United States Patent Application Publication US 2005/0228172 A9 - sequence listing, part 165

SEQ ID NO: 734453 - DNA, 501 bp, Homo sapiens
ttagagactataactttaagaataatgttagttaatagtggtaatgaaaagcatcctttttttgaatttacagacatacctctgatatttcattgttaagaacaattttggctctctaaattgagacagactcttcacactgttaaagaaacattcttttgcttyagttttaacatgtttgtgaaattttgaaaccaggattaatgttacatttattgtatattatgttgcacctgtaagtatgaatacatagcagttctttcatctattaatgtgaaaaattagatcagtaaatatcttgagatcaaaccaaccttgcattcctaaaaaaaaaaacccagtatttggttatgatatattattcttctaatatacggttgaattctgtttaattatgttttatatggtatttttgcccttatatttgtaaatagatagtctatagttctcttgtctatgctctccttgttacattttggtaagcctgtggtctcttcccac

SEQ ID NO: 734454 - DNA, 621 bp, Homo sapiens
accttatttgttaatattaatttttaatataaaccatttacaaatatgaacatgctaggttcatggtccacattttttaaaggatctggtactcctgacatgcaaagctccaaagcagtaccaaccttcgctatagatatgttccccaaccctgtatggggtagggaaggctggctaaagttcggttgtagctttgaggttatgatttagtgacattaactgtaaccaccgaaagwacttgagggaagtatctcttaacctctttttaaatttttcatttgagctacaaatatgggtattgaaagaagttttgacaaagctttttttttatctatgctttattgaaaataaatagtctttttaaaaatgttttattttttaagagacagagtctcacacagtcacccaggctggagtgtgatggtacaaaatcatagatcactgcaaacttgaactcctggactcaagggatcctcctgcctaggtctcccaaagtgctaggattacaggagtaagccaccacgtccagcctgaagtaatgctgttaactgcctcttggtgtttgttttctgccaattgcatgccattttttccttttgtaatagtgtctattagatagta

SEQ ID NO: 734455 - DNA, 643 bp, Homo sapiens
catgggatagtgttgtctacggatatcaggtttcatggaaattggcaagcccctatactccactagtggaggaaatggcccactagtttggactgacacagaggaggaggcgtttcaaaaccttaagaaagcattaactgaggcccctgctctagccctccaaatatctaaaagccattttacctttttgttcatgaaagccagggagtcactaaaggggtactcactcaaactttggggccatggtgatacccagtggcctatttgtctaagagactggaccctgtggcctctgggtggccaagttgtctgtgagccatagcagccacagcaagcctggttcaagaggctgataaactgactctaggtcaaaatttaacccttatggctcctcatgccatagagacattgytaagaagtgcttctggcaaatggatgttgaacgctcgcatcctgcagtatcacaatttactgttagatcagcctcgtttaactttctctcccacaaggtgtttaaatccaggtaccttgttccctgattcagaccttaccccacctatccatgactgccaggaactgttagtgactatggaaactggccgacctgatctccaagatgtgcctttaaaggaggtggatgcca

SEQ ID NO: 734456 - DNA, 623 bp, Homo sapiens
atgacctcaaggaaattgggggaagcatgagcaaatgcaattccattgataccagtgctgtgagggcagggccagaagggtgaacctccctgggattatacagaaattttatacaggatagacatttcaaggttgctttggagaaatgcagatagaactaactttcataggtgacagyatgcaaaagttaagcttcctaacagtcacgagttcacaagtccctcttactaaatttggcagtgtgtggtgatgtccaaatggccataatacacatacatcaaataattaatagcattcattttgtgttagaaattgtgcatttcagccaaaagtttttaatacatcatggatagtttcccatattgcttgaggattggaaaagagagcactttatgaaatgtccttttggacacattttcattgaagtttccatataccaacaggcaatgagacgagtgataattcagcagcctcattgtctggggtgacacttgaacttcttggtctcacaactgaggaaatcaagaatgcagacatgccaagggtgaggttagatcagaagtttaataggtgaaagagaatagctctctgctgcagagagggatcctgaaaaagagttgcca

SEQ ID NO: 734457 - DNA, 579 bp, Homo sapiens
atgagcttatgagataatgacacgtgtgtttagtgtgatggcaaattataccatagaaaaaaattttgaagattcagagtgaactattttcctatataaacttactgcctcaggaaaactgtggttaaaatgataaattaccaggaaacttcaagtttcccctagagagtcaaaataaaaatacaagaagaggcattgttgaaataatcccaaattggaaacagtgattattcaattaaaaataagtgtrgttacactttctatttatatagtatcatctggcagtttttagccttgagactcaaagagaaatctagtaatcctagacttcaatatcctcttctccatgagttttgctatcctactcaacatctaacctttttcctataaatctccaaagaagtagcttcatctcctctcctgtaaatctacttcagcttttttgggctttgtgaccagaaagctccttctaatgtctattctgaatcttgttgctatgatttaaacccataatctgttgccttgtcctagggaaaaatggcagccacagttaatccttcacattcttagagaatataa

SEQ ID NO: 734458 - DNA, 594 bp, Homo sapiens
cactggtcctggtggctcaccccaatatatgtatagtttttacttataaattgtgtttatgctgctgtaccaatcgtatacaattaaataatgcaagccttttatatacatatacacacacatctacaagtgcatacatagtcatcccttggtatatgtggggactggtcccaggacccccaccccacttcccgtatatccaaatccatgcatactcaagccctccagttggtcytgcagaacctgtgcatatgaaaagttggcccttgctatagataggttttgcaacccgtgaatactttattttccatctgtgtttgactgaaaaaaaatccaagtgtaagtagacccttcaagttcaaacctgttgttcaagggtcagctgtataatatataatctgtgcatgattttacatgtccatatttaacaaaaattgtatttattactatgcctatattataaagttatgtaaatacaatatgtatatatattctatttttttcctagcagcttaagggatcttaacgctgtactaccacttccttcctactctgtcccctaatttggggatgaccatctaatttagcacaaat

SEQ ID NO: 734459 - DNA, 615 bp, Homo sapiens
gatcccctgaggtcaggagttcgagtccagcctggtctacatagtgaaagcctgtctctactaaaaatgaaaaaattagccgggcgtggtggtgtacacctgtaatcccagccatctgggaggctgaggcatgagaatcgcttgaaccagggagacagaggttgcagtgagctgaaattatgccactgcacttcagcctgggcaatagagtgagactctgtctcaaaaaaaaaaaaaaagaaagaaaagaaaaaagaaaaaaatggtttttaatcaagtacttgtgcatgtgtgcactctttgtttaggaaaagtggctaactcacttgacctacctctaaaggctggtaccygggcctttcttcagctgtctgattctgcagctgcccgaggctcaagcaggctcacccctcctgggcctgagcaggcaggattagccccacagatgcatgctggaagggtggatttcagagatcatgaaatcatttattaaataaacatgcttatcctttttcttgttatttaccttcacctgaaaaaggaggtttcttagtacttcctttatttctccccctgagccaatcagttggtcccactaaacctagatatgtggga

SEQ ID NO: 734460 - DNA, 615 bp, Homo sapiens
gatcccctgaggtcaggagttcgagtccagcctggtctacatagtgaaagcctgtctctactaaaaatgaaaaaattagccgggcgtggtggtgtacacctgtaatcccagccatctgggaggctgaggcatgagaatcgcttgaaccagggagacagaggttgcagtgagctgaaattatgccactgcacttcagcctgggcaatagagtgagactctgtctcaaaaaaaaaaaaaaagaaagaaaagaaaaaagaaaaaaatggtttttaatcaagtacttgtgcatgtgtgcactctttgtttaggaaaagtggctaactcacttgacctacctctaaaggctggtacccgggcctttcttcagctgtctgattctgcagctgcccgaggctcaagsaggctcacccctcctgggcctgagcaggcaggattagccccacagatgcatgctggaagggtggatttcagagatcatgaaatcatttattaaataaacatgcttatcctttttcttgttatttaccttcacctgaaaaaggaggtttcttagtacttcctttatttctccccctgagccaatcagttggtcccactaaacctagatatgtggga

SEQ ID NO: 734461 - DNA, 488 bp, Homo sapiens
ttttttttttgagatggagtctcaccctgtcacccaggctggagtgcagcagtgaggtctcaactcactgcaacgtcctgctcccagttcaagtgattcttgtgcctcagcctcccaagtagatgggaccccaggcacgcaccaccacgcctggctaatttttgtatttttagtagagatggggttttgccatgttggacaggctggtctcgaattcctgacctcaagtgatccttccacctcggcctcctaaagtgtygggattacagatgtgaaccatccctgcccagccacctatttctctcttcacaaagtttctaaactttgctgtgtcaaacccatttaaacaatgattcaaataccaagagcacccaaggaatgtttcaggtttctgtctcatcacatggctttgaggaaagagcagaagtgcaggcagggcatacccatggctgtgggggtggaatctgcagccaggctggggtgagtga

SEQ ID NO: 734462 - DNA, 547 bp, Homo sapiens
gtaaacctaggtgtgtgatcagcaggattgtggcctcccggtaatgtctgcgcctcaatccccggacccagaggctatgtcatgttacgtggcgagggggatttagagttagtagtcagctgactttaagagataatcctcagtcacctgcgagagcccagtgcaattacaagggactgtgattgtgagtgaaagakgggggaagagagtcagagtcagatgacacaatgtgaagaagcctagactgctacttcgggctttgaagatggaggcagaggccaccagccaaggaacgtgggcagctggaactgcgatggaaacaggtcctccccgcagaaaggaacgcagctctgccctcacatcggtttcaacccagtgagacccatgtcagacttctggcctacagaaaaggaagagaaggaatgtgtactgtttcaagctgctaaatgcgtggcaatttgttgccctaataggaagtgaatacaaggggcctgggacagggtctcaggggtgaaagagaaaggtcctgaaatgattgtccatgttg

SEQ ID NO: 734463 - DNA, 577 bp, Homo sapiens
cactaaaaggattaactgaagagactttaatgaagggattacttatataaaggtggaaaaatttaaaggaattttttaaaaatggtgaccaattcagggatgagcatgaatgggaagacctgaaagagcatgggagagaatgttaccaccagagttcagtcagagctgcagctatggaagaggggttgtttctgtcacagcaatagaacagtgattctcaacctggggcaattttccccatatgagacattggcaatgtctagaaatatttttagttatcaatacactggggaaagaagatgctactggaatctagaagatacaaaccagagatgccactaaactccytactatgcatagtacagaccctataacaaagaactctccatctctaaatatcaataggactgaggttaagaaaccctgaaatggaggaagagagccactggctgaacaatgactgggtagagagtaagggagaattgatgactccgtctccctgtccggctatattttgatttcttgccagtgcctccattggttgaacctaacaggaagccacagagctatgtatccc

SEQ ID NO: 734464 - DNA, 563 bp, Homo sapiens
ttaatactctctgctctaaaggtgaaagaaacccacactcatacccagcaatctttttctgttgctctggctgggcagaaaaagaggaagagacatgtgttacttaactgcatttctcatgaagaataaatacttcaytggcctaggatttagattcatcaaaaaactgattagtattattgtattggagagccagctgctgcttcaaataaatgttaagtgaggaataaaaattgtttcataatatgatcctgatgtcatttattttatattaagtgcttatctcttgaaattttaacttttgaactttctactgttctgttttcccggctctccctcaatttatatgtatgtgtttgtgtatgtgtatatactgtatatacacatatatatgtgtgtacatacaaatatgtacttatatatttatataatgtataaatgtaaatatataaaaatatataaatttatatttatatgtatacatatgtgtgtatatatacaaatatatatgtaaactaatatataaaaataagtatatatatgtagatatagtacatataata

SEQ ID NO: 734465 - DNA, 633 bp, Homo sapiens
acaaggtgacgaaatgattagtgatgcagcagggatgtggaactaaggtcatcccaactcttcatctagtttgttttctagcatgggcagtcattagtctactcattcattcaatacttggtctggcatagtgatatattcaagcaatagcgagaagaacagggacttcgagcttcatgctctaattgctgaaccatgayacatgttgtaatagcgatatgattttcacataatgatagggcatgacaagtaagaaaagacagaaagcggcaggtggtagtagtagtagtgaaatgttgacatcaaggtcatttctagaaatatttctacatgcaccagccacagtgcaacccgttcagaattaaagtgaactcactgctttgctgaacttctctccatcagtttagttcccacttgtggcttggaagtgttccagtgttaaatattgattttgtgcagaataagtgcctatttttgtgcccttcctattcatcatatccaaatgggtgtgacttcagaaattttttgaggtgcttgcttccttaaataatatacatttctaatattgcattagaaacgagagggttcctcctggtgtttagaacgcaaaggaaaaataaaaagggaactgct

SEQ ID NO: 734466 - DNA, 633 bp, Homo sapiens
acaaggtgacgaaatgattagtgatgcagcagggatgtggaactaaggtcatcccaactcttcatctagtttgttttctagcatgggcagtcattagtctactcattcattcaatacttggtctggcatagtgatatattcaagcaatagcgagaagaacagggacttcgagcttcatgctctaattgctgaaccatgatacatgttgtaatagcgatatgattttcacataatgatagggcatgacaagtaagaaaagacagaaagcggcaggtggtagtagtagtagtgaaatgttgacatcaaggtcatttctagaaatatttctacatgcaccagccacagtgcaacccgttcagaattaaagtgaactcactgctttgctgaacttctctccatcagtttagttcccacytgtggcttggaagtgttccagtgttaaatattgattttgtgcagaataagtgcctatttttgtgcccttcctattcatcatatccaaatgggtgtgacttcagaaattttttgaggtgcttgcttccttaaataatatacatttctaatattgcattagaaacgagagggttcctcctggtgtttagaacgcaaaggaaaaataaaaagggaactgct

SEQ ID NO: 734467 - DNA, 633 bp, Homo sapiens
acaaggtgacgaaatgattagtgatgcagcagggatgtggaactaaggtcatcccaactcttcatctagtttgttttctagcatgggcagtcattagtctactcattcattcaatacttggtctggcatagtgatatattcaagcaatagcgagaagaacagggacttcgagcttcatgctctaattgctgaaccatgatacatgttgtaatagcgatatgattttcacataatgatagggcatgacaagtaagaaaagacagaaagcggcaggtggtagtagtagtagtgaaatgttgacatcaaggtcatttctagaaatatttctacatgcaccagccacagtgcaacccgttcagaattaaagtgaactcactgctttgctgaacttctctccatcagtttagttcccacttgtggcttggaagtgttccagtgttaaatattgattttgtgcagaataagtgcctatttttgtgcccttcctattcatcatrtccaaatgggtgtgacttcagaaattttttgaggtgcttgcttccttaaataatatacatttctaatattgcattagaaacgagagggttcctcctggtgtttagaacgcaaaggaaaaataaaaagggaactgct

SEQ ID NO: 734468 - DNA, 462 bp, Homo sapiens
ggaggttgctaagtgaaaatgctatataacctgcatactttttacaaatggtagctgttatcctgtccagcctgccactcctggacactgccctatatgtaagtcctcaataaaccttatgtcttattcactggctttgggtctcttcttcaacctctcagacagggtgccatcactattggagtcaataaggatctggtaaaacacacacacacacacacacactctcacacacacacccttctttttaaaaaatctttcctggcctttcatgctttgcctttcttcgttctttctaacarcctttctatctacctatcctcttttcatccccccattgagttttttttaatctcttttaccatcttttctcacatctttctgcccatatttcattctatgtcagtttatccagttattgttttaacattcaatatatatttgagtgcctactgtttgcga

SEQ ID NO: 734469 - DNA, 634 bp, Homo sapiens
aggtgcctctgatttcactggctgatttagtggaagcaaatcaatgaacatggttattgcaaaacctttttcgcaaaatgtaattaaaaatccttatcagtttgcatattaaatgaatgattaatattttcccaaataggcagaatcaaaagcttcctagaaaatccgggtaaaattgtaatgctgctgtgtgaaggtatattcacagtcagcatgcagcaacgaggaagcaggaagcctcctgccttgacaaacccgcgtggttcctgaaaacgtagtcttttggtgagctgatggcagaattcacaacttaacatgaagatattctgctctcattsagcacacgcaagtgaaccttggctataactttctacaaggtttctaaaattgagaaacaggtggatttaaaaccagagatacagtcaatggagtgtagactactcagagggctatggctagagttaaatggcagcttataaaaatgttatctggggcccaccttgaacctttgaagaaaaaggatggttcttgatgtaatttgcccatagggcctggtgcctgtggtgtgctctgaaagagagcatctatatccaaaaagatgtgcctgctgagaagggctgctggcagctgtggt

SEQ ID NO: 734470 - DNA, 597 bp, Homo sapiens
aatccattccctcccaccttccccaatggggcagacacatgtatacgaagaagcagcatcagtaaaccggcaccctagatgaaaggcaactgctcatccagaaggcaccaataacacagtcatgtttccattaaggggcaccttggcttatgcaaaactgtacttttgagatatgacayagaaaatcacatttttgtgaatcaaaatgtaaataatctaaaaaaggcactatttgaagggagcccaaatttttaacatgactaagggctccagaactgatcaaccctgtaagtttagtttgacatggaattaagtatatttgcttgaaattggttctgaaactattatttagacaaaaacgtgtaaaaatctttgaaaggcctttgtatcattctatggtctttatttgtattgtcgttattattactcctgttattagtgatgaatttgcccaggtcagggaaattcaatgtatttatgcttttcttcaccttgccaactgtaagtcatatcaaatgcaaatccatcccatccatttccccaagtaattccgatttttgtacattttttttcttgcagaatctctcatagaatcat

SEQ ID NO: 734471 - DNA, 541 bp, Homo sapiens
gatgtgttcgctggggctgccttcaattcaaaagtgaggaggctaatttgggcccaattcccagcccgtgtgcctcaacagggctcctctgcgctgctgtagccagcatacaggcagcatttttctccctgggagccaaaagcacttctccgacatgcccttattaatccctcatgccatcctgccggctgagcccgtgacaggtacggcacagacaggaaaatggggatacctggggctctggcggaggagggcaggatagctcaggctggtggctgctcctgctggcatcaggctcagtccctgagccccagtggctcccacraactccttttggcaggcagtgagtgagctctgggtaagatctggtgccagctctgctgagggaggagggctggcgacccaaggaaaggaaggtagggcctgactcagaagggcagggccctccctcggaaaccaggaaggctgggcaccctccgtgggcctcaccctcatttggaatgatgagaggtgttccccaaggcctgggccacctggcagg

SEQ ID NO: 734472 - DNA, 606 bp, Homo sapiens
atccctgtccccatctgaccaatacatctcttatgggagggaaggctttttggaacagcttctgatcctacatggtgggagcaagtcctggctttccagatggcccagatcaataactgccatatggaccttatgcttttttgtgctctctgytcaaaaaaaaaaaaaaaaaaaagtaactagagcaaagtatatgtgagtttcccttggttttcctgaataagggtagagggaaaaaccaactaaccaaccatcacttctaaatcatttctgtcatagctgtaacaaccaagggactctgtaaatctacttacagccaactctgcaaccatcagcgacttctcctgcttaggagaactagatgtttcggctcctgatattcagaccatgccaagtgtttgggggcaccaacagggctgggacaagagaactggggaaactggtatatttgaagacttttcagccagatgcaacaaaatatctttgagtataaacaattatatctatagtaccccagaaggtagatattcttatctccacttcattggataaggaaactgaggctcagagatgcctgtctggatccaacatccttgccaagttttt

SEQ ID NO: 734473 - DNA, 611 bp, Homo sapiens
gaggcgcgcctcagctactggagacagttcagcacccacgggagctgggtgacgctggccgcgggagcctgatagagaaaaggttcaagcttctgtataatgaaattttcccctgagcttcctaagtggagaggctaaaggtctgasctcatcccatggcaaatggataagggacaaacttaattacctagggcactggatccttctccattataattgagagggtcagataaactgagggacttgaacttggaaggggtatcagcccccttcagagcacacgcaacatgacttctgaaggctggtgcccattacagtgtgaggtattgtcctcatctcatattcaacaaacaaaattactaccacaaaaggaataaggggaagcccatcatctgccaggaggtttttttaaaaaaaaggtttttcctgaaaacttaaatgatcaagtagaagcataattgcatccctaagagaacagtgaggctgggatggatgacatttatctgaggcagctcaatgcaggccccatcagatgcagggaaaggtctggatgacttatcatggtccattccaggcctatgattttaaaagaggcccataaatatcccatg

SEQ ID NO: 734474 - DNA, 611 bp, Homo sapiens
gaggcgcgcctcagctactggagacagttcagcacccacgggagctgggtgacgctggccgcgggagcctgatagagaaaaggttcaagcttctgtataatgaaattttcccctgagcttcctaagtggagaggctaaaggtctgagctcatcccatggcaaatggataagggacaaacttaattacctagggcactggatccttctccattataattgagagggtcagataaactgagggacttgaacttggaaggggtatcagcccccttcagagcacacrcaacatgacttctgaaggctggtgcccattacagtgtgaggtattgtcctcatctcatattcaacaaacaaaattactaccacaaaaggaataaggggaagcccatcatctgccaggaggtttttttaaaaaaaaggtttttcctgaaaacttaaatgatcaagtagaagcataattgcatccctaagagaacagtgaggctgggatggatgacatttatctgaggcagctcaatgcaggccccatcagatgcagggaaaggtctggatgacttatcatggtccattccaggcctatgattttaaaagaggcccataaatatcccatg

SEQ ID NO: 734475 - DNA, 650 bp, Homo sapiens
gtcaacatgtgttcttaaaaggaatcagcctcatgttagataaggcgataaaaacctttctccaaaagcaggggtgagtctccaggggcccactgtctacgtgcacacaactattagcctcagtgagaggcagggcaggctgccctcctgaagtggaggcctgtgctcatttgaagcagagtcaaactggccagggctgggaagcaggcacctcaaagatacccttggctccgttcatgggaaggtgcaaacataatgcaccattttatcttgacagacacacattttccagccccggtatgtgctctggcagtcctcactgtgctgcgtttgtgctgcttttgggctcccagttaatactcctgtcacaactgcttaggtgggaaacttcctcccaccagctcccttccaactgctggcygctgcaccattatttactgaaaaccatccatctccctctccctccctttctgtttatttattttgcatcaacctgttaaagcaacacttaagaaatctcttccttgcgggtaaggagagggctgggaatgcacccttctgtgggatgtgcctgccaaaggatcctgtcacatacaaggatctggggttgccggctgccggaaggagtggctggtgtgagctggggaggc

SEQ ID NO: 734476 - DNA, 593 bp, Homo sapiens
agctctaaccttaagaatgactctgacaaggttaaaatatatgcagataaataactggaacaaatatactaacatgttaataatggaggaattattatttccattttatgttttctgtattttccccttttacatttgtatttaatataaaatatatattttatatagacataatttatawaattagaatcttatataaatgataaattgatataattacaaaaaacaattattttttaatctggtcatactgaaatcatatagatttataataatgaaaattgctttctaaaattattggcatgattaatctgtgctcatgttttccagttttcctgtcagtaatgaattataatcagaatccacattatgttcaagaaaagacatgaaataccagaacatctaatcaataatcaaatcagtaggtacttactgcatatttgtgtacctagaacttttataagcatgcctcattctagcccataaacttcctgttagatctttttggagaacctcagtttgctaacatagatagtatccacaatgccttcttgaaaaccaatttataaagcagatcctttaaacatagttca

SEQ ID NO: 734477 - DNA, 668 bp, Homo sapiens
agtgccattttatttataacttttttctttttttggcttttaatatctgtaagtatcatttataacttgtaaaaaaagtattattattattgttatgatgagactaccactactcttgaaatcttttgctctaggtttctgctgacttgtacttcttcaatgatggatggtgtaacatattttaacagaaactcaatttttttgatgctttgttcattgatttagaaactcatctggctggatagtcctgcttttcstctttcatatgattttacttttaagttttagtttaagctcggaggtggtgtcctccacagagtagtcctatagattgcaacaaggggacaagcagacaaaaccaagtcttgtgaaaaagtgtttaaggttctggagatgattcacctaaaaaagagaagactcaggaatattggggcaatgagggagtgggggaataaacaaggaaggagttctagccttaatatgcggaggaaaatgttaattagaaccatgcaacaacctgatagatgacattacagatgaggtgtttttttgtcagtaggatttgaaatatcaggcacaatctttaagcatggacccaagattttgctccattttagacttgtagaatgtgcattccacaacaggaagaaaaaatatgcgtgtgaatt

SEQ ID NO: 734478 - DNA, 668 bp, Homo sapiens
agtgccattttatttataacttttttctttttttggcttttaatatctgtaagtatcatttataacttgtaaaaaaagtattattattattgttatgatgagactaccactactcttgaaatcttttgctctaggtttctgctgacttgtacttcttcaatgatggatggtgtaacatattttaacagaaactcaatttttttgatgctttgttcattgatttagaaactcatctggctggatagtcctgcttttcgtctttcatatgattttacttttaagttttagtttaagctcggaggtggtgtcctccacagagtagtcctatagattgcaacaaggggacaagcagacaaaaccaastcttgtgaaaaagtgtttaaggttctggagatgattcacctaaaaaagagaagactcaggaatattggggcaatgagggagtgggggaataaacaaggaaggagttctagccttaatatgcggaggaaaatgttaattagaaccatgcaacaacctgatagatgacattacagatgaggtgtttttttgtcagtaggatttgaaatatcaggcacaatctttaagcatggacccaagattttgctccattttagacttgtagaatgtgcattccacaacaggaagaaaaaatatgcgtgtgaatt

SEQ ID NO: 734479 - DNA, 580 bp, Homo sapiens
cagttccacaatggggcactattgagttttgcaagatgccctttagagaaagggaaccttgacacaaatgatcacctaaaaggcactaagttgatttctcgtaaattaattatgtaatacatagttttctttaaatggaaataacaattcctcactaaaaagctgagtatatgtttgtataatcttacttcaaatatatcacaatcttcttttaaatggtattaattgggcctgaatactttggmgacatgaacaagtctatgctttctctttagaaatgtaaaaatatgctagtagtatgctagattagaaattctcttctagactttggatttgtgaatatggaaagaattatttgagtatttagattatttttagtcatctaaagtcccattaatttgtagtcctttcaaatataccactttgcactaatattgggttgagacgatgtcatatataaataaccagctaatttgatgacgacagcaaactggttgttcagcattgtgtaggcagatcagatgaattatttattggttctattttcttttgaagttgttctttgtcatcattaatgaat

SEQ ID NO: 734480 - DNA, 580 bp, Homo sapiens
cagttccacaatggggcactattgagttttgcaagatgccctttagagaaagggaaccttgacacaaatgatcacctaaaaggcactaagttgatttctcgtaaattaattatgtaatacatagttttctttaaatggaaataacaattcctcactaaaaagctgagtatatgtttgtataatcttacttcaaatatatcacaatcttcttttaaatggtattaattgggcctgaatactttggagacatgaacaagtctatgctttctctwtagaaatgtaaaaatatgctagtagtatgctagattagaaattctcttctagactttggatttgtgaatatggaaagaattatttgagtatttagattatttttagtcatctaaagtcccattaatttgtagtcctttcaaatataccactttgcactaatattgggttgagacgatgtcatatataaataaccagctaatttgatgacgacagcaaactggttgttcagcattgtgtaggcagatcagatgaattatttattggttctattttcttttgaagttgttctttgtcatcattaatgaat

SEQ ID NO: 734481 - DNA, 596 bp, Homo sapiens
tcataaggcaatttcattgagtatacttacccaaacctagatggtatggcctactacacacctaggccacatagtatagcttattactcctgagctaaaaacttgtacagcatgttactgtattgaatactccaggcaattrtaacacaatggtaaatacttgtatatctaaacatatctaaacatagaaaaggcatagtgaaaatacagtataaaagattaaaaaatggcacacctgtatagggcacttaccatgaatggagcttgcaggactggaagttgctctgggtgagtccaggagtgagtggtgagtgcgtgtgagggcataggacattactatacactactatagattttataaacactatacactttggctatcctaaatttacaaaaaaaaaagcactttttccttaacaataaatttactttataaacttttaattcttttatttttatttttttttaccttttggctcttttgtaataacactttgcttaaaacacaatatgttgtatgactgtgcaaaaatagtttctttacttattctataagctttttctacttaaaaatttttactttcttttactttaaa

SEQ ID NO: 734482 - DNA, 648 bp, Homo sapiens
tctccagagttgttcacctacttccagatgaagaccatcctggaggagggtggagtgagagggttcctggctctcctgtcctgctcctgtccctcgtcctgttcctgagactctgctgtcttcctgatcctagagttcatgaattattccagttatcttcaaacaattgcctttttgcctgagctactacaaattgagtttctgttccttgcagcccagagaaccttaaccaycacagcattaggtggcctggctcctgcctctctagcttcatttcctggccccttgccttaagttccacactgtcattctctctgggcccgacactgtttcatacctccttgcctttgcttctgtcattctctctgctggaccaccttttccacttttctttgcctggtagaaatggactcttcccagaaaacctagcccaggaagatttcccaagcttgcttgtcacctatcacattagtcacctctcaccagtcacattatctgtttatttgtgtctctctcattctagcctatagtttcttcgggtaggagcaagtcatattcctcttcgtatctcagtgcccacctcaatgcctggcatataatagacagctaaaacatgtttgttgaataaaactcagaaaaataaacaaa

SEQ ID NO: 734483 - DNA, 648 bp, Homo sapiens
tctccagagttgttcacctacttccagatgaagaccatcctggaggagggtggagtgagagggttcctggctctcctgtcctgctcctgtccctcgtcctgttcctgagactctgctgtcttcctgatcctagagttcatgaattattccagttatcttcaaacaattgcctttttgcctgagctactacaaattgagtttctgttccttgcagcccagagaaccttaaccatcacagcattaggtggcctggctcctgcctctctagcttcatttcctggccccttgccttaagttccacactgtcattctctctgggcccgacactgtttcatacctccttgcctttgcttctrtcattctctctgctggaccaccttttccacttttctttgcctggtagaaatggactcttcccagaaaacctagcccaggaagatttcccaagcttgcttgtcacctatcacattagtcacctctcaccagtcacattatctgtttatttgtgtctctctcattctagcctatagtttcttcgggtaggagcaagtcatattcctcttcgtatctcagtgcccacctcaatgcctggcatataatagacagctaaaacatgtttgttgaataaaactcagaaaaataaacaaa

SEQ ID NO: 734484 - DNA, 588 bp, Homo sapiens
gataattcattttggttttaatttgtatttccctaatggctagtgatgaatatcttttcatgtgcttatttgacatctgtataccttctttgaagaaatatctcatcgtgtcttttgtctattttaaaattttattttttcttaatyttcaagttttgttagagttctttacatgctctagatataggtctcgtgagatattttctcttagtctttagtttgtgttttcatactcttaacagtgtctttcctgagacaaacttttagctttgatgaaatctaatcaactgattttttaaaaaataaattttgctattgataacatgtctaaaaactccctgctaaaggtcatacagattttctcctacattatattctaaaagtttgtagttttataatttctatttaaatcaataatccatttagagtttattttggtataaggttgtcatttaggtgaagagtcatgtttttgccaatggatatccagtgtttcttcaaatacctgttagtcacaccctttttctcctctacttttggtacccttataatacatatatttgatatttcttatggatctataggttt

SEQ ID NO: 734485 - DNA, 588 bp, Homo sapiens
gataattcattttggttttaatttgtatttccctaatggctagtgatgaatatcttttcatgtgcttatttgacatctgtataccttctttgaagaaatatctcatcgtgtcttttgtctattttaaaattttattttttcttaatcttcaagttttgttagagttctttacatgctctagatataggtctcgtgagatattttctcttagtctttagtttgtgttttcatactcttaacagtgtctttcctgagacaaacttttagctttgatgaaatctaatcaactgattttttaaaaaataaattttgctattgataacatgtctaaaaactccctgctaaaggtcatacagattttctcctacattatattctaaaagtttgtagttttataatttctatttaaatcaataatccatttagagtttattttggtataaggttgtcatttaggtgaagagtcatgtttttgccaatggatatccagtgtttcttcaaatacctgttagtcacaccctytttctcctctacttttggtacccttataatacatatatttgatatttcttatggatctataggttt

SEQ ID NO: 734486 - DNA, 639 bp, Homo sapiens
gttctttacatgctctagatataggtctcgtgagatattttctcttagtctttagtttgtgttttcatactcttaacagtgtctttcctgagacaaacttttagctttgatgaaatctaatcaactgattttttaaaaaataaattttgctattgataacatgtctaaaaactccctgctaaaggtcatacagattttctcctacattatattctaaaagtttgtagttttataatttctatttaaatcaataatccatttagagtttattttggtataaggttgtcatttaggtgaagagtcatgtttttgccaatggatatccagtgtttcttcaaatacctgttagtcacaccctttttctcctctacttttggtacccttataatacatatatttgatatttcttatggatctataggtttctgggtatctgattattttgttttttttaaggtctatttctctctgtccttcagatwgagcaatttctattgttttacattaagttcattgaatctttcctctgtcttctccattctgctattgagcctatccagtgagattattattattttttaatttggtcattggttcttcatgtctcctattttatttttttcttgcaaaagatatact

SEQ ID NO: 734487 - DNA, 591 bp, Homo sapiens
attatgagaccatggatcttagttaaatcttttgttttwgttggcgtcctctaaaggaaggcgttacgtcattactgacaaatggtagtagagtccagggtccctcttcaacctcttgtgacacctcagttggggagggatttctcattattgttaggcagagttggaagttctggctctccattaagtcttcactgataccatgctggctgggaagggcagaagtgctttattactgcttcttactagcttccactgacacttgtgggttgagggtatggggaggttagctttatcatacctgggagatggtgaaatttctgattctctactatgcctcctctgataccaaccccattggcagggcacttcattatggatgggtgagagtggaattacagaatcatcctttaccctactgtggtctctactgatgccacaactggaaaagggcttgttaccaggggtggaaataaaagtttctgctctccccttggccaccactctggtggggattgaagggacacttagttatggttgtgtgcaagtaaaagtctaggctcaccaattagtctgtgtttgtggggatgc

SEQ ID NO: 734488 - DNA, 613 bp, Homo sapiens
tcccttcttgtatgctttggaaataattttataatcaagtttatgtctttttgctccagattttattgtctcccacccatctctcctctcggcagcatctcactgtgttttatgattgtcggttgtaccagactgcaaatacaacagatatgaaacggaaacctatgtttttcccatctgatatggacactgttaattcataagaaagctgttttgccattattagaaaaaaaaaaaaaaagaaagcaaacagytggtttgatggaaaagctgccctaatccctagagaatgggaagttcagacgtgatataaactgacagagggtgaaaaaataatcttcaggctgataatttagtgcagctatcatgggcaggactggatggcatttgccacagcagagaaaacagggtatcctgtggttgtacagcatacttagaaaaggtgacactgggagataataatcagcttaccaatgtttacagtaatgaaagagtgataaggaatggagaactgagattttggaataagttcacatgtaaaggaggtttgcctgcttagaatcttcctacaattattgttctgtctcagttgatattttcctaaacaccagta

SEQ ID NO: 734489 - DNA, 418 bp, Homo sapiens
ccttcattatgcttagtactcactggatcctttcaatatggaaactcatgtccttcaactctataatattttcatggattctttctttgatgattttcttctctccatttgtatttgtctctgaactcctattattcagataggagttgtattgttcttctaatgtttttctttcctgttttccatattttgactttttgtcttatttttggaatatgtgctcaattttttattccagcccttctattaaggttttgttttgttttgtttaggtwtgaaacgaatatctatttaggctaagaaattcccacaaattacaaattttaaaaaggtgacaaatattataaacattattttttgctatgctttttgataattgttggtaatttgaaataacaaagtagatttataatgatca

SEQ ID NO: 734490 - DNA, 650 bp, Homo sapiens
atggtagttctagttttagtttttttgaggaacatccatactgtttttttaataatgcctctactaatttacattctcaacagcaatgtataagagttctctttttgcacatccttgccaacacttatctttcatcttttgrataaaagctattctaacaggtatgaggtaatatctcattgcagtcttaatttgcatttttctaatgattagtgatactaagcattttttcatgtatttactgtccagttgcatgacttcttttgaaaaatatctgttcagaccatttgcccatattaaaatcaggttatttgttttattgctgtattaggtcaatcttgcattgatataaagaaatacctgagactgggtaatttataaagaaaagaagtttaattggcttatggttctgcaggctgtataggaagtgtggtgctggcccctgcttagcttctggggaggcctcaaggagcttttactcatggtagaaggcaaagtggaagcaggcacgtcacatagcaaaagcaggagcaagaggggtggggtgaggtgtcacacacttttaaatgaacagatctcatgggaactcactcactattgtgaggatagcaccaagcctttggggatccactcccatgatccaatcacca

SEQ ID NO: 734491 - DNA, 539 bp, Homo sapiens
atttgtagggaaatatagtaggtatgtgggtatgaggatcagattaaatctgccacagtgcaacacacacacacacgcacacacacacatacacacacacacacagagtaacttcagaaagggaaagctatacaagaatacactggaaatagcacatattatctttcagccattttttcctttggacctgaatgtttttcaaaactagcttgtagagtgcaatgggtttcacagagaattcaaacaacccagcatttttcaggatacaatctgagttcaattgatctgcctctttcttttctggacagggcagggyggtgaagaacgtgggagggttggaaggattggtttgtctctatctcataaggaatatcctttttgggcacttcatgtcagtccccatccagctctttccagccctctggctttgggcaagttaatgaaattttctacaacttgatattctcatctgcaaaatggagataaaatgcctgtgtggcaggtttgtgataatgtatggaaagcatgtaactcagtgt

SEQ ID NO: 734492 - DNA, 522 bp, Homo sapiens
ggaggaggatggaagccggtggtaccagcaggggtggacaacagagtctgttttttttttttgttttttttttttttttaaagagagggggtctcaccgcattgcccagtctgatcttgacctgctgaactcaagcattcctcctgcctcagcctcctgagtcgctgggattataggcgccctccactgcacttccactgtcccctctgcccagctgaaaggcagcagagtcttcagtcatttgttctaagtggtctgtaaacagactgtgtggcatgggcaggggctgcttggggccccaagtgaaggctgcgagcctgtgctcagggagatggggccggggagaccaccggtggaaagctctttgcctttacaraaagtgtgggctctgggcagggccttctctggtctccctttcacagatccaaaaagggaaactaaggccctgaaaggttaggcaaattgtgcaaggcagctggaacctgggagctggggtctgagtgtgcctgtgggactctgctc

SEQ ID NO: 734493 - DNA, 533 bp, Homo sapiens
aagggtgatcctaaggccaggggcatggtggggtcgggtggagggctggaaggctgtgagcacaagcctttgtggtacacatgtttaattgcaggagtgtcttggggacatctaggtggggacggccatagggttgtcagaatagtggtgcagggctgagcacagtggctcacgcctgtaatcccagcactttgggaggccaatgagggcggatcacttgaggccaggagtttgacaccagcctggctaacatggtgaaaccccatctcaaccaaaagtacaaaaattagctgggcttggtagcacacagctgtagtcccagctacttgggaggctgacacaggagaattgcttgaaccctgsaggcggaggttgcagtgagtcaagactgtgccactcaactccagcctgggcgacagagtgagagactgtctcaaaaaataaataaataaataaataaataaataaataaaaaagggggtggcgcacagagctcaggggagaggaaagatgacgatctccactgagatcat

SEQ ID NO: 734494 - DNA, 533 bp, Homo sapiens
aagggtgatcctaaggccaggggcatggtggggtcgggtggagggctggaaggctgtgagcacaagcctttgtggtacacatgtttaattgcaggagtgtcttggggacatctaggtggggacggccatagggttgtcagaatagtggtgcagggctgagcacagtggctcacgcctgtaatcccagcactttgggaggccaatgagggcggatcacttgaggccaggagtttgacaccagcctggctaacatggtgaaaccccatctcaaccaaaagtacaaaaattagctgggcttggtagcacacagctgtagtcccagctacttgggaggctgacacaggagaattgcttgaaccctggaggcggaggttgcagtgagtcaasactgtgccactcaactccagcctgggcgacagagtgagagactgtctcaaaaaataaataaataaataaataaataaataaataaaaaagggggtggcgcacagagctcaggggagaggaaagatgacgatctccactgagatcat

SEQ ID NO: 734495 - DNA, 356 bp, Homo sapiens
tgtctttatggtaaaatgatttatattcctttgggtatatacccattagtgggattgctgggtcaaatggtagttctgtttttagttctttgaggaatctccacactgctttccacaatgactgaactaatttacactcccaccagcagtgtataagcattcccctttctctgtaacctcascagcatctgctttttcgtttgtttttacttttttataatagccattctgactggtgtgagatgatatctcatcgtggttttgatttgcatttctctaatgactagtgatattgagcattttttcatatgcttgttggaacatgtatgtcttttgaaaagtgtctgttcatgtta

SEQ ID NO: 734496 - DNA, 687 bp, Homo sapiens
tgaactcatccttttttatggctgcatagtattccattgttgtatatgtgccacattttctttatccagtctatcattgataggcatttgggttggttccaagtctttgttattgctattgcgaatagtgccccaataaacatacgtgtgcatgtatctttacagtagaatgatttataatcctttgggtatatacccagtaatgggattgctgggtcaaatagtatttctggttctagattcttgagaaattaccacactgtcttccacagtggttgaactaatttacccgcccaacgacagtgtaaaagcattcctatttctccaaatcctctccagcatctgttgtttcctgattttttttaatgattgccattctaactgacgtgagatggtatctcattgtgsttttgatttgcatttctctaacggccagtgatgatgagctttttttcatatgttttttggccgcataaatgtcttcttttaagaagtgcttgttcatatactttgcccactttttgatggggttgtttttttcttataaatttaagttctttgtagattcaggatattagctctttgtcagatggatagattacaaaatttttctcccattctgtaggtggcctgttcactctgatagtttcttttgctgcgcagaagctctttagtttaattggatcc

SEQ ID NO: 734497 - DNA, 560 bp, Homo sapiens
ataaattgcatctcaatgatgtctactgtgtactcctttgactactaatgagattaaatggttttccatatgattttttttattattatactttaagttctagggtacatgtgcacaacatgcaggtttgttacatacrtatacatgtgccatgttggtttgctgcacccattaactcgtcatttacattaggtatttctcctaatgctattcctctcccatccccccaccccacgacaggccccagtgtgtgatgttccctaccctatgtccaaggttctcattttcaattcccacctatgagtgagaacatgcagtgtttgtttctctgtccttgtgatagtttgctcagaatgatggtttccagcttcatccatgttgctacaaaggacatgaactcatcattttttatggctgcatagtattccatggtgtatatgtgccacattttcttaatccagtctatcatagatggacatttgggttggttccaagtctttgctattgtgaatagtgccacattaaacatacgtgtgcatatgtctttatagtagcatgat

SEQ ID NO: 734498 - DNA, 511 bp, Homo sapiens
ttctgaaaatggactggaagagcttgcctcttctaagacagcccccatattttcacttatgacaaatatttggaaattaaataattatcttaaggaaggcatgatgccttttacagcctgaaatcctgagggttgccatggctgtgaacttcagagtttccacagcatttctaaatatttgcagagaaccatttcctgtttcaagaatgacaaaagtctaacttgaagagtgaacattttagtgctggtcaattatttcaraagagttgtactttgttaaaatccacactcaaatatactacaacaacattttgggcttgggaacgttttctcgatctaggaagttcaaaataaagcctgaatgctccatctttagagctttcagcaagggtaaggtagcatagaggaactattacataggatgccattctctgcaagcaagtggtggaaattagacataaaatcctctattcaggagaatacaacctggcattatcctaaaatgtgtatg

SEQ ID NO: 734499 - DNA, 511 bp, Homo sapiens
ttctgaaaatggactggaagagcttgcctcttctaagacagcccccatattttcacttatgacaaatatttggaaattaaataattatcttaaggaaggcatgatgccttttacagcctgaaatcctgagggttgccatggctgtgaacttcagagtttccacagcatttctaaatatttgcagagaaccatttcctgtttcaagaatgacaaaagtctaacttgaagagtgaacattttagtgctggtcaattatttcagaagagttgtactttgttaaaatccacactcaaatatrctacaacaacattttgggcttgggaacgttttctcgatctaggaagttcaaaataaagcctgaatgctccatctttagagctttcagcaagggtaaggtagcatagaggaactattacataggatgccattctctgcaagcaagtggtggaaattagacataaaatcctctattcaggagaatacaacctggcattatcctaaaatgtgtatg

SEQ ID NO: 734500 - DNA, 462 bp, Homo sapiens
aaagagaccctcaaggacgaaactgggtattgatggtataaccaacagtgctattttctaaaccaaaggtaaataccatcattttttcttgttaggagaaatattttgtttggaaaatatactctcctacacccagccttgtatttaactagatcagtcataggaattccatcccccttgcwatattgattaggaatatgacgccatcatggccaaagaagaaatgtgaaagggggcttctgtagagaattttcctgctccgataatggcacagctgtgatgagatggcctttcttcttctcttaggtattctgtctagccacctagaattaaagaagtcatctgtgactcaaaaggaacatacggggtgacaatgttgacacaaacatctttcttccttgatgtcaacgttgcaccagtgaattgtccaagccctactttgggctcctctttagagaaaat

SEQ ID NO: 734501 - DNA, 612 bp, Homo sapiens
aaaggttattagaaaatatgttttgctctttgggcattcctggagaaatctccagcaatggaagtacttgcttcactgtacaagttgtaaaacagttaaataaggaattacaaatggaatagtattaggtaaagctaactgaattaattggatttccttggtcaaaggcactgccggtggatggaaataagattcatttccaataaaaatataagttgaccgtgtatagtcactgtatggcctatgttcctaataatagaatgccatgtatctcctgctctcctgaaatctaatatgactaaatgcttcaaggttttattgcattataccaaagcatattttctttaggtaagaaaagcattctgtgatctactgatcaaggataatcaarcctcttatgatctaaaacctggagattaggtcttctataaattacattaaagaaaacctgcccttgtaccccattgaaagggaccatacaaagtttttctcaccacacaaactgaaaaaacaaaacccctgggggcctcaaatcttgggtctgcatctcacaagttaaaagggtttctcatattcttggaactgtacatccatgggagaccttaatgtaaa

SEQ ID NO: 734502 - DNA, 569 bp, Homo sapiens
atatatgtgtgtgtggatacacacacacacacacataagaatattattcagccttgaaaaagaaggcaatctggggccgggtgtggtggctcacactttgggaggacaaggcgggtggatcacgaggtaaggagattgagaccatcctggctaacacagtgaaaccccatctctactaaaaatacaaaaacaaaattagccaggcgtggtggtgggtgcctgtagtcccagctacttgggaggctgaggctggagaatggcatgaacccgggaggtggaacttgcagtgagccaagattgcaccrctgcactccagcctggggggcagagcgagactcagtctcagaaaaaaaaaaaggcaatttggccatttgctaccatgtgaatggacctggaaggcatcatgctaagtgagataaggcagacacagaaagaaaaatactgcataatctcaatgatatctggaatctaaaaaaagaaaattgaatacatagaaacagagaataaaatggcagttaccaaggatagaggtagagaaaggaaatgagaagatgaagcttaaaggatgc

SEQ ID NO: 734503 - DNA, 600 bp, Homo sapiens
tgagataaggcagacacagaaagaaaaatactgcataatctcaatgatatctggaatctaaaaaaagaaaattgaatacatagaaacagagaataaaatggcagttaccaaggatagaggtagagaaaggaaatgagaagatgaagcttaaaggatgcaacttgcagatatgtaggatgagtaagtcgagagatacaaygtgcaacatgaagaatatgcaatcatgtgttgcttaataactgggatatagtctgataaacatgttgttagacaattatgtcattgtgtgaacatcacagaatatacttactcaaacgtagatgagcctactacacacttaggttatatgatatagcctattactcctaggctgcaaaccttacagcatgttagtatactgaatattgcagtcaattttaacacaatggtaagtatttgtgtatctaaacatagaaaatgtacagtaaaaattagtattataattttatggagccacaattatatacatggtctgtcatggactaaaacatcattttgtagcacataactctaattataatattgtatcctatacaggaaatttgctaagacagtggactt

SEQ ID NO: 734504 - DNA, 571 bp, Homo sapiens
tacccttagaaatttgtcctatacaaattatcagataaatggatattcattgcacttttattcacatgataggaaaaaatgggaaaaagaaaaatatccaattataggaaataaactgtggtatatcaataaaatgaatgacttacccagtcattaaaagttgtatttattaagaatatacargctgggtgcggtggctcacacctgtaatcccagcactttgggaggctgaggcgggcagatcacgaggtcaggagatcaagaccatcctggctaatgcggtaaaaccccgtctctactaaaaatacaaaaaattagccaggtgtggcggtgggcacctgtggtcccagctactcaggaggctgaggcaggagaatggcattaacccaggaggcggagcttgcagtgagccaagattgtgccactgtactccagcctgggtgtcagagtgagagtctgtctcaaaaaaaaaaaaaaaaaaaaagaatatacaacaccaaaaattacttacgttataaataatgtgatgaagtaaacattcagatataacattatacttatatagtaagat

SEQ ID NO: 734505 - DNA, 624 bp, Homo sapiens
taatgcaagtaaagggcctaggacacaagctggtacatagtaggaatttttaaagtgtctgtacttattgtaattgttagaattatataaacaccaatgcacacaggggctgttgaatattatttgttgttgactgcgtctgttgttgtacaagcacagtgaaagtctcaatttgggaacccatacacaattccagtcaggttaagagtggctcacatagaattgcaggaacaaaaatcttactaagtttcacagtacgttatgcatagtcctttgctcttagccactgctcartaagtgtggaacctaaaaatataattcaaaatgttacctgtttgtttaaattcaactgtttgaacacagatgcaaggttcttgagggtctaggatgtctctgtggatatttcctgaaatcaagtaaatttaaatagctcaccttacccttcccaaaaatgaaaagtctgcatttagcgcatgcatgggcaatgccaaagaaaaatacatgttaataagccaatatttctataggtccgtattctacattttgcacaatggattcctctggagatgagggcccaaagcaggaaagcttttctgaaaaagttcaagggaagaaaaggtttct

SEQ ID NO: 734506 - DNA, 607 bp, Homo sapiens
ccattgggcagtgggctcctttgggctctttccagaaaattaaaaccataaattaaatataaatggtcaaagccacagaacaagcaaggccttcttagtgtccacagagaggagttctattaccaccactcgctttggagaagagggaggttacctgtaattcttgttctcttgaaggtgtatattttataataggtctccattcaccaccctgccttccccaaggagttcttagctgcttgattttcttggctagagaagaactggcagttaggggttagcaaattcttaggacccctggggtagatacattgcagttctagcaagagttcatactctcttaaactgtgtttctggattttaattttgcctcaagctgtatgttaagagaagctctctctgatgaraataactctgcacttagggagaaatgcttccctcaagataccatgtctttattaacagaaattttcccctcaccttgtttatttacatttatttatttatttatttatttatttatttatttattttgagacagagtcttgctctctctcccaggttagaatgcagtggcacaatctttgctcactaaaacctccacctc

SEQ ID NO: 734507 - DNA, 666 bp, Homo sapiens
gcttagtttttgctgcacctgtcctgttggtagtgccatttctctctcttcgctacccccttagccagaaagaacttccagctcactagaacagattgccatccctcccacaaataagcaaagccttacacatttggcagtactgaaaagkctcccttcaaaaaactgagttagaagcttcctccagaactcctatgagttggtgtgcttattgcaacagccctttcatcattgtctacattaaacccagtcctagtttgataggaagaagtggagagagccatcctttcagagactttagcgatggctttatcaaagccctcatttattttaatcagcatgcagagtagggctcatctgggtagttcgtgcccaggtggtgggtgagtagattcacccctcatttggccactgctgctgtgccctgtgttcttcagaagtcgtttctccactgaggctgccagcctggaagctctggctgagcactggggactgaatctacctggaattagatggtttgcttaaatccaattgtaaatgataaagtgctttacaaatgttagacattattattggtctctatgggagggtgccactctttagtccctctataccttatcttggcaatataaatctttccatctttatatgcgtctcacaaatagt

SEQ ID NO: 734508 - DNA, 666 bp, Homo sapiens
gcttagtttttgctgcacctgtcctgttggtagtgccatttctctctcttcgctacccccttagccagaaagaacttccagctcactagaacagattgccatccctcccacaaataagcaaagccttacacatttggcagtactgaaaaggctcccttcaaaaaactgagttagaagcttcctccagaactcctatgagttggtgtgcttattgcaacagccctttcatcattgtctacattaaacccagtcctagtttgataggaagaagtggagagagccatcctttcagagactttagcgatggctttatcaaagccctcatttattttaatcagcatgcagagtagggctcatctgggtagttcgtgcccaggtggtgggtgagtagattcacccctcatttggccactgctgctgtgccctgtgttcttcagaagtcgtttctccactgaggctgccagcctggaagctctggctgagcactggggactgaatctacctggaatkagatggtttgcttaaatccaattgtaaatgataaagtgctttacaaatgttagacattattattggtctctatgggagggtgccactctttagtccctctataccttatcttggcaatataaatctttccatctttatatgcgtctcacaaatagt

SEQ ID NO: 734509 - DNA, 611 bp, Homo sapiens
cccaactcccctcatgtacatgctcagtaaacagtaaaactgtgatgaacataatgatggcagtgttagtaccaggcaaagtgtaaatgctaggaaagagttttgagagtaattttttttctgattatggatgaaattattaattataggatagggttaaatcttcaaaacaaagaaaatgtaagtaaatattacctataatcccactatccagagataatcactgctggttaatatcttgatgtatttccttgtagtctttttttgttgttcattaatgcctttatatatgtaattttttgtaatatatatgagaacttgctatgtataaggttttttaatcctgcctattttttcttacataatattatgrtgcgagcatcttcccatggttataactttttctataatatccagtcacttagatataataccacttgtttatcagattcctcattgttggacatttaggttgcttcttatttttactatcataagtagatcttcagtaaagatctttgcatatcaattttccctattccagattatttctttaagataaagacctagaagtggttcaaagggttaaacatttttagtgtttttttttt

SEQ ID NO: 734510 - DNA, 505 bp, Homo sapiens
atcaaggaaatgcaaattaattgtaatatggtatcctggaatggattctggaacagaaaaagcacattagaatatagattatggactttagttgataataataccatatcattattggcccattagctatagtaagtgtataaattaacataatacattaataataggggaaaattggtatggggsttataagaactctctgtactatcttcttaatttctctgtacatctcaaattgttctaaaataaaaattttatctttttaaaaaaagtaaaaatcatttcagacatgaagactaaaccaaaccgaatataagaacaaatacagacaaggaatggactgtgaaataattaaaaaaaaaaaagataccacctcatacctatcagagtgtccaaaatccagaacattgacaacaccaagtgttagtgaggatgtggaacatcaggaattctgatccattgccagtgggaatgcaaaatggtacagctactttggaagacagtt

SEQ ID NO: 734511 - DNA, 505 bp, Homo sapiens
atcaaggaaatgcaaattaattgtaatatggtatcctggaatggattctggaacagaaaaagcacattagaatatagattatggactttagttgataataataccatatcattattggcccattagctatagtaagtgtataaattaacataatacattaataataggggaaaattggtatggggcttataagaactctctgtactatcttcttaatttstctgtacatctcaaattgttctaaaataaaaattttatctttttaaaaaaagtaaaaatcatttcagacatgaagactaaaccaaaccgaatataagaacaaatacagacaaggaatggactgtgaaataattaaaaaaaaaaaagataccacctcatacctatcagagtgtccaaaatccagaacattgacaacaccaagtgttagtgaggatgtggaacatcaggaattctgatccattgccagtgggaatgcaaaatggtacagctactttggaagacagtt

SEQ ID NO: 734512 - DNA, 505 bp, Homo sapiens
atcaaggaaatgcaaattaattgtaatatggtatcctggaatggattctggaacagaaaaagcacattagaatatagattatggactttagttgataataataccatatcattattggcccattagctatagtaagtgtataaattaacataatacattaataataggggaaaattggtatggggcttataagaactctctgtactatcttcttaatttctmtgtacatctcaaattgttctaaaataaaaattttatctttttaaaaaaagtaaaaatcatttcagacatgaagactaaaccaaaccgaatataagaacaaatacagacaaggaatggactgtgaaataattaaaaaaaaaaaagataccacctcatacctatcagagtgtccaaaatccagaacattgacaacaccaagtgttagtgaggatgtggaacatcaggaattctgatccattgccagtgggaatgcaaaatggtacagctactttggaagacagtt

SEQ ID NO: 734513 - DNA, 505 bp, Homo sapiens
atcaaggaaatgcaaattaattgtaatatggtatcctggaatggattctggaacagaaaaagcacattagaatatagattatggactttagttgataataataccatatcattattggcccattagctatagtaagtgtataaattaacataatacattaataataggggaaaattggtatggggcttataagaactctctgtactatcttcttaatttctctgtacatctcaaattgttctaaaataaaaattttatctttttaaaaaaagtaaaaatcatttcagacatgaagamtaaaccaaaccgaatataagaacaaatacagacaaggaatggactgtgaaataattaaaaaaaaaaaagataccacctcatacctatcagagtgtccaaaatccagaacattgacaacaccaagtgttagtgaggatgtggaacatcaggaattctgatccattgccagtgggaatgcaaaatggtacagctactttggaagacagtt

SEQ ID NO: 734514 - DNA, 529 bp, Homo sapiens
aggagaactcttccaccagtttgcggaaggctggcagctggctcgtgaaaggaggtcaagtggctgagccaaagttgaccactagtgggcgctcagggctggcaaagtcaagaaggtggcatgtggctccctcagctatcttctcctgggtaccattgccactgttgtcacctccttctgyactggagacatgcaccacactggaattgggggcatcctcacccaatttcacctgacggtaaaaaaaaaaaaaaagaagaagaagaagaaggtgagaatatcacattaaacacattgccacttgaattcacattaaatagttacaattggctctaatagagtgtggtatttccttcagagcatttggtaaacatttattgatttgagtaaagaggcatgatggcaggtaatgtaaagaatggcccaaaagacaataaaagtctttttcattctgtatagtcactgaagataattattttcatcactgaaggcactggagttaactctttttaaaattaagccaaggctg

SEQ ID NO: 734515 - DNA, 557 bp, Homo sapiens
ggaaggctggcagctggctcgtgaaaggaggtcaagtggctgagccaaagttgaccactagtgggcgctcagggctggcaaagtcaagaaggtggcatgtggctccctcagctatcttctcctgggtaccattgccactgttgtcacctccttctgtactggagacatgcaccacactggaattggggkcatcctcacccaatttcacctgacggtaaaaaaaaaaaaaaagaagaagaagaagaaggtgagaatatcacattaaacacattgccacttgaattcacattaaatagttacaattggctctaatagagtgtggtatttccttcagagcatttggtaaacatttattgatttgagtaaagaggcatgatggcaggtaatgtaaagaatggcccaaaagacaataaaagtctttttcattctgtatagtcactgaagataattattttcatcactgaaggcactggagttaactctttttaaaattaagccaaggctgttattctttactatccttattttgctgtcaattcttaacatgcattctataa

SEQ ID NO: 734516 - DNA, 557 bp, Homo sapiens
ggaaggctggcagctggctcgtgaaaggaggtcaagtggctgagccaaagttgaccactagtgggcgctcagggctggcaaagtcaagaaggtggcatgtggctccctcagctatcttctcctgggtaccattgccactgttgtcacctccttctgtactggagacatgcaccacactggaattgggggcatcckcacccaatttcacctgacggtaaaaaaaaaaaaaaagaagaagaagaagaaggtgagaatatcacattaaacacattgccacttgaattcacattaaatagttacaattggctctaatagagtgtggtatttccttcagagcatttggtaaacatttattgatttgagtaaagaggcatgatggcaggtaatgtaaagaatggcccaaaagacaataaaagtctttttcattctgtatagtcactgaagataattattttcatcactgaaggcactggagttaactctttttaaaattaagccaaggctgttattctttactatccttattttgctgtcaattcttaacatgcattctataa

SEQ ID NO: 734517 - DNA, 620 bp, Homo sapiens
actttgtctccccagtagaatcccacaagggagggatttttatttatcttgttcactggtgcatttgtctagcataaagcagttgcccaccaaatattcaaatgcatcaatgaatggatgaatgagtctacttttctcgaatggaagtgaagggtttccaggtagaggtgaggtctgaaggcaaaatgaatgatcttttgagagaacaaccaccttgcagataagttcaagtagctaccggacacctcccattttcacctgcccttcccactgttatccatgcctgaggaatgtgatgccagggacrgcaggctctgcattggtgtctcaccaaaatgttcaggctcacggagttggctcaggtccctgggcaggtcctggtctccctagttcaaatgcctggaagacagagacctttctaagccaggcatagaaataacaaactccacatatttccagctatttgtgggggcaaaaaaattaaaacaattgaactcatggagatagagagtagaaggatggttaccagaggcttagaaggatatgagggtggtggggagtggggatgcttaatatgtacaaaaaacagaatgaataagatctagtatttactagcacaa

SEQ ID NO: 734518 - DNA, 620 bp, Homo sapiens
actttgtctccccagtagaatcccacaagggagggatttttatttatcttgttcactggtgcatttgtctagcataaagcagttgcccaccaaatattcaaatgcatcaatgaatggatgaatgagtctacttttctcgaatggaagtgaagggtttccaggtagaggtgaggtctgaaggcaaaatgaatgatcttttgagagaacaaccaccttgcagataagttcaagtagctaccggacacctcccattttcacctgcccttcccactgttatccatgcctgaggaatgtgatgccagggacggcaggctctgcattggtgtctcaccaaaatgttcaggctcacggagttggctcaggtccctgggcaggtsctggtctccctagttcaaatgcctggaagacagagacctttctaagccaggcatagaaataacaaactccacatatttccagctatttgtgggggcaaaaaaattaaaacaattgaactcatggagatagagagtagaaggatggttaccagaggcttagaaggatatgagggtggtggggagtggggatgcttaatatgtacaaaaaacagaatgaataagatctagtatttactagcacaa

SEQ ID NO: 734519 - DNA, 655 bp, Homo sapiens
accatgccaaccttttacccaatcaggagcgttcccatttgttagccttgatggttctatggtggctgctcactgggtagaaagtatttgccataccctgggcaggtggcagtactttggcttgaaagctgcatgcatctcaaaagttattttccgcaccaaaagttcctactattccaccaggcagcagccaaaaggtttgtcctaacggaaatccttcctggccttttcctctggccaagaacaagacttrtattgatgactgaaactgcagggatttttagtattcttggtaatgtctctttaacacagagacatcaactatatggcacatctgtgccttcccatcccttcccatgcccagcacagacatcactagtggatcatgctgttctttcctgatgctcccagatgcagcacagctcacagtggtgtatggagatggcatcggtatgcacaattaaaccaatttcccagcccagacctctactctgcgtatgtctgtattagccagttttcacactgctgataaagacatacccgagactggacaatttataaaagaaagaggtttcattggactcgctattagtccatttgcactctgctgataaagacatactcaagactgggtaattaacataggaaaaagggt

SEQ ID NO: 734520 - DNA, 655 bp, Homo sapiens
accatgccaaccttttacccaatcaggagcgttcccatttgttagccttgatggttctatggtggctgctcactgggtagaaagtatttgccataccctgggcaggtggcagtactttggcttgaaagctgcatgcatctcaaaagttattttccgcaccaaaagttcctactattccaccaggcagcagccaaaaggtttgtcctaacggaaatccttcctggccttttcctctggccaagaacaagacttatattgatgactgaaactgcagggatttttagtattcttggtaatgtctctttaacacagagacatcaactatatggcacatctgtgccttcccatcccttcccatgcccagcacagacatcactagtggatcatgctgttctttcctgmtgctcccagatgcagcacagctcacagtggtgtatggagatggcatcggtatgcacaattaaaccaatttcccagcccagacctctactctgcgtatgtctgtattagccagttttcacactgctgataaagacatacccgagactggacaatttataaaagaaagaggtttcattggactcgctattagtccatttgcactctgctgataaagacatactcaagactgggtaattaacataggaaaaagggt

SEQ ID NO: 734521 - DNA, 655 bp, Homo sapiens
accatgccaaccttttacccaatcaggagcgttcccatttgttagccttgatggttctatggtggctgctcactgggtagaaagtatttgccataccctgggcaggtggcagtactttggcttgaaagctgcatgcatctcaaaagttattttccgcaccaaaagttcctactattccaccaggcagcagccaaaaggtttgtcctaacggaaatccttcctggccttttcctctggccaagaacaagacttatattgatgactgaaactgcagggatttttagtattcttggtaatgtctctttaacacagagacatcaactatatggcacatctgtgccttcccatcccttcccatgcccagcacagacatcactagtggatcatgctgttctttcctgatgctcccagatgcagcacagctcacagtggtgtatggagatggcatcggtatgcacaattaaaccaatttcccagcccagacctctactctgcrtatgtctgtattagccagttttcacactgctgataaagacatacccgagactggacaatttataaaagaaagaggtttcattggactcgctattagtccatttgcactctgctgataaagacatactcaagactgggtaattaacataggaaaaagggt

SEQ ID NO: 734522 - DNA, 650 bp, Homo sapiens
ctccaggtcccttagcttggcattcagagccctctctgcttgggtccctactctcagccttaacctcctctgcctctttgtgatatcccttataccccaaggcccaggcctgttctctgtccctggaaagccctccctgtccctctttgcctgctgaaatctcatccatctttccaggccccgtatcatggaaaggccccagacctagcagcagaatgtgctctctccctcctctgagcactcccagaaacctctgccagaatgggaactcctcgaagagagagtggtctcatctgttttctagccccacratgtgcaaagtgcagtcctgggtccagcatgggaataagagatgtggagtaagcatgtgagcgctaaatctgcatcattcaggcaatattcattgagcacctactgtgtgcctagcccctgctacgcatcaaggatatgacagtgaccaaggcaagtgtggtgcctgccccatggagtgtaggcagcccatgttctagaatgtgctgaggattcaccacagctccattcacccagcacctgcagcaaagctgttcgcctgttggtgtgtgttcagggaacatacaccaccatgacactcggctaggctgagggttctgcaacagctctttgcagttgta

SEQ ID NO: 734523 - DNA, 633 bp, Homo sapiens
ccccagtgcctcagctgaggggctttgaattccattcctcctgctggagctccagagaaattccccatcgccaagcccggttctctttcacggccttgtctgtctgagtcccactggggcacactgtagctggagagcttagtagatgctgactcaatgacaatcatggaaagggctcttcccaagaggcccaggagggcaacccttctaggggtcttgtcatgggctatttggccaggggtgtttgtcaacatgtgaatgtaaccctcttaggcaggcatgtgctcacaggccacaggcccagcaccaaggccagggactggggaagcggggagccttccaaacaactctccctttcagccactcagccacacacttcccattcccacccttcccaccccacccgtcgagagctcttccggcagggggccacagtgactaaagaggggtgccctgtcccccaytgccccccggttcccccctccctcacccggagagctgttctgacagggggccatggtgactaaagaggggttccctgccccccattcccacactccccctctgagagctgttctggcacagagtcactgtcactagaggggtacccttccaggtgcgctgggatggcac

SEQ ID NO: 734524 - DNA, 644 bp, Homo sapiens
ttgtctagggagagggttactctggctagatatcttccctctcagctcaacctcccagaggcccaccagtgaaattcctccccagccacctccccagtgtttatggggcccccaggaaactgatgcacccttacctggccgaacagggcatgcgggcccctccattgctgctggctctgtgtggctgcctctgtccactctccttcccattcctgccccccttgggccatgggatgccagcctcttcctttacaggcaccccagtttctgtgagcaagtctccaggagttcacccctacttccagaaagcggagggggaagcagagcccctaccctcggttaggaacaagggcagtttcaggggtgtgtggtctgtgcacttccatgaggcctcaggtcagaagtgctggcggttggtccaatgctcttctgtcttgaagtctcwtaatttttaaattaggggcaacttgttttcattttacactgggctccaaaaattatttaggcggtcttgactgttctcatccgcttatagaaaggaggagggtttctggcaatggtgggagtggagagctggttctggaggctgttgaagccccaggaggtacacagtggttttcacctctctttagagtggaagatgc

SEQ ID NO: 734525 - DNA, 620 bp, Homo sapiens
tagctcaaaagaaataaaaaatcatacaaggaacttcataagtgctaaaaatgtctaaaatgcatttgataaaattcaacatgtctctgattttaactcttacttcataggaatagatggatattgcttaacatgattttgtgtatgcctatgtgtgcttgtgtgtgtattcagacataaacacacacaaggaaagaatratcatgactgtaattctttaataccactctagaggtacaagccaacacaaattttggaaatgtaagttataaaagtgctaaatttatcaaaattgtagacggtaagattgccaacctggagaaaaaagaacaagattgtcaactgaaaaaaaattagaaataataaaagaatataccaacatgattggtaataactattagaagcaaaaatatatagcttgtttgtatataaacagactttaaccttttaaatataatggaagaaattgaaaatatcagtaaaagggctaaaataaccagtactaagtctaaccagaggtggcaggagcagctcttaagactacttcattcttgattccctggcacttggaatagggcctgacacatagtagtagatatttgtcaaatgatggaacggct

SEQ ID NO: 734526 - DNA, 603 bp, Homo sapiens
actaatttacattcccaccaacagtgtatgacagttcccttttctctgcattctcatcagcatgttattttttgtcttttttataacttaaggcattctaactggggtaaaatgatatctcactgtgtgcatatctcactgatgtgcatttctctgatggttggtgatgttgagcattttttcttatacttgatggccatttttgtgttttcttttgaaaaatgtctatttatgtcctttacccactttttttagtagkgagatttttttttttttactgttgagttttgttgagtttcttgtatattctagatattatttccttgttaaatgaatactttccaaatattttctcccattcggcaggttgcctcttcactctgttgattatttcctttgctgtgcagaagattgttagtttaaaacagtcccatttgtctgttttttgatttgttgtctgtgctttggaggccttagccataaaatctttgcctagactaatgtcctgaagtgtttcccctgtattttcttttagtggttttagagttctgggtctacaatttaaatctttatcttgagttagtttttgtatatggtaatagt

SEQ ID NO: 734527 - DNA, 603 bp, Homo sapiens
actaatttacattcccaccaacagtgtatgacagttcccttttctctgcattctcatcagcatgttattttttgtcttttttataacttaaggcattctaactggggtaaaatgatatctcactgtgtgcatatctcactgatgtgcatttctctgatggttggtgatgttgagcattttttcttatacttgatggccatttttgtgttttcttttgaaaaatgtctatttatgtcctttacccactttttttagtagggagatttttttttttttactgttgagttttkttgagtttcttgtatattctagatattatttccttgttaaatgaatactttccaaatattttctcccattcggcaggttgcctcttcactctgttgattatttcctttgctgtgcagaagattgttagtttaaaacagtcccatttgtctgttttttgatttgttgtctgtgctttggaggccttagccataaaatctttgcctagactaatgtcctgaagtgtttcccctgtattttcttttagtggttttagagttctgggtctacaatttaaatctttatcttgagttagtttttgtatatggtaatagt

SEQ ID NO: 734528 - DNA, 523 bp, Homo sapiens
atgcagaaagctgaaactggatcccttccctacaccttatacaaaaattaattcaagatggattaaagacttaaatgttagacctaaaaaccataaaaaccctagaagaaaaccttggcaataccattcaggacagaggcatgggcaaggacttcatgtcyaaaacaccaaaagcaatggcaacacaagccaaaactgaaaaatgggatctaattaaactaaagagcttctgcacagcaaaagaaacgaccatcagagtgaacaggcaacatacagaatggcagaaaatgtttgcaatctactcatctgacaaagggctaatatccagaatctacaaagaactcaagctctccctatccctctccctctccttctccccatggtctccctctccccatggtctccctctccccatggtctccctctccctctctttccacggtctccctctcatgccgagccgaagctggactatactgctgccatctcggctcactgcaacctccctgcctgattctcctgc

SEQ ID NO: 734529 - DNA, 523 bp, Homo sapiens
atgcagaaagctgaaactggatcccttccctacaccttatacaaaaattaattcaagatggattaaagacttaaatgttagacctaaaaaccataaaaaccctagaagaaaaccttggcaataccattcaggacagaggcatgggcaaggacttcatgtctaaaacaccaaaagcaatggcaacacaagccaaaactgaaaaatgggatctaattaaactaaagagcttctgcacagcaaaagaaacgaccatcagagtgaacaggcaacmtacagaatggcagaaaatgtttgcaatctactcatctgacaaagggctaatatccagaatctacaaagaactcaagctctccctatccctctccctctccttctccccatggtctccctctccccatggtctccctctccccatggtctccctctccctctctttccacggtctccctctcatgccgagccgaagctggactatactgctgccatctcggctcactgcaacctccctgcctgattctcctgc

SEQ ID NO: 734530 - DNA, 523 bp, Homo sapiens
atgcagaaagctgaaactggatcccttccctacaccttatacaaaaattaattcaagatggattaaagacttaaatgttagacctaaaaaccataaaaaccctagaagaaaaccttggcaataccattcaggacagaggcatgggcaaggacttcatgtctaaaacaccaaaagcaatggcaacacaagccaaaactgaaaaatgggatctaattaaactaaagagcttctgcacagcaaaagaaacgaccatcagagtgaacaggcaacatacagaatggcagaaaatgtttgcaatctactcatctgacaaagggctaatatccagaatctacaaagaactcaagctctccctmtccctctccctctccttctccccatggtctccctctccccatggtctccctctccccatggtctccctctccctctctttccacggtctccctctcatgccgagccgaagctggactatactgctgccatctcggctcactgcaacctccctgcctgattctcctgc

SEQ ID NO: 734531 - DNA, 527 bp, Homo sapiens
acttcaggatcctagaattttctccagttcttctcctttttttccctggcagtaggatggttggccagcaggggaagagctgggctcccctgggcccagattcctctgtgtccctgctctagcccctgcaccctgcccctgcaccctgccccagagctgtgtgtcctgggtcctctctcccaggcttctggctgcagaggtcagagatgggagagctaggcatgggtcctgggtcgggagaagccaggctgatgactgcatatcgggtccagctcctccttctgccagtggggaaacyggtccagtgaggcaggtggctggctcaggagcaattaaaggctgagttggaccccctaccctagcctcctctcagttcctgtggcttctcagctggttggaagatgaagtgctgtagggcgctgttcccagccacagcctctttctggccctcgccgaactggtcgcctgctccatgtctcttgtcctaagaagagaagccaggggagaacaagggagaaagccaagga

SEQ ID NO: 734532 - DNA, 545 bp, Homo sapiens
accttcccttctctgtcagccacgtgtaaagagcaaacaagatggtggcgatcaactggaaagcccacttgcatagtaagattaggatggggcaacttgccttccccgtgtgctatataaacgtcatacctgatcgaaccaatctgtgagcccaacataaatcagacactgccttctccagcctgcctataaagtctgccctggcacacactgccttttcctttgcagacctttctytctctctctctctctctctctctctggcaaggagagagaaagactgtctaataaactttccactgtttaacccaaaaaaaatatataaaattaaattaatttaaattaaattaaaaaataaaaaaaaaaataaaataaataaaataaaatataaaataaaatgcaggaacctggcagacctcagaggagcccaggcctgatcaaggtgctccttcctgcctcctgttcttaccagataactgattctctccgtgatgagatgcacacttcctgggatcccatcccctcacaaggattccacaacttat

SEQ ID NO: 734533 - DNA, 612 bp, Homo sapiens
ccactcatctgcaatggcttctcccagcagtttatccaaagcctcaaagatgaggctgctttcttcacagacgcccaaagtgtattcatataattccaaccatgtgctcatgaaagagcaggccattgcctcttctcttttcctgtaaaatgacagaggacaaatccagacattcctctttagatgttttctgagaggggtttttccctcaaatctcttgtgctttcagagggtcttctcaatcatcatctgcacccaatggcttgcctaccacagagtgtctcacgaagaccatacatgtgtgctccatgctggccatctcaggtcacgtggttcaggtggaaaattgcagccccacctactgccggctgcactagtgggaccaagtaaagtagcaccctgatgacaaggttggaaygggtcaacaaagacttcaaggagatgttcttctttccaaaatggccacataacacatgtatttgccaccacttcaagaaaagttgacattcaatatcctcattttaaaacatgtcaatgggcattattttcacataagtgaaatctccattttagattactattattgatttcctggttcctttaaatagcatg

SEQ ID NO: 734534 - DNA, 617 bp, Homo sapiens
aacaatatattcagaggtaatctcagacaatcatatctatataaagacattttttccaaaaactgaaaattgaacaggctgttggatgaacatcacatttctgactttattttttgaccctgctgattcagagcaatgttttattatatatcctgactcctaagaaaaatgatgctattgtttctaggtgacaaagcccagttgctacaggcagaagaataaagaaaaataattcccttcatttatagcctactatttagtcagcagcagtcctggggcccagcgttttctctaggcccatgttttgrcacttttcctgaaacagaagggctctttcctagtgtctgatattctgctgcttctttctaggttagactttgggattcttagattctaaaggccagacggacattgaaaactttcccgttagtcctcctgcctcaaggaaggaattaatatctatatatctcatcaaaagtgtttttaccatactattcaaaatgtatggggaaaagcttatacattttcaagtgagacaaagcttcttccttgcaccagctggtagcaaatgctcatactctactggcagagaaggattcataaaggtcttcacttac

SEQ ID NO: 734535 - DNA, 617 bp, Homo sapiens
aacaatatattcagaggtaatctcagacaatcatatctatataaagacattttttccaaaaactgaaaattgaacaggctgttggatgaacatcacatttctgactttattttttgaccctgctgattcagagcaatgttttattatatatcctgactcctaagaaaaatgatgctattgtttctaggtgacaaagcccagttgctacaggcagaagaataaagaaaaataattcccttcatttatagcctactatttagtcagcagcagtcctggggcccagcgttttctctaggcccatgttttggcacttttcctgaaacagaagggctctttcctagtgtctgatattctgctgcttctttctaggttagactttkggattcttagattctaaaggccagacggacattgaaaactttcccgttagtcctcctgcctcaaggaaggaattaatatctatatatctcatcaaaagtgtttttaccatactattcaaaatgtatggggaaaagcttatacattttcaagtgagacaaagcttcttccttgcaccagctggtagcaaatgctcatactctactggcagagaaggattcataaaggtcttcacttac

SEQ ID NO: 734536 - DNA, 632 bp, Homo sapiens
aatccatctcacagagttgtagtgaggattacatgagagagaatttataaagtacccaacacagagcctcgcatatagtagacccttaaaaatgttggatctcccttactttctatttcaatgcactgataaacaagttaggcctcctgggttatttaccttagctacattgcagcaattgaaaactgaaaaactaagtaaattttcagcctatcttcatttttccctatggtaggaattctagtgaggtggacatatccaaatgtgcttctgtttcctgcartttcactgaccatgagctttctcctctcaacattgacatttcaagtcagatagccagtgtcaagaggtgccattgtgacagtgtgcatacatatttaattggatggctacatttcacatcagcttaaatggaaaagaaaacagagtgactttaccctaagccagtatttcccagtggctatggtgtcagtttccccaagaggctactaaagggcaagtatattttgttttcacatactctaataagcaacacgtttctttactaccaaaaaagttcagtactgctgaatggaccctcagatctgcagtcaggccaagaggcaaagctaaccagggacactgccagacgg

SEQ ID NO: 734537 - DNA, 613 bp, Homo sapiens
aactgcctgttatcgtatactaagaaacagtggggaataggccgcatgcagccgacccaaagattctgtaaaaacctgggaaagatccatttcaaagctctttgcatcttttattctttctcctcaaaggaagagtttttttattaaatacttttaagggttttttsttggtagtcatactccttatttctctcaaagggcagtactgcatgggcacctggcattgagtacaaagctggaggggaatcaggatgataacaatgatgtcatttaccaggaggtggtccagggagcagggatgctcagcatgtgtcctgcccaatctgaagtcctgcagagcctttggattagtgccccaaccccataccagccaactttactcagtcccataaaagtcacagtgtaagagaagagagctaaaaatattttattctattctatctaggccttcttacatactctaggttggccagagcaagggcacttggtagaaacatcatgctgtacaggtgtgcgttcatgtgttttgtgtttggagggttggtgttatgcatgtgttatgtgaatgagtgtaaatttccctttcttttgaggctcagggtgtattgcaaag

SEQ ID NO: 734538 - DNA, 613 bp, Homo sapiens
aactgcctgttatcgtatactaagaaacagtggggaataggccgcatgcagccgacccaaagattctgtaaaaacctgggaaagatccatttcaaagctctttgcatcttttattctttctcctcaaaggaagagtttttttattaaatacttttaagggttttttgttggtagtcatactccttatttctctcaaagggcagtactgcatgggcacctggcattgagtacaaagctggaggggaatcaggatgataacaatgatgtcatttaccaggaggtggtccagggagcagggatgctcagcatgtgtcctgcccaatctgaagtcctrcagagcctttggattagtgccccaaccccataccagccaactttactcagtcccataaaagtcacagtgtaagagaagagagctaaaaatattttattctattctatctaggccttcttacatactctaggttggccagagcaagggcacttggtagaaacatcatgctgtacaggtgtgcgttcatgtgttttgtgtttggagggttggtgttatgcatgtgttatgtgaatgagtgtaaatttccctttcttttgaggctcagggtgtattgcaaag

SEQ ID NO: 734539 - DNA, 600 bp, Homo sapiens
ttagtgcccgtattttataacctttgttcagctcagcatctataaatcctgtattttgtactcaaggagaaaacagcttattttggttgtattagttacattcaagaaattatgtgttgtatttgttttctctccctcgattgctccccaccccatcctgcctctctggagcccaggggactttttggcatagtcctccataaattataagctattattaggtcatcattgtaaaaaatcctgggtcaagataacaagaaaggcttgctgtagctccagactaaaatgacccccaytggggtccacagataggcccaccagaggattaatcatagcctgtgattcctgagttatagtcgcaaaaaagcaggtaaccacaactatgccaagtgatcatgaaaatgtccttctgtgaaggattctgtgtatgatgagccttcagatgggtgaaatatggcaaatcagaaccccaaaactaacccagttatcacattagaagactgcagttctggttgctcaaggggaaccagcacttggtttgaggctgcgctggaagtggttggacgtgcttcctgccgtttagtctgtgctttggggaga

SEQ ID NO: 734540 - DNA, 600 bp, Homo sapiens
ttagtgcccgtattttataacctttgttcagctcagcatctataaatcctgtattttgtactcaaggagaaaacagcttattttggttgtattagttacattcaagaaattatgtgttgtatttgttttctctccctcgattgctccccaccccatcctgcctctctggagcccaggggactttttggcatagtcctccataaattataagctattattaggtcatcattgtaaaaaatcctgggtcaagataacaagaaaggcttgctgtagctccagactaaaatgacccccactggggtccacagataggcccaccagaggattaatcatagcctgtgattcctgagttatagtcgcaaaaaarcaggtaaccacaactatgccaagtgatcatgaaaatgtccttctgtgaaggattctgtgtatgatgagccttcagatgggtgaaatatggcaaatcagaaccccaaaactaacccagttatcacattagaagactgcagttctggttgctcaaggggaaccagcacttggtttgaggctgcgctggaagtggttggacgtgcttcctgccgtttagtctgtgctttggggaga

SEQ ID NO: 734541 - DNA, 496 bp, Homo sapiens
aagatttttcatagaacaataacaacataaaagatatgtgattccatcaaaaaagatatgaacttatttatcttttgctattgctataatcatcagtaactagacttaggtgtacatatctttaacctgcatacttttgcctaatactttttttacatgtgcataactgttttttaaagaaccaagcacacaatacaggaaggcaaaaagtaagatataagatacagcacacgaattttgcctggctagttccagaagcactctagaaaagtatagytgttaggttatgtttggaggatcataatgaacctttccaggaaaggatggaacgtggagatgatgcacattaatgacactgatgtggtgttgtgaaaatatgaagagctgtaaggacttatttaggagatttgccattggagagtcttgcaaacaatatcaacttttgactgactgaatgaataaagttttgcagctgcacagataacacagaagagag

SEQ ID NO: 734542 - DNA, 707 bp, Homo sapiens
tcttgtttccagtaatatatgaagggagccatgctgtaaataaagattaatcatttttcaacatctaagcagcagctccaagtaccacatgggaaatgaattactgctcttttggtcctgaaaaacatcacataaatcatttaaaaatkgattttgttagccacagaattgcaggcttatgataagggcctccctccatcctatgtaatcttcaggtcatgaacctatgggaaataaagggttctgctaaactaatggatctttctgatcagttttattatctgcccacctctaccaactttttcgctacctttccattgacctttgctcagagaatttttaattttttttaagtcaaagagcaacagaaaagtccattttcttcgaagtggaaggtacattcacagggtgttttatttctaataagcagtgtactgtaaggtagtacaaaagcattggccttaataccataagacctgagtttgaatgctagatcttaatagtttctcatctttggaaagttagaataagctatgttatcctgctgtaatggacaactgtaaacattgcagtgacctaaaataataaagatctatttcttactcatgctgcatgcccatcctctactcttcattgtccttaattcaggatacaggatcctggacaatccgccttctgaaacataattcattgtggcacagtgaaga

SEQ ID NO: 734543 - DNA, 682 bp, Homo sapiens
gcagatttatagatctgaagagaaacaacaggatccctgatgccttcaagatattgcatctcggccaggcatggtggctcacatctgtaatcccaggagtttgggaggaccacacagacacgttgcaaggtcaggagatacagaccatcctggccaacatggcgaagccccgtctctactaaaaatacaaaaattagctgggtatggtggcatacacctgtagtcccagctacatgggaggctgaggcaggagaatcgcttgaacccgggaggcagaggttgcagtgagccaagatcgcaccactgcattccagcctgtcgacaragcgagacttgtctcaggaaaaaaaaaaaaaaaaaagatattgcatctcttctgtttagcacctggaaataagtaacagataagtcgccagaatgaggaactatgacttaaaagtcttcccttagattaactgggatttatgtctctttctctgtctctctctctgggccatattgaaatccttttcctcctcttcctctcttcattgcttatttaaattacataaaatctttatggatttttcaaaccaagacaaatacagtgcattggagaatatattatgaacaattgaaaatgttttatttatgctctaaatatattttgttcatcaaatttggattaggtatagaattatga

SEQ ID NO: 734544 - DNA, 682 bp, Homo sapiens
gcagatttatagatctgaagagaaacaacaggatccctgatgccttcaagatattgcatctcggccaggcatggtggctcacatctgtaatcccaggagtttgggaggaccacacagacacgttgcaaggtcaggagatacagaccatcctggccaacatggcgaagccccgtctctactaaaaatacaaaaattagctgggtatggtggcatacacctgtagtcccagctacatgggaggctgaggcaggagaatcgcttgaacccgggaggcagaggttgcagtgagccaagatcgcaccactgcattccagcctgtcgacaaagcgagacttgtctcaggaaaaaaaaaaaaaaaaaasatattgcatctcttctgtttagcacctggaaataagtaacagataagtcgccagaatgaggaactatgacttaaaagtcttcccttagattaactgggatttatgtctctttctctgtctctctctctgggccatattgaaatccttttcctcctcttcctctcttcattgcttatttaaattacataaaatctttatggatttttcaaaccaagacaaatacagtgcattggagaatatattatgaacaattgaaaatgttttatttatgctctaaatatattttgttcatcaaatttggattaggtatagaattatga

SEQ ID NO: 734545 - DNA, 649 bp, Homo sapiens
gctttagattagagatttgttacttaaagtgtggcccctagaccagtagcctcagcaacacctgggagcttgggagcttgctggaaatgcagaaacttagacctcactccagtcctactgaatcagaatctgcattttagcaagatgcacagtaaagtttgagatgaactgctctaaagtgatggttctcaaacaatgatccttgcaccagcagcatcggcatctcctaaggagctcgctagaagtgcaaattctaaggcccaccagacctacagaatcagaaatgctgggagtggggctcggtaatctgggtttgaacaaaccctagaggtgattctcatgcatactatagtttgaaaatttagtgccagaataatgactgtcaacctcrgctgcccattaaaaaccctaggagaagattaaaaatccaaaagctcagagtgcaccccagaccaattccaattaaacagaattactggaagtggtaccctggtatcggtatatatttttttttacagttccccagctgactccaatctgcagtcaatgctgacctattgttctagggaccctcaaccccttcatcctctacactcccaggagatttaaagctgctttaattcttaggaaatcggatccaactagtgtt

SEQ ID NO: 734546 - DNA, 493 bp, Homo sapiens
cctagcttcagcttcctcatctataaaataataaaagtctctacctcacttacttgttgagaggtattaactaacacatcaatggcttagactaatacctggtgcataagtaagcatctattattagttctgattatcattagctgctgacctttaaatagttacaaaagattctgggatctttttataaatcatggaacccagtcaacaatgtaaagtctaacaaacaaatgatacaagggcagaggactcaaatactttagtaccataatcaggtagcaccaacccaaagtatgcaaaaacatatcaagtttacaaagccttcckatcctagctacacaacaatcgcaaaaggcctgaactcttttactgtgtaattattaccatcatcttactttggaaatgtctgtacacaatgaattgcacattactataatacatacttcaaccacatagatcttgttaacaaaggaacattgtaaagtggatacgg

SEQ ID NO: 734547 - DNA, 632 bp, Homo sapiens
ccctttaacttacttcatgggattcttgggtatattaaataacataatccatagaaaatgcctggggacatctgatatataagcatgctctaaatgttagttaataacaccacattctcattctcaaaaataggagatttgtttttaaacaaatgaaccaaactaacataggttgctggagggcaagagaacactaaacatggaagacatggttatcaaagagaagatatcagaagaagaaagagggcaggaagttgggagggggaaataaatacacctgagttaagggctcaaacacaaaaacagaaaacaataagaggaaacagaagtcagaarcgacaaacatttaaaatgaacagagaactgaatgccactttaaagtcacaagatcaacagaacaaagaaaacaatcacatcacagggccttaaagccacatatttgctacaaattaggattatttataaactgccatcatttctgaatgtcaccactgaatatgatgaccactgtatataaccacatcccaggtatttcagatgtgctgcgcagatcgcctatgtcagaacatttcccaaaagccccctttaaatttatttactcatgcacttctcattttgagatcataattggc

SEQ ID NO: 734548 - DNA, 548 bp, Homo sapiens
aaggtggaattttcacaattttactgatgtgttccaggtagtgaaacactctaatgacttgatttccaaatagcatcaccacacgaagaaaaggactcagaatcacttctgcctccagtatactctcagtttctcaagcaggtaattttgactccccttagtttttgcccagtcttacccatcttaggaaatggtaccaactgctcaagccagaaccctggggtcactctgaagtctacccccaacctcacccccaaatccaacctaattgagcccttttaactgtatttccaaatggaacagagaatctatccaactcctctgctagcaccctggtccagccacatagcagtctcctggctgggctcttcttcagtggcctaaataatgtttctgattctactctagcttcccgctacaatccattttccacatggcagccacagttgatcttaaaaagggcatcctctcatctccatctgaagcktcaaactctttcatggattcctattatacttagaataaaatccaaactccttaccatgttg

SEQ ID NO: 734549 - DNA, 618 bp, Homo sapiens
ttctggaaaaataggaatgtttgctcctatgctcaaaacgtgacacagctgtcgggggcgccattcattatatataaatacaacgtaacctccatggagaacacactgtggatggtgtcccctagaggagtactgcatacttctttgctgtagtacagcaggtcctcaaacagcaatggttttgttcaacatcattgtgtcataacttttaggaggggaataaaaaccagttctcggttggggccactctctgtgtggagactgcatgttctctcatgctgtgtgggttttctctgggtactctcacatcccaaagatgtgcacgttaggtgaactggggtatctacatggtcctaatctgagtgtgtgtgtgtgtgtgtgtgtgtgtgtgtgtgwgagagagagagagagagagagagagtgtgtgtgtgtgtgtgtgtgtgtgcaccctgcaatgggatggtgtcctgttcaaggtcgattcctaccttgcagcttgcagagctgctgggatgggctgtggccaccctcaaccctggactggaataagcaagttggaaaataaatgagtgaataaatacaaattcttataaaatacaaatctgttaaagcaggtga

SEQ ID NO: 734550 - DNA, 618 bp, Homo sapiens
ttctggaaaaataggaatgtttgctcctatgctcaaaacgtgacacagctgtcgggggcgccattcattatatataaatacaacgtaacctccatggagaacacactgtggatggtgtcccctagaggagtactgcatacttctttgctgtagtacagcaggtcctcaaacagcaatggttttgttcaacatcattgtgtcataacttttaggaggggaataaaaaccagttctcggttggggccactctctgtgtggagactgcatgttctctcatgctgtgtgggttttctctgggtactctcacatcccaaagatgtgcacgttaggtgaactggggtatctacatggtcctaatctgagtgtgtgtgtgtgtgtgtgtgtgtgtgtgtgtgtgagagagagagagagagagagagwgtgtgtgtgtgtgtgtgtgtgtgtgcaccctgcaatgggatggtgtcctgttcaaggtcgattcctaccttgcagcttgcagagctgctgggatgggctgtggccaccctcaaccctggactggaataagcaagttggaaaataaatgagtgaataaatacaaattcttataaaatacaaatctgttaaagcaggtga

SEQ ID NO: 734551 - DNA, 626 bp, Homo sapiens
ctcacttgatcttttggaatccagtgacccttgttgccccctctacttcggtgactcagtcctgcagccacagctctctgaactctctgaagtcacacatcctatctgctgatcacaatggtccatccttccagttctccctggcccatgctctaccacactgacacttcaaagtcactgagacatctactccccagatcgtttccttttctctgcggcctgaacctcctcctgactgtacctctttaacaacggagcccaaaacccacggtgtttcacttgaaccaccatcttcctaacgcctttacctttcctgcctctttatcctccttctgtatctgtctcccaaacccaacttacttaatcccagagatggcaaacctgaatcaggcaggaatcctaraagagtagagggggactctagacacctcaagaaggtctgtgacctctaacagggcatcactactcattccatgccaaagggtaaactcaatgagggcataccttccatgtactcaagagaagccagatttttacgtgaagtatgccagtttttaaatatcagtgactaatttaaaaatagaaaaaaaggggcacattaaagaaaacatgtcttggggtaaaat

SEQ ID NO: 734552 - DNA, 572 bp, Homo sapiens
tcttaagtagtttagacacatgcctttggctcaaggaaattcacagaaactgccactactatgtagcttattgaaagactcacgagttcctctacactgattaatccttttcctcatcccttccttctgctcccatctgtcctaagatcaaaatgcttgtaaaccaacaaattgggtggagcccaggaactctgaacggtgagcaagcctccgatgctttggtcctctggaacagccttttaaatactgattctatctctttctaaccctttgtctccaccagactcagggtacgtgytaggtggtgtggggctggttgtctcaacagccttctaaagtcttaatctaaggtatagaaaaaaaaaaaaactaggaattttaataaagaatgggatactccactattgtgcacattacttttatttctgttgacatttgtttatgccttttgagtgaatcctacaaatatagtgagtgagataaaactaaagatgaactaaatgtaatatatttggacagagcattaatgttgagcctggatgtgaagacaatatttgttactcttcttagag

SEQ ID NO: 734553 - DNA, 441 bp, Homo sapiens
taccccatgctttcaggatcctgctgtgtcctttctctagctctgcaccaccctatgtttctgctttctagaaccggtttcaaccacccagtgccccagagttccctacccaaacatccccaaactcccttccaggcctgcactggacttttccccaagtccgtactcttaaaggccagaatgtgctgatagtgtgtgtaccctaggcccaagctttggggtgatgttggggagggtgagtggagcttagattaagtggtccatacatctatacccaaaagcgtttgttgaattggagaaagcyagggagcagagagcagtggagcgggctggcatattctacagcagtaagttccagcatggaaaaatccaaggagcctgaaaattctaaatctgagcttggccttcaggtcattatgaagatatatttgtcacatagga

SEQ ID NO: 734554 - DNA, 635 bp, Homo sapiens
tgcatttattagctgatggacatctgtgttgtttctatttttttgactattatgaataatgctgctatgaacatttgtgtacaggcttttgtgtggggatatgttttcatttctcttgggtatatatctaggagtgcaagtcccaggtcatgtggcaactctgtgtttaactttttgagaaactaccaaacttttttccaaagcagctgcaccattttacatttctgccaatgatgtatgggtgttccartttctccacatcttcacaaatatttgttattttctgtcttttttattattgtcatcacagtgggtgtgaagtggcacctcactgtgattttgattttcctaatgactagtaattttgaacatattatgtttttattggctttttgtatatctttgaagaaaagtttatataaaccattctccttacccttttttggttttacttgtcttttgattgggttgtaagagttcattatatattttgaatagatttttatatattctggatagactcttgttagatacatgatttgcaaatattttctcccactctgtatgttatattttctctttctcgagagcaccctaaaaagtgcttaagagagtacaacagtttttaatttcaa

SEQ ID NO: 734555 - DNA, 622 bp, Homo sapiens
gccaccaaaaaactcagtcctggggcataacaggaacaaaaagcatatactaagtcataaggaactggcaaaggcagagttccaattagtatctgtcccagccatatgccaatgggcaggagaagggctggaggttatttgagctgctagggtaaaaacaagtatcaatttcaggggatatctacaagagagcccatgtctctgctgctgcatatatgcagagagccgtgggcacaagaataacaaggagtatttgtttaagaagtcacatggcatgcaaagtgaaagcaaagacagagacttgcccctggaaatggatgatctggcaggtacgcaaggccatctcrgaatacacacattgaaaagaggagaatgggaggtgcaggtctttgggaaagagctgattttagttgaaaaagcagaggaaacccaaaacattgcatggttttaggccttagtcctaccacttgagcctcctgtccaggagggtcattttagtaccttagatctatttggtgcagaacctaatttccttcccacccctgtgagccacccatcagaacgagctgagaaacccaccaggaggtgggcagagtcacttacggtcaagaagaattgttct

SEQ ID NO: 734556 - DNA, 575 bp, Homo sapiens
gaaatagaatgtagattcagaactaaaagtgatacttattatgtgttttgggaactcacagagggagttggggagctgtttttgttgggtgaggataatgacaaaaattcatgcccatattgacatattttgtatgcacttaggtgctaattcctgctcagtcctgactccattggccctgccccaaagtaggcaaagtgaagtagcctggcagaaggatgctaaaaggcaaatggaatttggaaacattttgttgttgttgtccactcttaaaggcaaaactcacgggtcatacaaaaatattccttagaaacctgtgacaatttgaaaactgtactttccatcccatcctgtacggggtgggggaaggaaaaggaggscgtttttcttgctttattcctaacagccatttctccaagcagtgagctctattagattttcctgtgattcccaccaaaataacttctagttaatgacctcaactatacatgccactatacaatgcttcttctcagaaatacaaaagtgctgtcttcactttgccaccaccagtagacactgatgaatgctcaaat

SEQ ID NO: 734557 - DNA, 514 bp, Homo sapiens
acatatttaacttatttggctagaataactgtcccatattaccaagagcaaataatcatttctccttcagacagatataaagtcttgatattttgggactgtattgtgtttctgtttcctttagaagaaatttctgcttatggggatggtcagyggattggcaatctccaactcacttttattgttataaaaaggtagaatttgagtttatattttataataaatctttcagaaaaccagtgcttgtttttcattcatcttgaaatcaaaagatacgaggtacagaagagactctcaaacaggcttatcacccctgtatgttacagctggaaagacagagatccagaaaaattatgtgactttcctgagctcgtgtagctagatgtggaccctcaagaaaacacattttgtataggtctctgtgaatccgatggcatctctaggaaaacaggctgcctttcttcttggtaagatatcattgcagaagcactgtgtacattgtaacgactgtcca

SEQ ID NO: 734558 - DNA, 580 bp, Homo sapiens
tctattgtgtaacaaattgcccccagaatttagtagcttaagacagtttctttaggtgaggattgtgggagcagtctggctgggtggtctgacccagtgtctctcagaaagttggtcttgaactcctgacctcagatgatccaaccgcctcagcctcctaaagtactgggattacaggtgtgaaccaccacgcccaacttctcatamagttggaatcatctgaagacctgattggagctggaggacttgctctcaaggtcacacaccaatggttctttgccaactgtgagctggaggccaaagttcctcacctcattgacctcttcacagggctgcttcagtgtcctgattacatggcagacggattccctcacaaacaattaaacctggagagagaaaacaaggcagaatcctcaataatctcagaaaccatatacaaggaaatcatatacttcctctatatttatattattcacatgcagcaattacgatacgatgtgggaaagaagggagtgaataccgggaagtagggattactgggagctggctagcatcggtttctgtgggattgttcattttc

SEQ ID NO: 734559 - DNA, 621 bp, Homo sapiens
catccaaagcctaatccagagcaaggttctaactttcttcagttctatgaagactgagagagatgacaaagctgcaaaacaaaagtcagtagctagctgaggttggttcctgaggtttagtgaaagaagccacctccagaacataaaagtgcacagtgaagcaacaagtgctgatgtagaaaagctgcagcaagttatccagaggatctagctaagatcactgatgaaggtggtcacactaacaacagatttccaatgtagacaaaacaaccttccattagaagaagatgccatctaaggctttcatagctagagaggaaaagtcaatgcctagcttcaaagcttcaaggaacaggctgactctsttgttaggggctaatgcagttggagactttaagttgaagccaatgctcatttgccatttggaaaattctggggtgcttaagaattatgccaaagctactccacctgtctgctataaatgaagcaacaaagcctgaatgacagcacgtttgtttatggtatggtttactaaatatattgagcccactattgagatctattgctcagaaaaaattccttttgaaatattactgctcactgacagtgcatctggtcacc

SEQ ID NO: 734560 - DNA, 626 bp, Homo sapiens
ggtgttgacttctctctagctatgaaagtcctagaaggcatcttcttccaatagaaggctgcttcatgtacattgaaaatgtattgtttagtttagccaccttcaccaattatctaagctagagctttttctggataacatggtgcaggttctacatcagcacttgctgcttcaccttgcacctttatattatggagatggcttcttttcttaaaccttataaacaacctctactagctaccaacttttcttctgcagcttcctcacctctctcagccttcayagaattgaagagagttaggatcttgttctgaattaggctttggcttaagggaatgtggccggtttgggcttctatccagaccaatacaacttttccgtatcagcaacaaagctgtttcactttcttatctttcatgtgttcactggagtagcacttttaatttccttcaggaacttttcctttccatccacagcttggttgtttggtacaagaagcctagcttttggcctatctcagctttccacatgccttcctcactaaacttaatgagttctagcttttcatttaatttgagagatgtgtagctctccttttcatttaacacttagagaccattgtaggg

SEQ ID NO: 734561 - DNA, 600 bp, Homo sapiens
tttttgtattgacattgtattgcctattgtctctgtcagatttttgtattggcattatgctaacttggcaaattaaacgagagcctttaaagaaattatatggtctggaacattttatgtaacaaaagaatagttgatttcttaaaattttgaaagaatttgcccgtaaaaccttccgattctaatctcttggcaaacttttccaatttcttccatagcatttgcttgttcaacttttggatataatttyggtagtctacattttcttagaaaattatctattttacagagatttgatgttttagatttgttgtagtgtggcacatgaaattctggtttaagtaaaaatattttcatgtctgtagatttatgtacatttttactcctaattttgaatttttattttttgtcttaaaattatgttctattctttttcttttaaaaatacattcacttccattttatttttgttaattgcatcttatttactttttctaaattatttgatttgaaattttagtttattcttatctttttaaaattactgatgaaaccatttaaggctgtatgttttttctctgactctggatttgagagcat

SEQ ID NO: 734562 - DNA, 510 bp, Homo sapiens
ggtcttgaactcccgacctcaggtgatccgcccacctcagcctcccaaagtgctgggattacaggcgtgagccactgcgcctggcgagagcacactttttaaaagggagggaagattgggcctttgaaagcatcttgtttrggccctcaaagaatatagactttatttatttacgatggagacttgctgcaacctctacctcctgggttcaagcaattctctgcctcagcctcccgagtagctgggattgcaggtgcccgccactatgcccagctaatttttgtgtttttagtagagactggatttcaccatcttggccaggctagttttgaacccctgacctcatgatccactcacctcggcctcccaaagtgctgggattacaggtgtgagatgctgcgcccggcctaagaaagtagtctttatttcccttcctgatgtgggaaatctgagctcctgatatgtgtgtactgggtctggatcctggattcttaggagtgacccggatgt

SEQ ID NO: 734563 - DNA, 550 bp, Homo sapiens
agggaaagaacatgtgtgttttaccagtggaatgcattctttgtgttatctcttcgatttttaacattttatgtttccagtttataaactttgcctccagtttgatgaagaaaatttagctattagaaagtatttaaaatctcaaaagtatgacattttaaaatgttagcaggtttaaagataacttagtttttcaactcttaacccaaaattatacttgtatactataatttgtgttgaattacttggtattatttatcatcctagtaagatctattttatataatttgattcactttttatattgaattatgttaattgtttttgtaatacacctttcatatttcttcaaagaaaactagtgttgggttattgctaattttgcttcgtggtttggttatttacrtataaaaattatattgttttaaaaattgcaaagtgatcgtttattgacacatcagcaagaattaatgttgaaatgcaagttttttcccctatccttaactaagtgtgtagatatctttgttttgtttctttaatagatagcaaa

SEQ ID NO: 734564 - DNA, 429 bp, Homo sapiens
ccatatataaaaatcaattcagacggattaaagacttaaatgcaaaacctaaaactaaaaaaagttgaagaaaacctagggaataccattctagacatatgccctggcaaagatttcatgatgaagacaccaaaagcaattgcaacaatgaccaaaaaaaaaaatgacaaatgggacctaatttaactgaagagcttctgcacacattagaacgatcaacagmgtaaatagacaacccacagaatgagagaaaatatttgcaaactatgaatctgacaaaggaccaatatccagaatctgtaaggaacctaaacaaattaacaagctaaaagcaggccaggtgcggtggctcacgcttataatcccagcactttgggaggccgaggcgggcggatcatgaggtcaggagatcaagaccacggtgaaacc

SEQ ID NO: 734565 - DNA, 429 bp, Homo sapiens
ccatatataaaaatcaattcagacggattaaagacttaaatgcaaaacctaaaactaaaaaaagttgaagaaaacctagggaataccattctagacatatgccctggcaaagatttcatgatgaagacaccaaaagcaattgcaacaatgaccaaaaaaaaaaatgacaaatgggacctaatttaactgaagagcttctgcacacattagaacgatcaacagcgtaaatagacaacccacagaatgagagaaaatatttgcaaactrtgaatctgacaaaggaccaatatccagaatctgtaaggaacctaaacaaattaacaagctaaaagcaggccaggtgcggtggctcacgcttataatcccagcactttgggaggccgaggcgggcggatcatgaggtcaggagatcaagaccacggtgaaacc

SEQ ID NO: 734566 - DNA, 612 bp, Homo sapiens
ttcttcagtgagaaaagagtacaagatttcttgcctcttccaagaaagttattctaatcaagtcatttgagaagtttctataaatactgtttggaaagttctaaaacagtattctttaattaattctgtattcctgacttcacattttaracatccttatttcattttcactccgttattccgaatttataaatttgaactgtcttcttaacttcacctgattttgttccatgacttttagctcattagtgtcatgtgtgttcttctatgaggagcaaaccttaaaaaattggtgttactttttcttcaaaatgtcagtgtacaattttgttgtatttacttaaataattttccagagacagacttggtttggaacctgacatttaacagatgtgtttctgaatccaagataacctttaaaaaaacaaaaacaaaaagacaaaaacagaggtgtggccctgggacaagttgtttcacttctgtaagtctcagctttctcctttatgaagtcatgcctggaattctgctattaattatatatttaaaacaaaaaaaaatcagtatgtcgaagagatatcggcgctcctatgtttattgcagcactatgcacga

SEQ ID NO: 734567 - DNA, 595 bp, Homo sapiens
ccctactcccagtggagcagaagactggatccatttcatggactcactaggggtggcttacatttccttaacaccaaactggctaattaaaagatggctttagccatttgctccctttcctactctgggctatattctctgagagccaccatttctgcccagcacttttttttttttttttttttgagacagggkctcactctgtcacccaggctggagtgcagtggtgccatctcagcttactgtaacctccacctcccaggttcaagcaattctcctgcctcagcctcccgagtagctgggattacaggcccccaccaccacgcccggctaatttttgtatttttagtagagacggggtttcaccatgttggccaggctggtctcgaactcctggcctcaagtgatccacctgccccagcctctcaaagtgctgggattacaggtgtgagccactgtgtccggcctctgtccagcacttctaaccctcctccagcaactacttcctcttgttcctccatgcctgggatatgggctctattccaggcactactgctggttcctccactaggatctgaaccttcctgtcacccat

SEQ ID NO: 734568 - DNA, 521 bp, Homo sapiens
ggtctcaatttatatgtgctttccctttggagactcatagatgtttctgcctcagttacccatctgggccatcaagaattcaaacatttgttgaggggcagcaaagtactcagcatgaggttgggcacaacgtagggctcaaatgtgcatgacttcttaaataagttgtttgctggtaccaggtaggatgtggttaagttttacttcctggtgtagactggaagtgctgacagggagagggagatgaggctggagcagctggagaaggcttcatgagrggctactgtgactgtacagatgtatgaaatgtgagcacaacctcttaccaggaagaccaatgggatgctgtctaacctagcttctggatcactcacatagaccattggctgctgactataatagctggctgtttgcaggggactgtggatgagtaagaatcctgatgcatgatggaccatgagtaacttctcaaaagcagccaatccatctatccatctctgatgcatcatgtaggtgtcatc

SEQ ID NO: 734569 - DNA, 642 bp, Homo sapiens
tcatataaaataaggtcaaaacaaccaggactactttgtctaaaattatttgtcttattttgctcataggaattcatagaggttttgagatagagcacttttcaatgcgctggacacggtgttctgttttgggtacagtggaaatgactttcctttattttattgcttgtttggcttatcgagggagctgagccttacctaacaagtagctcacatctcttgtcagaggcagtaaatcgatctcgatcaagtttgaaactgagtgaattgttatctaatctgttattctgtggaaatctttctcttctgctacagagaagctaagagacaagttttcccatcactctaggtgtcattctgtttaatcctaacatctataataaraccaataaatagctgtttgttccgatccatagtctcaggctgcctctctccaaagaggctgaagccacttggccttgagatcgcccatctgcactgtgcacttctgattagtgttttggaactccattatacaggtgcaatcttctgggctcagcagttccggttgctctgcccaacagtggtggatcctgaaactgattttcacaccccagtgtagagatgaacgcatgacaggccccccacacagatgtaagaact

SEQ ID NO: 734570 - DNA, 606 bp, Homo sapiens
ttctgacactaaatttggtgtagtttattatacagcaatagacaactggaacacagcccatttaatttttgttttaagacaggatcctgctctgtcacccagagtgcagtggtgcaatcacatttcactgcagctttgatcccctgggctcaagcaactctcccaactcagcctcctgagaagctggaactacaggcacgtgccaccatgcctggctaatttaaaaacttcttttgtagagatgaggtcttgctatgttacccaagctggtctcaagctcctgggctcaagagatccacctgcctcagcttcccaaagtgctggagtgacaggcatgagccaccaggcccagcmccatttaagtaatgttttcatctaacacattcatttttatggtcatctgaccccaagagccttcttggggtaaagtggatgctgcctgcctgcagtcccaggaggatactccaaggccattcagtgtcagaaggtgggagcaacacctcctaggtcgtttgccatttcttctttcctgaggggggctgccacatccttggctggtggcacacttgatagaggactccaatgcactgggagaacaaacagctg

SEQ ID NO: 734571 - DNA, 450 bp, Homo sapiens
cagcactttgggaggcaaaggtgggaggattatgtgaagccaggagttcaaggctagccttgacaacatggtgaaactcttgtctctacaaaacataaaaaataaataaataaataaataaataaataaataataaaatattagccgagcatggtggcacatgtctgtagtcccagctactcgggagastgaggcaggagaatcacttgaggccaagagttcagttcagtgagccatgatcacaccactgcactccagcctgggcaacagagcgagaccctgtttcaaacaaacaaacaaacaacaaataaatcaacaaacaaaatgttttacggatcctctgaggattgtagtgctttgagagcaacatggtatttggccatggtatttggccataaccaaaggagcaaacctaacctgttcgctccaatagcccattcaaacctcaaa

SEQ ID NO: 734572 - DNA, 614 bp, Homo sapiens
tgctctgctacatttggagagaaaaaggcaaggctgaggacgacaaaagtccagacaggggagtgctctgtgcagaaaagaagcactgttgtgctctgaggttgtgcaaaggagatcattgtgtgagaagcatggagacagagcctgaaggttcaaggaggatagaggagctctacgagtataagacaccagctctgcaattgagtctgctcccagctacacgggaggcaactcgactcacatctggctgagtgtctgatgctgttgtggacagtgttgctataacctgctgagacacgcagagatcccagcacaacaattttcctctttttattccttaaaaaccattttagttcaaaaacaaaatttcaaataataaaaaaaattytcctcccagctatcacagtcctcagtatctactaaaaggagttgaaaacatatccacaaaaacacctgcacatgtatgtttataacagcttcattcataattgccaaaacctggaagcaaccaagatgtcctttaggaggcgagtggataaataaactgcagcacatccagacaatagaatattattcagcactaaaaagaaacaggctacattaaccagtcaatg

SEQ ID NO: 734573 - DNA, 594 bp, Homo sapiens
cagttctcggaagttgatctgtaatgggcactatttgggtactttgtacactgcaggggttctgagcacaagctttggaatccgagagacctgggttttagtcacaactcagctacaaactaactgtatgacctgagcaagttatttctccttcgagcctcagtttcactggccgacaatgtggctaacamcaccagtctttctgagattgagtttgatgtaaaaaatgtttagctcaatgcccacatcatatctagtagatgattatattttagggcattattattattattaagggcaactatgattagggaatttatgcttgcaaagtggtgttgtgccttccagggatactttgattctttcactctgaaagaaagagcagagaggacctacctgtggacaaccagacacaaattagggcccaaagcaaagaagggtccaggatggagttcggaacacagacagggagaggtcatttgaggtctaggagaaggacaccctaaagctatcccttgaaaaccatgagtctatgagcagaggatcccaggggctgccacttggtactgcagaaccacaggagctgggagctaa

SEQ ID NO: 734574 - DNA, 528 bp, Homo sapiens
caccacgcccggctaattttttgtatttttagtagagatgggttttcaccgtgttggccgggatcatttcgatctcctgacctcgtgatccgcacgcctcagcctcccaaagtgctgggattacaggcgtgagccaccgcgcccggccaacaaatggtacttctagataccgttttatatggttctggccctccccrgtgaagttttatttaaagaaaaaagaattatcttggagagatacattcatggggtttaaaaaaaaatagaaaaaaaaagcacacagcgaaaaacgtctttatatcccagaggcaacttttcttgctagtttcttacatgcatagagttatgtgattatataacccttctcttatttacacttgctgttttcacatagtgccaatcattccatattagcatatatagattttatttctttaacatccacagagtaccccaaagtatgtactatggacataccaacatttatttgacaactcttctattagtagatgtttgcatccccctttt

SEQ ID NO: 734575 - DNA, 577 bp, Homo sapiens
aggttagaaaaaacaatggaagaaatgatagcaaactagtccctgcacaaaccagggaagtaagtagtagatgctgtttaatcaccttaggatttaaccagagaaagtggaggcatctcctctttgcctcttggtcagttgcatcttctgtctttcttgtggaggtcaccccaatggaggtcaccccaagagctagggtaatcaaccattccagttggtttgacactgaggtttccccagatatgggattttcagtactaaaaccaggacagtcccaagcaactgagacagytggtcgcccaacctgtggtttttgttttgttttgtgtttttacagtgtatctgagatccatgttcacctcagggctcctaccttcttgtttcatttacatagcaatcaagtattcttgacagaaaagacagatcgatccttataaaatttaaccacagaaaagaatgcttatgagaacttctttgagaaaagacaaagccacatctaagctgtaaataaatcacggcagaaagcttttggaaactaaacattaatatttgggaaggataaaaatgagggctaaat

SEQ ID NO: 734576 - DNA, 625 bp, Homo sapiens
atcctttattcaaagaaaccaaggatccttaggaaaatgtctgattccagggctgaaacaggtaatatacaagttgcacttggaacatcttcttatgccagaaaataaggaaatgctcaatgaacaatgggaatatgtcaaaaggacacaaaaaccagcttgaaagggtcaaacttgcagtggtttaagcatagaaaataatatgctatttcttatagtaaaataccagctcataaaaatagaaccaatgatggaaatagacactcatcatgtggaaacttacacaaaggcasttgattcagtcaatggatgctaagaccagagttggaagtttgataaggaacaggatattgactaatttcagaaatgaaaatatgttcccacaaaacacaaataaattgcaaaaggcaaaatgttgaatttaagtaggcgggagctggcagacaatgtggttgagcaatcgaggttagcatcaccagtggtgatgatatgtgccactgggtgtgaggcactgagaaaaacaaagcagcacttctgtagaattactgcccagaatttataacctcactaaaaccatgatgaaacatctggtggacctggcttggtggtcattctactgaatgaa

SEQ ID NO: 734577 - DNA, 625 bp, Homo sapiens
atcctttattcaaagaaaccaaggatccttaggaaaatgtctgattccagggctgaaacaggtaatatacaagttgcacttggaacatcttcttatgccagaaaataaggaaatgctcaatgaacaatgggaatatgtcaaaaggacacaaaaaccagcttgaaagggtcaaacttgcagtggtttaagcatagaaaataatatgctatttcttatagtaaaataccagctcataaaaatagaaccaatgatggaaatagacactcatcatgtggaaacttacacaaaggcacttgattcagtcaatggatgctaagaccagagttggaagtttgataaggaacaggatattgactaatttcagaaatgaaaatatgttcccacaaaacacaaataaattgcaaaaggcaaaatgttgaatttaagtaggcrggagctggcagacaatgtggttgagcaatcgaggttagcatcaccagtggtgatgatatgtgccactgggtgtgaggcactgagaaaaacaaagcagcacttctgtagaattactgcccagaatttataacctcactaaaaccatgatgaaacatctggtggacctggcttggtggtcattctactgaatgaa

SEQ ID NO: 734578 - DNA, 525 bp, Homo sapiens
atactctatgccaccaaattgacctaaccatttttactttgtcttcttctgaaagtgctaccagttaactaaattgcatgaaaacagcgtgtttgaggtaacagaatgttctttttttttttttttttttttttttgttgttgttgttgttgttgttgaggcagagtctcgctctgtcgcccaggctggagtgcaatggcgctatctccgctcactgaaagctccgcctcccgggttcacgccattctcctgcctcagcctcccgagtagctgcgactacaggcgccggccaccacgcccagctaattttttttttgtatttttagtagagacggggtttcaccatgttagccaggatggtctcgatytcctgaccttgtgatccgcccacctgggcctcccaaagtgctgggattacaggcatgagccaccgtgcccggcccagaatgttctttcatttttacactagataagttgttacctactggggagtgtgcatcagaatcaagtgcattactttttagt

SEQ ID NO: 734579 - DNA, 525 bp, Homo sapiens
atactctatgccaccaaattgacctaaccatttttactttgtcttcttctgaaagtgctaccagttaactaaattgcatgaaaacagcgtgtttgaggtaacagaatgttctttttttttttttttttttttttttgttgttgttgttgttgttgttgaggcagagtctcgctctgtcgcccaggctggagtgcaatggcgctatctccgctcactgaaagctccgcctcccgggttcacgccattctcctgcctcagcctcccgagtagctgcgactacaggcgccggccaccacgcccagctaattttttttttgtatttttagtagagacggggtttcaccatgttagccaggatggtctcgatctcctgaccttgtgatccgcccrcctgggcctcccaaagtgctgggattacaggcatgagccaccgtgcccggcccagaatgttctttcatttttacactagataagttgttacctactggggagtgtgcatcagaatcaagtgcattactttttagt

SEQ ID NO: 734580 - DNA, 578 bp, Homo sapiens
cccgggttcgagcaattctcttgcctcagcttcctgagtagctgggattacaggcaggcaccccatgcctggccaatttttgtatttttagtagagatggggtttcacaatgttggtcaggctggtcttgaactcctgaccctgtgatccrcccgcctcggcttcccaaagtggtgggattataggcgtgagccactgcgcccggctgatagtttcttttgcttttcagagactgtttagtttaattaggtcccacttgtcaatttttttttttttttgttactgtttttggaggcttcataatgaagtctttgcctgggtcaatgtccagaatgttatttcctagattttcttcctgggtttttatagttttaagttttacatttaagtctttaatccatcttgagttgatttttgtacatggtgtaaggaaagggtccagtttcaatcttctgcatatggctagccagttatcccagcactatttatcgaatagagagaccttttcctgttccttgtttttgtcagttttgtcaaagatcagatagttgtagatgtgtggctttatttctgtgttc

SEQ ID NO: 734581 - DNA, 565 bp, Homo sapiens
atgtagtaggcattcaatgaatacttgttaaattgaattaatcaaggacacagactcaggattagaaccttgctctcccagcttctagtccagtgttctgtgaaccttgctgtctctctctctctctctctctctctgtgtgtgtgtgtgtgtgtgtgtgtgagagagagagagagagagagagagagagagagagggacagacagacaaagacagagagtaaactttggaatatcaaataattctagtagttttggtccagtggtctgggattttacattatcatgcatactagtaggaaaactcagacaaatcagaattatttcactggataaactagaggcagatgtatctggcattcacaatggttttattttatgggctacaytgagggaaccacctcaaacttgggtggggcagtagctactcagcccagccaaatattgccatggggcaatgcaggcccaagatagcctgtatcctctgcttcctcaagagaagctggaaatctgaatttttaggtgatatctacaaaatttttaatgttgtctcaaaaatttaaaat

SEQ ID NO: 734582 - DNA, 565 bp, Homo sapiens
atgtagtaggcattcaatgaatacttgttaaattgaattaatcaaggacacagactcaggattagaaccttgctctcccagcttctagtccagtgttctgtgaaccttgctgtctctctctctctctctctctctctgtgtgtgtgtgtgtgtgtgtgtgtgagagagagagagagagagagagagagagagagagggacagacagacaaagacagagagtaaactttggaatatcaaataattctagtagttttggtccagtggtctgggattttacattatcatgcatactagtaggaaaactcagacaaatcagaattatttcactggataaactagaggcagatgtatctggcattcacaatggttttattttatgggctacattgagggaaccamctcaaacttgggtggggcagtagctactcagcccagccaaatattgccatggggcaatgcaggcccaagatagcctgtatcctctgcttcctcaagagaagctggaaatctgaatttttaggtgatatctacaaaatttttaatgttgtctcaaaaatttaaaat

SEQ ID NO: 734583 - DNA, 583 bp, Homo sapiens
gtggcagattcccttcccaaagaggattgcagcattatctccctcccacgtgtgcttctttacaaagtgactttgagcccttcctgttagaggtgaaatgtatgtttcctcgccctgattctgggcaggtttgtgatgacagtggaagtcatgctaaatgatttctgaagctatatataaagctaatatagcctaagcaagtgttactaaggttttataaagtcatacrgcctttgaatttttctttatcttggaactcagccatcataatgtgaagaagccgaagcagcctgtgaagaggcgctagtggaaaggaactcaggtgcccctgccctcagtcccagctgaactctcagctgacagccatcaccaacttgccagccacaggagtgagccaacttgagagtggatctttcagtcccagtggagccatctcagctgacacaccatggtaaaaagatgaaccatccttgctgatccttgccagtgctgcagatacataagcaaaataaatgtttttgttgttttaagccactatattttggagtgttttgttatactggtgtgttaaacaggcctctat

SEQ ID NO: 734584 - DNA, 706 bp, Homo sapiens
cctctctttgtgtgtggatcctaatctttccagagagtgtggagttttaattgcaaaaaggatgtggatgctttagaatccaggtggatggaggtactctgaatatattctactgtggagtgattgtttgcatccataagcaactggatctccattagcagtctccttcagtccaggagtcctcatgaattgtgacagagaactaagtgtggcaccgtcacaaactccgagaggaaacatttcaactccctctttggcctttactggtagctctgccattgggtactctccctaaggaaggaggcatttctgttcaggaaggaggaagcaggtatggaagaatttcactttttattattcctgagcctttagctcactggtcacaggcctaggcaaatgacaactttctgaggcacctgttttctagccgtttgtatgctccccactgccatggaggccagcatggatgtmaatagatgtagaaaattctacaaactctatttagtaagtaaccaagtagaatagttgtttaaacaaaaatcagtgcccagggataatgatacatgccatattttgcccagtgtgagtgtattaatcttctagttgaaggagtgaattggtattatcctgatatgatgtcatactcagagtttcctgcctctattttccatctggagtgaaatcaagaagattaggatgtgagcat

SEQ ID NO: 734585 - DNA, 536 bp, Homo sapiens
gagtgtcctttttttcaatcctccctgcaattggctacttttaggatcctgctgatgggtgcattttacagagcgctgattggtgcattttactgagcgctgattggcgcatttcacaatgctcttgctagctacagagcgctgatcggtgtgtttttacagagcgctgactggtgcattttacaatccccttgctaagacagaaaagttcttcaagtmcccacttgacccaggaagtccatctggcttcacctctcattgagatcttggctcactgcaacctccacctcccaggttcaaaagattctcctgcttcagcctcccgagtagctgggactacaggtgcctgccacaatgcctggctaatttttgtatttttagtagagatggggtttcaccatgttggccaggatggtctccatctcttgacctcgtgatctgcccacctcggcctcccaaagtgctgggattacaggcgtgagccaccgcacccagccctttgtctatattttaaaagatatagatcgaacttcaaa

SEQ ID NO: 734586 - DNA, 666 bp, Homo sapiens
gagtctggcttctttcacttggcataatgcatttgagatttgtccatgtttcagtgtatatcagtagttcattcctttttattgctgagtagtattctgttgtatggatgtaccacaatttgtttatcacttcaccagctgaggtcagaagtttaagaccagcctggccaacatggtgaaaccccgtctctactaaaaatacaaaaaattaaccaggcgtggtggtgggtgcctgtaatcccagctacttgggaggttgaggcaggagtattgcttgaacctgggaggcagaggttgcagtgagccgagattgcaccattgcactccagcctgggtaacaagagtgaaactctgtctcaaaaaaaaaaaaaaaaaagagccatattgtttgtttgtttgtttgtttgtttgtttatttatttatttattgagacaggatcttcttctgttgcccaggctggatggaacyggcaccatcatagctcactacagccttgaccttttgtgctcaagcaatcctcccatctcagcctcccaagtaactgggactacaggtatgcacgaccatgcccagctaattaaaacaaatttttttttagagacagggtcttactatgttgcccaggctggtctcaaactcctgggctcacgggatccttccacctc

SEQ ID NO: 734587 - DNA, 518 bp, Homo sapiens
tctttagttttgggatttaactaagatcagtatttcacaggtttgtatacattattaaggcacactagcaacagtaacatttacattgttttggtgttcacttgtcataaacagcagaatcatgacttagaataattgattcagatacaagatatatgtcaagcttgtcattctttgttgtatctcacatttctgtattgtctggcagacacatttgaagatgataactgtttcagctctggaaaggatgatatggattttgctgggtaacatacttctatcttctccttcctatttttctagcatttcccaaattgwtgtccctcagaacagtagaccacagaactatatgataaaggggaaatgtagtcaagtaagtttgggaagtggatacagtactttcatctttgacatttataaagcacgttattatttactctgagcagtctgcaaagctttctccttctgagtcatttaatagcctactgccctagtagtcagcaaaacactactttaga

SEQ ID NO: 734588 - DNA, 497 bp, Homo sapiens
tttgtgccttatgatttgtgtattttttatcttctttaagaaatactttatcttaggccaggcgtggtggctcacgcctgtaatcccagcactttgggaggccgaagtgggtggatcccctgaggtcaggagttcgagaccagcctggccaacatggcgaaaccccatctctactaaagatacaaaaattagctgggcrtggtggtgggcgcctgtaatcccagctactgaggaggctgaggctagagaatcgcttgaacccaggaggtagaggttgcagtgagccgagatcacactccagcctgggtgacaagagtgaaactctatctcaaaaaaaaaaaaaaagagaaatactttacttaactcataaagatattttcttacattttaagactcttaagacttttttcacatttaatggacttcctctattaatataaaactctgaaattcatttaaaattttcccagaaccttccagtctgggaacagatacag

SEQ ID NO: 734589 - DNA, 607 bp, Homo sapiens
ttggttcatcgcccaaagtactaggctagactttgcggttggtaacttccctaaggagttctgctttatagaggaaactagggcagatttttaaaattaaaaataaagctaactttttcactagaaaaagttacattacagtgttacaaagtgataagactggttcaaagagaaggcagacattacttcttgtggggtcagcaggggaagcttcctaaaggaagtgcaatttgagctatacctgaaaggatggaatggattactgacagaagtgctgaatggatgagggttggggaacaacctttcatgcaagtacaggagcactaggatgaayaaacagggaagcaggaaatggactcttaaggaattatgaataaattaagttggctggtgtatgtaggtatgttgagggttttataacaggtcagcaactttttccgtaaactttttagtaagtaccttaggctttgtagaccagcagtccctaacctttttggcaccagggactggttttgtggaagagtttttccacggaggtagggggttgggagatggtttcggaatgaaccgtgtcagatcatcagattctcataaggaacacacaacc

SEQ ID NO: 734590 - DNA, 598 bp, Homo sapiens
gatgctcgctgggaaatacatgcatacacacataaccttgtatacccaaagcacttcattatggctcctaatccagatgatatggaagaagatccttaatcactgagctaacctaaataaggaaggatttcattttatggactgatattttgctgtgtaacttgttctttgtagattgtcatctgcagtgctgcaaagatatgaagaaatatgataacgaataagtgacaccagtactgtagttcataatgagtaggtacaggcgggaaactgaataataagaagtcataatggaatcaaggtgaagctttttataaacttttttagcctaagcaataactggttttgtattttttcttaatccttcactttaatacaataggctcacttaatttgtcttcccatttctctttatatatatatatataaatataaatatatgtttgtttgtttttttaakgaaaaacaagtcaagctagcatccagttactatatagcttggctaaattatacaagacttacaagattgattactcgacaggcttgtatttaagaggtaactgtgaggttaccattatgtgatgttactataaggact

SEQ ID NO: 734591 - DNA, 619 bp, Homo sapiens
ttcctcaatgagcatttcttagttttaataaaaataaattcttaatatgagtatgttctctacactcaacttttcacctgactccctttttattatacaaaactccttagttctttgatgctatcccacttgatatacaaagacattttaatctcttttataaaaaggcaaatgccctcccaatccccccagatggcctagagcattatcatttaatgtaaaattacttttgtatcacaaatcatataaacacattcctctaggttgaaagcatgggaaagggattttttttgtctgcctagaacagtgccaggcacrtaacagtcaatgaaaatattgtgctgaaagaacaaatggtataaatccaataacacgaagcagaccctattagacaattatattatcatgccctctgttgtgccagaaagtatcccaatgatatgccctacatcaagaaacgctggcttataaactagtgccaatgtattgaaaccgttattaccccaagatgtccacttaactaaggggccacaataagtgtgtactagcttaaaaagcaaaatcacactaagtattaacacttgtcaacctgactagtatatatgaaatttcactactt

SEQ ID NO: 734592 - DNA, 520 bp, Homo sapiens
catagcactttataatgtaatatataccttagaacagtatatttctattttcttcctattgtcatttttatattttatttctacatgcagtcaattattgttattcatagtagttatattctgtaaagtcactgagaacactgaattagctaatagtgaacgattgctcctagtaggacctagtggaacctttgttcctagtgggaggataggttcctgcaagcctctggtcacattttcgtcaaccaataaatacataaccttgttttatgtgtttctgtttgaagacactttatttaatatatatagttgattcattaacattgtactcacagctaacagygctgttacttatacctgaatgttattgaacacgtgtagttactctataagggacatcataaactttttgcacttgagaacactagactgcttcagcactgtgcttgggagccattttaaacagaagagtcactaacaaaagatgaaaaaaatgcagaaaatatggcactaaatagac

SEQ ID NO: 734593 - DNA, 520 bp, Homo sapiens
catagcactttataatgtaatatataccttagaacagtatatttctattttcttcctattgtcatttttatattttatttctacatgcagtcaattattgttattcatagtagttatattctgtaaagtcactgagaacactgaattagctaatagtgaacgattgctcctagtaggacctagtggaacctttgttcctagtgggaggataggttcctgcaagcctctggtcacattttcgtcaaccaataaatacataaccttgttttatgtgtttctgtttgaagacactttatttaatatatatagttgattcattaacattgtactcacagctaacagcgctrttacttatacctgaatgttattgaacacgtgtagttactctataagggacatcataaactttttgcacttgagaacactagactgcttcagcactgtgcttgggagccattttaaacagaagagtcactaacaaaagatgaaaaaaatgcagaaaatatggcactaaatagac

SEQ ID NO: 734594 - DNA, 596 bp, Homo sapiens
gctccactgattttatttctagtaatttatctgaatgatgtattcaatgatatatgaacaaagaggttcatggcaggactatttataatagaaagaaagaaagagaacagcctacatatccataaatacagggacaggttagagaaattatgatgtatctataaagtggaatattatgtattcaaatgaaaatgtaagaattctaaatgaacagttaagaataaagatattgccctagaaaaatgtctaccaaaaaaattttaagaaagtaattttggctgggtgtggtggctcatgcgcctgtaatcccagcactttgggaggccarcgcaggcagatagcttgaacccaggagttcaagaccagcttggacaacagggtgaaaccctcttctctacaaaaaatacaaaaattagccaggcatggtgttgcacacctgtgctcccacctactcaggaggctgaagtgggaggatcgcctgacctgggaggttgaggctgctgtgagctttgatcatgccacagcactgcagcctgggtgacagagacattatctcaaaagaaaaaaagtaattttacagcgtgtgtcatcccatt

SEQ ID NO: 734595 - DNA, 618 bp, Homo sapiens
gtgagacctcgtctcaaaaaaaagtgcattctgaatgctccactgattttatttctagtaatttatctgaatgatgtattcaatgatatatgaacaaagaggttcatggcaggactatttataatagaaagaaagaaagagaacagcctacatatccataaatacagggacaggttagagaaattatgatgtatctataaagtggaatattatgtattcaaatgaaaatgtaagaattctaaatgaacagttaagaataaagatattgccctagaaaaatgtctaccaaaaaaattttaagaaagtaattttggctgggtgtggtggctcatgcgcctgtaatcccagcactttgggaggccagcgcaggcagatagcttgaacccaggagttcaagaccagcttggacaacagggtgaaaccctcttctctacaaaaaatacaaawattagccaggcatggtgttgcacacctgtgctcccacctactcaggaggctgaagtgggaggatcgcctgacctgggaggttgaggctgctgtgagctttgatcatgccacagcactgcagcctgggtgacagagacattatctcaaaagaaaaaaagtaattttacagcg

SEQ ID NO: 734596 - DNA, 610 bp, Homo sapiens
cttagtgggacaagatgtggaggtggaagacagtgatattggtcatcctgaccctgtgtaggcctaggctaacatatgtatttctgtcttcatttttaacaaaaaaagtttaaaaagtaaaaaaataaaaaataaaacatttttaaaataagaaaaagcttatagagtgaggatataaaggctgggcatagtggctcacacctataatcccaaaaatttggtgagccaaggtgggaagataacttgaggccagaagtttgagaccagcctgagcaacatagcaagaccgtgtctctacaaataaaaaaaaactttaaattagccaggtgtggtggcatgyacctgtagtcccagctactcaggaaggtgagacaggaggatcacttgagtccaggaattcaggctcagcagtgagctatgattgcactactgcacactctagcctgggcaacaaagtgagaccctgcctcttaaaaaaaaaaaaaaaagaacaagaatataaaaaaagaaaatagttttgtataactatacaacatgtttctgttttaaactgttattataagagtcaaaagtttaaaaatttttaagtttataaagttaaaaagttaca

SEQ ID NO: 734597 - DNA, 584 bp, Homo sapiens
cccttatccgtggggataaattccaagaacctcagtggatttctgaaaccgcaggtggtgccaaacctggttgctgctaatggaaacacgtttctgttcatttcttccacaaagttaatgccttttctatcttatttatcactcactgtagccttaacatttgtagctaaggtgtaacagcaaaactggcacaaatttktttttccttcttcacaatttaatggatagaagacttattcttactgtagatcttagcatcctcagcataggattttttttctttctttcttaagtccagaactttcatcttttcacctaaaggaagtagtttataccttctttttggtgtattcgaatggctagcatcgttactcttgccatttggagccattattaagtaaaagaagggttacttgaacacagcactgggttgctgcaagagtccatttgataaccgcgccagttactattaataagtgactgactggagggtagtgtacacagctttccaagtcaccaaggacatgattccagaggcagtgtagcctagcgactatggctctgtggtcctactgcctagattt

SEQ ID NO: 734598 - DNA, 584 bp, Homo sapiens
cccttatccgtggggataaattccaagaacctcagtggatttctgaaaccgcaggtggtgccaaacctggttgctgctaatggaaacacgtttctgttcatttcttccacaaagttaatgccttttctatcttatttatcactcactgtagccttaacatttgtagctaaggtgtaacagcaaaactggcacaaatttgtttttccttcttcacaatttaatggatagaagacttattcttactgtagatcttagcatcctcagcataggattttttttctttctttmttaagtccagaactttcatcttttcacctaaaggaagtagtttataccttctttttggtgtattcgaatggctagcatcgttactcttgccatttggagccattattaagtaaaagaagggttacttgaacacagcactgggttgctgcaagagtccatttgataaccgcgccagttactattaataagtgactgactggagggtagtgtacacagctttccaagtcaccaaggacatgattccagaggcagtgtagcctagcgactatggctctgtggtcctactgcctagattt

SEQ ID NO: 734599 - DNA, 604 bp, Homo sapiens
gggatgttttgttagattcaattttattgacttcttgtgaatatggaaaaattggaatttaaatgaaaaatggttcatctattaaactaaagagagacacttctgttctttgaagacattattatacctattttagctttttcattagtagaggaagttttgctatattatcctagatcatgctattgcttctacattgtgctaataatcattttaaatctatattctaaaccactattttttttagctccataaggttatacaaactcaaatttggcaaattgtctgttacatgtaagtaaatattttatgtttacttaaatataaatataaaccctgtctcattctgttgcctaggccggaatgccrtggtgtgatcatgattcactgcagcctccacctcctggatttaagcaatcctcccacttcagcttccctagtagctgggactacaggtgtgcacaaccagacccagctaatttttacattttttgtagagacagggttttaccatgttgcccatggtgatcttatactccaggctcaaatgatcctcctgccttggcctccaaaagtgctggtattataggcataagccacaact

SEQ ID NO: 734600 - DNA, 575 bp, Homo sapiens
tttaaatgactatgatatagatgaaggaaatgctatggtgaggaaattcctggaataaaaaaataacaaaatgttgggatttgacaactaccttccaatgataaattttatatttgaagatttttcatgaggtttaaattctaaaatttgaaaatatttatagaaatcacaaaaatgaattatrtatcaattatcatctgtgcatgtttattttctattgaataaagaatagtatatgcagaaatcttatatttaagaatgcacagtgttaatttttattactaagtttttatagagatattcctaacgctagctaaatattaataaaagattattataatcagcacttcccttaagggatagtgtaggtatagaaggcattgccactaatcaatctaactaattaacaaaatcttttcttaatagttgattagcttcttaggtacttgcagatgttgtaaaatgatatttctctgtctagttaggaaccttctgaagtaattctatgtccaccactatcctgctgacagttcacttacgcctagttggcaagaaacacgacggggggtgaagca

SEQ ID NO: 734601 - DNA, 575 bp, Homo sapiens
tttaaatgactatgatatagatgaaggaaatgctatggtgaggaaattcctggaataaaaaaataacaaaatgttgggatttgacaactaccttccaatgataaattttatatttgaagatttttcatgaggtttaaattctaaaatttgaaaatatttatagaaatcacaaaaatgaattatatatcaattatcatctgtgcatgtttattttctattgaataaagaatagtatatgcagaaatcttatatttaagaatgcacagtgttaatttttattactaagtttttatagagatattcctaacgctagctaaatattaataaaagattattataatcagcacttcccttaagggatagtrtaggtatagaaggcattgccactaatcaatctaactaattaacaaaatcttttcttaatagttgattagcttcttaggtacttgcagatgttgtaaaatgatatttctctgtctagttaggaaccttctgaagtaattctatgtccaccactatcctgctgacagttcacttacgcctagttggcaagaaacacgacggggggtgaagca

SEQ ID NO: 734602 - DNA, 440 bp, Homo sapiens
aggctaatgtacacaacaaaggcgaggtctccctcactgtctatgggactgtggtcaaatttgctttgatatcccgaagtgattaggttgattggtatatctgggaagtgccatccatcttkccttcacaagagcctactgatctttcttaaactgtgtccttgagatgcaataacagcaaaggtgtttgggaggatggcaaggagtgacataggcctttagttgcaaaggtttggaatgaatttcccattttctccctaaaaacagcacttctcggagattactctttatctcttttgcaaagtgacgtctgcctttgcccattgcatggcctcactagacctgtgggcagaaggcaacagggctttcaatgtttttttttcagcagccatgcctgtggcatgctgggtttttgtcaagtcatttttttttaagtctat

SEQ ID NO: 734603 - DNA, 649 bp, Homo sapiens
tttttaaatttctgtttgaatagcattgaaatatttagatttgtatttgtttgccactttataattgcgtatatactgacttagtcctgagattttgtaatttagtacttggttcttaagatagcttccaaagtgcttaattttcatctagtgaccagtttaagtggaagtatctcattttatagactgtacatgaaatagtaattaggatgtagacttgtaaaacttgacctggcttatggtcctagcactttgcctctgactgatgtagaaatcctcctttatattgtctagtaccatccacacagtgaaggttcagagtgcamctcttctcaactttctcccaagtggaggaagtccaatagatcttgaactaatttttttttttctgttttggaatgtagcaagtaatccattggaataaaaccagcagttgagtaactcatgcaaaggtaatttagagcacaaattaaatctgtcagagcggtattagatttgcaaaagctcataaataacaaatgaaaggtcacagaactgtgaaaatgagagtgtacttcttcataaagagaaccgtattcagggacacgatctgcagtgcatattcaaatagcagcatcataaaatggaaacacaatgtcttttctaaatg

SEQ ID NO: 734604 - DNA, 585 bp, Homo sapiens
cactcttgtactaactcaagtgtagtcctataatctttctgcagttcattcgaatgttttttgatgtgttgattaattgtctcacaaatattcctgtttgaaaagacaaatctaggttcggattcaagcttcgctagttaaaacactctccctaatcttcttcaatcttctgcttgtaaaatgggataaatgagcttgttgcgagggtcagccatcagcaatgtaagcccatagcatgtgcaggtgcaggcatgtgcgagcatcaaatragcagtcctttcttgacgggtgtgctgggcactgtgctggcactggtgtgacaaagaccatgacttggaatgcacccctaaggggctccggtgcttatcaggctcaccctctttctctttttgttttgtaaactgccttgaaaatttaccaatatatcacatttttctgtcagcaagtagaactgtaggaaataatttttaatggttggttagtattacattttatgattgcgccataatttatttcatcatttcctctttcttattttttaggtgtttctagttttttactttgaaaatctttttatataaaagt

SEQ ID NO: 734605 - DNA, 508 bp, Homo sapiens
ccaaagtgtaagagaaatatctgtgagtccatactgacataaatgaatgtctgagtaagtaaacaaatagataagtctctagggcagaaaatgtccaaatattttatgtaaatatcccattctgagaaaagtagagtgtaacttcctactctttcagtgtgaactgcatatagtgacttccttccaaaaagttcagtacaggaaaagggagaaaagagtaattctggagtcaataaacttggcaaacactaccccagcctggagatcaaggtcaacgccaacagtaatgaattctattgatggtatgtacccttcataggatgtgatgagaayggccctttatctccatggtcttcctcctgaaactcagtaccccaatgtaatcatgagaaaaacaccagacaaattccatttaagggacaatctacaaagtacctgaccagtgggctcctcaaaactgtcaaagtcttcaaaaacaaggaaagactgagaaaatgtcacagccaag

SEQ ID NO: 734606 - DNA, 508 bp, Homo sapiens
ccaaagtgtaagagaaatatctgtgagtccatactgacataaatgaatgtctgagtaagtaaacaaatagataagtctctagggcagaaaatgtccaaatattttatgtaaatatcccattctgagaaaagtagagtgtaacttcctactctttcagtgtgaactgcatatagtgacttccttccaaaaagttcagtacaggaaaagggagaaaagagtaattctggagtcaataaacttggcaaacactaccccagcctggagatcaaggtcaacgccaacagtaatgaattctattgatggtatgtacccttcataggatgtgatgagaatggccctttatctccatggtcttcctcctgaaactcagtaccccaatstaatcatgagaaaaacaccagacaaattccatttaagggacaatctacaaagtacctgaccagtgggctcctcaaaactgtcaaagtcttcaaaaacaaggaaagactgagaaaatgtcacagccaag

SEQ ID NO: 734607 - DNA, 584 bp, Homo sapiens
acatggaaattctagggggtttggccaagaaaagccctggatgacaatatcaggagaattgcttggttgctctggagtaactttgatgtgatgaagctgaggtttctctgaaagagtggaaaaccccagggtgttrtgccggattacgggtcttgatcctccttagcagggcaattggaacttctaaatcctctctacccacccctcccactttaacctgaattctcctttccattccagctgcctccaagacgtcagagaatttccagccaagacagacggactccagaatgccactgtgggacaattttgaagcaagaaaaattaacgtgcaaagtcatcctggagtctggggaagaaagaggcatttcctcatgtttaacaagcgttggagctcaaagagtgagcttgggagcctgtcctgtcacggttctgatgggacatagggtcgcttacaaatgaaaagaaacgttttgtcacatggggcatcattccaggcctgaagtgagggagcctttatattgccacagtgttcattgttcccagcattgttgggctcacctggaatccagaacctaccaaga

SEQ ID NO: 734608 - DNA, 577 bp, Homo sapiens
gcagaatcagattcttattccaagtttaaaaagaggtgtgcaactttattaatggaaaattattttctctccaatcccattcaactcatgttgagaaacaacaactaaatatggtttgcagggtgccatgctgcccggctgccagagccccacgtgctgcgtgtaaacctgctccctggagcaaggaccacgacagcctctggaaagtcaagctgggggaaacctgtggattttttctaatcaagaatactttttaaaatgtgtgaatgatgaatgaagaaatgttttctgttgctatcttggagcccttctgaagagtaagcctgcagttccgggcttcacttcccggcagtgggaatttgcgaagcccgtctcctttcctgtgtcggcactgcaaggccttcaaatcsgtgctctgccccttcaacacccagggtggccttacagagcgttggccttctccctgctggctgattctcttctcagcagaaggcagcatgtactttggctgaacaataattagctttttaacatatatgtgaagatacaaataaaagagcattacaagggaccagga

SEQ ID NO: 734609 - DNA, 669 bp, Homo sapiens
tcttcaaataaccagctctcacatgaattaatagagtgagaactcactcatgaccatgggcagggcattaagccattcatgagagatccatgtctgtgacacaaacacctcccactggctcaatctccagcattggggtcacatttcaacatgggatttgggggggacaaacatccaaactgtatcactcctttaaaaaattagtgtgatttggaggagagggcaggggatacagagggtgagtgagtggggaaagagttacatttaactgaggacagtgagtggggtggagaatgcacatctgtgcaggggaagaagatacagacggaatatggtctatgggaaggaataggatggtcttgaaggcagaagcaaacccgagaaggttaatggctctcagtggagaaagcagacaagcctcattctgaaaacagattctgcctcagaaaggacgtgggttggtgacaatggcatgggttaaaaagcgggtyataggtatatatttaaatcagccccagttgtcagccaggctgcgaaagttatgaactccatcgttagttgcctttttgagtacttactgcatccccagcgctgtgcagttacctaatttgatccctgcaaaaatcctgatgcaaatgtcctcgagagacattccctgatcactctgtt

SEQ ID NO: 734610 - DNA, 525 bp, Homo sapiens
cgtccttaaggtcatcggacttgagttttgtggaatgagcaggaagaaatcaatctagagtgcctgttcgccaaacttcagatttcacatttaagatattatatgaactttcagccggacacagtggttcaagcctgtaatcccagcattttgggaggctgaggcaggcagatcacaaggtcaggagattgaggccatmctggctaacacagtgaaaccctgtctctactaaaaatacaaaaaattagccaggggtggtgtcaggtgcctgtagtcccagctactcaggaggctgaggcaggagaatggtgtgaacctgggaggtggagcttgcagtgagccgagatagcgccactgcactccagcctgggcaatagagagagactccatctcaaaaaaaagaaaaaaaaaagatattatatgagctttctggagtctcttccccataagtgtaatatgagggaagaactaataactattaagaagcatttattaattgccacataatgcatgttcctcttttgg

SEQ ID NO: 734611 - DNA, 596 bp, Homo sapiens
tggacagtagctacagatgaggtgctccgtgaagttggctgaagccagagcagaagtgatcaccaaatccatccctggaagagcaggtgtggtgagacgatttgaagtggtgcacagtggtgcctgatgaatagcctcagttaaacaaactgctcatttcttgcttgtctggaagcaatcaagcaactccagtttcttttctgaactggaaaaacacaaccatgatgatgaagccacggatctcaaatcgtcactcgagtcagcccagcactccagctacattccttactatgttaactttctcccacttcaaaataacttcgcactctctcttgtcactctgarcctattacatatcctcttttctataagtagcactctttgctgctaagtctgcctcataattcattgagaaaattgagttattctgccaggaactttctcatttttatactaccaaagttaccagcttacctgcatcggtacccatgccctctgtctacactctggctactgtggatgaagaatccctgcttctactagagaccaattcttacaaatagcaaagtccttgagaaagcaaaagatcttgaatt

SEQ ID NO: 734612 - DNA, 620 bp, Homo sapiens
acttcatccccaatgcaacagttttgagagatgggacctttgagaggtgtttggatcacggggacaatgccctcatcaatgaattaatagcattatcccagaagtgggttagttatggcagaagcagatttctgataaatggatcagtctgactttccttctctccctgctctctcacactctcttgcccttccaccttctgccttgagatgacacaacatgaaagctctcaccggatgtcagcaccataatcttggacttcctcacctccagaactgtgagaaatcaatttctttataaattactcagtctgtggtattctgttatagcaacacaaaatgggccaagacaggtgacctatatgttgaataacttatttttaaattttttgtcatataaacttccactctgatatatatgcgcaaaatttatgtacattgtcaaaccagaaaagtaaccttttaaaycttaaatgattaatatgcatataatgctcaagtgctatgaagctctctttaaaagttcttctatattctctttctaattttgaatcaagggctgaaaattaattcaataggctagcttttcttaatatatcaagtgagcaagcatgtttacac

SEQ ID NO: 734613 - DNA, 656 bp, Homo sapiens
caaggggcagaagtgctgagaaaagactgaaatggggtttcagggaatattgttcccttttgtcttcccagtttttttagtccattcttgcactgctataaaatgcctgaaactgggtaatttatacgaaaagaggtttaattggctaatggttccacaggctatacaggaagcctggtagcatctgcttctgggggggcctcagggagcttttactcatggtgggaggcagagctggagcaggtatcttcacatggctggagcaggaggaagggggctggggggagtgccacacacttttaaacarccaggtctcataagaactctgtcatgagaacagcaccagggggatggtactaaactgttagaaattgccctcatgatccagtgacctcccaccaagccccacctccagcatcacatttctgtatgagatttgggtggggacacagatacaaaccatatcaccaatttcaacaaaattcacagatcaggacttatgtaattaagtgtatatttagtttaattctttcagatcaactcctttcctgttcagagatatcccagaaccctgctgaacggcttgcagttttttgtcagcaggtggattctgtactttccctcgacttttgtgtttgttcttttccgtgtacaag

SEQ ID NO: 734614 - DNA, 620 bp, Homo sapiens
tgacatcagccatgtggcctagtatttggcagactagactatttctgactggtgaaaacaagtttagaacatctgaaacgctgaccctttgataagatttttttgtgttgaagtcttgtgtattcccaccttgattttgtttgtgtgtgaagaaatgttggttttatttttagagtatgatggttgggtaaagggatctctttttctaaatgggacatctctttttaatttgtgatatcaataacatggtcttacaaatcacaaactagctattatggcttgcaataatatgagttctgtttttgataaagtctgatttacttatctaaagaatacttagcagagaaatagatctcattaagcagatgctgatggaatcctggaaatacagttctaggatggtgggccaccaatgagcagttaacacaaaaagagtcttaccrtatagctcatttattatgctgtaattagcctatgaataaatccatttttttcagtgtaatgttcatttgtatctattttgaaaggacatcgtggctgggcacggtggctcgcgcctgtaatcccagcactttgggaggccgaggtgggctgatcacctgaggtcaggagttcgagac

SEQ ID NO: 734615 - DNA, 461 bp, Homo sapiens
agtagttgagatggctcagtaatgtctgcaaccacacatttaataaagaaaacctaaattacatctgcatgttacgaaattgaaactgcatcaacttttgttttttctagtgacaggaattggctttctgattgcgaaaacaaagctagtgtttttggaatgtgctttccaaatagaaagtgtgtcttagtttcctgataggtggattctgaaactttttatctagctttagattttatgaatttgtatctagcttaaacatgctcatagataatggagccaggtaatatagactaagtacttaaaarcaagtactcttctctttgtcacatttgaaagaaaatatattttatgaaaataatttaaaaaataaactgacttggttatttgagaatagtttctcataattgttattatatactctgaagcctaagatgttatctcatttgataatctgctta

SEQ ID NO: 734616 - DNA, 495 bp, Homo sapiens
atatccacaatctcagtttccaaagatatgtagcctcctcacagtgtgccctaaaaaaacaattatcttcagttaatatttacttccctatatttatatagatattgccaagcccttccctttcaagctgcagtctcacagaagagcaatggtgatgaaggttgcagctggtggcaggaacactgacattttctctaattgctcttcttcamactggcctaaagttaaactgtaatttagttaccagattggactcttgaaatattaagggaattaaacattttcagaaactctttaaaatgtctaaagaaataaacaaaaaagtgcttttcaagactcttatgtgttactagcgatatttagaaactctgctttgaactctgagctggtcagtggcctcttagttccatggtatataagcattagaggtggacataaccaaggaattatgagtttagtagaaaataatatatagtcttttttttaaggccctaa

SEQ ID NO: 734617 - DNA, 583 bp, Homo sapiens
atataatatatactataatgtgtaaatatcataatattaactatagctatagctctcagttttactcttcttcagattaaataatttcaattgctgtatctttaagtttactgaatttttgatattatgcctctccagtgattttttttaaaacactcgtatttttcaattctagagtattcatttggagctttttatagctttaatttctgatatatcttatcattttattcattataagcttacaaatctgtctagttgagcatagcaataatagcaactttaaagtacttgtctgataatttcaagatcttggtaatcttgaggttgacatctattaactgcctttactgtttagaagaagcatcgtttaaaaatatttttcatctaatatttttgaattatactttggaacttgtacagggtgtgccatggagaatatagrttctttttcatctccctgaaaaatttcatttggttttagcaagacaataacttatttagaatcaaactgaaagctctgttttgtatgcaatgggcagcagcttaaatcttaccaattctgttttccttagctagtctt

SEQ ID NO: 734618 - DNA, 631 bp, Homo sapiens
tatatgaatatcattatcatctatatctgaatacagataaaatatagatatatgttatcccagttttactgctcccagaaaataaaaactgtaaagaaattcaacaaacatacaaagtaacaaccatggtgttatgcactggcaccaaaaaataggctctccctcagttttatattagaggcaagtattttaagttcccatggcataaataaagttgtaattgcttcccattttaattaagaacccatttcaaactcaggaaggctgagtagctgtttgaagtgtttatgccgtaggcagctggaggcattgaacaggggtaattagaaggacatttttgtgtggtaggtttggccaaaattggtcagctttgaagagctgctccatttcaaaaataataattacatacacaaaaagaattcctttgaatatgaagggtttcatagacttcatccagttttactgtcgttgtgctcaataacttatgamgacggttcgtaaacatttttgtgccatacttcttttgcagcctggtgaatcatttgaactgttttccaaaataatgtttaaaagtacaaactaaaatatatgatattatagtggataccaattatattttaatgttagtata

SEQ ID NO: 734619 - DNA, 619 bp, Homo sapiens
gggaaaatctgatgataattttatatacatatgtgtgtgatatttacatgtttattacagttcatatatttatatacacatatgggtgagcattatctatctatctatcatctatataatcttttctttgaagataacagaacagtaatgggatgttttatcttcaaaaatcaacagttttgctcagcaattgctaactgggggattacttttcattaattttacctaatatttgatgcatcttgttgaaattatttttttatttttttctaaatccagaaagttgtctattaatayactgtctattgcttttcctccatttactatttcacctcttgtagaatccttagggagttcttatatctgccctcagtcacgtatcttttatttcatcatgtgaatatactcatgttttctctgattttgggaagagttccccctcttaccttctaattctcttactcagctttcggtagtatttaatgtgttgatcacacaatcctatgtgttttaaatttatgaatcataattttcatctccaatgaaacattctaggtagtaaaattttccttttgcatgattgcctgctcttgagatataaaagcaacatcctcacaag

SEQ ID NO: 734620 - DNA, 524 bp, Homo sapiens
catgatctttttctcctttactggccatagctaggcaatctctacatattattgagcacattagctctactcctacaaacatcttcttggttcagagaagtccccattattcagacttttcctcaggaatctttcttgctctcttggtgttagttttttcctcctttgacgtcttttacaaaccataggtagagttacccttctaaaatatttctcaaaaacwacgttcagtaagtgaggattccatggagtactatatgttcaagcagtgaagtgctagaaaaatatgagtaacatagtccatggtggcaagttgcatatctatccacttggtgactgatgcgtattctttggactttagctaccaatgttttctttcaacttaatatatccatcatatttcctactcattgtattatgtgaatttatgttttgaggagatttgtcaaaaaaaaaaaaacaaaacaagagaataacattcagaccagttaacctgttattcttgactctcaaaagcctggctg

SEQ ID NO: 734621 - DNA, 616 bp, Homo sapiens
tatacaccacacatacacacacagttatttttatgtaatgaagtagacgttaattgtttgaaattcagtttctggcttagaaatgaggacacctcagttactaaaagaaaacaatctgttgaatagagcctacactcattggaaattttaaaagagaaaaggggtagggaagcaaggcatgggattgatggggagaaaggaaaagaatgtgttcaaaaaccagtttacctttgcttagagaaatagaatctgaagttgatcaccattaatattccaagagaagtcttgctacagcttcagagctgtattatcatttcaatctcccctgtattagatatttagatttgtcaaagtaatcctgattttagatttgaagtatctatttctgtaaatatcagtcactacaaaattaattttaaattaagttttatttcattgaayttattaaatttaacgaaataaaacatcaatttagaaattaaaattaggcaactccctaacttcaatcatactcttccaaaagaaaatagtagtaacaataatgacaactgatatgagcaattttctcatcctatcacaagactggtatagatttaattcttggactccaagaaaa

SEQ ID NO: 734622 - DNA, 602 bp, Homo sapiens
acttgactccagagttaaataggcatccagttgctttttgtgtttatttttatattcactgcttttgcctgcaactgtgtttctggttctaagtaaatataacatatgctactggtacacatatgtcttaggcaacatatgtttcattcactggattgttagctctgttttgttttgtcactactttagtcccagtaccaataactgccaggcacaaagtaggtgtttagttaatattgttaaatgaasaaatacaaatatttgattttatcacttgaatcctcgtttattagtactgcactatcttttcttagctgtttttgtgaacataacacagcttgtgtacaagctggtcttgtaccctaacgagattggaagtacattgtgggtagaaacttggttttatttgtttttcctatattctcctttacagcagtttagacttgatgggaagtaggtatttcccaaacatgtgattgaactgaaatatattggtagattttattttatcaggagactgccaaaagtatagtcataactaaggaatttggaagagaatcaaaaagctagtatgtactcgtctgtcagcttgaaggcctgta

SEQ ID NO: 734623 - DNA, 569 bp, Homo sapiens
gtggtgtgatcactgctcactgcagccttggcctcctgggctgaggtgattctcctgcctcagcctcccaagtagctgggaccacagacacatgccaccatgcctggctgattttttaaattttttgtggggacgtggtctcgctatgttgcacaggctaggctcaaactcctgagctcaagttatccwcccgcctcggcctcccaaagtgctgttaattacagggctgagccactgtgcccagcctctgattatacttttaattgtaatttctcttatgcttgaagttgaacatatacagtaaagactttatggtattgtaggctgaagtttcagaatcatccaggaccaatgatgttagcagaaatgcaaaactagccaaggagtatcgaggggacaaaatagataattgatattgttattaccttcaaagtttgattgcattgattagcttattatttttattaaagtcattttaaagagcatataaagttctatgccaaagcacgtttggcatagacaaacatttggaaatgacaagttgggctgtcatttccttttgacacgac

SEQ ID NO: 734624 - DNA, 591 bp, Homo sapiens
ctgggtgtagtggcgaacacctgtagtcccagctactcgggaggctgaggcaggagaatcatatgaacccaggaggcagaggttgcagggaggcaagattgcaccattgcactccagcctgggcaacaagagcgaaactcagtctcaaaaaaaaaaaaaaaaaaaaatgcagagcacagtggctcacgcctgtaatcccagcactttgggaggccgaggtgggcagatcacctgaggtcgggagttcgagaccagcctgaccaacatggagaaacccagtctctactaaaaatacaaaattagccaggcgtggtggcgcatgctactcgggaggctgaggcaggagaatcacttgaacctgggaggtggagattgtggtgagccgagatcgcgccattgcactccagcctgggcaacaagagcgaaactccatctcaaaaaaaaaaaaaaaaaamcagagaaatcatctaagatggccatggattttttttttttaataaactgattcttttttattaatataaaaaacaattcacttctggttttttacatttaaaaaaattagccaaagctaaatcttttttgaacttt

SEQ ID NO: 734625 - DNA, 643 bp, Homo sapiens
atatcacgcagactttctacatacataaaacctttggactttattctacaagcagtgggaaaccattagaaggtgttctctgcaggggagtgacataatgagatttgcactttttacattttgttcttgctgcatgatagagagtggactctacagggtaagaattacggtattctcggaagaagatggtagtgatttgctctaagttagtaagagaatggggagaaatcaatggatttgaataatatttaggatgaaggatttgttcattaattggctcttagtggggcatagttggagaagagggttagaaggatgtggcctaggtttttgacttgagtatagtaatgtaattccctgagattggcaacatyggaggaggagggttgggaagagtggatatcattaattcagttttagacacatggatagttagttttatgggcctggagctcagaaaagagaggtctggttaaagaggtaaatttgagaggcatatgcatttatatggaaaacagagacgtaggagtagatgagatcaccaaggagagagtcatgattgaggaacccaacttgaaaattttagaaaagaggaaaggagtcagccagaaatatgtagaagcagttaagagagattaaagaa

SEQ ID NO: 734626 - DNA, 572 bp, Homo sapiens
cctaatgtaaaattgctttataaatgcttttttgtttcttgtttttttgttttttgtttgagacagagtttcactcttgttgcccaggctggagtgcagtggcgcaatctcggttcaccgcaacctccgcctcctgggttcaagcgattctcctgcctcagcctcccaagtagctgggattatgggcatgcgccaccacgcccggstaattttgtatttttagtagaggtggggtttctccatgttggtcaggctggtctcgaactcctgacctcaggtgatccacccacctcggctgggtgctgagattacaggtatgagccactgcacccagctatagatgcttttttaacatttaagaatttatacatggtaatgaagcttttagtgatcttatgttttctgggagtgaaaaggaacacaataaggtgtaattatcggattcatcagtagatctggtaagtgaaaatgtgaaaaacttccaaaacaatgactttacccctatgtaaattaaaagcagttgtttactatgatacccattgtgcctctataacttgccatttaaaaacttt

SEQ ID NO: 734627 - DNA, 572 bp, Homo sapiens
cctaatgtaaaattgctttataaatgcttttttgtttcttgtttttttgttttttgtttgagacagagtttcactcttgttgcccaggctggagtgcagtggcgcaatctcggttcaccgcaacctccgcctcctgggttcaagcgattctcctgcctcagcctcccaagtagctgggattatgggcatgcgccaccacgcccgggtaattttgtatttttagtagaggtggggtttctccatgttggtcaggctggtctcgaactcctgacctcaggtgatccacccacctcggctgggtgctgrgattacaggtatgagccactgcacccagctatagatgcttttttaacatttaagaatttatacatggtaatgaagcttttagtgatcttatgttttctgggagtgaaaaggaacacaataaggtgtaattatcggattcatcagtagatctggtaagtgaaaatgtgaaaaacttccaaaacaatgactttacccctatgtaaattaaaagcagttgtttactatgatacccattgtgcctctataacttgccatttaaaaacttt

SEQ ID NO: 734628 - DNA, 572 bp, Homo sapiens
cctaatgtaaaattgctttataaatgcttttttgtttcttgtttttttgttttttgtttgagacagagtttcactcttgttgcccaggctggagtgcagtggcgcaatctcggttcaccgcaacctccgcctcctgggttcaagcgattctcctgcctcagcctcccaagtagctgggattatgggcatgcgccaccacgcccgggtaattttgtatttttagtagaggtggggtttctccatgttggtcaggctggtctcgaactcctgacctcaggtgatccacccacctcggctgggtgctgagattacaggtatgagccactgcrcccagctatagatgcttttttaacatttaagaatttatacatggtaatgaagcttttagtgatcttatgttttctgggagtgaaaaggaacacaataaggtgtaattatcggattcatcagtagatctggtaagtgaaaatgtgaaaaacttccaaaacaatgactttacccctatgtaaattaaaagcagttgtttactatgatacccattgtgcctctataacttgccatttaaaaacttt

SEQ ID NO: 734629 - DNA, 643 bp, Homo sapiens
taaatatatgaaacaacagttttcagaaactggacaacagataccacaggacagtgatatttcttagagtagggaaacaaagtgggtcctatgattgccttagcttaccacttgtaggctgtttccaggggccagcatgaggaagaaaaatctaaacagaaaccagtgatttctctgggttgaaataacatagtttggactgcagagattatagccaaggtggctataattttcaaaagaggagggagtttcacaaagacagagggctccagcaatctgcagaggtgtttctttgagtctttggctggtaatgatctgcatgtgagtgtgaagaaactatctgaatctggagaaagaatcactagaatgagcaggtggaataaycactggctatcagacagggttgagagcagctcatgttcttaccagccagagtggaaggtcctcctaacatgcagcacactggggagaatccccataagggcactgccttagtactgtccttatgctacataaaggctgccccggatgctccctaacaaagcttaaaagcaagggtcaaagagatacctgcttccaagcaccttagctgtgcaccagaacaaatatttaccgaagtccaacaatatttacagaaaaacaa

SEQ ID NO: 734630 - DNA, 682 bp, Homo sapiens
atgccgagcatggtggcatgcacctgtaatctcagttactcagggaggctgaggtgggaggattacttaagctcaggagtttgaggcaacacagcaagaccccatctcaaagaaaaagaagtcttaataaatgtagaaggaaagagaaaaacagaaaatcaccattagacaaacaccactataataattgttgcagacaagatctaccaatgaatgctaaaactagtgggtgaaagttccaggaggaacagaatttttacaattccaaagtgtctcccccaagatatttattaactacaaagggaaaaatagtgattttgaagtagagaagccaggcagaaaccaccttaaccaaatgaccaaggtcaacatcaccagtaataagatagtaataagacatcaatatctctctatatcatgaaccatggatatgatgtactaagagtgacacaacatttctgtggtattcttgccaaacatgcggttcaatcacaagaaacataagacraacccaaagtgaggggcatttgacaaaattaccgatcactactcttcaaaagtgtcatgaaagacaagacagacaagacaacaaagactgagcaagtgttttaggctgcaggagactaagggaaaatcacaactaaatgcaatgtggggtcctgaatgggatcctagataggat

SEQ ID NO: 734631 - DNA, 631 bp, Homo sapiens
acttacatacataaatagaaaaaaatgaggcagaaagagacagcatgtgaaatgttaatagtcagcattataggctatttatttttgccataagcgttttgttgttttccatgatttcttcattgaacaaatggttttgtgattaaatcttaaagagaaacacaagagataccccgaggtgtattgtggtgcaataagaaattgtgcctaattctactgtagcaatttacaaagcaacaatcatctagtatgtagcaggtgtatgttgaaggcattgctctcttcataaagtatgggcaactgtcatcacacagcttataacctcattttcacctgcccttaaggtagttgctttaaactgctggcacacagctgrttgaaatgtggggaatccctggctgagagctaccttgctgggtgctctctattcacattctttctgggaatggaacatctccctggctctggtttgtacatgtggtcgtcatggcttctttgttagcatttgaggcttttatatatattttatatatgcatatataaataaatattttatataaatatatacaaataatatattatataaatatatgatttatgtatatataaccatataaatatatgatttata

SEQ ID NO: 734632 - DNA, 519 bp, Homo sapiens
gcctgttgacttcaaggtaggaggatcccaaagtgtccaggtggcaatcttaaattctagtttaatggaatcattgtcgtgtctcctggtgtcagtgttcctccctctggaactaagacctttaggccagtagaacataatgtcactggaacaggaagcaraaattttgctagtggatcactaggtgagtggtgccacttccaccccttgatttctagacccgtgaatcctggctatgggagaaatagtgccatacattggatgctgagtcagagcatatagggccttctggagaactttgccccaatcctccaaagtattgtcacctagttgggttgtaattgtgacttcaaaaggtcattccaccatctatcaatccagctgcttcaggatgatggagaacatggtaaggccagtgaattccacgagcatgagtccactgctgcacttctttagccataaagtgagtgccttggtcagaggcagtgccgtgtggaataccatgacggtgaataacac

SEQ ID NO: 734633 - DNA, 519 bp, Homo sapiens
gcctgttgacttcaaggtaggaggatcccaaagtgtccaggtggcaatcttaaattctagtttaatggaatcattgtcgtgtctcctggtgtcagtgttcctccctctggaactaagacctttaggccagtagaacataatgtcactggaacaggaagcagaaattttgctagtggatcactaggtgagtggtgccacttccaccccttgatttctagamccgtgaatcctggctatgggagaaatagtgccatacattggatgctgagtcagagcatatagggccttctggagaactttgccccaatcctccaaagtattgtcacctagttgggttgtaattgtgacttcaaaaggtcattccaccatctatcaatccagctgcttcaggatgatggagaacatggtaaggccagtgaattccacgagcatgagtccactgctgcacttctttagccataaagtgagtgccttggtcagaggcagtgccgtgtggaataccatgacggtgaataacac

SEQ ID NO: 734634 - DNA, 623 bp, Homo sapiens
tgtttggaattttgtttcttttaatatttaggtttaaatattgatgaaatttgtatctgtacaaattagatgagaaaacaaggagagaaaagggcttcctagatcccatgagaaaaatcaagtaagagaatgtgtttccttccacaacargacacattttacatttctgccctcataaatattaaaatttgaagtctagcctcagttatttctgaacaaggataaccagatttttacaatggggagaaaagactacattggcaatgcaaccagatttctcggtctactggaaaaataccaaaaatatgataattttaccaaaatgaaacaaccaggacaaggcctttaggaagtgcacacactagctctgtaacactgtgtttgtacactgagatatagtaaacacgatttataatataagttccttttacttgctattgataatttttcaaagtatctatgaagtatacatttcaaggtatatattataattccggctctcaaaggattaaaggggttctttcctgaggaagggacttttctgcccagttttcccttacagctaggtttgggccaatgttgctcaaagaacaaaattaattaatgtggaaagttagaccgca

SEQ ID NO: 734635 - DNA, 604 bp, Homo sapiens
tgtggggtggcacatgattttgatctgtctcattactgatggtattcaatttgatcacttgattaaggtagtatctgccaggcttctacaagtaaagttatccttttcctttttataattggtatctattttgtgggagatactttgaggctatgtaaaaatcccattcctcatctaactttatctttctgtcaatcaatctatctatccatcagttgatcactgtatggactcattgttgtggatttcatttaatggggttctaactatcattgtccctggtttggccagtaggagctctttcacgctgactcctaggtctgtttgatctgtctgcatcattcttcrggtgcccctttgctttctggtacaggatactccagtttcatcttgcacttttcttgctccagccctgctatcagtcatttctccaaaaagccctgtctctttttagtggtgaatggtttttagaagctaggatctgggtatgaggtgtgctcatcaatattggggtattgctttttccaggtcctctaagagacagaagtagggaagatatggatatgaatatataagcacacatacatatgtaaatatatacata

SEQ ID NO: 734636 - DNA, 629 bp, Homo sapiens
ttaattagaagtacttaccatgtgatagctcttgtgctagatcttgggatacagagatgaaagaacatttttctcaagaagcttatagtctaatgcagtggttctcaaagtatggtttgtaggcctctggtggtctctaagatcctttcaggtcaaagcttttataataatactaagacttctttggggggctttatttattgtgcagacatttatactaatggcacaaaagcaatggtgatgtgttagaactgctggtgacttaaaccatatcaagaaactgataccaaaccctattgtattctttttttttttttttttttttttgagacggagacttgctctgtcacccaggctggagtgcagtggcacgatctcagctcactgcaagcgccgcctccggkttcatgccagtctcctgccttagcctcctgagtagctgggactacaagcgcccgccaccatgcccaactaattttttgtatatttagtagagacggggtttcaccgtgttagccaggatggtctcaatctcctgacattgtgatccaccctccttggcctcccaaagtgctgggattacaggcgtgagccaccacgcccagccagctctattgtattattttcca

SEQ ID NO: 734637 - DNA, 620 bp, Homo sapiens
aattctattcctgtttctgataactgtggaactgactcctttgaccatccaagatttcaatggaaatgacttcacttaccatctgactgaagttcttgcaagagataccttggaaaagacctctccaccttgacatagtgttatagatatgggacagaggatagacatggccagcaactggggtcacttttctttccttatgtttaggattttcaaggaagtggtatatgttcaattgacaatgttcaagtttagccatatctagcttttctgtttgctcattctttcatgttttttctgtagtttatgacatatggactgatacagatcttatgaactttttgcaaactatctctgtcccatattatttgtatatctgtyttatcctcctgacttccaccaaaaaagtgatgtgttgcttagtgacaggaatgctgttttattcatctttagtggcatgtatttaataggtggctaataaatatttgctaaatcaatgtattttcatcatttaaaaactcagataatatacctcattttcccctgttctagttattaaaaaaccccacttttctgaattggacatactcttttctttcctcaatgtttagtcatagtat

SEQ ID NO: 734638 - DNA, 619 bp, Homo sapiens
agttcttaacttcctcattggaattgtcaaggttttacaagatagtaatgtgtattactctccagcttatagaagggaactactttggagtcatagtggcagtactgaatggctttgatcacagattagagatgctatcatcacgggtactaagaagatttgctaagggcagctgtaataaaatmcattctttggatgtatcataggaattactggtagagaggctaagaaaaagttatagaattaatttgctcactttattttgtacatgctaactagctatgatttttttctacaaatactgtagaaaatcagtcataataggaaaaaagatctctaactccagaattgttacataaatcatatgcagagaaaaagacttggtgttgtcaatgggtttatatttccaccagaacactgcgtgtacctagtaagtctcccactctgactttgtaaaccgtcaatcccagtattcagcatatagtatcaaggaaggggtatccccaagcctcatcaagagacagccacctcccctgctggtccgccagttctaacctcagtggtccttatggactccactgtgctagaagtgcctggggcggaagcttaaccccctggc

SEQ ID NO: 734639 - DNA, 398 bp, Homo sapiens
gattaaaatgtggtggtaaaaaagtcacaaaggatttttagcacacttattcctggggatatgagctcatagtttgaagtgttaggtaataattaatgtaaacaagccattgaaatattgctttttatttattttgagayagtctcaagcttatagaaaagttattagtataacacacagaaccttttgtttctcaatttgaaagtaaagctgaccgaatgcttctctcatgctgtaatattttactgtgtatttcctacaaaggaggatgttctacatagtcataatacgagaatcaaatcggtaaattagcactgacaggttactgccaactaattctcagcccttatttaagtttcatcagaggtcctgataatttcctttatagcagagctacc

SEQ ID NO: 734640 - DNA, 551 bp, Homo sapiens
gcataccacgctatttaaaaagaaggggcctacactgtggcacacgtctgtggtcccagctacttgggaggctgaagcgggaggattgtctgggcccaggagttgggggctgtagtcagccttaattgcccactgcactccagcctgggaaaataaaaaaaaataaaaataaaaattttwaaaaaagggatttggaacagtacaaattcaggtttgaaccctggctctacctctccctggcagtaagatctcaatggctataccttgatgaacctcagcctcctcatcgtcaaatggggtaataaatgaatctagttcatggcgcgtgggtatgggtgcagtgaaatgacacaagtgaggtgcttaaacagtgcagagggcactcctagccttccctcatgccccctcctgcaccataggagtcttactctatccctggagatagagtttgctaagtgtgccagagacagtggtcttgtcctccccatcctgaccagaaactcacatacaagtgtgtctacaggatgccacagagagcagcctcaaccagt

SEQ ID NO: 734641 - DNA, 551 bp, Homo sapiens
gcataccacgctatttaaaaagaaggggcctacactgtggcacacgtctgtggtcccagctacttgggaggctgaagcgggaggattgtctgggcccaggagttgggggctgtagtcagccttaattgcccactgcactccagcctgggaaaataaaaaaaaataaaaataaaaatttttaaaaaagggatttggaacagtacaaattcaggtttgaaccctggctctacctctccctggcagtaagatctcaatggctataccttgatgaacctcagcctcctcatcgtcaaatggggtaataaatgaatctagttcatggsgcgtgggtatgggtgcagtgaaatgacacaagtgaggtgcttaaacagtgcagagggcactcctagccttccctcatgccccctcctgcaccataggagtcttactctatccctggagatagagtttgctaagtgtgccagagacagtggtcttgtcctccccatcctgaccagaaactcacatacaagtgtgtctacaggatgccacagagagcagcctcaaccagt

SEQ ID NO: 734642 - DNA, 636 bp, Homo sapiens
cttggccactctgtgattctaggagagaagccatgctgtaaaagattccaggtcatgccttgacaggttacagtgaccacatccaggagatctttaaggccttaattgtgcccttcagttcctgtcatcatcattatcattatctccacmaccaccatcatcatcatctacatgcctgaaactggcgtattcttatgccatgaactgtaaaatatttcatttattttccctactttaaccagccttgtgaccttgttcaagtaaccccacctctctaagcctcagtgttctcatgcatgaaatggggcctgtaaattccatttgcaaaaggacagtgagctgttgttttcatccccaatccctctcctccctgaactccctccctgaactccctccctgaactccctctccttcctccgtgaagtgccctcggcccccagggcctggattccggccaccagctctcctgccccggcttttaacgttggtccctgcaacaggccagaacatctcctgtgaacgccatggaactctgcccctgcgctggggtcctgccagcaaagagtttaaacaaacagaactgggcagaaacgagatggtccgccggttgtaaagggtcgcacctcatgcgcacac

SEQ ID NO: 734643 - DNA, 618 bp, Homo sapiens
ttaatctttatattaattaaaacatattattagcctttcatccatttaagaacttagtattaattgaaatctattgggtagcatatttatattttttacagtgagatgtatttttaataacagcctgcttaattgaaatcccaacaaagatagcatatttgcaaatattcagatttgaaataatcaaaacartaagacataatttcccagtttgtttgctatttatttttaattatctgaaatttagcaaaaacatgtgatgtgattacttggacatattccattcttttcaagcactggcttgatacaaaaataaaattgatttcttcacgaatatgaactatcatgttttcttgataatttcactcacctaaattctttcagaataattctcttggcttgtggtaatttttttcactacacaattttattctatatctatttttttcagaccaaaatatgcattcttatttgaagtattatataaagttgaaaaatgttaaaatgcattaattctcatattaaagtcaagttaatactgtatgtcctagaattattctttcaactctatttccaactgaattctcacatttataatgaatctgcctcggtacagta

SEQ ID NO: 734644 - DNA, 606 bp, Homo sapiens
cagcatgataagcaatgtattagataaattgtagtagcatcattcccatctcgttcaataaaaggtgtattagatttttgttttaaatccagttttcaagaatttgtaatactacaagcaaaattttaaaagagaatgatcaaattcagaaaaattagacaaatataatttctaataatcataaataagtattatagaggtagttcagattcagcctttttaccacttcttattttcaactacaatattaagaaaaaattaataaagataaaataatggtaaggaaaagttattytatcattacttgaagctctctcaaaatgtctctacagatacttgaatatcatatatttattacatattaactattatgaattacttcaaaatgtcaactgtgcataaatagatgctcagctatatcatatcttcctgaatattatttcatatgggctattttatggtacactttcatagaaacagtttcagtggttccaataggagagttggatcatgtggataagatttttgttatggcaacactaggcctcaacgtaccaataagaagaaaatagaattttgcccccatataaaaaggagttaaaaata

SEQ ID NO: 734645 - DNA, 568 bp, Homo sapiens
cagactccaaagtcagtgtgctcattgtattagatcagaatgctgtccattctagaacacactttctaggtacatgtcctcaaaaggcactataatctctaacaaatccaactcttcttcagaaaaccataaggcattatggtagacagggacaaaataggtcactgtcattttctatgaaactaaattgatgattcatcaacacaggccattgttagaaagatcattgttcctaggtctttacaaacatatygctaggccaaaagtgatgtgaaatcggtgccatcttgcttaccaaaagatatcactgaaaggtgctacaagaatgctcccctagcagggcatagtggttcatgcctataatcccagcactttgagagacggaggaaggaggatctcttgaggccagaagttcgagaccagcctgggcaacagagcaagactccatctcaacacaagcttttttttttttttttttttttttttttttaaattagctaggtgctcgcctgtaatcctacctactcaggaggctgaggcaggaggattatttaagcccaggagcttg

SEQ ID NO: 734646 - DNA, 625 bp, Homo sapiens
cactggagtccccttctacattgtatgtctgtgttctctgtgtagagttcaactcaacctcaggccaagaatcagctgctggctccacctaaaacctgtttattccttaactagatactcctttcagcagctgtggcttctaggaggcaaacactaactagagggaggtggcagcaaaggctatatatacatagtgaatgtccacattcagtgacagcctgtataagtctggtgactgtcagtatccattctctatgcgtaccaaaacaaaccacaagttcaaaaaatsattccagtaaatcaccccttctattcagacttcaaacaaaagaagattgggggtggaggagggaatcagtttgacctcacactcagagtgaagtatctatgctgtgagttgttttacctgttgtgataaattagcaaagccaataggccaatccagaaatccaccatggactaaggcctaataagcatttttattttctttctgtggttttggtttttttttttttttttttgtcattgtgaaatctgctgtgttataaatgcataatcctgtagcacctgtattttctgcaccatgatgtgacttttagagataattctgtttttactgttttat

SEQ ID NO: 734647 - DNA, 497 bp, Homo sapiens
atgagcattagggtaactcattttaaatgtgcttgatttattagcgcgggggtctccatttccagcaggtcaatgctttactgaaacacacaaagtcattgtcaaggtcagcctctttatgaattttttaaacaaaatgccttgaycacatatcaggtccttcatagaaaggaaaaacagaaaggaatagcttttgcaaaaagatttcttttaaaaggccaaaggcaatgttggtcaagcttcaattatgattcctagtaagacaagaaccttaatgttcactgtttgccttcggggatgtttattacacacaactattttgcagaagcagcgtcaaatgtacagtataaaactaccattaggcagaaaaatcaatcaaaatgccattaaagtggaataagttgccaatattgctgatgtggttgcaggtcctttgattttctttcagattattaggcacagtctagtagtgactttgttaagggaaatgagtgttg

SEQ ID NO: 734648 - DNA, 480 bp, Homo sapiens
atagcgtaagcatcttggtaatatattaaagtgaatgtaaatagtggttaaaattacattactgtgaaattcaccttccaactctaagttaagctttggagatacgtattagcgattaactgttaagagctttgaaaacactgcacgtatctgtacaagccagaattactatttctttgacttattgttagcatggcagttgyttttgatttggttgttttatgacatggtatactatatttactcagtttgaaactattcatttctatacactattttttaaaaatcacctactaggtgaaacatacaatgaaactacctgtgctgaaatttgggggaagtttaggtcctttaaaaaaatgtattaatcattgactacatctatgataaaagtgcttattttggtttactaagataatgcagttggtggaaatgataaacattttaagtgttaacatcctttgaatgcattggatttca

SEQ ID NO: 734649 - DNA, 647 bp, Homo sapiens
tccttctgcttcccatcttcctcatcacttagtatggtcagtctttttaactcaaggcttcctaatagttgtgtaaaaatgtgttaatgtgatttttaatttgcatttttctaatgataaattatattgagaatcttttcttatgtttatttgctgcctgttttcttggaaaagtttctcttgaaatctttgcttcattagttaattgagttgctttcttattgagttttggtagkgcatttttattttatattttagtattctggatataagcttcttgcatgtagaaatggttctagaacccttttttgagaagactcttttttctccacctaaattacctttgtacaattgtcaaaaatcagttgttcatatacgtgtgggcctgtttctgagttctctgtttgttccatcatcggtttgtctataccaattcaacactgttttgattactgtaacattataattttgaaaacagatagtaggtcctccaactttgttattcttttcaaagttacattttgctgttcaagatcttttttaccatatgaattttagagtcagtttattaattcctataaaagcctgctgcgatttagattgggattacattgaatttacagatcaatttgggaagaattaacatc

SEQ ID NO: 734650 - DNA, 509 bp, Homo sapiens
atatacgttttgctaggaaaaggtctgaaaataaacactgaagtgttaacagtgggtgatttgtattttcttctctttgctcataggcagtttctgccatgtatatatgacacatgtattaaaaaataagaggttttgcaggccctcctttataacagattagaaacagcacatttgtcaactagcccaaggtcacttcacacatcagcaaaagactccaggtctttaaagtyccagagcaattgctcagtccccagagctgacgttcatccgtcagtcagtcagcaagtagtcattgagtcctgggtctggggtgaggggcagagaaggcataagatgtggttcctgttcacaggtgcttatggtttagggagagagttgtttttgtttgtttgtttgtttgtttttgagacagagtcttgctgttgtccaggctggagtgcagtcgcgcaatcgcggctcacgacaacctccgcctcccaggttcaagcgattctcctgcctcagcg

SEQ ID NO: 734651 - DNA, 565 bp, Homo sapiens
cttgggagattttaaaacatacagatgctggggtgctacccctaactcaattctgaggatgggacctggacatcagcattttgaaatttttccctgagtggctctgatgtaagactcactactgagaagcagtgttctagactgatgcatcttacattttaatttgcataaaatcacctgttaaaatgcagattcaggttcagtgggtccagggtggggcctgagactgcatttccaaccagctccctggtggtgtggatgtgctgattggtagaacaccctaaataatgagctccagactgtgctgccccctgtccgcagtagcctcctcacctcrttcctccctgtcactatcccaggcctttgctgaagagtcagggagcagtctccgctccctcctggcagagccgccacgccaatccagctgcctgggctgctggtcacagcttctcagagaaatctggcttccagatgttaagaacagttccttaacagctggaagaatataataaaataggccagaccccaccccctggtgaatttaagtatgtgtgtctcttgcaaa

SEQ ID NO: 734652 - DNA, 565 bp, Homo sapiens
cttgggagattttaaaacatacagatgctggggtgctacccctaactcaattctgaggatgggacctggacatcagcattttgaaatttttccctgagtggctctgatgtaagactcactactgagaagcagtgttctagactgatgcatcttacattttaatttgcataaaatcacctgttaaaatgcagattcaggttcagtgggtccagggtggggcctgagactgcatttccaaccagctccctggtggtgtggatgtgctgattggtagaacaccctaaataatgagctccagactgtgctgccccctgtccgcagtagcctcctcacctcattcctccctstcactatcccaggcctttgctgaagagtcagggagcagtctccgctccctcctggcagagccgccacgccaatccagctgcctgggctgctggtcacagcttctcagagaaatctggcttccagatgttaagaacagttccttaacagctggaagaatataataaaataggccagaccccaccccctggtgaatttaagtatgtgtgtctcttgcaaa

SEQ ID NO: 734653 - DNA, 565 bp, Homo sapiens
cttgggagattttaaaacatacagatgctggggtgctacccctaactcaattctgaggatgggacctggacatcagcattttgaaatttttccctgagtggctctgatgtaagactcactactgagaagcagtgttctagactgatgcatcttacattttaatttgcataaaatcacctgttaaaatgcagattcaggttcagtgggtccagggtggggcctgagactgcatttccaaccagctccctggtggtgtggatgtgctgattggtagaacaccctaaataatgagctccagactgtgctgccccctgtccgcagtagcctcctcacctcattcctccctgtcmctatcccaggcctttgctgaagagtcagggagcagtctccgctccctcctggcagagccgccacgccaatccagctgcctgggctgctggtcacagcttctcagagaaatctggcttccagatgttaagaacagttccttaacagctggaagaatataataaaataggccagaccccaccccctggtgaatttaagtatgtgtgtctcttgcaaa

SEQ ID NO: 734654 - DNA, 594 bp, Homo sapiens
cttaccattttattattgatttcatggaaatgaatctcacagactttctccacaacatcttcattctcaaaagtgacaaagccaaaccctaaaggaaaagagagagaagaaaaaacaaagagaggcggggtgagttcagttctggcaggcccaggtttttctctgacgtcctgaggtcttgacagcctcctggtctgggggtaggtaggcggatccttgggaggaccttgaggttggaggcaatgatttctaatttgtactgagcacccttccgacagcgaggaaaagttaatgatttcacccacatgcagcgggcactgtgtggtttacatttgccccgaagcaaacaagaaatttacttgtctgttatttacaagggtcagagccccgyggctctgtgcacggcagcaggcgggtgggctaaccagagcctcgtggatcactgcggggccacgcttgccctttccgcgagcagccctggccagccctcgggtcggcctccagacggaggtggttatttgtccttttcttcctgaattacttcctctaatacctcatcaggacatcctgaggcctggaagaaactattaaaag

SEQ ID NO: 734655 - DNA, 665 bp, Homo sapiens
gaagaacacagaatctcagaagcttattgagtatgagaaaaactggccagcaatagcattttaggatacaaaagcactagccacttgtttcagacattagtcaatgaaatctactcttggtataaagatttgctgatctttaagtttttgaacagcctcaagagaagtaacacacagaaatttggtcatggtattttttaaagcaggctgctatgagaaaaactggcaataggctacattcagtatagttttagtaaaaattatttgttttttaaatctagcattgctgaatatttttttaaaattttattttattttctttttttttgagacagagtctcactctgtcgcccaggctggagtgcagtggcgcgatctcggctcactgcaacctctgcctctcaggttcaagtgattytccggcctcagcctcctgaggagctgggactacaggcgcatgccaccatgcccggctatttttttttttgtatttttagtagaggcagggtttcaccgtgttagccaagatggaaaacttgattttaaattatgaaacatatatagagaaaattaggtgaagcgaaagtactgagtgggaggatgtgtatgcaatcagctttacaaggtgttgcaaagtcactcttcaaagtcactgcacaagttta

SEQ ID NO: 734656 - DNA, 597 bp, Homo sapiens
gctagatagggtattggtcagaatcatgaggccccgtttccaggccctagcccccagatacatttctagacatactctggaccagaagggaacatgcttccatgaaaggaaggacccagtcctggcagaatcctactaactgaagagcctttgggccctgaataaccagcagcgatactcaggtactatgttgagggccttcagtgagcctcttgaaacttgctggcttcaggcaagtacagcacattcccagctgtggtggctatggggttatggggtgagattccttccacttgagaaagtggatggaaaagcaaagggggggtttgtcttccacmttagataccagctcagccatagtggggtagagcaccaagtagggtcttggggtccccaattccaggacgtggctcttggatggcatttctggacctgcctcagccagaggggagcccactgccctgaagggtgagtcccagggaaggcagcattcatcacaatctcacctaagagcccttggcccttaagggaacattggtggcagtcttgaggtactccctgtgggcctgtggtggcaatggccacttggtgaggctc

SEQ ID NO: 734657 - DNA, 630 bp, Homo sapiens
gttacacacagacagagattgtgctaaggcagaaagtttcagagaaacaaagagcttcatgcctaggagagtgaactttcgaggttgttactattttgcttgtttggttcctttggttctagctcttaatgtctaatgtaaaatactccaaaaaaaaaaaagcattatctcactcttctgtataagtaacatatctctaagttacttatggaacttagttaggatatgttggaagttcccctacatttttcctacgtatattgttttcgataaattaactttgttaccttcaatttcttcattacaaaaatttcaatactgtaagtagagggaaaaccaccgaatatttgctttattatctatccaaaacactgcatagaacaatttggtctctatactgattaataatttaaaagtattacagtatttgggtgtaattccagacttatatgayatataacaagctttacaagagaaaagaaaaatctggagttaatctgaatatttatgatatgtaaatctgtgatgacacaaaggatctgaaatttatatagttttgttttatcataatacttataaaatatacaaaaaagtagcaaaattatacatgacatatatgtatatatacat

SEQ ID NO: 734658 - DNA, 594 bp, Homo sapiens
ttagaatccagtttagaaattccgcctttattttcatttgacaaaacattcattgatgataataatgtacctgtattagtctgttctcatgctgttatgaagaaatacccaaaactgggtaatttataaagaaaagaggtttaattaactcagttccgcagggctggggagacctcaggaaacttacaatcatggtggaaagggaagcaaacatgtccttcttcacatggyggcaggaaagagaaatgagtgccaagtgaaggcggatgccccttacaaaatgatcagctctcatgagaactcactcactatcatgagaacagcatgggggaaaccgcccccatgatacaattatctccacttggtcctgcccttgacatgtggggattattactattcaaggtgagatttgggtggggacacagtcaaaccatgtcactaccagaagtttagatataaaaaagataaacttcaagtaataaagcaaataacaggtatttataaaatatcacttatgaacttagtattctgcaaagagctttgacagaaaatttttacatagaatttgaatagaccaactgaaaaaaacattat

SEQ ID NO: 734659 - DNA, 550 bp, Homo sapiens
aggggacatataatgaaatcggaaaggaatttgaaaaagtaatgatcaaatattccccaaatttgggatacaacctacaggtataagaaactcactgaatccgcatcaagataaacagaaggaaaatcactcctaagaacataatctaaaactaataaaaaccaaagataaaaagaaaatactgaaaacagccagaggaaaataaataacacattaataatgggaaacaacacatgaatgatagctaaattctcawcagaaacaaaaaaggagaaaagcaatgagatgtcatctttaaaatggtaaaatgggccaggcacggcggttcacggctgtaatcccaccactttaggagaccaaggcacatggatcacctgagctcaccagttcgagaccagcctggccaacatggtgaaaccccgtctctactaaaaatacaaaaattagctaggtgtggtggcaggcgcctgtaatctcaggtactctggaggctgaagcaggagaatcgcttgaacccaggaggccgaggttgcagtgagctgagattgca

SEQ ID NO: 734660 - DNA, 550 bp, Homo sapiens
aggggacatataatgaaatcggaaaggaatttgaaaaagtaatgatcaaatattccccaaatttgggatacaacctacaggtataagaaactcactgaatccgcatcaagataaacagaaggaaaatcactcctaagaacataatctaaaactaataaaaaccaaagataaaaagaaaatactgaaaacagccagaggaaaataaataacacattaataatgggaaacaacacatgaatgatagctaaattctcaacagaaacaaaaaaggagaaaagcaatgagatgtcatctttaaaatggtaaaatgggccaggcacggcggttcacggctgtaatcccaycactttaggagaccaaggcacatggatcacctgagctcaccagttcgagaccagcctggccaacatggtgaaaccccgtctctactaaaaatacaaaaattagctaggtgtggtggcaggcgcctgtaatctcaggtactctggaggctgaagcaggagaatcgcttgaacccaggaggccgaggttgcagtgagctgagattgca

SEQ ID NO: 734661 - DNA, 589 bp, Homo sapiens
ttgttgttgttctttaattacattgtaaactgaccatttataattgtatatatatacagcatacaaagtgatgttatgatttatgaataaaatgtgaaataattaaatcaagctaacctgaaatacttatgttttgtggtgggaacatttgaaattctctaascaagtttgaaacataaaatacactattattaactatattcaccatgctgtgcaatagatcccaaaaagaaaaaaatgtattccttctgtctgagactttgtgtcccttgaacaccaccttccttttactccagcttcatcctccataaccaccattctactctctgctcctgtgaatttgaatgttttagcttccacatacaaatgagaacatgcaatatttgttttcctatacctggcttatttcacataacataatctcctccagatttaatcatgctgccataaatagcagaatgttcttgttttttaaaatggaatggaattctatgtgtatataccaaattttctttatctgttcatctgttgatgacacttatgattccataactagacatcagtaatttgttagggattacattcaata

SEQ ID NO: 734662 - DNA, 706 bp, Homo sapiens
ttgggtagtgtggacattttaacagtattaattcttccaatccatgaacattgtattttttttcatttatttgtgttctctttgatttctttcatcagtgttttataattttcactgtacatttcacctccttgattagatttatttctacatattgtttatagctattgtaaatgggattgtttttatttctttctcaatcattcattgttagtgaacagaaaatactactgatttttatgtgttaattttgtatcttgcaactttattgcattcatttataagttcttgcagccctttggtgaagtcttttgagcttccaatatataagataatgtcatcaccaacagtgaaaattttacttcttccttgtcaatttggatatttttcatttctttttcatgtttgattgctcttgctgctacttccagtgctactttgaaaataaatggtggcagtgggtatccttgtcttgttccagatcttaaaggaaagtctttcaattttccactgttaaatatgtaagctataggtttatcatacatgccctttattgtgttgagraacattgcttgtatatctaatttggtgagagttttatcataaaagagcattgaattctgtcaaatactttttctccatctaacaagatgatggtatggtttttacccttcattctgtaaatgtaatgtatcacatttattga

SEQ ID NO: 734663 - DNA, 537 bp, Homo sapiens
agacctatcattagtatggagatttaatgaataacaaaaatccttctaacaaataaaaayccaggatcagatagcttcacaggtagattctaatacacatttttttaaaaaagtgccaatcagtctcaaatgcttccaaaaagtgagagaacacttccaaactcattttataaggccagtagcacactgctaccaaagccagacaaggacactacaagaaaaaaaaaatgacaggccaatatctctgatgaatatagatgcaaaaaatattttaaaaatattaggaaatagaatccaacagcacattaaagggatcatacatcatgaccaagtagtatttattcccaggatgcaaggatggttcagtatgtataaatttgtaccacattcacagaataaagggaaaaaaaatcacataattatataaatacaagcagagaaagcatttgacaaaattcaacattctttcatgttaaaaactctcaagaaactataaataggagagtatctcaacataatacaggctatatatgaaag

SEQ ID NO: 734664 - DNA, 537 bp, Homo sapiens
agacctatcattagtatggagatttaatgaataacaaaaatccttctaacaaataaaaacccaggatcagatagcttcacaggtagattctaatacacatttttttaaaaaagtgccaatcagtctcaaatgcttccaaaaagtgagagaacacttccaaactcattttataaggccagtagcacactgctaccaaagccagacaaggacactacaagaaaaaaaaaatgacaggccaatatctctgatgaatatagatgcaaaaaatatttwaaaaatattaggaaatagaatccaacagcacattaaagggatcatacatcatgaccaagtagtatttattcccaggatgcaaggatggttcagtatgtataaatttgtaccacattcacagaataaagggaaaaaaaatcacataattatataaatacaagcagagaaagcatttgacaaaattcaacattctttcatgttaaaaactctcaagaaactataaataggagagtatctcaacataatacaggctatatatgaaag

SEQ ID NO: 734665 - DNA, 607 bp, Homo sapiens
ttctgcatgggcttgcaattatctctcctttgtccttcattcacttgttcattcaacaaaatgttcaacaatatattatgtgccaggtaagatgctaagactccggagaatacatagataaataattcatcacccacatcctccaarctattcatagtcttcaggatatataggcataaaaacaaattcaattcactgcagtaaatgctagggaggaggtatgtgcaaacagtgatgggaacatatttggaggttaaccatgttagggagtcagtgaaagtttgcatcagagtttactttggatgggtggaacatttctggattcatcaagataaaggcagatcattccaaagagagaaaagagcacatgcataatatacaatggcagataacaatgaatgtaaagatttaactcagtgattcatttactcatccacaaatatttattgtatattttgtgcaaagcctcgtgctaggtgttcatgaggccacataaatgtagagctccttgccctcatggaactttctatcaaataattattctcagtgagggaaggcactgccaccctagtaggtatttggaaatgtgagggtggttgtcacaata

SEQ ID NO: 734666 - DNA, 656 bp, Homo sapiens
ctctttcccttctgaagaaggtcataagaccttcattcaagaggtactctttctactgcagaggaaaagaatatccttatcctcaaagacacagatatgcttcacagaatctgaataaaaagtctgggtgcggtggctcacgcctgtaatcctaacactttgrgaggccaaagttggcagatcacttgagttcaggagttcgagatgagcctacccaacatggtgaaaccctgtctctacaaaagtacaaagattagctgggtatgaggcaggataattgcttgaacatgggaggcagaggctacagtgaggtgagattgcaccactgcaccccagcctggacgacagaatgagactctgtctcaaaaaaagaaaaaaaaaaaaaaagaattggaataaaaagtccttgctaagtctcccccagtttattgccatgtcatacctgctttgtccagtcatacttccccgagactgttcactcttcatcaaacctagcatggaaatacacaggtttccctgatttggggggtctttatttctgaaggctcccatgttatgtaaacttacattaaatacatttgtatgctttttctgctgttaatctgtcttttgttattggtgtctcagccatgaacataacgttgggtgatgttaaa

SEQ ID NO: 734667 - DNA, 656 bp, Homo sapiens
ctctttcccttctgaagaaggtcataagaccttcattcaagaggtactctttctactgcagaggaaaagaatatccttatcctcaaagacacagatatgcttcacagaatctgaataaaaagtctgggtgcggtggctcacgcctgtaatcctaacactttgggaggccaaagttggcagatcacttgagttcaggagttcgagatgagcctacccaacatggtgaaaccctgtctctacaaaagtacaaagattagctgggtrtgaggcaggataattgcttgaacatgggaggcagaggctacagtgaggtgagattgcaccactgcaccccagcctggacgacagaatgagactctgtctcaaaaaaagaaaaaaaaaaaaaaagaattggaataaaaagtccttgctaagtctcccccagtttattgccatgtcatacctgctttgtccagtcatacttccccgagactgttcactcttcatcaaacctagcatggaaatacacaggtttccctgatttggggggtctttatttctgaaggctcccatgttatgtaaacttacattaaatacatttgtatgctttttctgctgttaatctgtcttttgttattggtgtctcagccatgaacataacgttgggtgatgttaaa

SEQ ID NO: 734668 - DNA, 625 bp, Homo sapiens
ttaggagaggcaggctattgataagtgatttggcttctgcagcaagtgtaaatagctccttcattgtcttagaagtcaacgtttctttttaaacattagatgtgcctcctgagagatacaattatcactcttagatgttactgaataatttgaagctttgaagtaagtttaaataaaaatcaaaaggaggaactaatattgtgcagtagacagtccacctggtatgccatctgattcccaataggaacattgttttatagatcaagggttttgtgttcattccatatacaccaataatctgaaaagtgaaggwttttttttcctctaaaccgagactgattttttttttttttcttttgagatggagttttgctcttgttgcccaggctggagtgcaatggtgctatctcggctcactgcaacctccgcctcccaggttcaagagattctcctgcctcagcctcccaagtagctgggattacaggcatccgccaccatgcccagctaatttttgtattttagtagaggcagagtttcaccatgttggccaggctggtcttgaatcctgaccacaggtgatccacctttcagcctcccaagtgctgggattacaggcatgagccac

SEQ ID NO: 734669 - DNA, 625 bp, Homo sapiens
ttaggagaggcaggctattgataagtgatttggcttctgcagcaagtgtaaatagctccttcattgtcttagaagtcaacgtttctttttaaacattagatgtgcctcctgagagatacaattatcactcttagatgttactgaataatttgaagctttgaagtaagtttaaataaaaatcaaaaggaggaactaatattgtgcagtagacagtccacctggtatgccatctgattcccaataggaacattgttttatagatcaagggttttgtgttcattccatatacaccaataatctgaaaagtgaaggtttttttttcctctaaaccgagactgattttttttttttttcttttgagatggagttttgctcttgttgcccaggctggagtgcaatggtgctatctcggctcactgcaacctccgcctcccaggttcaagagattctcctgcctcagcctcccaagtagctgggattacagrcatccgccaccatgcccagctaatttttgtattttagtagaggcagagtttcaccatgttggccaggctggtcttgaatcctgaccacaggtgatccacctttcagcctcccaagtgctgggattacaggcatgagccac

SEQ ID NO: 734670 - DNA, 632 bp, Homo sapiens
aatcctgtctacagaaacaatggggatgcaagtggtcagcatctagtgctccatgacttttggttacaaggaagcaggccaaagtgcagcctgataaatgcttaattataaccatatttctgtccagaatccttgttaaccctgtgaggacagctttagtagcatattctggtctcctagtcatgttttaaaatggcatttctcaaccttatgcattcagaggatgatcatttatcatttctcttcataagattaaaattatatattcagaaatatctctatccagaaatttatctcaaccagaaggcccaagtttcctttacgttggtgcacatcaacatgaaggaaaccaagagagtcccgtgaccagactgttaagttcccagggcagagagtggatatcaatcatctgggcttcttcactggttacctgtgtgccaaagatacagcagcacttcctcctcctctcagcttcgtgaatgaatgaatggggrtaggccacggctcttgcacatacttacacatactcacatgcctggtcttctcagcttctttcattgcccttcaccacctgggcctcctgtctggtggtgacataataagaaatatatgtttagtctcccgttggaatt

SEQ ID NO: 734671 - DNA, 502 bp, Homo sapiens
gaaaggacaccctactcaacaaatggagctgggataattggcaagccacatgtaggagaatgaaactggatcttcatctctcaccttatacaaaaatcatctcaagatggatcagggacttaaatctaagacctgaacctataaaaattctagaagataacattggaaaaaccctggtagacattgtcttaggcaaggatttcatgaccaagaacccaaaagcaaatgcaataataacaaaawtaaatagctgggacttaactaaagagccttgcacagcaaaaggaagagtcagcagagtaaacagacaactcagagagtggggaaaaattttcacactctatatatctgacaaagaactaatatccagaatctacaatgaactcaaacagaccaacaagaaaaaaaaacaatcccatcaaaaagtgggctaaggacatgaatagacaattctcaaaagaagatatacaaatagccaacaaacatatgaaaaaatactcaa

SEQ ID NO: 734672 - DNA, 528 bp, Homo sapiens
ctcaatgcattacagtcctatgtacaagtctgaagtagatgctaatggttttctgaaacttaacttctttcttttgttttatttgtcactggttttagccagatattcaaatgacctaatacttccacttaatgagtattaataaccaacgcatcagggctgatccaagtgaatgtaataactgtcgtcctccagggagcttgagaccaactccttataactgaatgtataaattagttaatggacacatgtctctacgtccagtttgaaaactatagatcttcatatagctagagaaggttattcaygcctatttaaattttcatttcctttatcccccaaaagagtaataatgattccctctgcctttcaatttatcccagctccattactgtacttttgggtgacacaagtgagccaacccaagccagccacagtacagcttctcgaaagtaggcctgtaacataaggaagaagcaagaggagttagcagtaattaattatacacactagctccttgtactgctc

SEQ ID NO: 734673 - DNA, 614 bp, Homo sapiens
attatgagacaaagaatcatttcaaactcaaacgtcccaacaaggctgtgcctttggggtccttgttattctaaactgaatcctttctccacatcacctagaagaaaaatgtcactcagataaaaaaaggttcctttacatggaattgtgtgtttaactggcaacatataattttatttttaaaaaaatgaagagcaattgctgttgaagccatttcagggacgagagaaggggaggctctgtcagcacaatgggaacaaaaaamtgttgtgcactaagcattattccaatcatttgcttcatagttaagtttaattgcacattacacactgtcctgtaattatgtcgcttggggaaccgccaaattcccccttgaaatgttagaagtcccttagtttattttaaagtcttggcgtcgcctccaccagcatcctgccttaatgcacagaggctacttggttcctgttcccttcaatgcatactgttgtcctgcgagggatccactctatggtctgactcctggtacagagggctgatgatgctcagagctcccagagcactggtccagtgcagtctgtttataatatactcgtgtgacttttttctttaaaact

SEQ ID NO: 734674 - DNA, 614 bp, Homo sapiens
attatgagacaaagaatcatttcaaactcaaacgtcccaacaaggctgtgcctttggggtccttgttattctaaactgaatcctttctccacatcacctagaagaaaaatgtcactcagataaaaaaaggttcctttacatggaattgtgtgtttaactggcaacatataattttatttttaaaaaaatgaagagcaattgctgttgaagccatttcagggacgagagaaggggaggctctgtcagcacaatgggaacaaaaaaatgttgtgcactaagcattattccaatcatttgcttcatagttaagtttaattgcacattacacactgtcctgtaattatgtcgcttggggaaccgccaaattcccccttgaaatgttagaagtcccttagtttattttaaagtcttggcgtcgcctccaccagcaycctgccttaatgcacagaggctacttggttcctgttcccttcaatgcatactgttgtcctgcgagggatccactctatggtctgactcctggtacagagggctgatgatgctcagagctcccagagcactggtccagtgcagtctgtttataatatactcgtgtgacttttttctttaaaact

SEQ ID NO: 734675 - DNA, 555 bp, Homo sapiens
ccatgaggacctcggccctgcagaaagcttctgcctggatacccaggcatttccatacatcctctgaaatctaggcagaggttcccaaacctcagttcttgacttctgtgcacctacaggctcaacaccacatggaagctgccaagacttggcaccctctgaagccacggtccaagctgtaccttggcctcttttagctatggctagagcagcggagacccagggcaccaagtccctaggctgcacacagcaagacgtccctgggcccagctcacaaaaccattttttcctcctaggcctctgggtctgtaataagaggtgctgctggaaaggtctctgacaagccctggattgtcttagcgattaacatttggctcctcattacttatgmaaatttatgcagccagcttgaatttcttctcagaaaatgggatttttcttttctgttgcatcatcaggctgcagattttccaaacttttatgttctgtttcccttttaaaactgaatgctttttacagcgcccaagtcacctcttgaatgctttgctttttaga

SEQ ID NO: 734676 - DNA, 581 bp, Homo sapiens
ccttggaaaaattaactttatctctctgaagtcaataaatatttttttctgtaaaactggataatggtagcacacacatccagcagcctatgctgatatcaaagtagtcagcctggggtgagctggtccattggtatataaggtgctgagcagaatataagcatgttattttttggctcttatgtatggcctcatgtgaatactgttactataaaacttaattgtgcttcatactcaaaccagttctcttttggggtaaaactgacttttgaaagaaatcagacagctatgaaaacattaattttgaaatgagaatttacatttctttgtgtatatttttcaagaaaattcagaatcattttaatactccaacttagtcaytcctaaaacgaatgatcgcaaataggttgacaactgataaatagtttcaaaagtcagataagaatttcttgtgttaaatatttacgccgacaaaaatattcatagatttgaaaattacttactaaatattaaataccatgttttctcaatagtgagagtttttttccatttttaacataaatttctaaaaagtttattat

SEQ ID NO: 734677 - DNA, 581 bp, Homo sapiens
attttcaatatcatatctttggtcaatggtgtatggagaattacatgtcttaacttccaaatatgcagaggtttccagtgatttgatttatttttgctacttgtttaggacttaattgtattatagtaacagattgcatgctgtggattattgctatgttttttagttactaaaatttgtaaaaattagtttttagtttagggtcagttttttwaaatttgtgaattctcagggtgtgcttatatagagtgttggcagtgatatcattaaaaatcaatggttgatatgtccatgaagtcaagtttttaatagttttctcaaagtattgagtccttttttttctgattgacttatcagttgttgagaggatgaaatttgactccaacagtgatggtggatttttctattttctcttacatatagcaccatcagttttcacttcttgtatggtgagccaatgcgattgtttattaatttatttttacagttttatgttctttttaaaattttttttgcatataagttggtgttatcagatacatgtagataacaaaacggttaatagaatgaagcaaatgaac

SEQ ID NO: 734678 - DNA, 581 bp, Homo sapiens
attttcaatatcatatctttggtcaatggtgtatggagaattacatgtcttaacttccaaatatgcagaggtttccagtgatttgatttatttttgctacttgtttaggacttaattgtattatagtaacagattgcatgctgtggattattgctatgttttttagttactaaaatttgtaaaaattagtttttagtttagggtcagtttttttaaatttgtgaattctcagggtgtgcttatatagagtgttggcagtgatatcattaaaaatcaatggttgatatgtccatgaagtcaagtttttaatagttttctcaaagtattgagtccttttttttctgattgacttatcagttgttgagaggatgaaatttgactmcaacagtgatggtggatttttctattttctcttacatatagcaccatcagttttcacttcttgtatggtgagccaatgcgattgtttattaatttatttttacagttttatgttctttttaaaattttttttgcatataagttggtgttatcagatacatgtagataacaaaacggttaatagaatgaagcaaatgaac

SEQ ID NO: 734679 - DNA, 581 bp, Homo sapiens
attttcaatatcatatctttggtcaatggtgtatggagaattacatgtcttaacttccaaatatgcagaggtttccagtgatttgatttatttttgctacttgtttaggacttaattgtattatagtaacagattgcatgctgtggattattgctatgttttttagttactaaaatttgtaaaaattagtttttagtttagggtcagtttttttaaatttgtgaattctcagggtgtgcttatatagagtgttggcagtgatatcattaaaaatcaatggttgatatgtccatgaagtcaagtttttaatagttttctcaaagtattgagtccttttttttctgattgacttatcagttgttgagaggatgaaatttgactccaacagtgatggtggatttttctattttctcttacatatagcaccatcagttttcacttcttgtatggtgagccaatgcgattgtttattaatttatttttacagttttatgttctttttaaaattttttttgcatataagttggtgttatcagatacatgtagataacaaaayggttaatagaatgaagcaaatgaac

SEQ ID NO: 734680 - DNA, 671 bp, Homo sapiens
acctgcaagagatagaagataaagctgttcaatttgccatggataaaatattagtttgttagctattttctaaataaattttatacttaaatggctaaatattttatcatcatgtatttctcttgctagaaaatctatttgagaaaacaaacacacatgtattagaagttggctaagatacttcattcttttttttttttttttttttttttttttttttttttttgagatggagtctcgctctgtcacccaggctggagtgcagtggcgygatctcggctcactgcaagctccgcctcctgggttcacgccatcctcctgcctcagcctccggaatagctgggactacgggtgtccaccaccatgcctggctaattttttgcatttttagtagagacggggttgcaccgtgttagccaggatggtcttgatctcctgaccttgtgatccgaccgtctcagcctcccattctttattttaataaggataccatgccccagacttgattcatctctgaaatatgactacagtttggtttcttctttccccatgattctgctaagtattttctatcaaggttagcccttccaacattctatccctgctgaaagcctttcttactttcacttttccgattttcgtttgatttttaagacttttatcttttcatt

SEQ ID NO: 734681 - DNA, 495 bp, Homo sapiens
tgactcctcaaaaagttccagtggtcctccattttactcaaagtaaaagacaggggtttgcaattacctacaagagctaactgcccattaccatctctaagttgccttgtttattcattttgtgcagcaaccctggctggctagcattcctaacacttggccctcatatatttacaaaatgacctmcctcatgtaaagccactctttggataacactttcttaacaaggtctaacttagacaacctatttaatatagcagccttcatccatcgctactcaagtactcacaatccccttaccttttactagtttttcttttttcccatagcatatattatcttttaatgtagtttgtaatttgcttgtttgttttattatggtctcttcatgtcagaatgtaaagttgcaaaatgtcttgtttgtttgttatattatggtctcctcatgtcagaatgtaaagttgcaaaatggcaagttcatctttcttgattact

SEQ ID NO: 734682 - DNA, 511 bp, Homo sapiens
tgtattcagatggtggcagctccatcagtctgtgttgcagaattagagaaacaaacagagcctccaaatgacctgcactggacatgtagtgtgagtgagaaacacatatttgttgtttaagcgactgaaattgggattatttttactactatgttgtaacgaagactttcctgattaaaccaccctgccattaaaagtcacatgtgcacaaatgagagcatatgtcaaatccaggagaaagctatccctaaggttatctyactttatctcatgagatcatctgaaagtttcatgtctgcatgccaaaatttagcttgctaacatttaacttgacatagctccctagacataggaaaaactaaaatactctaaaacctgatctgtcatagtgacactgttcctcacaggaattttatgaagggacaggaaaggaaggggtagaatagagctgtaattccctcctgcacatccagcagagtttatgcttaataaaaaagcacaaaatatatat

SEQ ID NO: 734683 - DNA, 494 bp, Homo sapiens
gagacatgaggactaatgaagtatcaggggttggatcctggaccagaagagaaacattggtggaaaaattgatgaaatgcacataaaagtctgggttagtctgtcttagttaatgggtggtgcaccaatgttaatctcttcattttgataaatgtatcacggttctgtaggatgttaatattagggaaagctgagcaaagggtatatggaaactctttattctatcgttgtaagtcgtcataatttaaagaatttaaaaataaaaagttaaaaaatacccaaaaacattggtttaaattattgcttcctagtttacagyaataacctctctattggtctgtgtatcttcatttttccttacaatccattctccactttaccaccagaaagatatttctaaaatgaaaaaatgaccatcttttaaacaacgttcagttgctcctcatagctttcaaaataaaggtcaaatttattagtttatccttttctgtagg

SEQ ID NO: 734684 - DNA, 502 bp, Homo sapiens
tcccaggataatgtattatttcttttttgcactgaataatatttcattatttggatgtgccattgtttatttatcgaatcacttactgaaggacatcttggttgcttataagttttggcaattatgaataaaactcctataaacatctgcgtgcaggctttgtgtgaacataagttgttaatcactttgagtaaatagcatggagtgtaattattggttcatatggtaagagtatgttcggttttgtaagaamctaccaaactgactttcaaagtggctgtatcattttgcattcccaccagcaacgaatgagagttcctgttgttccacatcattgctagcatctggtattgtcagtattctggattttggccattctaatagatgtgcaatgtatctcactgttttaatttgcatttccctgatgacatatgatagggagcatcttttcatatgcttatgtgccttctgtatatctttcctgttgaggtatctcaaggtt

SEQ ID NO: 734685 - DNA, 483 bp, Homo sapiens
ctaatttctcaggttggttaggctctggtaaagcctcagcatgttaggctctggttaaataattccccctgcctgatattcactatgagcatcttttcacactcttgtaggtaaaagtcacaaaaggtagggtcacacctatgactgggtccccctggagttttctctctcagatctatccacactaagcctccagcaattcatcaattacagttcaggtttccccacttttgcactggtttctgaggaggtttgtgttcatgggttcctgttttgatgtgttgtaactctctctatttgccygttggcctttcaatttttgggggcagcagtttgccttatgacctcatttctctgaatattctcagaaagtttgttgatttttcaatttgctcagcttttcacttgttgtgagacagtggtgacttccagcttcttacattccaaggccagaaaatggaggttcctttttttaacgtaacc

SEQ ID NO: 734686 - DNA, 626 bp, Homo sapiens
tattattacattaactcattaatttataatttttctaatagacaacaaacatgggaggcatgtgaaatggaatagagaagattagaatgactgagtgctctgggaagattagctttatctgaattgtcccaggatgcagaggaaagaacacaagagggcactaagtgtctgctcatgaccatgaagatgggtgtctctagggagcaaggctcatgaagagtttgctctcttcatgatataggctggaacaggccctggaaagtgctatagtgtgaaaatagtcaaaacattacatagtgaatacagttgtaaatgtgcttaaatatacatasttcatggttaaaatttgtaaaattcttttagttgccaggagttgagctgaacttaaaatatttggagatggagattttagaaaccattttagatcatgtttagtttcagtttttacttcttcactagaactagaagattttaaaatggaatagaggggaaaatatttttgtgtgtggttctcaagatcagtatctggttctggcagatttatggctttgcagatagaggtcatctatggaggggtgtatttcctgctttctgggaaaatggaaggtaattgttgttttatattg

SEQ ID NO: 734687 - DNA, 741 bp, Homo sapiens
aagtagacataagggaccccattttaatctgtaaccttacccccaaccctgtgctccctgagacatgtgctgtgtcaactcagggttaaatggattaagggctgtgcaagatgtgattttttaaacagatgcttgaaggcagcatgctccttaagagtcatcaccactccctaatctcaagtacccagggacacaaaacactgcggaaggcctcagggacctcagcctaggaatgccaggtattgtccaaggtttctccccatgtgatagtccgaaatatggcctcatgggaagggaaagacctgactgtcccccagcccgacacccgtaaagggtctgtgctgaggaggattagtaaaagaggaaggaatgcctctttgcagttgagacaagaggaaggcatctgtctcctgcccgtccctgggcaatggaatgtctcggtgtaaaaccsgattgtatgttccatctactgagataggggaaaaccgccttagggctggaggtgggacatgcgggcagcaatattgctctttaaggcattgagatgtttatgtatatacctatctaaagcacagcacttaattctttaccttgtttatgatgcagagacctttgttcacgtgtttatctgctgaccttctctccactattatcctatgatcctgccacatccccctctcggagaaacacccaataatgatcaataaatactaagggaactcagaggccggtgtggatcct

SEQ ID NO: 734688 - DNA, 617 bp, Homo sapiens
cattcctggtcttaggctaagctaactttagtttatagtttacatgataataggctttccccaaaattcaatcacctttgtaaagctaatgaaaggccatcaggctaggagaagggcaggaattctgctaaggcatagactggtcacaagatctgtcctacagataacatcactattgtagactggccttttgagacattttcccaggttttttgcaggtctgatacccatgactccacctggcccccaccaaccttgctcttgcttctgttgccccacccagaagtwagtcagctcaagaggacagcttcaacccactatgatttcatctctgccccagccaatcagcagcaagcatccattttagccacacccacccccttccccaaactgcctttgaaaaacccctaacctacaagtcttccaggagattgatatgagtagtaacttggtctcctgtatggcatggccagcctcacgtcaattaaactctttctttaccgcaatgctgtggtctttatttgtgcagtggggcaggaagaacttgttgggtggtcacattaccatactaatcttcctaaaacaaaacaaacaaaacttaatactcagcatattta

SEQ ID NO: 734689 - DNA, 522 bp, Homo sapiens
tcagtcaagtgtttgaaatagtggagttcagacagtacatttttattctgtcctttcaatcttcttttaagactctatctttgaaggccactgaagccttacctccttccaaggcccctcccagatcacagaagcacccatatttgcccctctccgtttgcaatatcgatggctattatggtcatctcccactggtcctactttctggaatggtttcttaatagattcatgaagtwcacaggaacctcaggtctctggtataattatgatgataattttgacaaccatatctactattgtgaacttctttatgtgccttaatctctatacaatcattgtgctcacaataaccctaaaaggtaatgttattacaatttccacattataaagaagttgaacctgagaaagctcctgactcactcagggtcacacagcccgagagctggctgagctgggatatgaagatgtcgatctgactccaacaatcttagcttttgactgtctccatagaaggcactatct

SEQ ID NO: 734690 - DNA, 522 bp, Homo sapiens
tcagtcaagtgtttgaaatagtggagttcagacagtacatttttattctgtcctttcaatcttcttttaagactctatctttgaaggccactgaagccttacctccttccaaggcccctcccagatcacagaagcacccatatttgcccctctccgtttgcaatatcgatggctattatggtcatctcccactggtcctactttctggaatggtttcttaatagattcatgaagtacacaggaacctcaggtctctggtataattatgatgataattttgacaaccatatctactattgtgaacttstttatgtgccttaatctctatacaatcattgtgctcacaataaccctaaaaggtaatgttattacaatttccacattataaagaagttgaacctgagaaagctcctgactcactcagggtcacacagcccgagagctggctgagctgggatatgaagatgtcgatctgactccaacaatcttagcttttgactgtctccatagaaggcactatct

SEQ ID NO: 734691 - DNA, 511 bp, Homo sapiens
tgaaggtgccattaagcatagcggcaagagatgattttccggttggtaccctgttgtcctttactgaagccggtttacaccaccctcatgtgaatcagaccctggatgtggagatacgtgccacccacggtgcttctaggtccccccaccgctggcacaattagatttctttaaggaattaggaaatgaaactctatattaaaattcattgctgagaacactacctaccttaatattttytgctgttcaaaattttcctctgaaaacaattagaggctgatggggtgtgcatttgacagtgcaaatggagctacaaatgacctgggtgggcttcagctaagcacagggcagcttaggaatgtattaagtggagtaattatctcatatggttttcccttgggttcagtgacatctacaaagttcgtttttctaagttcctccttctacaaatttaaactcaagggaaataggatccatatgtccctgattaatttgcactaactcatcaaat

SEQ ID NO: 734692 - DNA, 563 bp, Homo sapiens
catgagccaccatacctggtcaaatttcttttagaggaaaaaaaacctatgccttgctgtaaatgaacatttcttctgaatgtacaatatgtgctaactaactttagagggatacaacatgaagtttgagaaagtatattttccaaaaggattgaaatgtatagatgcacttgctcagtgataggtaatactttaaaatatgtattaggataactataggatttccaggggctttttgtttatttgctttatttttgctctttgtagcagaagtacaaatggcagactctacaaggtcttcaaagaatgttttctgggtaattctgagatcaatgtaaaaacacctgggagctacaggtgcttgggggttacagaagaacatctaaaaaaacacatcctggtgttctcactccttgtggtaawaaactctcaggggctggaggactaggcttacccccatggctacagctaggtctacaactattaacagacatatgcgtgcaaaaagacaaggcctgtctcagggagctgacggagggcctggctgtaccttcacagcccat

SEQ ID NO: 734693 - DNA, 623 bp, Homo sapiens
attaaatcccttccataaatgttgactgaggggctccagctttcctccaacattaggagggcagcgggtctcaccagatttacccgtcatccttagggaagcggggaattggtggatccggacacagccaaagaactcctgagcaccaggggcctccgctcctggggcagtgagagagtggcagccagagaggtctctccctgccccttctcacatcatcatctctctaggtggtggacactcatgctttcctggaaaacagcggaagcagctggctcacccagggtygcacaatcagggcttcatggggaaaacaccaaacacacacacacacacacacacacacacacacacacacacacacacaaataacccctacattaacccctatgggccttgagctacagcacacattttagcagcgccacagaaggtgccaaagtgtttctattgtctccggctgttttctgcatatattcattatattaaaaccactgtctcctctttggatattaaatctcgagggcagggactctatgaccactttcagaatcctccaacttggagtctcggtactccttaatgaaaactgcacataaaagaaacattgccattgtttaaaa

SEQ ID NO: 734694 - DNA, 577 bp, Homo sapiens
tgactgaggggctccagctttcctccaacattaggagggcagcgggtctcaccagatttacccgtcatccttagggaagcggggaattggtggatccggacacagccaaagaactcctgagcaccaggggcctccgctcctggggcagtgagagagtggcagccagagaggtctctccctgccccttctcacatcatcatctctctaggtggtggacactcatgctttcctggaaaacagcggaagcagctggctcacccagggtcgcacaatcagggcttcatggggaaaacaccaaacacacacacacacacacacacacacacacacacacacacacacacaaataacccctacattaacccctatgggccttgagctacagcacacattttagcagcgccacagaaggtgccaaagtgtttctattgtctccggctgttttctgcatatattcattatattaaaaccactgtctcctctttggatattaaatctcgagggcagggactctatgaccactttcagaatcctccaacttggagtctcggtrctccttaatgaaaactgcacataa

SEQ ID NO: 734695 - DNA, 600 bp, Homo sapiens
taggaagtagcactcaagattaggagaaaaaataagtttattctggatcaaaaattttttaactttttcagattaatctgtttttttcctataatgttcttaaaaattctagagacaattttctctatgcacctttgaaaatgaaataaatgtaaygactaaaaccaagcaaagtgaaatagattatccttcacaatggaggtgaaatccaagagataattcaaaaaaattacgtatctcaagttcctgtctgtcagatttggcaccagagatttcatccagtggaattactgatttggaacctaaatagaattttattttccaagttccagtattttcaattttcatgaaattcaggccttcataaataaataaataggagaaaacaggctctacatctcagaagaaaagattcctgtgggttccttgcccctactctgaagtataatcattaaggaattcccaagggactaaaaggttataacttagaatttatatttcactcttattaggaatacaggtaaaatagtataacttatctaacaataagcaatgagaaatgtggagaaggcaagtttcaggaaatcaaagatcataatt

SEQ ID NO: 734696 - DNA, 600 bp, Homo sapiens
taggaagtagcactcaagattaggagaaaaaataagtttattctggatcaaaaattttttaactttttcagattaatctgtttttttcctataatgttcttaaaaattctagagacaattttctctatgcacctttgaaaatgaaataaatgtaacgactaaaaccaagcaaagtgaaatagattatccttcacaatggaggtgaaatccaagagataattcaaaaaaattacgtatctcaagttcctgtctgtcagatttggcaccagagatttcatccagtggaattactgatttggaacctaaatagaattttattttccaagttccagtattttyaattttcatgaaattcaggccttcataaataaataaataggagaaaacaggctctacatctcagaagaaaagattcctgtgggttccttgcccctactctgaagtataatcattaaggaattcccaagggactaaaaggttataacttagaatttatatttcactcttattaggaatacaggtaaaatagtataacttatctaacaataagcaatgagaaatgtggagaaggcaagtttcaggaaatcaaagatcataatt

SEQ ID NO: 734697 - DNA, 588 bp, Homo sapiens
caaaggccttcctcatctgaatttgtaaaagtattctcctatattttattttagtacatttatgattttcacttttcacatttgaatctttgatccatttgtaatttaagtatatagataaagtagtgaacattcatgcagctgcacagttgtatcaaatcttaactttttatgttaactccactttattgagatacaattttcagacaataagatgcatcaattgaaagtgcgcaggtcaggctgggcacagtggctcacgcttgtaatcccagtgctttgggaggccaaggtgggaggatcagttgaggttaggagtttatgccagcctgggcaacataatgaggccccatctctaaaaaaawttttttaaattagccaggcatggtggcatgtgcctgtagtcccagctacttgggaagctgaggtgggaagacaacttgagcccagtaattcaaggcttcagtgagctatgatcatgctactaaactccagcctgggcaatagagtgagaccctgtgtctaaaaataaaaataaaagtaggcagcttcatggagtttgaaagcacatgaatttgtgtaatcaac

SEQ ID NO: 734698 - DNA, 588 bp, Homo sapiens
caaaggccttcctcatctgaatttgtaaaagtattctcctatattttattttagtacatttatgattttcacttttcacatttgaatctttgatccatttgtaatttaagtatatagataaagtagtgaacattcatgcagctgcacagttgtatcaaatcttaactttttatgttaactccactttattgagatacaattttcagacaataagatgcatcaattgaaagtgcgcaggtcaggctgggcacagtggctcacgcttgtaatcccagtgctttgggaggccaaggtgggaggatcagttgaggttaggagtttatgccagcctgggcaacataatgaggccccatctctaaaaaaatttttttaaattagccaggcatggtggcatgtgcctgtagtcccagctacttgggaagctgaggtgggaagacmacttgagcccagtaattcaaggcttcagtgagctatgatcatgctactaaactccagcctgggcaatagagtgagaccctgtgtctaaaaataaaaataaaagtaggcagcttcatggagtttgaaagcacatgaatttgtgtaatcaac

SEQ ID NO: 734699 - DNA, 627 bp, Homo sapiens
ttaagtgttacaataacttcagaccccaataaaatagaagagttaattcaatctagtcactgccccacctcaagcaacattagggcttgaagccatcctcaccccattgggagcctaccccatcgtgccagggtttgcagggaaagtcaaacattatcttccagaggaaacactaggcgggtaccctggytcgaaaccttctggtttcccattcccacgtcctgctccagcacttcctctgagctgctcttcattctccagctgccctccagactcgtggaggcagtgtgggaacctgagaagccatttgcagtcactgtgctgtccccataggtcaatgtgaggtcgccttcagtcagaataaaatcagagtttccctctctcagtggctcttggttatcgtacacctggggactggtcagacatcaagctagcaagctacaccaggcgggagagtggtggttggcggggagccgctttgtctacaccaggcaggagagtggtggttagcggggagccgctgtgtctccaccaggcgggagagtggtggttagcggggagccgctgtgtgtgaggatgggcttcaggtaattgtgatcaaagctgtaccaccgcctgaatatccat

SEQ ID NO: 734700 - DNA, 623 bp, Homo sapiens
ctctgctattattgtattgcagtctagctctccctttagatctattaatgcttgctttatatacttgggtgctcttatgttgcatgcatagatatttataattgttatatcctctagctgaattaacctctttatcattatatagtgactttctaccctctttttacggactttggcttgtagtctatctgataaaaggatagctagtcctgctctttttttggtttccatttgcatggaatatcttttatccattccttaactgtcagtctatgtgagcctttataggtgaagcaagtttcttataggtggcatattgtttggtcttgtttctttatccattcagccactctgtcatttaattagaaaatttagtccacttacattcaatgttatcattgataggtaaaaacttactactgacattttgttacytgttttatgtttttttttttttatttcattttgttttttttaactcctctcttcctttctactgtcttctgtggttattttctttggcagtatgttttattttgttgctcttaatttttagtgcatttattatagtttttgctttgtggttaccacgaggcttacaaaaaaacctcttataaatataa

SEQ ID NO: 734701 - DNA, 473 bp, Homo sapiens
ctacccaccctctacaatgtgattgtataggagaaacgatagtacagtatatatagagttcagtattataagcagtttcagacatccattggggatcctggaatgtatcccctgtggaaaaggggtgactactgtaataaaacaatttaagatgatataagagaaaccaaacatgtatgtcagataaataaaagtcagacacattcactwctttaaaggactctaattggattttaagaagtctaaactcaaaaaagtgatataatatgtaagaaaagttactcaaaaaattggaagtatcatttccatccttttaggatgggaaaatacagtaagcaaatgaaaataaaagtaaagcaggggtcaggatattaaggatattaatgttaggcatggttgaattcgaggaatagaactttatggtaataataagtaaatgcaacccacaatgaaattctgagcctaatgcatct

SEQ ID NO: 734702 - DNA, 627 bp, Homo sapiens
tgtgtgtgtgttgaaacttaacatctggaatggaggtggaaggcaagactgagagattggagatggcgtcagagagctcctagcaggtatgtcaaggctctgatccaatctctgggctagcagaagcctccagcagctctctggggcaggagcataaggaaactctaagmtctgtacttctgctttagcactaaaccagtacaatgtagtctcccaaccaggaaatggatggagactccaactcagatgctgtagatctttgctaaggccattcaatccattcacaatagagtcaaaatgagatctctggaagttctgaaaactcttattgtgattcaggtcacagaattaattttctgatcctataagctcaatatctatgtcctatcttgaaccctttatccacttttatgtacataaatctttgtctttatcagtgactattttagagtgtacccctaaaaatagcattaagtacaaggatttaacattttaaggctcatcatccatactgcaaacagctttccagaaaagctgtgtcaattcgcactggctctgccacacctacccaccactaagtatcatgattgaaaaacggaaatctttgcagtacagggacagataatg

SEQ ID NO: 734703 - DNA, 580 bp, Homo sapiens
tcttccttgagcaatgtgtctcaaaatacgatgaagttgaaagctctaaaatgggcggaaatttaagtaataacaacaacaacaataatacaaagctctaatttgcatctttaatgcattttattcttcccaagtaataacatatactcattttcatttggttttcatgatgtaacagttcctgtttatgataaggaaactgtmagagagattataactcctccagtatcaacaagctatgaaaatatgaaaccaggattcgaattcaggtctcacagttccacacccactattttttcacttcaactacattaaaacaataaaaaatattagtaaatgcaaatgtctgaaataaatgaggaaaatcaccattttaaaattagcaagctgcttctgtcttctagactagagatttggatttatctttgtggcagacagtcccgttgttctgggaaaaggaaaaagaaaacatatgcttgagaggggctctgcggttatgcaagtagaaagcaaacatctgctcgccttttttggaaaagactcgaatgcagtgaaacatccctaatgttcatgcgtcctt

SEQ ID NO: 734704 - DNA, 496 bp, Homo sapiens
cagaggaggaggagaaggaggctgaatttattctaaaagtaaacccactcttaggataactaacccattctcaataatgacattaatccattcatgagggcacagccgtcatgacctaatcacctcttaaaggtccctgtctcaacactattgtgttggagattaagtttacaatacctgaacttcttacaaaccacagcacattcttaggggtagttttatggcaatttgttctgcccagtattctatgaggatctattgtttygctacgtattttgaaattgccaaaaaaaaaaaaaaaggaaaaaagaaaaaagatattgtcccctccccagttcttggaagttcttttttgtgtgtttttttctattctgtttgtttgcttgttcttcattttctctctctgcatttcagtttgggaagtttctatttacctatcttcaagctcactgattctcttcaagctcactgatacgttgtgtttactggagcctat

SEQ ID NO: 734705 - DNA, 606 bp, Homo sapiens
tgaaatttatgtcattaatgaatatccccttgcccacaaccagctcaggctttcaaaattcgagaatggtcatgccacacagcattctaatctagatggattaattctgttgttcaaaacattctcatacctgcctttatattgaaaacaaattctagatacaactggggttattctggaaaagcacattctcaccttttttttttttttgagacggagtctcgcactgtcgcagggctggagtgcattgtcgtgatctctgctcactgcaacctctgcctcctgggttcaagcgattctcctgcctcagtctcctgagtagctgggattacaggtgcccaccaccacgcccagctaatttttgtatttttagtagaratgaggtttcaccatgttggccaggctggtctctaactcctgacctcgtgattcacccgccttggtctcccaaagtagtgggattacaggcgtgagccgtgcgcctggcccattctcatcttattcaaattactggcacatgggcaagagagacaatgacatggatagaagcttttctgcctttctctgcacacacatacagtgaaggaaccacaggcagattttttg

SEQ ID NO: 734706 - DNA, 604 bp, Homo sapiens
atatttattccattcataagattggatcctttctcccatttctgatttatatatactttacctccttcttgcaattgtaatcctgtcctacacactagtctgtttggctgggcttcaagcttctgtctggttcctgccgactccttacccctggggaaatgcagtctgtttccaactggacaggccatgtggaagcatattgctaccactctgccaggtgtacttagaagtttttgctctcctctttcaccttcaagaactaactaatttctttgagcacttatagaattccagatcaaggctaaatttcccattcctcttaggygtgtagaccatctctcttctcaaagcactgaccctggggctgatcagacaatcagttttgagctcatccgtcccagaatccttccttcttcatggcattggcaaatgccaccaacttctcagcctgctcagggtcaagccagctcatgaaaggacaccctctggtgtgctttctggctgtttcaggaccacaagaagaagcagcagctcgcaagaaacatgttgctaaatagacctggcttctatgggaatcccggagttaagcattcccacccctttg

SEQ ID NO: 734707 - DNA, 561 bp, Homo sapiens
tattcatggaaatgccaaattatcaaagtagtcatttttgaaaccgaaatcttttggacttcttggttaggtattttatatttttgtatcttcagtaaaaaacaacatcaaaatctcagtggctgaaaataaccaagatggattgtttgcttatactacatattcaccatgtgatattgttaggctttgtgtccccacccaaatctcatcttgarttgtaagccccataatccccatgtgtcaagggagagaccaggtggaggtaattgaatcatgggggtggtttcccccatgctgttcttgtaatagtgagttctcaagagatcaatagttttataaggggctcttccccctccccgccgctgagcacttctccttcctaccaccttgtgaagaaggtgccttgctgcttttttgtcttccaccatgattgtaagtttcctgaggtctccccagccatgctgaactgtgagtcaattaaacctctttcctttataaattacccagtctcaggcaattctttacagcactatgaaaacagactaatacaccatgggtcag

SEQ ID NO: 734708 - DNA, 623 bp, Homo sapiens
gggtgggcctcatccaatcagttgaaggccttgggaccaaaaacttggaggagaaattctgccttaagactgcagcctcagctcacacaggaatttccagcctgccagcctgccctatggattttagactttctagccctgagaattgcatgagctaattcctgaaagtaaataagctaataaatacttgtatattatgttattgtattattttatataatacaatatataaactatatcacacaattatgttgtgtgatatataaactatatcacaattatgttacctttgtaattgatatataaactatatcacacaattatgttacctttatataatataataattayatgctatttctaataaaatttctattacattatatattctatattatgttatgtgccaaattataaattataaatacatgtaaatttatgtataaatactaataataatttataatttgctatataacataatatggaatataatgtatatattccatattatgttatatattatattacatattatgttatagattatattccatattatgttatacagcaaattataaattattgttttttcttaatgatatgaaatatatatatataaa

SEQ ID NO: 734709 - DNA, 623 bp, Homo sapiens
gggtgggcctcatccaatcagttgaaggccttgggaccaaaaacttggaggagaaattctgccttaagactgcagcctcagctcacacaggaatttccagcctgccagcctgccctatggattttagactttctagccctgagaattgcatgagctaattcctgaaagtaaataagctaataaatacttgtatattatgttattgtattattttatataatacaatatataaactatatcacacaattatgttgtgtgatatataaactatatcacaattatgttacctttgtaattgatatataaactatatcacacaattatgttacctttatataatataataattacatgctatttctaataaaatttctattacattatatattctatattatgttatgtgccaaattataaattataaatacatgtaaatttatgtataaatactwataataatttataatttgctatataacataatatggaatataatgtatatattccatattatgttatatattatattacatattatgttatagattatattccatattatgttatacagcaaattataaattattgttttttcttaatgatatgaaatatatatatataaa

SEQ ID NO: 734710 - DNA, 614 bp, Homo sapiens
ttggatggaactggaggccaatattctaagtgaagtgactcaggaatggaaaaccaaatgcttcatgttactcacttataagtgggagctgcactatgggtgcacaaaagcatacagcatggtataagggacattggaggctcasaagctggaatcgtgggaaggggattgaatgatgaaaaaacacctattgggtacaacgtacaagacttgagtgacaggttcactgaaatgttagacttcacgactatatagttcatccatgtaaccgaaaaccacttgtacacctaaagctactgaaattaaaaaaaaagtaaaataaaaataagtaaatctatatccaatagcatataacaaaagaaaaaagttcagataccccattctcaaagcactattcagttggtgtgtacctggcagaaacactgtatcctgtatattttcagtctgttttagcaaaaacaagtttcttgtatcaccccaggctaatattcctatatcagaaatgcactgaagtatcttcttttcttttgtgctctctatcagaccaagatctgtaggagtactttttgattgccactttcattttagataattttcacttcaacacctcagat

SEQ ID NO: 734711 - DNA, 614 bp, Homo sapiens
ttggatggaactggaggccaatattctaagtgaagtgactcaggaatggaaaaccaaatgcttcatgttactcacttataagtgggagctgcactatgggtgcacaaaagcatacagcatggtataagggacattggaggctcacaagctggaatcgtgggaaggggattgaatgatgaaaaaacacctattgggtacaacgtacaagacttgagtgacaggttcactgaaatgttagacttcacgactatatagttcatccatgtaaccgaaaaccacttgtacacctaaagctactgaaattaaaaaaaaagtaaaataaaaataagtaaatctatatccaatagcatataacaaaagaaaaaagttcagataccccattctcaaagcactattcarttggtgtgtacctggcagaaacactgtatcctgtatattttcagtctgttttagcaaaaacaagtttcttgtatcaccccaggctaatattcctatatcagaaatgcactgaagtatcttcttttcttttgtgctctctatcagaccaagatctgtaggagtactttttgattgccactttcattttagataattttcacttcaacacctcagat

SEQ ID NO: 734712 - DNA, 532 bp, Homo sapiens
attattgcactccagcctgggcgacggagtgagacggcttctaagtaaataaataaataaataaataaataaataaacatacatcagactactttgtacagggcttgttcattttctacactgtcttccctatccactagccctcccgcagccactccacagttgtakgtactgtactggatgcccacctgtctcctgtggacatatcacactacacatgaaaatttctatggagtgacattcccagaaaagctaaaatcctattagtctctcttggtcagttaagctcaacagtgtttgacatttttgctagaatcatgtcctatgctagaccttcagtgtaagaaagtgaatagcataagaaacttgattttgggtgggagataaaacaataatgggtgcaaagattttaaaaagtgaccaccttgcctttattctgcttttcagattgtctcctcatggtggcaggaacatgaagggaaatgtctaattttctcctttcatttaatcataaaatactaatttttggagg

SEQ ID NO: 734713 - DNA, 589 bp, Homo sapiens
tctatataagggaaagagatttattaacactatttccatttgtagattattttaaggatccagtaggaagtaagacagacaagaaaccctttcagctgttgagcaatgaggcctcacagagtataagaactttgttcttggagtcatactgggatctcaagagccatcctcttggtttttccctcggatacacatgttcactsctccctaatccattgccccaccgtgacagcagtgcagccaccctcgctctattctgtctgctggcactgctgtgagatggctcctctctgcctgctggcttcttccaatcttggcttcttctgtctcgtggcttacacctatggcttttattcctgtgtatgtttccacttctgtccattcactgcttcatctcactttccaattccccccagtacagggtttaatacagtgtgtggacctgggtctaggctataacttcataagcttttcccctgctgctactggctaggctcacttctttagtccaattacacaattacacagaggtagctttttgaacttgaaagggaagagaaggagactatgggttggaaggccgtctgta

SEQ ID NO: 734714 - DNA, 589 bp, Homo sapiens
tctatataagggaaagagatttattaacactatttccatttgtagattattttaaggatccagtaggaagtaagacagacaagaaaccctttcagctgttgagcaatgaggcctcacagagtataagaactttgttcttggagtcatactgggatctcaagagccatcctcttggtttttccctcggatacacatgttcactgctccctaatccattgccccaccrtgacagcagtgcagccaccctcgctctattctgtctgctggcactgctgtgagatggctcctctctgcctgctggcttcttccaatcttggcttcttctgtctcgtggcttacacctatggcttttattcctgtgtatgtttccacttctgtccattcactgcttcatctcactttccaattccccccagtacagggtttaatacagtgtgtggacctgggtctaggctataacttcataagcttttcccctgctgctactggctaggctcacttctttagtccaattacacaattacacagaggtagctttttgaacttgaaagggaagagaaggagactatgggttggaaggccgtctgta

SEQ ID NO: 734715 - DNA, 589 bp, Homo sapiens
tctatataagggaaagagatttattaacactatttccatttgtagattattttaaggatccagtaggaagtaagacagacaagaaaccctttcagctgttgagcaatgaggcctcacagagtataagaactttgttcttggagtcatactgggatctcaagagccatcctcttggtttttccctcggatacacatgttcactgctccctaatccattgccccaccgygacagcagtgcagccaccctcgctctattctgtctgctggcactgctgtgagatggctcctctctgcctgctggcttcttccaatcttggcttcttctgtctcgtggcttacacctatggcttttattcctgtgtatgtttccacttctgtccattcactgcttcatctcactttccaattccccccagtacagggtttaatacagtgtgtggacctgggtctaggctataacttcataagcttttcccctgctgctactggctaggctcacttctttagtccaattacacaattacacagaggtagctttttgaacttgaaagggaagagaaggagactatgggttggaaggccgtctgta

SEQ ID NO: 734716 - DNA, 651 bp, Homo sapiens
tattctgtctgctggcactgctgtgagatggctcctctctgcctgctggcttcttccaatcttggcttcttctgtctcgtggcttacacctatggcttttattcctgtgtatgtttccacttctgtccattcactgcttcatctcactttccaattccccccagtacagggtttaatacagtgtgtggacctgggtstaggctataacttcataagcttttcccctgctgctactggctaggctcacttctttagtccaattacacaattacacagaggtagctttttgaacttgaaagggaagagaaggagactatgggttggaaggccgtctgtaacccctgacaaaagagcagggtaattttctcattttgaagggccctgaacgccatgccagaagatgggaaaggtgaaattaaagggttttgagaagcagaggagagttcacaatgctcattagaattattcctttggcttcaatgggatggatgagccgaggttcagggaaaagacaccacttttgaggcaattgccatggtacagaacaaagacaataagtttctgagtatgtagaaataagacttgatatattgttactcctttccttacacaagaattttagagcagttacttgaaagacagacagagatg

SEQ ID NO: 734717 - DNA, 512 bp, Homo sapiens
tcaaagccctgacacagcaggatgttgattatttcaaaattacaaattagatccccattaaaatacatataattaagtgattaaatatggggaagtaatgtcctgcaaaatatttacagtctactaaccataagcaaatggtttgtttaaaaaaacaaacacacaaacatagtcctcctctctaggatggactaagatcatagatcagaggatttttgtttgtttttaatcacctctaagtctgactttttcccaataagattgggttttcaarggtacccagctcaggggatgagagacagagcaactgatgatcctgtccctctaatgatgattcgccttcccctgttgggagcccgaactctgctaagccatgaggtcaatcatcacaatctctggtttttgtttctcaagacatagaaattatgagatacttgtttctatttttataattaagatataatttatgtatagtgaaattcccccttccaatgtagagtttgtacatttgg

SEQ ID NO: 734718 - DNA, 625 bp, Homo sapiens
gagtaaggttgggctttcgagtcctgctttctcaaaggatcctggagctctgctgtgcacgtttgctcacatgccctccttctccccccacccatcacaggtcagtgctgtctcgcacaggagaaggtgctggcttcccctgacgtcctctgtgggtagactcacaggagctctgcattcagtgatcatgtgatgaggatcaggaatttcaaagaggaatttcagcactgcctgcactgaaataatcacgtttgacctcacaaggaacagcaggttgggcagaacgttaagtgtcaggcagcatgagagcccacacgcagggcacgcagcctgggactgaaccagaagaaggtctgccattgaggatttagcaaggggagtagctcatgatgaggcgagaaacaactgtttccagtcaggtccaacaacctccctgaggtaatcacaaagtcattctaatatctggactayagaaatccaaatttcgtctccatcctttggagctaaatttctgacgctcctttcaacaagatgagaacctgccactttggttggaaccaggccctgggcctcactgtgaaggctgaacgaggatgaccagagccgggaccttggacacactggg

SEQ ID NO: 734719 - DNA, 534 bp, Homo sapiens
taatatctggactatagaaatccaaatttcgtctccatcctttggagctaaatttctgacgctcctttcaacaagatgagaacctgccactttggttggaaccaggccctgggcctcactgtgaaggctgaacgaggatgaccagagccgggaccttggacacactgggaagtgaccatccagcaatgtgtsaggcctgggggaaggaggaaagaaagcagccgggggaggccttggggcagaaaagagatggacatggaggccattcaaagcaggggagagactcaaggcgtgagaagacaggcctggggctcaaggtggatctgttaaggtccgtggttacagcccgctgccccaggtgagggaggatgctactgaaggatgcggagttttttagggaactaccatgcaggttttccctcgaccatccccatcccttgattgaccttaccattctcccttcaggtaaactgaaaaacagaaccataacagagggatactcactctccactctggtacatattcatatttctt

SEQ ID NO: 734720 - DNA, 534 bp, Homo sapiens
taatatctggactatagaaatccaaatttcgtctccatcctttggagctaaatttctgacgctcctttcaacaagatgagaacctgccactttggttggaaccaggccctgggcctcactgtgaaggctgaacgaggatgaccagagccgggaccttggacacactgggaagtgaccatccagcaatgtgtgaggcctgggggaaggaggaaagaaagcagccgggggaggccttggggcagaaaagagatggacatggaggccattcaaagcaggggagrgactcaaggcgtgagaagacaggcctggggctcaaggtggatctgttaaggtccgtggttacagcccgctgccccaggtgagggaggatgctactgaaggatgcggagttttttagggaactaccatgcaggttttccctcgaccatccccatcccttgattgaccttaccattctcccttcaggtaaactgaaaaacagaaccataacagagggatactcactctccactctggtacatattcatatttctt

SEQ ID NO: 734721 - DNA, 646 bp, Homo sapiens
actttacttgcccctgtgaatgaagcagacacaagtcattctaggcggatggatctgattagagggactgagaggaccacagggtggggcgcaagacttctgagtggcagctgttatcacagtcatgagcagcatctgactctgattggcacctccacatcctgctgtcagagttyctaaatgagggaatatccactggacttcctttgcctcatcctgtttgctgtggagtccgatctccttccagatggcactggcatgtgcagagagagttgtacatttttcttgggaagagtgatagttattgaatccttctcagaaaagctccacgggtagagaataggtacaaaaatggaatgctagtcagagaagtatgtaaaatgttcaaagaaaatttctaggccccggaccatgttatttcctagagctattgtctaattttcaaaaggttcaaaaacacaaccctcacacaaatatgaacataatgtccaagttctattcagctcattaattagtgaggaagccactaagatgttaataggggttcaaaggagaatttgagaagctggatatttatggacagtttaatatgaggatattaggaaaagattgcttaggtgagagacacaattgattgatattttgt

SEQ ID NO: 734722 - DNA, 639 bp, Homo sapiens
tttcaaaaggttcaaaaacacaaccctcacacaaatatgaacataatgtccaagttctattcagctcattaattagtgaggaagccactaagatgttaataggggttcaaaggagaatttgagaagctggatatttatggacagtttaatatgaggatattaggaaaagattgcttaggtgagagacacaattgattgatattttgtgaggtcataaaccatatttgggaggaggtttcccccagtggatggtaattatttgcatctctacctgatgmaaatctataactttgcccctaacgaagctgtaaaatagctcagtcaacaaaaagtcaatcaaggacgcaaaaccagctctgcactgagaaaatacttactaatcttctttgcctatttcctaacttcagataacttttctgatattagaaagctctcagacagctcctcttaggagtctcaggcagaactatattaacatgaactacaaaagacagttcacacatcctattaatttctcaatataccttaaaataagggtaagatgagggaataaatgtctccgtgaatgagactccaagaagagcctagacaacatttggccaaattaaaagaacagactgctcagtggcacgtgtgtga

SEQ ID NO: 734723 - DNA, 666 bp, Homo sapiens
tgaaatcagggtgttggctgggaacttggggagaatcggttcctcatctcttctggcttccagtggttgccagcaattcttggcatgccttggcatgtagtggcatcagctcagtctctgcctctgtcttcacttggtattctytctctctctcgcctgtctctgctttcacttcttataaggacacaggtgattagattagtacccaccctaatccagtatgacttcatcttaactaaacacatctgcaaaatcactactgtacttccaaataagatcactgctatggactgaattgtgtcctcccaaaagtcgtattttgaatccctaaccctgttgtgactgtatttagagacaaggcccaaggaggttattaagatttaatgagattgtaaacatggagccttgaccctgtagtgctggtgcccttagaagaaaaagaaatgccagagctctttctctctgccatgtgaggacacagcaagaaggcggccatctgcagccctaggagagagccttcaccagaacccaagcctggtactgtacttccagtctccagaactatgagaagtaaatatctgttgtttaagtcacctagtttgtggcattttgttatgcagccagaacaaactaatacaatcacattctaagattcccagttgtcat

SEQ ID NO: 734724 - DNA, 666 bp, Homo sapiens
tgaaatcagggtgttggctgggaacttggggagaatcggttcctcatctcttctggcttccagtggttgccagcaattcttggcatgccttggcatgtagtggcatcagctcagtctctgcctctgtcttcacttggtattctctctctctctcgcctgtctctgctttcacttcttataaggacacaggtgattagattagtacccaccctaatccagtatgacttcatcttaactaaacacatctgcaaaatcactactgtacttccaaataagatcactgctatggactgaattgtgtcctcccaaaagtcrtattttgaatccctaaccctgttgtgactgtatttagagacaaggcccaaggaggttattaagatttaatgagattgtaaacatggagccttgaccctgtagtgctggtgcccttagaagaaaaagaaatgccagagctctttctctctgccatgtgaggacacagcaagaaggcggccatctgcagccctaggagagagccttcaccagaacccaagcctggtactgtacttccagtctccagaactatgagaagtaaatatctgttgtttaagtcacctagtttgtggcattttgttatgcagccagaacaaactaatacaatcacattctaagattcccagttgtcat

SEQ ID NO: 734725 - DNA, 674 bp, Homo sapiens
cccttagaagaaaaagaaatgccagagctctttctctctgccatgtgaggacacagcaagaaggcggccatctgcagccctaggagagagccttcaccagaacccaagcctggtactgtacttccagtctccagaactatgagaagtaaatatctgttgtttaagtcacctagtttgtggcattttgttatgcagccagaacaaactaatacaatcacattctaagattcccagttgtcatagttaatactgagtgtcaacttgattggactgaagsatgcaaagtattgttcctgggtgtgtctgtgaggttgttgccaaaggaggttaacgtttgagtcagtggactggaaaggcagacttaccctcagtctaggtgggcaccatctaatcaattgccagcttggccagaataaaaacaggcagaagaatgtgaaaaggctagactggcttagcctcccaacctacatctttctcccatgctggatgcttgctgccctagaacatcggactccaggttcttcagctttgggactcagactggcttccttgctcctcagcttgcagatggcttattgtgggacctcacctccttgtgatcctgtgagtcaatactccttaataaactcccctttatatatacatctatcctattagttctgtccctctagaga

SEQ ID NO: 734726 - DNA, 614 bp, Homo sapiens
gaggtaattgaatcatgggggcagatctttcctgtgctgttctcatgatagtgaataaacctcacgagatctgatggttttaaaaaggggagtttccctgaacaagccctcttctctggtctgcagccgtgtgagacgtgcctttcaccttccaccatgattgtgagacctccccagccacttggaactgtgagtccaataaatctctttcatttgtaaattgcccagtctcaggtatgtctttatcagcagatgaaaacagaccaacacagtgagattctgagggcctgaacttaggcagtttgggaagtgaaaaataaataggcaaatcctcgagctatgaggtgatagctcatagttaactttgtcatacattagggacagaaaagaggaagtgtgtccaaggggctggcacacggragagtgagccacaaggcaggaagttccttagaggtgatgggggagctccctcataggcaggaaattactattttgatttttgccattagttttcaagatgaggcaccccataccttgtgcatctgaagctccccgccaccagcacagcagagtaaatgtccagctctaagaatcggggtgcacagcctaaactg

SEQ ID NO: 734727 - DNA, 610 bp, Homo sapiens
ttatgtttcctcaagaattaagtgcccatttcttaacattttgtaaaatgttctggtttcacttactacctttctcggcaaggctttacttctctgtccatcctttgaaataattggtgaggtaaatctataattattgggagcagaattgattatcaaaagtaggaaaattattatgccaagtttttaagttgccrtgtgaaaatatcctatatagaaacatattcaatttgggtttaatattgtcaaaagcagtgaactataatattgaagcattttgttaaagctatgatcttgtttttccaaagtggaatatttaatggtcattgcagattttttcaatatgcattcatttatgtgaccattacaaaatacttctctaaaatttaaaagtccaactagcaaattatcctcttttgactttcttattacatccactataaccagattaaaaacatgtgaatcacaccatacattatcttgactctgtgtttttttttaaaacaaagtcaacccactaaaatatcctttgatgctcattcagctaaaattttacttttttttaaaggtgcattatttgatctgaaaatatctttaagtgcctagaata

SEQ ID NO: 734728 - DNA, 632 bp, Homo sapiens
tttacattacaggattgctgaatcttaggttatgacggagaatatctttcatgtcttcaggatagctctgtcaggtgaatagtcaacaacaatgtaaaacacttgatttccttttaactgctccagtgaccttagaactcagcttatcaacctctcaaaaatgagaaaggactaaatagctttttttccttgctattgaaaaagtcagccttctcaacgggaacagactacaaaataggggtcaaaggctaacagtagatactcttagactcctctgtgctagaaaacacaatgaatagatatgattttcttagtacacatactaaagtaataaaatcaatacaagaayggtctctttagaaactataagaactaatgtaactaataagcaagtgaaaagttgtgtaaatctgagtacatacacgatgaagtcagaatcaaacgcttagaattatatgctggttttgtcataatctcagtctttctccaagctccatttagttgtgaaggcaaagaattttcaggagaaatatgaacattcaattacatgtttgaaaatcagacatttacacatccacttgcgataagtgccagagttaacatcaaagatacgtgaaggacctcttgtccaa

SEQ ID NO: 734729 - DNA, 585 bp, Homo sapiens
gcttttgggatttctgaggtaaaagcagtcttgtttttgaagggtaaaactaaccatttcctagcctaccttgatgtttattaccacacccaataaattatttttgtttctggtagctaaaatgtttgacttgtactgcagttcagcaatagctcattatccttccctcacagtggaatatgtttggtaagaaaaaaaacatgttagttgaaagtaaattctgcaaagtattttcttcttagcaagaactgccaataacagtcaaatcaagcaattctacaaatattataaatgctttgatttaaagttcatgatcctcgattcaagtttccaataagaagggcagaaatacatgtgaaatttattttattagccagagaaaatgattacaaattaccttattttgtaaagtttgggtaggcccaaraaaagcattataaaacaataatcttaaaaacaaaaacaaaaactcccgcattgttaagatgaggaaattgagacccagagaagttaattgcattttatttattaacacactgaattctttttcattttgcaataagacaacttaattatcagtagtgg

SEQ ID NO: 734730 - DNA, 622 bp, Homo sapiens
atgtaaaatataattttggtgattttcactatgtttttgtttctacaatgccagcaaattacaggcagctaccaatttggagtgaaaagaatactgagctttaaaccactgcatttggttttaattctagctgcaggatggtgggcaaatgacctcacttctccaggccccagtcttgtcatccatgaaacaaaaggtttcagtcatatcaccaagattctcaacaattctaaaataattttattttctttacttctttgacaaagcatgtattgggttccttctatgtaccaaggaataacctagagtttttgagatacaaagaggtcattttttaaggaatttactgagtataccagtatatttcagaaattgtgcttcatgttgatggaactaygatgagtaaggcctagtctctaagctcaggagtgcaacatagggattagctaagtagatagcatattttgatattctgtgacaatttgttccatggagcggtactaatgcactatcaagggggagaaaaggggtagcctgcccagtgcaggtctggggatatgtttaagaaaggctttctggataagtagtaataaacagtaacaaatgttgctcttgtctagga

SEQ ID NO: 734731 - DNA, 471 bp, Homo sapiens
cctgatttcactgagcacttagaacttctgttttgaccatcttgctgttctgcgttgatttgccaatacagataatatgcacagggtgcaaatgtgcaatcttttcttctttttcttttggtctttttatctttttttgtcggggggagggtctatttctcaatcctgaagttcccctcmcagcattctcttcagtttattgaaagaatgtgacatgaaggagaaggtactttgtatgtttcctatcatgtgaaaaaagctcacttccatttgcacataggtcagcaaggaggtttcatctcctttaccagctttcatctctgtaacagctacttgtgagttttgttgtgaagtctcatccaggctctgagagaaagtgtgctgtgatcaagggaagatgcctacctctgagtgcagaagtgaaaagtttccattctagatagaggggcaaagttctgcaaatgaccagct

SEQ ID NO: 734732 - DNA, 649 bp, Homo sapiens
aatctctggcaaaccaaggacatcattaaaagggaagcatgaaatctgcgacgggttgtagaaagagactgtagtatcccaatattaaataaacaacaacagaattgatttatttgggaaataccataagtagaaccaagcttataaaatgctgagcgaactttttccataagaccttggttaggccattttatcataatctgatatataattgaacattgaaatacataagagagccaataaagccaagttaactttttatttgattaaatgacagcattagtatcatggtatggatattaacataacggaaattataggaaaagttgctatatgccttacctaggcaatgaaaaccrtaagaaccatgcagtcccaagaaaagaactgaaagcatgggagaacatgaagtattacagaattacagcttaagccaaatatgggtaactcagaaagaaaaaactaaatgtataggagggtattgcctaagactacattaaattaacatctggatatgccatatttttatgtaggatcatatacaaagaattttgattaaatattaattttatcaaagacaaagactaagttgaaatgacagttcatcatatgttaatataatttcatataacataacttggcatgtgcc

SEQ ID NO: 734733 - DNA, 613 bp, Homo sapiens
aatgtcagtaaaaaataccctagtttagggggcaggatctagcaccaagaggtaaataaaaacaattttgcattatttatttaatttttttaaattttacaataatgaatttactgcattgtcgcacaatttctgtctagactacattgtgttaaaaccttaccttttttgtattgtaagccttttgaattgttcctggcaccaaacagactgttctagcacaaaacctaatttacagtaatgcctaaagtgttcaagaagctatcattaagatttctttttcttttctcattttttaaggtatatgcttctcggtcagaaaattaaattagtggtggtgataatacattgcaatctttactgacaagtgagaaaggcaatgcacaatgcacagatagtctaacattttcaaaaccttccaggaactaaagacaccagttgctggaagatctggtctyggcctgtcagcctgccaaaaaaaaaaaaaaagttatttcctacaatataaactgactgaaaatgcctcacagtgtcttcaagagagctgggtcagggaagggaagatgatcatactgttagtttggctgtgttatctgtatgtgtttcggctgtt

SEQ ID NO: 734734 - DNA, 641 bp, Homo sapiens
ttcttcatttaccatcaaaattggcaagggagtatcaagagacacccaggtggatcacatgagtactgaacatattccttcctgaccccagtgtatgacagcaactctctctactcgtgatgatcaaggttaattatccctgctagcatagtaatttctttctttgctcttggtgtcytgacatgcagagaccaaagtgatcaggcagcaactgcagctcaaggcttagtataatgtctccttctgaaagcacttccctttaggtattatagtccctaaacttgcaggtatgggaagcacaaattccccaagtcaataaaagtaatggcagtaagaccactcctgttttctttccttgggtcttggacccaggtattctaaatattaaagacagagaaccatataatggtcattggtttaggttatataactgcatcatgaagtatcctactttatgaaggatagggtcttatcttcacggtctatcatctccaagctggctgtaattgcactattccattattctatcaggccagtttggtggagcagtatgtgatataaccaatggctcccatggccctgtgtccactaccacactttctttagtctagagtgttccttggtccaatgtgatgttatgt

SEQ ID NO: 734735 - DNA, 628 bp, Homo sapiens
ctgaagttgagtttggcttttgtggcatagagccaatctgagcacatttggaggtaatctaacccctgaacttatcacagaagtctttgacccgacctcctttgttggataccaggattttaccccactctgctcataamccactcctcattgtagtggcctagaaagaagaaacttgggtttggactccaaatcagctatgtgatcttgcaccttagacaaaaccaccatccctcttttgagatctcactgtgttacctgcatagtgagcaggttgggctcagccctccctcacagtgcatgattagaaggctcctgtcactctcacacacaagatttctttttgttctctttatgtaatttactctttgcttaactaatttaaaagaatttgtttgtttttgtaaagtttgtcttattaaaaagccacacattcttttagataatgtaaaaatgcagacaaacaacaagaataaagcaaatgaaattcatgcataatcttgccaaccagtaaaatgttacatgatatagcttccagatatttgtaacttgcttcttcagttaataacatatagagattatctgctcatgtacttaaacaggcagacagcatagtttactttgctga

SEQ ID NO: 734736 - DNA, 467 bp, Homo sapiens
gcatgtcaaagggcatagatagcatgttgaagaaatatcaaaccctgtaaatgtcatttatttacttatttaagtataaggaattatttttaactcctaaggacttttcatcacctaaaaagtttaactcctaaggacttttcatcacctaaaaagaaaaaaaaaaagcacaayacttaaaaacagaatagattaatgatgttgattatttcaaatataactgagatgtgttctggaactaaaaattttcaggttatattggatgaaaccaccaagtaacaattgtatgtgacttaaaaaaagtgtgtgtattatgcagttaggtagttaaaacgtattcaatcaaatcataatatgaaaaataattctgattataatcaattttgtttcattatatctcacaaaatgtttgctattttctgtctcctacttaaaaaagtaaaatttaatacaactggaccaattac

SEQ ID NO: 734737 - DNA, 620 bp, Homo sapiens
ttccaagtgaattttcctctctttacttttgtaaagcctttttaaatgacttccactcctactctgaaactcactttggtctcttctgccttatgcccctcagtcaaattctttcttctgaggaggcaataattgaggttactgcagacctgtatggatttgccaccagtaactcggatacctgccactggtaacaatctgtcacctctagctgaactttaaggctatttgcaagcaggtagtgttgtcaactgccagagcttataagctacctgccaacaaaaacacagaaccttttacttaagaggytatttattgatttaaggcatttaaggtaatctcttccaaatcattagctgaccacaaagctaatcaaacagatttcagtgactgcacacaacaaagaatatggactttgtggaattagtacaggaaatttactaaacaagcagcaacatcaaaaataactactataaatagcaacaataataataaactgtgaggaaaggagggaattttattaccaaagttaccatgctttattatgttaatctagttttcaaccaaaatttagttcatgaaaagaaagaaaatatggctcatacccaggataaaaagac

SEQ ID NO: 734738 - DNA, 636 bp, Homo sapiens
tacacgttattgtctgacttttttattctatccctccaagtggatgcaaaatggaaagtagtatatatatgctctctgatatctatgtgttttctcacaggattattactgagtatatgaaacatgttttaaccagaggagagctacaaaaatatttgtattattattgttacaattgtgaatacgtaatatgctatgcaaggktattgatcttaaaaataaaatatgagaaaaaaagaaaccatctctgattaagggaaagaaaggaatctgttggaagaatgtttgcgggcccatagactcaaaaggaaggatggataatgtgactcagaagacaggcagaacccatgacagcctgagaaatcagcccaggccaaaagatcatgaagcaagacagtggtgggaaagctgcagccactgccccatccaggtgatctggtaccctagccccttatcactctgccacataccttgccactgctgtaggaataaacttttagtttctcctacctcttatgtcacttaccccagaccaaaagttctggaaggcaacattctattggccagtctttgtttgtttgtccactgggagcaggaagaggaattatctcccttcctttagctttcttggacaaa

SEQ ID NO: 734739 - DNA, 628 bp, Homo sapiens
ttgttctggacctcttaacttcttaggatgaaaacacatatttttatgtcctaaagagctccctggctcttgttcaacttatgtgtgtttgtgtgttagtcaatgtgtgtgtaaatgctaagggtgggtttacaggattttcacaggtttctctctggatataaagatattytagaaaagaaaaactgagagagaatctcctcaaagccaatcactttccagatgttaagtgacttgctcaaagccataaaagacagttataagtaggactttccactccaagaacagtgctttttttctaaggtagcatcctgaccttctttatattgtcttatacatatagctacatatagatattgtagatgcatggaataataatctcataagccaaaaaataatgctaactgatgacaactttagaagccacggtatagtaattgttttagcacattgatttgttaatgtggaaagcactacaggcctagaatctgggacaaactgggcatttatcctgcattgagcacattcatttttgttatatttctctatttttgaacttaagtacaaagtggtgtttctccttctccttagttcatagcacattaatattatttgtccagtaaattcc

SEQ ID NO: 734740 - DNA, 619 bp, Homo sapiens
aaattgaggaagcaataaatagcctattaacaacaacaacaaaaaaaaccagcagccctggaacagagggatttgtagctgaatactaccagaggtacaaaggggagctggtaccatttttcttctgaaactatttcaaacaattaaaaggagggacttctccttaacccattctatgagtccagcatcatcctgacaccaaaacctggcaaagatacaacaaaaaaaggaaactttgggccagtatccctgatgaacaatcctcaataaaataccagcaaactgaatccagcrgcacatcaaaaagcttatccaccatgaacaagtgggcttcatctccgggatgcaagcctggttcaaaatatgcaaatcggttaatgtaattgatcacataaacagaactaaagacaaaaaccacattattatctcaataaacacagaaaaggccttcaataaaattcaacatcccttcatgttaaaaactctcaataaactaggtattgaagaaacatactacaaaataataatagccatttatgacaaacccacagccaataacatactgaatagacaaaagctggaagcagtccccttgaaaactggcattccccttgaaaac

SEQ ID NO: 734741 - DNA, 587 bp, Homo sapiens
caatttacagttgctaaaaatagaataaaatgcctaggaatacagctaacaagggaagcaaagaacctcttcaagaactataaaccaccactcaaggaaatcagagaagacacagaaaaatggaaaaacattccattctcatggataagaagaatcaatatcatgaaaatggccctattgcccaaagtaatttatagattcaatactatattaaattatcattgacattcttcacagaattagaagaaactgttttaaaattcatatggaaccagaaaagagcttgtatagccaagacaatcctaagcaaaaagaacaaaactggaggcatcatgctacctgacttcaaactatactaaaaarctacagtaactcaaacagcatggtactggtacaaaaacaaacacatagaccaatggaacagaatagagaccttagaaataagactgaacatctacaaccatctaatctttgaccaacctgataaaaacaagcaatggggaaaggattccctatttaacaaatggtgctgggaatactggctagccatatgcagaaaaatgaaactggacctcttccttacacct

SEQ ID NO: 734742 - DNA, 494 bp, Homo sapiens
gaatggctattattaaaaagttaaaaaataagagatgctggcaaggatgtagaggaaaggaaatgcttatacactgttggtggaagtgtaaattatttcaaccattgtggaaagcactgtggtgattcctgaaacagaattactatttgactcagcaatttaattactgggtatatacacaaaagaatataaatcattcaaatttaaagatataagcacaggtatgtgcatcacagcactattcacaatagcaaaaccatggaatcaacctaaatgtccatcagtggtagactggataaagaaaatgtggtacatacacaccatggaatactttgcagccataaaaaagaayaagatcatgttctttgcaggaacatggatggagctggaggctatcattgttagcaaaccaacccaggaacagaaaaccaaatgctgcatgttctcacttatgagagctgaacgctgagaatacatggacagaaggaggggaa

SEQ ID NO: 734743 - DNA, 629 bp, Homo sapiens
ttgggatcctgcttacagtgccaattgtcagtttctagaccaaactgggtccgagggaagtcagagggcaggtggcaggtagctggaaaaacacttaaggaattgtaggcaattttgacatggctttattctctctgtgggcatgagcctgggcaagagctgtacatacagcgtcatcagggtaatgataccttttatagacaacagtggctctgagccaagcacaagctcacatgagtggtcacctaatgcaccttatgcagcatggttacataatgtgtggagttgtgcgcttgcactccaaacccattgagtcatgctgcactggaaggccaccrcagcctactcctgactaaagtgcagccatttcccctacactgccccatccccaccctgggggacagcaaacaaatctgacctctaccctggagacaagatctttatcttccaaggccatgtccaatctgtttgctgtacaaaaatccttgaaaagatagtctggaacaaaagctgtgacacgacacaaaagatccaagggaattgtctcccaacagatactgtggggggctaatgtgagcctgtgagctgagagggaagaggcctcccgtctccttaagtacaagggcaag

SEQ ID NO: 734744 - DNA, 629 bp, Homo sapiens
ttgggatcctgcttacagtgccaattgtcagtttctagaccaaactgggtccgagggaagtcagagggcaggtggcaggtagctggaaaaacacttaaggaattgtaggcaattttgacatggctttattctctctgtgggcatgagcctgggcaagagctgtacatacagcgtcatcagggtaatgataccttttatagacaacagtggctctgagccaagcacaagctcacatgagtggtcacctaatgcaccttatgcagcatggttacataatgtgtggagttgtgcgcttgcactccaaacccattgagtcatgctgcactggaaggccaccacagcctactcctgactaaagtgcagccatttcccctacactgccccatccccaccctgggggacagcaaacaaatctgacctctaccctggagacaagatctttatcttccarggccatgtccaatctgtttgctgtacaaaaatccttgaaaagatagtctggaacaaaagctgtgacacgacacaaaagatccaagggaattgtctcccaacagatactgtggggggctaatgtgagcctgtgagctgagagggaagaggcctcccgtctccttaagtacaagggcaag

SEQ ID NO: 734745 - DNA, 589 bp, Homo sapiens
acccatattcagaccatctcttctgatctagggaatactggagccaggctgtattacagtaatatatcatttgctttttggtcatgggtggatatgcagtttccattgccagaggaggcaccctaacaagctctccttccaagacctagttcacgacattctacggtctctgcacacagtytgaggggcttccaaactctggagattaatgatgacacaaatcccacaactcagcttgaatacttctggtcctctttgctggccaccatgcaaagccatccagaggtcctgggaagctgagaggataacagggatttcctttccctggatcatgttcggtccgggcagcctcccaggagatctcatggagacaatgaagtagttctggatccagctcaggtggtggggaggtaggtaaatcaatcaagtgagtgaggtgtttcctcagagaaagcacacacactgttcatgtaacctttgtatcactgcattctggttccagggatcatgatcccaccaaaactgccccctttgaaacttgggtctcctcatcaaactaacagcagtccttctgtgactgctgcaaaac

SEQ ID NO: 734746 - DNA, 514 bp, Homo sapiens
acagaacccaaatttcagtgcatttgaaaagcacatgagagattaagtagagacagtaagtacagataacttcttagaacttaaatatgaagcagtgatgaaaacaggtttggggccgggcacggtcgtcacgcctataatcccagcactttgagaggccaaggcagcggatcgcctgaagtcaggagtttgagaccagcctggccaacatggcaaaaccctgtctctactaaaaatacaaaaattagccaggcgtggtagcgggtgtctgtaattccaactattcgggaggatgaataggagaatcgtttgaacccaggaggtagaggytgcagtgagctgagatcccactattgcactctagcgtgggcaacaagagtgaaactccatctcaaaaaaaaaaaaaaaaaaggggttgttggtagctagaggatactaaggcatttactacaagaagagatggaattaaaggctgtactttgtataaaatgggagacatgggagatgctggaga

SEQ ID NO: 734747 - DNA, 632 bp, Homo sapiens
tttgaggtcctttttctacaaaggaacttccatcagtatacaagttgaggtcaggatcagtcaagggaacctctagaaggtcccctcgagtggcataggtttgagaaattatttgttgacagttatattctatcttcattgtctggaagaaatgtgactgggttaagagttgcacaagtgcacagttgcagcactggcctttcaagtaatagagcctgatatttaagtaaacggttgtctgacagccacaagtctcctttagcagtgagtatgctgttcacctcatgagatgtccacacagtaagatctctccctgtattattttaactgcttcagatactamaactgctactgccaccactacccataaacaatgaggccaaccctttgccactacatcagtttccttactcaggtatgccatgggttgcaagcttgtcccttggacctgtgtaaggactcccagagctgtttctgtttttttctgtgatgtataaagaaaagtcttgccccgttggcaagcttaacactgggacttgggttaaggccttctttagggcctggaaagccacttttgcttcaggtatccatcttactaaatgggtattggctttctgagtttccttaattac

SEQ ID NO: 734748 - DNA, 598 bp, Homo sapiens
ttttaattcgaatcattcaataaaatatacctcatcttacctaattttcatgacttacaaatattcaggataaagcaatagattgcattgcctcaagaagctttagtagttttcaatctgctataagatatctccctcattgataacattgattttctcaggagataggattgggagattatctgtttttttattggaaactttcatattgcttttttttttttttaagaataagcatttgttactgctgaactttaaagcttatttttttaagtaaaagaatttttaagcatcatggagatctcacagtaagaaacaaaagctctctttgggactatttgcgtaacaatacataaaaaggtaataataaatgttcctaggtaaagaccttaaaactggggatgcactcytccataaagtgagcttaaacctccagacagagttaatagctctttgctcaaacctgtattattgctcttttcatattgccttgtaattatctatttgtatgtttttcttctcactgaattttgtcctaaactgctttgcatctttagtgacaaacactgtgctgacctcataataaataaataataaa

SEQ ID NO: 734749 - DNA, 453 bp, Homo sapiens
catgaccactactgcaatcatccacatcacacctgctgtggagaaaccccagaaaccaccgacatgccaagaccatcactgtaactactggcacccaagaaagtcacatggaagaccaagactcatcctgccaggacccactaacatgagtgtcataagccaccctctcatctaagaacaggcatattcagcctacctttgcaaccactggggcccaaagactgccctacctggcatcctaaacttcaccatagtctttactaataactrcaccctaagacaccgaggaaatcaaaaataacactgatgctatttatagccaaaaaaatcatacagatattatactactacatatagcccaaacaaaagtcaaagcaccctatctatctatatctatttctatatctatatttatatctacctatatttatatttgtatgtgtgtgtatatat

SEQ ID NO: 734750 - DNA, 595 bp, Homo sapiens
agtgacagggaaaatggatccaagttggaaaacactcttcaggatattacccaggagaacttccccaacctagtaaggcaggccaacattcaaattcaggaaatacagagaacaccacaaagatactcctcgagaagagcaaccccaagacacataattgtcagattcaccaaggttgaaatgaaggaaaaaatattaagggcagccagagagaaacatcaggttacccacaaagggaagcccatcagactaacagcagatctctcagcagaaactctacaagccagaagagagtaggggccaagattcaactttcttaaagaaaagaattttcaacccagaatttcatrtccagccaaactaaccttcatatgtgaaggagaaataaaatcctttacagacaagcaaatgctgagagattttgtcaccaccaggcctgccttacaagagctcctgaaggaagcactaaacatggaaaggaataactggtaccagccactgcaaaaacatgctacattgtaaaaaccatcaatgctaggaataaactacatcagctaatgggcaaaatagccagctaacatcataatgacaggat

SEQ ID NO: 734751 - DNA, 673 bp, Homo sapiens
ctaattttttaaccttgcaactgaatcagaatgattccactgtacagtgttttaaaagaaaaaaatgttacctctagaattttacacccaggcaattcaacattcatgtattaaaaagagacattctcagatatgcaaggattcatgtatccttgaaaaaattatttgaagatgtactacaacagagcgataaatgaagcaaataaagggcattaagaatggagctgtcagtcaggcgtggtggctcatgcctataatcccagcactttgggaggccaaggcaggttgatcgtgaggtcaggagttcgagaccagcctggcctacatgatgaaaccccatctctactaaaaatacaaaaaattagccgggtatggtggcgtgcacctgtagtcccagctactcaggaggctgaggcaggagaatcgcttgaccccgggaggcgggagctgcagtgagctgatawcacgccactgcactccagcctgggtgacagagtgagactctgtctcaaaaagaaagaaagaaaaagaacggagcttggtaatcccagctacttgggaggctgagatagaagaatcacttaaatctgggaggtggaggttgcagtgagcaaagataacaccactgcactccagcttgggccacagagcaagaccctgtctcaaaaagaat

SEQ ID NO: 734752 - DNA, 564 bp, Homo sapiens
gaagactatacattgtatgattgcaactatataaaaagtccagaacaggcaaatttacagagacagaaagcaggtcagttgttccctaggactaggggtggggatggggagtcactacaagtgagcataaacactggagagatcagtaactcaagctagaatggctatattggtgagagattttgaagtctaggacctagagcctccgatacgcaggagaacagaacataagggagttagggcaatgctctaaaatgggattgtgatgatgcctgcacaactctgaaaatttacaaaaagttattgaattctatatttacaatgggtgaactttatggtatggaaagtgtgcctcagtaaagtcaataaaacagtttttaaakatctcgacatcaattgtgtttatatattaatttaaattaatttaaggaaggggatttggaagttgtcacaatagcttttgaaataatgggaactgtaacttacttgagaaataagttatacctgtggagggaatcactaccacaggagaaggccctttcttcttacattttgatgtttgat

SEQ ID NO: 734753 - DNA, 657 bp, Homo sapiens
attattcttttctcctatgtgatgacccctcagcacacttttctccattgtgctttaagagttccatacttcaatttgtatttggaaatatgcctataactactatatccgagaggaaaaatatcttttcctctatcttcctatgttcagtatctgcargtcagtgaattaaattgaaaacaggcagaagcaggataaaaatttattgatgtagctatattcatacacatgaggtgctcaaggattagtaagtcaaagtggtggttaaaatttggggtggatacacctaacttagtagggaaaagaaggagggggaaaggctccaatgggaaggatatgagggtttctttaggaaagacaaatgggtttttaaaagaacaaatgagagataagaaagtttgtgataatgtttgcctatgcagataccattggtctttctatccactttagggccataacactgctccaggaagagaactggggtaagttttatttgcatttttcattccaagagtggattcagtctgaagtggcaatttatacaagcttcattttccaaaagttgctgcttttagtcaaagaagggaaactccaagaaggcttctttctgcatctgtcttcaaatctcagatgtcttcagcttaaaatagtcattat

SEQ ID NO: 734754 - DNA, 614 bp, Homo sapiens
tctggccaacagttaggcacacctacttggagtagctattattaatggggcagatactagtatcttcattttattgatttggttaactggtttatcttagaaaataaagttggcacacaaatactagtctgtcttatttctcagcctgtattataaacctctacactataaggtttaaagatttctgaatacacaatgatgtagcaattgggaatgcctcatcttccagtcacctgtctcttccccttattcttgtcttgttatctgtgatcactaagactctacaagcacccctcactagtttccggaggaggagaaaagtttatagaagccaatcctatagctgtgaaaggaagcaatctagtctagaccagcaaagtgatggtgggttatgaccaaggagagtttcattttataatatctatcaaaaagatttkctttctggggtgtcatgcaatgatctaaatcagatttacaaacctctgtataatctatgatgtcaaacacatcttttagcaggttgagtttctagagcaggtaactgtatttatcagtctagttatggtcctcattcagagatggatggtcatgttactcaagacaggccaatgata

SEQ ID NO: 734755 - DNA, 633 bp, Homo sapiens
actcagtggctgggccaggctgtgtttataatcttaataacacagcagcttaatcaagtcagccttactaccttagctatcatttaattgcctgtggtttatatcttgcatattcagtggttatgtgattgaaaacttaacgattgagccacttaagaaaggaaaaaaagaagacaaatattaacacacattgcatgagaaattcagattaaatagagtaatyttacatttcatcagatttttttccaaactactgaataaagcttgtgcacacatgctgggagaatattctttccaacctgagcttaacggtgtacttttctcccatcaataaatctgcatagcagtgcttataaaatcatctaactaagtgcacctcattaacctatatttatctgtgttgagtacctggtgatcactgatgtttctagaattgattatctccttccaggtgagtctgaaagaaccctgggctgcgaaaactttaatagatctgttgacatttccaaaggattttgaattccaatttcccttccttgaccaccagttcccaatcattttacttgtttccctgggagtttcaaatcactttatctttgcccccaagcagaatctgtaacctaacagacacat

SEQ ID NO: 734756 - DNA, 586 bp, Homo sapiens
atgcattgtaaaccctagtccttaggtcatttgtgaacaattagacattgttacttagcagttagttaatgacgtcctggactgttctcaaatttggaagtgcttgggctcgtcttattaatcataagcctcagcagttcagaaaccttgttctctatcttccctgcccctytttcaccatgcctagcaagagtttatattcatagccaaagctaaatactataaactggtgttaatatttactggaaataaagttaatttagctaatgagctctaaatacagtatatagctttttaaccatgcagtgtttaggaaacactccctgaaatcttggcataactgagaactagatgggaccaaacagcagctgggaaatagcacgttgtaagtgcaggctaccctcagtagcagattctcatttttcttacctttgattttccacctagtaaaccatggattaccttaaaagaaagggagggatgagtagcttggcagacaagagacttacctcagacccttagggttggggatatctttatacctctgtgtgacctctattctaccctagtgacctttgcttcatgg

SEQ ID NO: 734757 - DNA, 634 bp, Homo sapiens
acctgtaatcccagcactttgggaggccgaggtgcgcagatcacttgaggtcaggagttcgagaccagcctgcccaacatggtgaaacccccgtctctactaaaaataaaaataaataaaaaataaaaagcctagctgggtgtggtggtgcgtgcctgtaatcccagctacttgggcagctgaagcacgacaatcacttgaacccrggagacagaggttgcagtgagctgagatcgtgccactgcactccagcctaaggaacagagtgagactctgtctcaaaaaaaaaagaatgataaatggtggtgtgtcatgaaatacttcttcagcagtgagaataagcaaactaaatctacacccaagcatcaacacgggtgaatctcacaaggtgttgagcaaaagaaacccaacacaaaagggtatgtgctgatgattccagttatataaagttcaggttcacaaccaggcaaaattaatttgtgctgttagaagccaggagagtggatgcccttgggaaggtggggatatctgggagggaatatgagagaagtttctgggatgctggtgaagttctaattttttttttctgtgaacttgcatacagaagtaaagaagtcctatttgttatctgggt

SEQ ID NO: 734758 - DNA, 593 bp, Homo sapiens
gcaagggtagaatggtaaatggtggccaggcacggtggctcatacctgtaatcccagcactttgggaggccgaggtgcgcagatcacttgaggtcaggagttcgagaccagcctgcccaacatggtgaaacccccgtctctactaaaaataaaaataaataaaaaataaaaagcctagctgggtgtggtggtgcgtgcctgtaatcccagctacttgggcagctgaagcacgacaatcacttgaacccaggagacagaggttgcagtgagctgagatcgtgccactgcactccagcctaaggaacagagtgagactctgtctcaaaaaaaaaagaatgataaatggtggtgtgtcatgaaatacttyttcagcagtgagaataagcaaactaaatctacacccaagcatcaacacgggtgaatctcacaaggtgttgagcaaaagaaacccaacacaaaagggtatgtgctgatgattccagttatataaagttcaggttcacaaccaggcaaaattaatttgtgctgttagaagccaggagagtggatgcccttgggaaggtggggatatctgggagggaatatgagagaag

SEQ ID NO: 734759 - DNA, 586 bp, Homo sapiens
aataccactgctgtacagggagaaatactgctgatcctacccgttggggcattttaaactaatatagttagagccttcctactcaaaacaagaaaatcacttaactgaggcacttttgaaaaattgtaaggctttacgttgtgtgtttgtgtgtgtgtgtgtgtgtgcgcgcgcgcgcgtgcgcgtgtgcttcccccaactttatcttattttcctaagtaacagattcctaatttttagcaaggtacattacccccattcactccccgcaactaaaatgccagayatggtagctcacacttgtaatcctagtacttttgggaggctgaggtgaaaggatcacctgaccccagaagtttgggaccagcctggacaacatagcaagaccccatctttacaaaagaatgtttttgaaaaaattagctgggtgtggtgatacatgcctgtagtcccagctactcgggagactgaggtgagaggatcacttaagtccaggagtttgaagctgcagtggaccatgattgcaccactgcattctgccctgggcaacaacatgggatcctatctcaaaaaggaaaaaaaaaaa

SEQ ID NO: 734760 - DNA, 560 bp, Homo sapiens
caatgagttattccatataaaacactagggaaaatgctgggcacatagtaggtgcttaaatattagatatttttaaaatttttattttaaaattgtaagtggacaaattacagttgtatgtatttatggagtaaaaagtgatatgatttgtgaatacagtgtgggataatttaacctacttaacatgtctctcactgcaaatacttattttttgtggtgagagcatttgaaaatcttagcaatttttgaaatgcacaatatgtcattayttagtatatttgccactctgtgcagtatatctcaatatatttcaaagtaaaaaccaaaaaacaaaacatattcctcctgtctgactgatgctttgtaactctgaccatcctttccctcagcctctactaaagaccattctactctttgcttctttgagtctttttattgttttagagtccacaaagaagtgagaacatgcggtatctgtctcagtgtctagcttattttacttagcttaatactgtctgattccatccacgttgttgcaagtgacaatatttctgtctgtt

SEQ ID NO: 734761 - DNA, 601 bp, Homo sapiens
tttcttgggtgactgtcattggtaatatggatacagtgcttcatcttatctctagtggaggggtcttcaactgtatcaatacttttttttaaagctgtggaacactgacctctatgtgttaccagtccttaatgagctgctgcagaggtggctattttactttcttggatgttaaggtactctactcactactttacctgaatgaatgaatgaatgaataaataaatacatacatacataaataaatgaataaaatgtcattcttaatttttgatatcagttggtaaagattayaaatgtcttagagctccctagctactttggtcctgtattgtgaaacatgaggttcgtaacagttcagttctttaaaattctacagagctctacaagtagaacccagcatcttgcctttaaaaataaaatttgatttaagccaaaggaggaagaacctttacccatttggtttagaaactattggcgacaaacagtcttgcttctttttagtcagtttctctatgtgttcttggcaattataactaatatatcttaaacatttttttattaaaaatgattacaaaagcaatcataacattcaatagag

SEQ ID NO: 734762 - DNA, 516 bp, Homo sapiens
ataaaatattttgtgtttcattacagagcaattttgagagcaaatagaaatgattatgggccgggcgtggtggctcacacctgtaatcccagcactttgggaggccgaggcgggcagatcacaaggtcaggagattgagaccatcctggctaacatggtgaaaccccgtctctactaaaaatacaaaaaaattagctgggcgtggtggtgggcacctgtagtcccagctactcgggaggctgaggcaggagaatggtgtgaacccgrgaggcggagcttgcagtgaaccgagatcacgccactgcactccagcctgggtgacagagcgagactccatctcaaaaaaaaaaaaaaaaaaaaaaaaaaggattatgaactggccatttttcctgttaccttatttgatggtatttccttacccaatcttcaaggtctccccatataaagaaagcagggtaacatctggatttcagagaaaattaaccactttcttaaagctgtccaattattctgtta

SEQ ID NO: 734763 - DNA, 600 bp, Homo sapiens
aattatcttggaaatattttgatttgaggaaatggacattttacacaattcccttagagaagaaagaaaacagatttccaagtgcattatcaataagcagggcatttgaactctatgatcggaaatggagaagacatggtgagctcttgggttcagatgttcaatatttgaaggagacggtggagaatgagcattggcaggacatgtgcttcacctggatgactgaggatggttgaagggcaggcctcaagccaacttggatctcaagtccacctaaaagagttatgttcacagccttgaactgtcagggaatggagacagggaggaacatagttgaatgtcacccatggagtcccttgagggcagggtcttgccctacttgtctcctagcataggtctggcccctcatagatagtattacctattttgttgaagtgaaatggtttttcrggacgcaaatccactttcctacattgaaatcaggtgacatctagagatctagacttaaccagggcagttttccgggggtgggaagacagcctgggagcggtcaggagggagttgcgtctgccacgaagccattggatggctgtctcgaaa

SEQ ID NO: 734764 - DNA, 484 bp, Homo sapiens
taaataaacttttaattttagaatcattttagatttacagaaaaaaatataaagatcgtacagagttaccacacaccctgcacccagtttcccctataactaatatcttacgtcgagccagtgcagtggcgcacatttgtaatcctagctgctcaggaggctgaggtgggagtattgtttgagcccaggagctcgaggctgcagtgagccatgattgcaccattgcactccagcctgagtgacggagtaagatgccatcttttaaaaaaaartcttatgccagtatgatacatttgtcacaattaatgaactaagattgatatattatcattaactaaagtctatacttcattagatttccttagtttttccccagtgtccttttctattccaggatcctgtccaggacaccatatcatatttagttgtcaagtcttcctagttcctcttggctgtgacagttttttagacttcccttgttttt

SEQ ID NO: 734765 - DNA, 603 bp, Homo sapiens
atacacatgtatatagataacatatatgtatattgtctatgtttatatatgtaaataaactaatctatatgtaaatatacacatttatatatgtatataaactctacatacatacatatagatagtatatatatctacaaatacacacatttacacacacacacatataaactctgctacaaactctatggaaggcatttgaccatctctcttaaaattaaaaatgcacacatcctttgatccaacaattttactcctaggtattaattaccatagatctcacttgtgaaaaacgttatgtattaggatactcactacaatattatttgtaaaagcagaagrctaaagacagtagaagtctggttacataagttatggaaccatacaataaaaagctacacagtaatttaaaagaacatacaaatttggaacaatctctaagacatagtgttatccatgtggggaaaaaacacataaacgtttgtaactacatagaatatcttagctgggcacagtggctcacgcctgtaatcccagcactttgggaggctgaggcggccagatcacttgaggtcaggagtttgagactagtctagccaacat

SEQ ID NO: 734766 - DNA, 438 bp, Homo sapiens
tttgttcactattaagattgatgttggacacactgtactgtaagttgcaaactgcaattacaattcgttgcaattatctttggttgttaatagcacaagatagcatgtcactttctaccaagtgtataatttatcatttgtggttttttttgtgaactsttgtggtattccaaatgtataatcttgttgtatttatttcccagtggtccaacaaaatgcacagcaagtgctgactagaacaaactaaaaagcactgctattgacaagccgtcacttgagcagtaatgaacattcagcctccactttcacctcaacaaaccagcagctttaatttatgataaagcaaaggagagacaacctccaggtttattataccctcactgctgtttcaaataaagtaattagaaggtcaagagacaggtctggaaagccaaatat

SEQ ID NO: 734767 - DNA, 617 bp, Homo sapiens
ggggctctctgtaagtcattttttggcactgggagtacatttctccatagagacatttctgtacaatatggaaagattcccagcccagcctctcaaagtatttaacccacagtggatagacgcattgcaagaggagcgctgagttccaaattgttgtgagtccctttagctcctggactgaaccccagctccagaggaaggaaaattaggaaaggaaagggatgctgtcaataaggaagactcggtcaaccggcctcgaagtaaggattcctcagttgaagactstccacgcttccttttaaaatcaatactggtgataccttgcatttatgtatgttttatattttacaaactttctcattggatcatcataacaatatttttcaagaggcaacagttttagtgattattcattaaccaacttgggggaaaaagattctaacatcttgataatattccaaataaatggcacgacatcctttggaaatcttgttttcctttcaaatctgtaggtctggtgattattattattattttgtacactacttcattcttctagactgagattcttctaggatatttcagaggtaattataataaagtaaataacagactag

SEQ ID NO: 734768 - DNA, 593 bp, Homo sapiens
ctgcctctaagccataggtatttcaaggaaggtgaacttaatctataaaaaactactggccaggctctaaaagtaaagctggcctccaccaaagtaagactgattactacagggctctgataaccaatggaccagatrttaattctcctcaccctcaagaatccattggtaaaacttccctttcttgtagttcctatatgtagcaaatatacgtatggaatggtattttgtgaaggtgacaaaactctgggcatgaagcaggatacgaacacagcattcagcattcttctatcacccagtcgtctcactggttctccaatatgccatggtccagttcccactcttcacaagtctgcacttacaaattatagcttgcaaagcctattcccatacattttcttatttgtactcccaaaaactctgagaaggaagtatcattaagctcccattttacagtgaaggcagagactaagagaggcactagcaatacacaggcaattgacaatgcggtgagtctgggacctggttacctgatagaaatcctatggtcctttcacaactctaccctaaactgttgacaaggtaaagaaaaa

SEQ ID NO: 734769 - DNA, 605 bp, Homo sapiens
caaagccatttcctaggttaattaaaaaaacattttttataaaccttctagaatgagaatgataaatacctttatatcaggggacatgactgattggctggttgcggctttttagagccctagtggagaagaaatctgaaactttctcctagctcagcaggaaagagtgttatgatcaattactgatgtctgtcatgggcactacaagggttagtgagtggcagcaccagcaytagatagttgctatcgatgtctgatgacattctacaggcacttcttattcatacataatatactgttacacttgaaaataccagaatttgctaaactggagttcatggaccagaaaagaactcacgaaggtgtgtagcttgacctcaaccatatttccttaacaaatctaaatgagttgccaactgataaaaggactttgcctaaaaatccaaattcccagctacccttgaattacaagatctggtatcactgagccagtcacagtggctatagggaagaagtagctgcccattttagacaaggacgtgacctttgctagtcgcagtccccacagccacttcactttactcatttgaggtacctgcctaacc

SEQ ID NO: 734770 - DNA, 640 bp, Homo sapiens
ggcatatggtaaggactcaggaaatagtaatagtcgttactcatgttattggttaagttgaattttcccaaagtctttgaattttaaatccttttttgtttttcaaagctaccttttaaaacgactcgtcttatttccttttgccatgggcatttgtgccatgggcatttgtgccatggagatagctttatttttttattggttagttattaactataaggagttcacttttgaaaactgattgcttcacctctgaaaattactccttaaggtgctacttcaactcttacaattgttaccaaatgaaaacaatgctgcagacaaacaactctgtttgtgtaggygacgcacacttaggagtgaaggttgctgtaatcacccttgtggtgacgtaatgttgatgtttaatactttacatgaaacacaattgtttttgtaatacataaatagctgacaatgtccagtttaagggaatctgcagttcaaatgcccaggacatctctctccattaaaacatgcaactgggcatggtggctcatgcctgcaatcccagcactttaggaagctgaggcaggaggatcttttgaggccaggagtttgagaacagcctaggcaagacctagagtgagaccatgtctct

SEQ ID NO: 734771 - DNA, 640 bp, Homo sapiens
ggcatatggtaaggactcaggaaatagtaatagtcgttactcatgttattggttaagttgaattttcccaaagtctttgaattttaaatccttttttgtttttcaaagctaccttttaaaacgactcgtcttatttccttttgccatgggcatttgtgccatgggcatttgtgccatggagatagctttatttttttattggttagttattaactataaggagttcacttttgaaaactgattgcttcacctctgaaaattactccttaaggtgctacttcaactcttacaattgttaccaaatgaaaacaatgctgcagacaaacaactctgtttgtgtaggtgacgcacacttaggagtgaaggttgctgtaatcacccttgtggtgacgtaatgttgatgtttaatactttayatgaaacacaattgtttttgtaatacataaatagctgacaatgtccagtttaagggaatctgcagttcaaatgcccaggacatctctctccattaaaacatgcaactgggcatggtggctcatgcctgcaatcccagcactttaggaagctgaggcaggaggatcttttgaggccaggagtttgagaacagcctaggcaagacctagagtgagaccatgtctct

SEQ ID NO: 734772 - DNA, 640 bp, Homo sapiens
ggcatatggtaaggactcaggaaatagtaatagtcgttactcatgttattggttaagttgaattttcccaaagtctttgaattttaaatccttttttgtttttcaaagctaccttttaaaacgactcgtcttatttccttttgccatgggcatttgtgccatgggcatttgtgccatggagatagctttatttttttattggttagttattaactataaggagttcacttttgaaaactgattgcttcacctctgaaaattactccttaaggtgctacttcaactcttacaattgttaccaaatgaaaacaatgctgcagacaaacaactctgtttgtgtaggtgacgcacacttaggagtgaaggttgctgtaatcacccttgtggtgacgtaatgttgatgtttaatactttacatgaaacacaattgtttttgtaatacrtaaatagctgacaatgtccagtttaagggaatctgcagttcaaatgcccaggacatctctctccattaaaacatgcaactgggcatggtggctcatgcctgcaatcccagcactttaggaagctgaggcaggaggatcttttgaggccaggagtttgagaacagcctaggcaagacctagagtgagaccatgtctct

SEQ ID NO: 734773 - DNA, 646 bp, Homo sapiens
ccttctggttccaagtcctctgttatttctgtttcatcttcagaagatgccaagctttgttctgcaagctgaccttcagatagtaaagacacatcatcttttccttgctgcattttctcagtattctcttttacctcatctacactgcyttcttgtgaaacctgaagaaatcaaagcacactggtatatttataattgcttagatcacattttatagcattattgctggaacagttgaataataaagcatgtaaatttgagacttaaatatacagatatgtaatatgtatgagactcagaaaacaaccacttcaatttgtacaaatgataatatatagataaatggaaatctgaatatgtactaagaataaaaaatgtattaatctcaaaatgaattttacattaagactttaattcaaatattcatatattacctgtcaatagcagtataattatggctgttacccttgtcatatttttgactttctattccaaggaagtcatatataaaaataggggaaatgctatgacttcctgagtcatgtcaaaacttataagacaaagtatttaagaaccaaattaaaccttccaaaataattttaacacaaatgcataccttgggaacatgtggaacagtcagcatatt

SEQ ID NO: 734774 - DNA, 624 bp, Homo sapiens
tggcggcctataggggtagtagctagctacaggtaagtgatttctttttgaggtcatgaaaatgttctaaaattgactgtggtgatggttgcactactctgtgaatatacaaaagtccatgcattatacactaaataggaaaattggccgggcaccgtggctcatgcctataatcccaggactttgggaggctgaggagggtgggtcacttgaagccaagagttggagaccagtctgggcaacawggcaaaaccccatttctactaaaaatacaaaaattagccaggggtggtggcacacgcctgtaatcccagctactggggaggctgaggcaggagaagtgcttgaacccaggaggtggaggttgcagtgagctgagattgcaccactgcactccagcctgggtgacagagcgagaccccatctcaaaaaaaaaaaaaaattgtgtggtatgtgaattatatctcaataaagctgtttaaaaatgtcaaagttggtgacacacccatgggtaattcacaaaacaccacgtgccatggcatgcccactggaaaccacagcctgagacacgctcaggtgcagggagggcctggactagaagctttcagaaaggactctctccct

SEQ ID NO: 734775 - DNA, 637 bp, Homo sapiens
ttcattttcttattgttgagttttaagagtgttttgtctattttggataatagctctttatcagatacctcttttgtaagtgttttttctctgtctatggctcatcttctcattctcttgacagtatcttttacagagcaggagcttttaattttaatggagttcagcttatcaattatttctttcatgaatcctggttttgctgttgtatagttgattccaataacaaaaacaatgacaataacaaractgacccaaagtgggatgttaattgcctcaaaagcagtcatttggtatcaacctgagttttgtggtaatgttttatttggcatgtaaagatccttttatgcaaatcatttccatggacccataatataaaaacataagtatttccaattactttatcagtgtagctattccaaatgaaatgtctgcagtagcaacagagcagactgcatatgtcagtcctgactggagactagcaggcagcaaccactcctcaagctgcttctcctgacatcttgcttgactcaaagccaggaatgatcaacaaaggcgtttttccatcccgtgggagtctagtaatggtgttctatagaagaagcagcggagactactgctgctaatgactgtagac

SEQ ID NO: 734776 - DNA, 614 bp, Homo sapiens
cgtggacacggggcttcctcatcgaggattactgggcttattcacacccactgtccaggctcgttctgagagagatggggcgaagtcactttggaagaggtcacaacagatgtcagccaggacagccagctctgtgcagagcagaaccaaggccccagagccttcggagcagcccatttgcaggcgttccagcagtttgctgctgcttgcctctcctctccccacctttcccctgcagcctcagtttcttggtcctctgggctttccaaagcagcagggctrgcaggctcctcactgcccccagcaggagaagtggcctggaaaaggcaacagtatgaacggccatactgagtcgatcatatttgccaagcccctgaccccccaaagtcctcgccttggtcagctctcaggtcagtgtcctctgccagtccttctaacctggctcccctcttcttcacccctcggccttctcctgacacactgaccttcctctttgccaaacctttcaagttctcctcctctcagggattttatacttaaacttctttctgctcgaccccaagccccctagccatccttcacgtggctctctctgcttttatatcacctcctcc

SEQ ID NO: 734777 - DNA, 597 bp, Homo sapiens
gagagagggcttctctgagtgtggggaatgtggggaacgcagccaaccacccagtcttcggaagactcgccagtgttactgctgatcccagtgccgaaggcgggtttgcatttcaagtcccatgtccactgaggagggaaagtggtctgggctctctggccaacttaagggagatcagaagttctcttatttttaaaagatcctatccctacttgcctcaaaaggtgctgccacatccgcagtggcacagggctacttaggctcagggattggccctggggtttaataatgtccttcttttcctcttaggcacagcccagrcccaggaggcaggatacctgggtcctgccctgccacctgccatcaccatctcaggaaacttgcagagacgcatctaactgccctgcccctcaatctctggtactgcaaaactgggactcattgttcagaggcgaggtgggttgaggaaaggagaaggtgctggtgatgaagagggccttggaatgagagttggggtcacactggccacaacttctcccattctctgcttgaagttcctttatgattggagaggctggcaagtgagggaggcaaggc

SEQ ID NO: 734778 - DNA, 584 bp, Homo sapiens
ctttcttccttctcccgtcatctccactaccctcccttttccacccacccccccgccacgggcttccttcttcctggaaaatatacttggaagagcagtttggtgattgacagggacctggggaggggaaaaaaagagagagagaaccaatgacaaacccaagctgctcgagatgacccctccctccctccctcccccccccacccccacccccggtctgggttggggaagggtgggtagcgtaagggaggggtcctgcagatcagctggagatacctgaagctggctttgygctttgagtttttacatcccaatcttcacaggccaggtctattcaaatggctttttagggagtggagggagggcatttttttttttaattacaagaaaaaaatgtcttcaaacagaaaattcttaatgatttgcagttgacataaatttctagcagtagattatttgcttattgtttttggcatgtcgtgaatgtcaagaatgagagagcaaaaaaaaaaaaaaaagctcctactctgttaaaacttagcagtcctgttagaaaaataaagcaatggattatttgctaggag

SEQ ID NO: 734779 - DNA, 475 bp, Homo sapiens
gggttcccttcttttgcattccttaaagacccaccggttttctgtcccccaccaaccccaatgtggcctgcccccctggcagttgttggggtagcaggctggacttctttgtgtggatgctttgtttaagcccagtcttaaagtttgggctctttttccaccgtgaagggcagatggacagaggcctggcacgtgtgtcccatcagcctggcttggggtccacacagttcggcagctcattgatattttcgcagctaagctgaagtactgtgtaagtactgggtaagactttcaccgccgacttgrtggccttcaaccaatgaccagggaacattcgatagatagaaacatctacaaaaaaggacaggaaatcccagagaaggaaaattggaccaggctaaatcccgggttgtagttccttactgagcctggcttcctcttaactgtttaaacataggacttggctcctctcatg

SEQ ID NO: 734780 - DNA, 573 bp, Homo sapiens
aactcatgcatgaaaagaacccagcatggatccttacacaaagctgctctccaaacaggagaaagccaaccagaagacaaatgatgatgcttctttggatgttcccagcttcacagatgtgggccctgtaaccatattcaatgagtgtgactctgttgtcctggctgtgatgacttgctgagggattagcatctgattctagataaacaaatcatattacttacctgtttgttgttgttgttatttayttatttatttttacagtagatctaaggggagaagttcatctcttctctgctggtcccaaccacaagaacttctcattaccaagttaccccttaggtggaggaagctggtctgcagtaagaaataataaaatcaacaacgcatgcaagagaaactgtaatacatagtgggaaaaggcatgtaagtcctggaaatgttcacgccctgacccctgacccctgatccagcctgcagacccagcagaagccctcccaggtcacaggaggctccttactcatccttcacagacattctcctttctgcctgagcagatttgagctgggtttc

SEQ ID NO: 734781 - DNA, 536 bp, Homo sapiens
ctatttgagatccttagacaggaactatttatgaacaccaggagaaggtgcttagcactagttggctgtaaagacagaagcatgtttccatgactgctctttttgttaatctgagacttctgagggctccaacatagtctaaataaactctgattcagaggtgtactctatgaaacagatacaattggaggttgaggggcctggagccctgcctgatcctgtacctcatacctccaaagcctccaaggcattccatggarccataattgacactctggagtgtcagttctccaagcccagttcctgagcacagacacaagcctttggaagcctgactggcagctcctccaccttgacagcaccatgtgctttagggtgggtgcccccaccattgcttcacctcaccctgtgcccaagagtccaggttcctgctgggcaaaaccaggcgtttcctattattcttgaatacagcatgaaggatggctggctgccctgccaggaacaatttgattcttccttgttagtttttcattagg

SEQ ID NO: 734782 - DNA, 484 bp, Homo sapiens
atgctgacattctgaataaaatcactccatgccttcacctaggtcaagaaacgacattgttttcctgagcggcagtgacagcgaggtgacagagattaatagcttggtattgactgagcaacttcgagttccttatctctgtcaagtcaaggctgtgtccaagggctgaaagtgttattagacttataattgcaaagacatttaaagggtttccccttaagggactatgaaatccaataaacgtttcacaaaacctcaagcgctcgagtgcaaagcccccatctgggagagctgcgtgctcccagccaagcgccagggaaaccttkaagccgccaacattgaataatgtttgatttatgaagttggttttgaatttgtatcagttgttttattaaaaatatatgaaaggaagttttaaatatgagcaagccctgtaggctgtcgcctgcactgtgccacctgtctggctaagccgcctccttct

SEQ ID NO: 734783 - DNA, 626 bp, Homo sapiens
actcagtggctgggccaggctgtgtttataatcttaataacacagcagcttaatcaagtcagccttactaccttagctatcatttaattgcctgtggtttatatcttgcatattcagtggttatgtgattgaaaacttaacgattgagccacttaagaaaggaaaaaaagaagacaaatattaacacacattgcatgagaaattcagattaaatagagtaatyttacatttcatcagatttttttccaaactactgaataaagcttgtgcacacatgctgggagaatattctttccaacctgagcttaacggtgtacttttctcccatcaataaatctgcatagcagtgcttataaaatcatctaactaagtgcacctcattaacctatatttatctgtgttgagtacctggtgatcactgatgtttctagaattgattatctccttccaggtgagtctgaaagaaccctgggctgcgaaaactttaatagatctgttgacatttccaaaggattttgaattccaatttcccttccttgaccaccagttcccaatcattttacttgtttccctgggagtttcaaatcactttatctttgcccccaagcagaatctgtaacctaaca

SEQ ID NO: 734784 - DNA, 595 bp, Homo sapiens
tttctaatgtctagagcttcacgtggcaatggttacctggagacaaggagtaggtgaccaccttaagtggcacataactcttcaaatttccacagcctcttcctggccaactttgctaacttagaaaaatttactttgcctctgtaggtgttagacttctaaatttggagttagaatagccaggtaacataaaatttggaatgaacaaaaagataacctgaaccaatattttcattctgtgactgaraaaacaagtctatctgtcaagatataatttacttgatatttagatatcctagttttgtgattctttctcatttgcctctctccacacctcaagccccagctagctgtcttatgagaggaagtaaatgactccatggagcccataactccagaatgtttctagaaaaatatctctctacagatatgttgctagaaacatatctatgttcaccaaccacacttctggatggccaccaggacaattgtcccctgcttaccatcactgtaatacttcacagccacttcaaacacaaagctatcccagagagaaccctcttttccacaaatctacatctcttcctaaattcct

SEQ ID NO: 734785 - DNA, 595 bp, Homo sapiens
tttctaatgtctagagcttcacgtggcaatggttacctggagacaaggagtaggtgaccaccttaagtggcacataactcttcaaatttccacagcctcttcctggccaactttgctaacttagaaaaatttactttgcctctgtaggtgttagacttctaaatttggagttagaatagccaggtaacataaaatttggaatgaacaaaaagataacctgaaccaatattttcattctgtgactgagaaaacaagtctatctgtcaagatataatttacttgatatttagatatcctagttttgtgattctttctcatttgcctctctccacacctcaagccccagctagctgwcttatgagaggaagtaaatgactccatggagcccataactccagaatgtttctagaaaaatatctctctacagatatgttgctagaaacatatctatgttcaccaaccacacttctggatggccaccaggacaattgtcccctgcttaccatcactgtaatacttcacagccacttcaaacacaaagctatcccagagagaaccctcttttccacaaatctacatctcttcctaaattcct

SEQ ID NO: 734786 - DNA, 595 bp, Homo sapiens
tttctaatgtctagagcttcacgtggcaatggttacctggagacaaggagtaggtgaccaccttaagtggcacataactcttcaaatttccacagcctcttcctggccaactttgctaacttagaaaaatttactttgcctctgtaggtgttagacttctaaatttggagttagaatagccaggtaacataaaatttggaatgaacaaaaagataacctgaaccaatattttcattctgtgactgagaaaacaagtctatctgtcaagatataatttacttgatatttagatatcctagttttgtgattctttctcatttgcctctctccacacctcaagccccagctagctgtcttatgagaggaagtaaatgactccatggagcccataactccagaatgtttctagaaaaatatctctcyacagatatgttgctagaaacatatctatgttcaccaaccacacttctggatggccaccaggacaattgtcccctgcttaccatcactgtaatacttcacagccacttcaaacacaaagctatcccagagagaaccctcttttccacaaatctacatctcttcctaaattcct

SEQ ID NO: 734787 - DNA, 398 bp, Homo sapiens
tgctctgagcttctgtgaagacccagtggacagtgctgtggatggaaggaggaggtcttcacttagaggacgattgtgcctcttattctgcttggcatctgaccctcactgcaggagccacacactcctggactgtgatgggkacctttttctgtttctggtaaggatgactgtcaggtaggaaggtacaatagcagcccccattaattgagcctgcatggtgtgcctggcacaattctaagcactgtttaattctcccaaccagccccatgaagaagcttctgtaaatatctcaattttttagataaagaaattgagtcttggtaaagtcaagaaacttccttaaggtcatgtggtcagtggtggagcctggatgtaaacccagctcttctggatcc

SEQ ID NO: 734788 - DNA, 598 bp, Homo sapiens
agattttgttaataaaacccttcatttttctaatcagtgtcatcattggctctcatcagccacattcagttagtaaggaactttctccaattctttcttcaaaaggtttcatatctcaaccgtcctttcttttcccactgtcaacatcaccactggtatcaacctcttttcactgatctccccagtttctcccagttctaactttttagaccccacaacctgacaaatctgattatactattgctttcatcatttatttccacctggagcatagcacatgaaaatattccaatctcttcctcctaattataatatccctcaacttcagtgctgaggcacaccataatytgacataacagtggtaggtctctctaccaggtagcctgtaggatttatcattgttttgagtttctctctcactaaaattttaatgatgttttcactctttcacagcaaagagacaaaaatgactgataattcgcaatttatgtggctgtcttatgttctatcaagtcttgagcaggtgccaaaaatagattttctctgttcagctgtgatctggtgggaggatattataatctaagagggaaacatagtt

SEQ ID NO: 734789 - DNA, 618 bp, Homo sapiens
accttgctttaaagaacaatataatccactggttaatagtgtttaagatcagttatcttaataaagaaatttttgttagcaaataaaaatgagggaacattcagagttataaatttctagaacatgaccagaaaagtctatcttaatttgaacccaagctttaaatccaaagcaccatgttccatgatgacaatgttccccattctgtcaagcaagtatttattgcgcgtccattgtcccaggtgaaaactctctcaggggtttctacaaatacagtggtgaaccaaacagacagagttcttgtactcatggtgttaagaatgtattggaagagataggcaataataagttaaatacacagaaagaattgctcatagtgataaggctgaaaagatgacaattagacataaggaacagataaaaacaggaggtggtgtctattagggtgatcgaggtagttttstctgaggaagtgatatttatgcagaggtctcatggatgagaaggggccagccatgcaaatggacattgggttagaggagcgagagagggaaatgtgtgcatgggatgtgtgtgtgcacgtgtgcatactgtatgtgcaaaggcccctgacgtagg

SEQ ID NO: 734790 - DNA, 546 bp, Homo sapiens
ttattgcaacctgttttatcagcaaggtgtttatgacctgtatcttgtgttgacctcttgtctcatcctgtgacttagaatgccttaacctcctgggaatgcagcccagaaggtttcagcctcattttacccagccatactcaagatggagttgctctggttcaaagacctccgacaatttcactttggttctccacactgcactctcccatcttccctccaatcccactgcccgaacacaaatacttgttgaacatgcttgctggctagaattggataaatgaaactgggctggaggtattcttttctagaagaaaggcaggcctttttgcctttttttttttttttttcctattkggcctttcttcctttgagatctttctcccccatggttagcataagctcacctggaacatgccttgaaatggagttgcctaggtctattaaggcctgagtgttctgattaaatttagttcactaaaattctacattgccctagataatcataaatgcttctttactttgttcttttctggttgcatgtat

SEQ ID NO: 734791 - DNA, 619 bp, Homo sapiens
tctgtgcattgtaggatgtttagcaacattcttgacttttacccactagttgccagtaaactgacatcatccccaagttgggatgatcaaaaacatcttcatacattgccaaaggttctctggggtgcaaaactggcccccggttgaaaactgctgtttaagtaagcttggcttctcatttgagcatctgtgtggtttcaacagaaacatgctggccttggtcttcaggtcctggatctgccacttccctctgcctacccttcagctctcctacccttatgttctctgagttgggttttttcattctgcaaatggggcagttgcytacttcacaggattaatgcaaaggacatatgagatacaaactataaagcaccacataatattacataaaatatatttcagcactctaatataattactgggtgcaaataagactaaagctagacactcaagggagagttaatgttaagtgttgatggaaaaggtcatgtcagatgctcagtggactagattgggagatttgcaaaaaatagataaaagggaagaagggacccagcagtcaggatggcaaaaggagaacaacatgaaagcagaagagaaagattttcataaaatt

SEQ ID NO: 734792 - DNA, 647 bp, Homo sapiens
atcttgatttatcacactgtgcacttttaatagccaacaagtttgctattaaattttaatcaacctgcctattaaatttcattcaaatggtttggagatacttcagcttcttttaatagctaattcattcactgggaatccattagtatggatttcaatgacatattttctctaaagtacagattaagttattgttagttcaatataaaatgacatagtctgatttcagaggtgttgcctctgttttaacatacaaatccgaagattcagagttgggaaacctagaagttacctcttcaattgctcttattttgtattaattggctacatatgtgtcttcttgtccagayatatgagcttttccacagcaaatacttaaaagtcaaattgctgggtcatatcttgtgcacattttcaatttattgaagtaacatattgcctaaatgctgtcaaacctgtttatacaattcactttcccatgaacagtgcacttattctctcaaattcttgctaggatttagcattgtcagactgacatttttgccaatcagagtatgaaatggtatttcatatcactgttatactctgcatttcttattactataaaggtaggtaatttttcatatgtttattcgctataagggttt

SEQ ID NO: 734793 - DNA, 501 bp, Homo sapiens
aaaacatatggctagtgaatacattgctaaggcccttccaagggccttgctacatgtaagagaaacatctaaaattggaaaataagaaagttgaaagtaacaaatttttaaaaagttataaccaaattcttatcgaagcaagctggtataactgtataaatattaracaaagtagactttaagtcaacaagtacagataaagatagtgatttcataaagataaaacataatcattttaatttttaaaaggtattcagataataacaaagcaagaaaaaaatacacaaatccacaatgaagcaagtaaaatttccttacaacatctctattgagacacaattcacataaaataaaattcacctgtctaagatgtacagtccagaggtttttaatgttcatagaattatgcaaacataaccactatctaatttcaaaaacatttttatcactccccaaagaaactccatacacattagcagttactctcaattgaactccttc

SEQ ID NO: 734794 - DNA, 501 bp, Homo sapiens
aaaacatatggctagtgaatacattgctaaggcccttccaagggccttgctacatgtaagagaaacatctaaaattggaaaataagaaagttgaaagtaacaaatttttaaaaagttataaccaaattcttatcgaagcaagctggtataactgtataaatattagacaaagtagactttaagtcaacaagtacagataaagatagtgatttcataaagataaaacataatcattttaatttttaaaaggtattcagataataacaaagcaagaaaaaaatacacaaatccacaatgaagcaagtaaaatttccttacaacatctytattgagacacaattcacataaaataaaattcacctgtctaagatgtacagtccagaggtttttaatgttcatagaattatgcaaacataaccactatctaatttcaaaaacatttttatcactccccaaagaaactccatacacattagcagttactctcaattgaactccttc

SEQ ID NO: 734795 - DNA, 582 bp, Homo sapiens
tagaaaaagtagtatttctgtatttgaaaatttcaaatttacagagtgaaattcaatgctttgttatgaaaatgagaagagtaaatagaagaactaaactttttctgatttcctaatgtttacaatcaagacctattaaggatagcacagaaattaatcgcaaccaatagaaatgtgcagctttggaacattgattgaattgtgactttaacttttgctttttattagcattacactgatgaaatggaaatggaattgagtaaagataaacagtgaactcagtcagatatgaagcacgatttagatatgaaataatgaagttcataaagttcatgtctcacrtagacttggcaagctacagtattgtaagaactgatgccaataccagtgtatctggtcagcttccccctcataccagcttctagtaagactttgctgttctagtcaaagatatcctcagtagcctagggttgaccaatcatggtacccaatcctttgggcaaaacttgtccagggaaaggtgaaagaatcacgcatggtgaatctgaatccttcctggcagctttctaaccagtttcaggg

SEQ ID NO: 734796 - DNA, 639 bp, Homo sapiens
aagaagaaaggagtaataggtcccaagcaagtccaaaatctagcaaggcaaatttcactaaacattaatagtaaggtgtgactattaataatcctctttggtttgatgctctgtcctgtgggcccacgggggtggcaacatcacccccatggggtgggtagtgtggccctgccttttttggtggtggagctgcaactctctgcagcggcccacctacactgcagctctctgcaggactgcagttttccttttgaaactgacatggaggtactcttgctccctgggcctgtatgctctgggcccgtggtgatagtggcattcctgacgatatctaaatagcgtttgtggtccttcttccttttcttgaaggatggtacctgktcacggctgaatagctctgtggtcccatttgtagaatcagaaaaacccagcagacattttttattccctcccactttttctgtcccctttcattcaaatgggcaatgtctttgctggcataattccatctgtattcctggcctctgctgaaatggctgaataagtttatgagccacactcatggtctttttatcaaatggttgctcagccatacccttaatagtctcttctgaacaaactctctcatgttttataata

SEQ ID NO: 734797 - DNA, 686 bp, Homo sapiens
atatctcatctgtttgtctcacttagtagtactctatggtgtggttatacttctgtttgttgaaccactcacctgttgaaggacttctggcttgtttccaggttggggctataacaaacaaatcctctataaacatttgtgtacaggtttttgaatcaacatacgtctttatttctctggaataaatacccagggatgtgatttctgggttgtagtttcatgtttcatttttaaagaaattgtcaaagcatttttcaggtgtctgtatcatttcatattcccaccagcactgtatgagtgatctactttccctgtgtccacaccagtgtctggtgtcattgttcatgctagctgtgctgacaggtgtgtagcgatacctcactgtggacttaacttgaatttccctgatggttaatgatgctgaacttcttttcatatgtggactcaccatctgtttgtcttcttcagtattatagaacttacagtattctgctaaaaacattttatataaaaacagsgttctctttccagtagaagagtgaccttttcacagaggaggaggtggctgcacaaataggtgaaatgcctcaaagccacgcagccataaggtaacagggctgacgtaggaggtcacacaagcccagggcagtgaggccccctcagtcttctcatgtggagagtctcct

SEQ ID NO: 734798 - DNA, 573 bp, Homo sapiens
tgaaaaggtcagtcttctagtggaaaggcaatgctgtttttacataaaatgtttttagcagaatactgtaagttctataatactgaagaagatatacagaagacaaatcaacacatgaaaagaagttcagcataattaaccatcagggaaattcaagttaagtccacaatgagatatcctacacacctgttagcacagctagcatgaacagtgacacccaaataccggtgtggacatggggaaagtggatcactcatacagtgctggtgaaattgtgaagtgatacgaacactctggaaaaccgatcgtttctttaaaaattaaacatgagactactacccagaaatcacattcctgggcattattccagagaaatgaaggcttacattgatccaaaaacctgtacacaaatgtttatagagratttatttgttataacctcaacctggaaacaaaccagaagtccttcaacaggtgagtggttaaacaaactgaagtacaaccataccatagaatactactaagtgagacaaatagatgagctataaatatctgcaaaaatctgcatgaatc

SEQ ID NO: 734799 - DNA, 666 bp, Homo sapiens
gaaatacaagtctaattgctttacatcctgttcacacacagtaatgacttccctggtcttgaagtatatatttttttaatttgatccaccaggctttgcatggtctggctcctgttaatcttgcaaggattactttgttttattttgtttgtttgtttcttgattgcacttgtagtgggctgcttccagccctctatatgctcttcccttggcagtatttgaggcctgtatcttctttcgtatccttttgcatatttaatgctgtttatccctagagctaaactcagaccttttctgacctccctgagtggctcaaattttcctttttttatgctctcattgcatcttacatctttctttcatagcagccattacaatgataatttctcatttattggtgtgatgagtagattaatgcccatctcctatgcttttatsttggattaggatgaaactaccacatgttcagtattctgtcctcagcaccaattactgtacctgatacagatactgagaatttgaaaacagaagttagattattgatggtgcaaattttcttgcacataggaggaggtcccagatagcagtggtaggaatttgctgaggatagggagtgggacccgagaagagagctactttatgatgcagtggaccaagaaagatgcc

SEQ ID NO: 734800 - DNA, 571 bp, Homo sapiens
tccatgtggcatgtctcagtattacatttctttattgctgcataatatttcatggtatggatacatcacattttgtctatccattcatcggttgatagacttttggatcagttgatccactttttggctattataaataatactgctgtgaacattcatgtaaagctttggtttagacatattttcatttctcttgggtacctaccttctttcttttggcgaatttagttgttccttttctaactttcaaagtagaatgcttacctcatataatcttgggattttcttttggtggaaattgacaaactgattataaatttttgagaagtgctacagttagctaacaactggagaatgactgttgtttttaatcatgcatagartatttatactattggctctaaagcaagtctcaagaaatttcaagtaattggaatcatatgaaccatattttattacaatgcaattaaggtagaaaccaatttttgaaaagttaaccaaaaagattctatacatttaaaaatctgaaggagaaactgaaaaataattaatgaggaaagattgaaattac

SEQ ID NO: 734801 - DNA, 589 bp, Homo sapiens
aaagcaagtctcaagaaatttcaagtaattggaatcatatgaaccatattttattacaatgcaattaaggtagaaaccaatttttgaaaagttaaccaaaaagattctatacatttaaaaatctgaaggagaaactgaaaaataattaatgaggaaagattgaaattacattcacgtgttgcataacattttgatcaatgatggactgcatgtacaayggtggtcctatacaattataaaatcatattatcaccataccttttccatgtttagatgtacaaataccatcttgtcataattgcctacagtatttattaccctaatctgctgtagaggtttgtagcctaggtgtgtagtaagctataccatttaggtttgtgtaagaacaccctatgatgttcaaacaacaataaaatagcttaacgaaacatttctcagaatgtatccctgtcatgaagtgacacacactgtataatggtaatttaaaaacaaagaacttgctggaagtacagttgggattgctttgaatccagaaaacataaacatttaagttttcttctaaatattttagctgcatcatatatatata

SEQ ID NO: 734802 - DNA, 589 bp, Homo sapiens
aaagcaagtctcaagaaatttcaagtaattggaatcatatgaaccatattttattacaatgcaattaaggtagaaaccaatttttgaaaagttaaccaaaaagattctatacatttaaaaatctgaaggagaaactgaaaaataattaatgaggaaagattgaaattacattcacgtgttgcataacattttgatcaatgatggactgcatgtacaatggtggtcctatacaattataaaatcatattatcaccataccttttccatgtttagatgtacaaataccatcttgtcataattgcctacagtatttattaccctaatctgctgtagaggtttgtagcctaggtgtgtagtargctataccatttaggtttgtgtaagaacaccctatgatgttcaaacaacaataaaatagcttaacgaaacatttctcagaatgtatccctgtcatgaagtgacacacactgtataatggtaatttaaaaacaaagaacttgctggaagtacagttgggattgctttgaatccagaaaacataaacatttaagttttcttctaaatattttagctgcatcatatatatata

SEQ ID NO: 734803 - DNA, 573 bp, Homo sapiens
cgaggttgcagtgagccgagatcgcgccactgcaccccaggctgggtgacaaagtgagactccatctcaaagaaaaaaaaaaaaaaggaaaagaaaaagaaagaaagagagaaaagaaagaaagaaagaaagaaagaaagaaagaaagaaagaaagaaagaaagaaaagaaaagagaaaagaaaggaaaggaaaggaaaagaaaagaaaagaaaaaagaaaagaaaaggcatgctgtggaatgtgctgtgagaaaggttttaagamatgtgggaccgccaggtgtggtcactcacgcctgtgatctcaatactttgggaggccgaggtgggtggattgcttgaggccaggagtttgagaccagcctgggcaacacagtgagaccctgtctctgatttttaaaaaaaatttttttaattagcctggcatggtcacatgcacctgaaatcccagctactcaagaggctgaggcagaaagatcacttgagccaggagtttgaggctgcagtgagctataatcaccccactgtattccagtctgagctacagagcaagatcttttctcaaaaaaaag

SEQ ID NO: 734804 - DNA, 618 bp, Homo sapiens
aatattcagttcctcacaataactccatcactgcaaattagggaatatattagattccaaagataccaaaacatcagaaaaccatgagccagtatgacacgctaaaccaatactagacaaatcctagtaattctctcaatttaattttctttgaaaaatatgctatataaaatgccactaagatcttatcttatattactaatcaactattaagagaaaatagaatagaaatatgacaaaatttagaaaagccatcagctctacagtcaagaataggcttaaaattagatacttgagacctatgtcaatgagtcactcttcctagcatcctcttcactgrtgacatgttttaagtcaggcaacaactatttcgacaaaaaacattaattcatgagtatatccctaactaaaaacaatactatttattcaatgcctactgtgtgataatatttgacaggcataattccatttaatactcataatacctctgggaagtagctactactgctactcttgcttcacagatgaaaattacttgtccactatcacatggctgtgatagtgtgagaagctggaatttgaactcaggtctctctgcctctactgatccagaagttt

SEQ ID NO: 734805 - DNA, 578 bp, Homo sapiens
actagaacgtaaatcttatgaaagcagggattgtgttttcctggtgcctgaaagtgtctatagtgaatatttaataaatatttatttgcatgagtgatattcaaaactctcttcttcctttcctagtgtcaaatattggtgcagatggaatgcttgattttccaaaaacatctcttctggaacttatgataggaagaaaagatgttatttctgtggatgctgctgtgaaatttataaaattagcttttacctatgaggagtggagtttatttgaatcttctgctgtacatcttatttattttctccaggtaatatatgcaaaattatcctcctggttttttttttgttaaaatgacatccaattactaattaaygtgtgggatatacttccccaagaggcaggatgatccagagtcaaagaaagcagagaaggatttaactcttctgattgcaatggaaccactaatcaacgtgaagagaaacaaaggtttgatctttcctttggaaaactataaagaaggacagtcaactcaaatttatttaaaaaaaattgctgttcatggtaagtatttatttgt

SEQ ID NO: 734806 - DNA, 541 bp, Homo sapiens
gaagaagttgatttttggttaagtaactatctcaaaaaaaccacagttattacaaaggagaactaagacttaaagttagacctctgtttttcaataggccacaatttttaaccactcaccttggagcttttaatttggagatacatatacaaaaagtatgaaaacaatattttaaaaatccatcgacttaccactaaacataagaaataaaacattacagataaaagccatgtctcctaagtttcttacattcccttttctcagtggcacagctaactacttaccagaggttatttgatcatttccatagctgtgtttatatttttactgcacatgtatgtactcctaaataatacaygtcattgttagtatgttatataaatgttatcctactatcttctctgtaattttctttatgatattcattcttatgaatatatgtagctttttttttcatttatgctaggagtaattacactataaaattagttttataccaagaaaaccaactagtctttcaaggggggatgatttctctact

SEQ ID NO: 734807 - DNA, 596 bp, Homo sapiens
cattgttcatgtgtcagtcagagatctggggaaaaaaagtttaaacaaagaatttgcatctcctcttctctggctctcttctttctgggatccccccaatccctacctgactttccagaaatggtattttccccaactctgtcctctggtttttaggcctgaaaacctgtgggttttgtgttagaccttcacctgacctgcctggctctgcctgccacttgcccaaagtataaaaactgttattaattagaagaagaaggggaagaagaggaggagaagaacgaggaagaggaatakgcagaggaggaagagagggagaaggagggtgttgggaagaggagagaagcaggaggagaaggaattaaaataagaaacacattcagtgccttttgtttctcccaagtgtcaacttccctctagaatctgttgatgttaattctcgagtgctttcagatactttactgtgttttgtccagagttcatagttgttatctgtggaaagacaaattagttaggagcttaccggtccttcctagaagcagtgacaaacagaaaatgtaaaaggcgcttgtaattagaacctattgataagaaga

SEQ ID NO: 734808 - DNA, 620 bp, Homo sapiens
attactgggtatatacacaaaggattataaatcatgctactataaagacacatgcacaaatatgtttattgtggcactattcccaatagcaaagacttggaaccaaccgaaatgtccatcagtgatagactggattaagaatatgtggcaaatatatgccacagaatactatgcagccataaaaaaggatgagttcaygtcctttgcagagacatggatgaagctggaaaccatcattctcagcaaactatcacaaggacagaaaaccaaacaccgcatattctcactcataggtgggaactgaacaacgagaacacttggacatagggcagggaacatcacacaccagggcctgtcagggggtgggggtttgggggagggatagcattaggagaaatacctaatgtaaatgatgagttgatgggtgcagcaaaccaacatggcatatgtatacccatgcaacaagactacacattgtgcacatgtatcctagaacttaaagtataataataataataaaaatcctctagtgaaaaaaaaaaaaggagaaaatcttgtcatttgcagcaaaatggatgaatctggaggacatggttaagtgaaataagccaggtacagaa

SEQ ID NO: 734809 - DNA, 582 bp, Homo sapiens
atccctacctgactttccagaaatggtattttccccaactctgtcctctggtttttaggcctgaaaacctgtgggttttgtgttagaccttcacctgacctgcctggctctgcctgccacttgcccaaagtataaaaactgttattaattagaagaagaaggggaagaagaggaggagaagaacgaggaagaggaatatgcagaggaggaagagagggagaaggagggtgttgggaagaggagagaagcaggaggagaaggaattaaaataagaaacacattcagtgccttttgtttctcccaagtgtcaacttccctctagaatctgttgatgttaattctckagtgctttcagatactttactgtgttttgtccagagttcatagttgttatctgtggaaagacaaattagttaggagcttaccggtccttcctagaagcagtgacaaacagaaaatgtaaaaggcgcttgtaattagaacctattgataagaagagggcagcattgcttttaaagaaataactcttgggaaaacactttagtggtccttttgcttacgtaaaggttcaggtcagggcta

SEQ ID NO: 734810 - DNA, 430 bp, Homo sapiens
ttcttggcatgttgaacaaagaattgaacaaaatgctcagacaaagcagtggaagattaaagcatagatgttttgaagtgaaagtacactccacagagtggaagtgggcttgagcacatggctcaagagccctgattataatgttcctgggcttttattgaattacaagagcatggtaacacccctaagtaccctttagaggcctytgataggttacaccctacacaaatgaagaattcagcccaggaccaatcagaggcaggattctgcccagaaccaatcagaggcatcctgcctgtgatgtataagcaaatgaaagtttcagaatggaccaattacagacatacccatttgtgacataggggaggggaggttcagagaggcatgggcatttggcccctcattacttggtcctggaaaggtggggttt

SEQ ID NO: 734811 - DNA, 430 bp, Homo sapiens
ttcttggcatgttgaacaaagaattgaacaaaatgctcagacaaagcagtggaagattaaagcatagatgttttgaagtgaaagtacactccacagagtggaagtgggcttgagcacatggctcaagagccctgattataatgttcctgggcttttattgaattacaagagcatggtaacacccctaagtaccctttagaggcctctgataggttacaccctacacaaatgaagaattcagcccaggaccaatcagaggcaggattytgcccagaaccaatcagaggcatcctgcctgtgatgtataagcaaatgaaagtttcagaatggaccaattacagacatacccatttgtgacataggggaggggaggttcagagaggcatgggcatttggcccctcattacttggtcctggaaaggtggggttt

SEQ ID NO: 734812 - DNA, 576 bp, Homo sapiens
gcccggctaattttttttttttagccatgttgcccaggttagtcttgaactcttgggttcaagtgatccacccacctcaatctctcaaagtgctgggtttacaggtatgatccccacacctggtctagagcacaattctattttttttttttttttttttttttgagacagtcttgctctgttgcccagttgcccaggctggagtgcagtggcgcgatctcagctcactgcaagctccgcctcctgggttcatgccattctcctgcctcggccttatggagtagccgggattacacgcgcccgccagcacgcccggstaatttcttttgtattttttagtagagacagggtttcaccgtgttagccaggatggtctcgatctcctgacctcgtgatccgcctgcctcggcctcccaaagtgctgggattacatgtgtgagccaccacgcccgggcctagagcacaattcttttgatgaactgatagagttcaggttctgttggagcttcagtgtgaactctggacgcataggagctttctgaccttgtccagaaggaccctgcctcaaaaaccagc

SEQ ID NO: 734813 - DNA, 475 bp, Homo sapiens
gtacaaaatgaaaatgcaacgatacctaccttagaatgttgttgtgaggcttaagggttaagggattgtattgcatataaagcccttaacagaatatgtttatattagtgtacttttgaaactagcaaatgttttgcatttagagtgaaataaacctctttaaraaagaagcttcaagtttgaaaagtgatttgctttaataattttcctttataacaactcatttggctattaaggcttcagctatttatttcggactatttagctatttatatattctttgcttttgcttaccgaagatgaaataaactagatcttttccagatctaggttcattggcatttttttagtatattgtgtaaagattaggatatcaacttaaatagttttttaaaggccaaaagaagactaaaagctaccttttttttttttttttgatggggtctcattcttttgtgtgttcataactcactgc

SEQ ID NO: 734814 - DNA, 542 bp, Homo sapiens
agggaaagggagaaaagggctctttctaactttgctgaaaaaggctattcattccattgtggcaaataacttgaatatgattcacatattaactgtagacagaagaaatagcagagcaatttatttatacactaccacattcctgaagcagccttccaggtgcctcagcatgtttggatctggcctrtgtgtctcctaaatacatctcctggagaacttagtcgaaaccaaaatgtttacaccaattggaggggcccatgatgtccgcagcaaactaaaaataataggatctctgtgtccatacccattacactgggaagcagaggtgtgactctgatactccagacccaaccagagtgtcagtgccgggaaaaatgtttgagggaggagatgggttggtggtgccaaaaatttcaagcaacgccctctttctctgtgtgctgtgtatatggggaatctggaaaatgacccacctaacagctcccaaagccaaaagacactacagtacgtaaatggggtcttatattctgcgtcgatgttat

SEQ ID NO: 734815 - DNA, 591 bp, Homo sapiens
taatgtggtgatactctaaattgatagtccttagatacttgtcaatgttagtttagaggagaagtggtgcatgcatggagaaggatggaggaggaggctcgcttttgtcaatctttagtttctcttttattattcccaattatttatttaattttttaagagacagagtctcattctgtcacccaggctagagtgcattggagcgatcacagcttgagctatgattactgtaaactcaagctcctgggatcaagcagtcctcagcttcccaagtagctatgactactggcatgtgccactatttccagctaatttttaaaattttttgtagagayggtgtctcacgatgtttctgaggctggtctcaaactcctggcctcaagcgatcctcccacctcagcctctcaaagtgttgggattacaggtgtgagccactgcttctggcccccaataatgtattattgttccactcaccaaagaaaaagttcatcagactagctgcttagtgactctgtgttggtactgggcctgctccttgaggcaactcttcttcctcactccttctgcaaaaactttattccatattttatt

SEQ ID NO: 734816 - DNA, 639 bp, Homo sapiens
aacaacaaaagcaatacaaataataaaaacaatactggtgacttcttatgctattgttatatggtagacattttacttatatttttatactttgttcttgcaaaaagacttaggagatagggagattattatgtctagtttctatataggaaacctgagtcagagagattagtgtgccaagattacctggtgagtaatgggcagaargctaactatggagcctttgtttttaactactatattatacttctattggggctcagaaagtgatacttcaaagtatggcactttggcatgctgagcactttaaattaaaggattaaaaataaaaatatcctggagggttgcatcattcctggaggtactgcaataccaagtcagtgtgtggagtggatggagcaagctcctactctatctccctgctccaaaaatccatttaatatattgcccttggatagaggacatatcaaatattaaactgataagaacagatactacacttgatcttagccaaaatatctagaagcaataaattaaaggatgtcagaaggcctcagaagcaatctcagaaccaaggtctcttagattttctgccttgctgtctcttacccttcattctgtcttgaagcaagtcataga

SEQ ID NO: 734817 - DNA, 533 bp, Homo sapiens
tactttgataacaccaaaaaaattttctgtatattattttaaaccagtctgacagtaataccaaaagaaaacttgacccacaaaatatctaatgatttttaacatttctgctgtcaccatcaataactaccttttatttccagatttttatctgtatttaatttctgcaaacataaacagacatgagaatgtaataatggagggaaagtaaaagaagaaaaatractttaagaaatgctgctgtttcacaagagaacataaaccaggaaaaaaaatgttgctgtaatttttacatttcttcactagtttaaatagtatctgtaattttcagaacaatctaatagtcaccagaaagtacaaaatgagcccttctcacatgtgttctatctaggcttactcaacatattaactttctctttgcttaaaacaagagtcttgaaaatgagtgacttgaagagtaggtttctctgtcctgataaagacaggtaattactaggatcacactgtttaaatgtaacagttacaactactgg

SEQ ID NO: 734818 - DNA, 619 bp, Homo sapiens
tcttttagtcctttttatcacctgatttctctggctagaacttccaatactgtattaaatagaagtggtgaaaggaggcatcttttccttgttcctgatcttagaaggaaatatttaagtcttttaccattaaggatgatgtttactgttggtttttcatatatggtttttattatgttgaggtagttttcttctattcctagtttgttgagtgttttaaccatggaaaaagtgttgaattttgtcaaatgttttttttctgtaccagttgagattatcatgtgttttactcccttaattgtgttaatgtgatgtattacattaattgattttcatatattgaaccatccttgcatttcagaaataaatctcacttggtcattgacataatccttttgataggctgctgaattttgttgaggatttttgtgtcaacgcttataaggtatattcatctgtagtttttccccttatagtatctttwtctggctttggtgtcaaagtcatgctggcctcatagaataagttaggaaatcctccttcttcaatttcctgcaaaaatttgagaaggattagtgttagcttttttaaatgtttggtagaattcaccagcaaagcc

SEQ ID NO: 734819 - DNA, 537 bp, Homo sapiens
tcctcccatgaatcaccaatgttcttaagggcatttagaaagatgaatcttttctagaaggttttcaatttacttgtgctagatccatcagaggaatcactaactattgcagccatagcctcacaaaatgtacttctttaataataagactgaaaatcagaattaatctttgatccgtgggctgcagaatggatattgtgttagcaggcatgaaaacactaatctacttacacatccatcagagctcttgggtratcaggtgcattgtcaatgagtggtaatattttgaaagaaattttttttttctgagcagtaggtcttaacagtggacttaaaatattcagttaatagtgctataaaaagatgtgctaccattcagccttcattgtttcatttatagatcatagacagagtagatttagcataattcttaaggcccctgggattttcagaatagtaaatgagcattagcttcaactgagttaccatctgcattagcctctaacaagacagcgagcccgtcctttgaagctttca

SEQ ID NO: 734820 - DNA, 600 bp, Homo sapiens
tatgtaactttagttgttatattaggccattcttttgcattgccattaagaaatacctgaggctagacaatctataaagaaaagaggcttaattggcccacagttctgcaggctgtacaggaagcttgttgtcagtatttgcttctsgtgagggtctcaggggacttacaatcatggcagaaggtaaacgggaggtcagtgtatcacatagcaagagcagagcaagagcaagagtagagaggtgccatacacttttaagcaatctgatctcgagtaaacccactcatcaccaagaggatggtgctaaatcattcatgaaggatctgccccaaaacccaaacacttcccgccaggccccacctccaacactgggcattacacttcaacatttaagacaggacccccactcaaaccatatcagttgttaaggtgagtatacagtaatacatgtccaggtggatatgtttcatagttagtgaaaggtgtacaattggacgaagaaaaatccatggccatctgcctgtctgtgacataataaatgctccatgtcattgttcatcaaaacagaatggcaataagcaagatcaactatattgtgat

SEQ ID NO: 734821 - DNA, 526 bp, Homo sapiens
tattgagcctttacacttgcttccatattttctaccctacgtagtgtgaaaataaggcacaagacattcactaataagcctgttttgttgtctaagtacagctcatctttgcttctgcctcttggtcaataactaccacaacatatttgaaaagaaagattactttaacgttaaatgctttttcgaatttcaaagtatcttctctgtgatgataggaagtcataamgtatatgactggctatcacatcattatctttggaggccacagggcatggttgttaagaagcatatttggactcagtaggctgggttcgaatggcagtttcattactcgttgactattgaaatgtgagccagttacttgactgttatacttcatctgtgaagtgggtatacaaagactttataagtcataagaattatgggaaataatttacataaaagattgttttttaatagatcctgcacatagtgaatggtcaaccgcagttactatgaaacactaaatgtagcgggaacacaaagt

SEQ ID NO: 734822 - DNA, 651 bp, Homo sapiens
tttaaatctgttggccagaatcttcactttagcatgagacaggttaagatatccctctatctccatagttctcaatggaagcaatttttggctccacattccccccatccccaggatatttggcaaagtctggagacatttctattgtcaacactgtggggttggtacaggcatataggagttagtggcctgagatgctgttaaacatcctacaacgcacaggaccaatgcaccaatgaagaattgtcttgcccacatatcaatagggctgagattaagtaattcagctctaaatgaagagtattagaaacacaaacacagagagtgttgaaatatctcaccacccactctggaatgagaattatacatggtttactatgaattaaattaagcataaccatatacaactgtcaaagaaatacactaggcttctaatagccatttttttgttgttttttagttcacctctgtaaggaactagaaataatcwttctatttatttttggttggtttcttaattttctagtgatgctggtattcctctgtctcccacaccattcttgactgtgctgtttgtgttttgaatggtcatttccttgtataatgacttgcaatgctatttgcaaatcagtctcatcactggccgtgtgc

SEQ ID NO: 734823 - DNA, 352 bp, Homo sapiens
tagatagcaattcagctgcatagaaatatggttggctgggctcatgttggttaaggagactgttggaagtagcaattctggaatgattagtggctcttagtgacatcagtcaccttggctcttacttcaggtattttakaagtgtccctgttgcactcccttcccaggtggctgatgaattaatgattatttactgagcatctactatgtgcctgattcattgttaagtacctagagagccacaaagaaaatgatacagtgaaatagaaaacccgtgcttaactagcaaacactaccttctggctgacagttcaggaaagagttagcgtctgaaaagaaaaaaaaaaaatac

SEQ ID NO: 734824 - DNA, 625 bp, Homo sapiens
tgtggttttgatttgcatttctctaatgatcagtgatattgaacttttttcatatgcttgttggccagatgtatgtcttcttttggaaaatgtctatgtcctttgcccacttcttttttttttttttcaattttacttcaagttytgggatacatgtgcagaacgagcaggtttgttatgtaggtatacatgtaccacggtggtttgctgcagctatcaacccatcatctaggttttaagccccacatacattatttatttgtcctaatgctctccctcccctttccctttccccccaccccccgacaggccctggtgtgtgatgttcccctccctgtgtccatgtgttctcattgttcaactcccacttttgagtgagaacatgcagtgtttggttttctgttcctgtgttagtttgctgagaatgatgatttccagcttcacccatgttcctgcaaaggacttgaactcattttttatggctgcatagtattccatagtgtatatgtgccacattttctttatccagtgtattattgatgcctttgcccacttcttaatggggttgtctgtttttctcttgtaaatttaagttacttatagatgctggatattagacctttgt

SEQ ID NO: 734825 - DNA, 625 bp, Homo sapiens
tgtggttttgatttgcatttctctaatgatcagtgatattgaacttttttcatatgcttgttggccagatgtatgtcttcttttggaaaatgtctatgtcctttgcccacttcttttttttttttttcaattttacttcaagttctgggatacatgtgcagaacgagcaggtttgttatgtaggtatacatgtaccacggtggtttgctgcagctatcaacccatcatctaggttttaagccccacatacattatttatttgtcctaatgctctccctcccctttccctttccccccaccccccgacaggccctggtgtgtgatrttcccctccctgtgtccatgtgttctcattgttcaactcccacttttgagtgagaacatgcagtgtttggttttctgttcctgtgttagtttgctgagaatgatgatttccagcttcacccatgttcctgcaaaggacttgaactcattttttatggctgcatagtattccatagtgtatatgtgccacattttctttatccagtgtattattgatgcctttgcccacttcttaatggggttgtctgtttttctcttgtaaatttaagttacttatagatgctggatattagacctttgt

SEQ ID NO: 734826 - DNA, 625 bp, Homo sapiens
ctgttcttctattattctgtctctgcaaagtcagttgtgaataagttttaccatccactttaagcccttgcgtagacaagtaatacataattatggtttccagctgcctataagctatcagcatttatttcaaagatttcctactcaactcaaggtatttaccacactcctgctactctcaccctcascaagtgttcttgcctgtttcatggaaaaaagataatgaagaagataaaatagaaactctgcccatcctttacaaacaaagagccaattaactgtgtctgcacttatctccctctccctcctgctgtcccagaaagagaatacctccccatcaaaagcaatactgtcacctgagcttcagaggtcaacttttaccacctcctccaagacctccaggaacccatggactttgcttcatagtgtgttacttttttcctttttcccttctcatctagctctttaaattttctcaggtcattgtgctccatttcctttttctcctctaagattcattcattctcccaaatgctgccctaacttgcttcttccatttacacccaagatactcaaaggaaatttaattttgctttaccttttatagtcatacaacccactgcat

SEQ ID NO: 734827 - DNA, 630 bp, Homo sapiens
tcccaaagtgctgggattgcaggtgtgagccactgcgtacagcctttctttggtttcttggtgactgtgggttttactaccttctgccctaggtcttcacctcaacttgaatattgacctattggatgtaggaaacaagtcgtatttccattaatggttaatttccaaaagcaaattaaacagtgaaaaccagacaccaatctcctttttttctctcatctcttacttcctttcttcagtccccagcttgatgctttcaacatgagatgcttcaagcctatgtgcaactcaaaatcttccctctcgcagatcccagacctcaagtcaggcatctttcctcagcctctcagtaaccctgcagtcatacttaacatctcctaaactggggaaggccctgtagattccatcagtgctgcccacacagccatcacacacgtgttaactgccaccaaggccctgaacaattcctatgctcattagrtcagtaaaactggttccattatctactcaagattatcctttcggcaggtggagggtggtatctaccacatcagatttctcatcaggataacagaaatataaactacccccatgctttgtagctgaacttaatccaaagcaaagagaagc

SEQ ID NO: 734828 - DNA, 703 bp, Homo sapiens
atattaaagatttgcaattactatgctctttttctgttagagctaaaaattgctactgtgaccaaagctttctaaaacctgaattactccaggaaacgaaaaaattgagaacagagttccagatgaaggcatcatgatgacgaatgtcaacatcctggtcaattatactcaactgcttcataagacacttctgaaagcctcactgtcctgaggccccaaaaacctaatagggaaaagattaacatgtcaacaagggaaaactgccctctctgctctcattstttttaagcacagctaaaataaattcttttgtttttggggggacagggtcttgctctgttgcccaagctagagttcagtggcatgatctcagctcgctgcaacctctgcctcccagactcaggtgatcctcccacctcagcctccagggtagctgggactacagttgcacaccacaatgcctagctaatttttgcattttttatagagatggggttttgccatgttgcccaggcttgtctcaaactcctgggctcaagtgatcttcccacttcagcctcccaagtagctgggactccaggagtgcactaccacgcccagctaatttttattttctgtagagccggggatctcactatattacccaggctggtttcaaactcctagcctcaagggatccagggatcctcccacctcaaccctt

SEQ ID NO: 734829 - DNA, 617 bp, Homo sapiens
accttcccgagaacttccttaccctcactatctgcctaaatcatttctttttaactcctctaacagtgaggccaaggtggatcttgggtttgcacctccctaaagaacaaggtgaaggttctccctccaaaggtatccgtgtctcccaaccccgatgcagagcggtagccacactaaaggggccacagctgccacagaggctcaggggaccgtgtgaagagctggaggagaggaggaggcctctgagtctgctaaaaaaaaacagtgtgacattttattactatcccacatgggcttgggagatggaatgccacccctaaaccaagctaaagctaagatgacctcatcctctgtgcacaggagaaatacaggcagctgtgccagcaactttcyctaagagagtgttaacccaatatatcgagacagatcttactcagtgtagaacttttattttggccgggagcggtggctcgtgcctgtaatcccagcactttgggaggccaaggcaggtggatcgcctgaggtcaggcgttcaagaccagcctggccaacatggtgaaaccccttctctactaaaaatacaaaaaaattagccaggcatagtggcaggtgcctat

SEQ ID NO: 734830 - DNA, 605 bp, Homo sapiens
atgaaaagagagaaaaaaacaagaaaatatgaaatagagcaaacgggggacactagcaaagggcaaagaaaatcctagaaggatggggagcagatccccagaatggcagctgtgctccagatgtaaccagcccacattgtagtaatgtgactcaagacatgatgccaccattgtaccttcttctttaacctgaggacasagtgctcaggtgagcccagcccaaattcttacctgcccttggcttattttctggtgaacttcctattctgctttctagatccttctgcctgttgagcctatgacacaatttcatctcatggaggtattctttctctccaggagaaacttagaaacaaaaactatagaacagcctacttccctgattacagccctgccagatatcccaagtatagtgagccttttgttttccaggtctcataaccttgctcattattaccctggaaagggctcttataaactctcactgaagtcaaagttacattttgtgtggcttacctcttcttgaatttcttcatctaacaatggcagcattgcccacacttggtttttcaaaacaaagcaatgtatgagcggaggaaggaaga

SEQ ID NO: 734831 - DNA, 533 bp, Homo sapiens
tctgcaggaagagagccagtgaaggtgacagtagagtggtgactgagataaaaggaaaatcaagagtgcttcattgtctcaagtatatgagaggaggcatgagactagtgcagcaaagtatccactgggttaatccctatggatgtcatcagtgatcattagtagcctggatgtcatttgttgcacaaaagacagattggagtggattcagtagaatgggaraagaactggagacagtatagacaaatattttggtgagtttagctataaaagggagatgagaaataaggcataacataggagaggaacgtgtaatcatcagtatttttccttaacctgagggatgctaatgccaaaaagagatgcaattagggaagaagtgaaggccttgaaggccatgaaggccatgaggagtatcaaactccagtggaagattgccttagggaagagtaggaacaggtcctccactgtaattacagataaacaaatgaaaaacatctaaatgtaggtaggtttgcaggtttgactgcagg

SEQ ID NO: 734832 - DNA, 621 bp, Homo sapiens
ttttgtgacctgagttttctactcaataattattgtgaacagggagccatacttagcctggcgttttggcacgatgcttctaaaaccaaacagaggggcatctttttgttgttcatcccctgcctgttcaagtgactgyccagcatgtttgccttttatctaagccatggctgagtgttcttttcatttctctccatatgtccatgagatcttgtttctgtggcttgacgcctttctaaacgcatatttcttgctttggtatctgggtgcccagagaacatcttcccctccaggagaggccatcagtgacttttgctgcaactttgtctgctcttgatcctgtgactgggaaggtcagcatatctcatccctggtgaggagcagaaacccagatgaggaaggggaacaaagtggtgcccagaattgtcagcctggaagatgtgatgtggctccgagtccagagccctgtgtccaggagaggcctggagagaaataagtgtggaaactcgtggaaggaggaggctagggtgggaccaagacaggcctcccagtctcagaagggccgtacaactggaagtacatgtgtcccactctccgtggccctgagactggggcaagcac

SEQ ID NO: 734833 - DNA, 634 bp, Homo sapiens
attatattctgctatggaaataatgagcggctggtaaaggggaagccacagtcctgtgtagaggggcaggatcttgtctgatagtgaggccattgaccacccatgctagaatttggaacttccagggagtgggttgcgagatggtgcttctgcatggagacagaccaaaaacttggagaaggaatcaggtaagatggctgcaattgcagcagcctgtttgggctgtggggtggccctctctgacgtttgtggatagaccagrgtctggaagccacaggagatagccagcttgggctcggtaagtgtgatccttccgctttcctgtagttgctgggtttatttccttgcgctttaccttagagtttggtacagcccttctgcaagacccagacggtctcagctgcgtcagggaaagctcagggaaaaccctgtgattcgtatttgacttagatcaataaagtggtagcagttcattcttcgttgccagcatgggcaagaccgcagtatctgaagctagaggaccttggggaaggcaaaaatcagaggactaagttagggttactaataccccatatctctttatggaaatcttccttacagtattcaagattggaggttctgctttacaaaggag

SEQ ID NO: 734834 - DNA, 588 bp, Homo sapiens
aaaacagcaaccttaaaaatatacacaaagaataagaaactattttgaaaattatctagcagataatgaaaactaaccaataaacctctatctgctagaaataaatatatatagaaattaacaaaaatattattgttatatatatgatttttatatgccatgtatatatgtgtatatatrtgtgtacacacacacacacacacattcacacacacacgaccatggatagattttttttttcttgagacggagtctgattctgtcacccaggctggagtgcagtggtacaatcttggctcactgcaacctccgccccccgggttcaagcgattctcctgcctcaaccatggatagacttaacaacaaattagacaaagctgaagagagaatttgtaaactgcaatacaggctggaataaattatccgtaatacagcatagcgataaaaaagattggcaatatggaaaacaggttgaaagagaacaggtaatgagggagatataaggactggtggtttcctaatttgatgcagtacaccaatccatagattgaagaatcctagtgaaacccaggcagaaaaagtaaaaat

SEQ ID NO: 734835 - DNA, 553 bp, Homo sapiens
acgtccaggctggagacctaatcactatagaaggcatttaaagctataagattgcatgagatcaccaagagaatgagagtagatagagaaaatttccaaggaccaagtcccgggacactgctatgctgaagtttgggagcatgaggaggagacagaaaaragaattgaaaagggataggggagaatagagagtcccagaagtcaagaaagcatttcaaaggggcaggacaatcaattgtattagatgccactgataagtcaggcaaggagaggactgaaactaggagcttgtctgctgcctgagagaaaaatctgtgtcatcatcaatgtcatcatcatcatcatcaacaacaaatagatcactggaccaccattcaacaaatactaaaaactgggtcaatggtgggtcatcttgccaaagttctaagttttttctttttttaaaattccattgatacctcctaaagctagactggaaagtgggaatatttttattgttcacaaataatacataattatctctcctttgtaaaatcttccctttcccagcccc

SEQ ID NO: 734836 - DNA, 625 bp, Homo sapiens
caatgtcatcatcatcatcatcaacaacaaatagatcactggaccaccattcaacaaatactaaaaactgggtcaatggtgggtcatcttgccaaagttctaagttttttctttttttaaaattccattgatacctcctaaagctagactggaaagtgggaatatttttattgttcacaaataatacataattatctctcctttgtaaaatcttccctttcccagccccacccaactccaaatcttgatataaatgcaagattctgtatcagaaccaataactaattgagaatctcactatgcctggggtcccacaactgccaccagcaagttccgggaactgaaccatgtgggcaggagctgggagcagagtggtgggaatggggrgagccccctttacacatcacccttcacagtcaggtgctcaagctcgtccaggcttaagcttccagaccagggagaattattaatagcacttcttctttactctcaaaagtattccagattggacaatacattatattgtttcctgcctatttgattttttaaaatccttatttggcactaacttgtccccgtttctttttccccacttaaaaaaaagcccagttttctttatttttta

SEQ ID NO: 734837 - DNA, 482 bp, Homo sapiens
ctgggtcccccctcaagtttctgattcagtaggtctggggtacagcctgaaaatgtacctttccgacaagttccctgatgttgctggattggacagccactgttctagaaccttagaaggtgtaccttagaccagcagcagagacatcacctgggagcttgttagaaaagccaaacagggcccatcccagcctgtggaattggagtctgtgatgtgagtcatatgcacatgagagtctaagaagcactgtttgagaactctgcctttgaaacttctgggctcctactttccttgytctggaggggaggtggaaggcatcttttctaaggcaggaagcaagaccttggcagaggccagcggcttagccctgagagaactggcccagcacccactctctgccctgcctctgtgtttgccaaggaaaagcctccccggcttcagcgctcctgtgtgcgcactgcgcgagaatgagattgattacc

SEQ ID NO: 734838 - DNA, 635 bp, Homo sapiens
cagcatgcccagctaatttttgtatttttagtagggacagagtttctctatgttggccaggctgatctcgaactcgagctcaagtgacctgcctgcttcggcctcccaaagtgccaccgtgcctggccttcactcatttttttttgagatggagtctcactctgtcgcccaggctggagtgcagtggcgtgatctcggctcactgcaagctctgcctcctgggttcacgccattctcctgcctcagcctcccgagtagctrggactacaggtgcccgccaccacacctggctaattttttgtatttttagtagagatggggtttcactatgttagccaggatggtctcgatctcctgaccttgtgatccgcctgcctcagcctcccaaagtgctgggattacaggcatgagccaccacgcccggccctcactcattttttaatcggataatttccttactattgaggtgtttgagttcctgatatattttggatattaaccccatatcagatgtatgatttgcaagtattttctcccattccataagttgtgtcttcaccctgttgattgtttcctttgctgtgcagaagctctttaatttgatgcaatcccatttgtctatttttgcttttgtt

SEQ ID NO: 734839 - DNA, 607 bp, Homo sapiens
tattccttcctctctctctcttttccctctgcttcttgcttttacttcttttaacccattaatactttgtctggtttgccttctgtatacatgtgcccattttcctagtaacaagatgaaagctagagttgttaaatccaactttaaggtcgatayactgcccaaagacaccagccagagagtgcagttctaagggggttcattccaggagaggagtcccaactttagcccattcttttggaaggataacaagtttgaagtgggaaaagctttgaaccaggacttactctccctggattccagtgagaattctactgcttagtagacatgtgatgttgggctactcacttaactctcttagccgtggctctctcagctggagcatggagctaatgttgtctattcctacctcagggatcaattaagcaagataatgcatgtgactatttatgaagtgtagcgtgttttataaatgagttattgttattaagtaaaaacatttcagtttaaaggtattctctggaagatataacgccctctaaaatttactaaaatgttaacataaatgaattaatcagattagctaatcaacaactttaaatgagca

SEQ ID NO: 734840 - DNA, 575 bp, Homo sapiens
gaagattgcaaagtagcctttgtgcattgtggaaataaaagaaagtgtgttcaaagaattaagggaaaatatattattttatgagtaaacaaatagtctcagcagagaaatggaagctgtataaaccaactaaatgtaaattctagaacttacacaatacttgaaatgaaaaattttcttgattggcttaatagaaaagagaagatcacagatttaaaaaaagagctagtgaatctgaatattgagagaaattttagcatctaaataacagggaacatatatattttaaaaattaacagagattcaggcatcttgggggatgatataaaatggcctaatatgtatgtatrtaataggaggcttaggagagaaaaagagaaaagaggagaaaaaatatcagaggaaaatgccttctaatgatgagaaaacattgattcatacatccagaaactcaatgaaccctgaataggcaaaccaccaagaaaaccacattaactttataatcaagctgttgaaaatgaaagataccaaaaagaaccttgaaaaaagccaaagggaaaagcatgaatgatggc

SEQ ID NO: 734841 - DNA, 538 bp, Homo sapiens
gaactaaaagccagatttcaatgctactggttactcagtgcctgatttgtctacattttgcttaacagactttcccattatgcaccaaacagtactatctaggtgaaaagtgaataataaggaaatataaataaatattttctcctaaaaatgcaactttcagatatgaagcacaatatgtatatgatttctatttatatttgtggacagtaagatttattagtaaggatcattatttttaggtctttgagatacaaaaattctgagattccraataagtcctaaagtacatttagtataaaaaatgtatcatgaaaaatgaaacacactttggcaaattttccaataggttaaaagtaaaaggattttccatcagctctcggtgaatttgaaagcatatttataaccaggattccccattcactaagcatttaatgaataaacagccagtgaccaccagcaaacttgcagctctggaggcaggactgtgttttggatccccagtacttagcaggctgtgtggttcttagtagattct

SEQ ID NO: 734842 - DNA, 538 bp, Homo sapiens
gaactaaaagccagatttcaatgctactggttactcagtgcctgatttgtctacattttgcttaacagactttcccattatgcaccaaacagtactatctaggtgaaaagtgaataataaggaaatataaataaatattttctcctaaaaatgcaactttcagatatgaagcacaatatgtatatgatttctatttatatttgtggacagtaagatttattagtaaggatcattatttttaggtctttgagatacaaaaattctgagattccaaataagtcctaaagtacrtttagtataaaaaatgtatcatgaaaaatgaaacacactttggcaaattttccaataggttaaaagtaaaaggattttccatcagctctcggtgaatttgaaagcatatttataaccaggattccccattcactaagcatttaatgaataaacagccagtgaccaccagcaaacttgcagctctggaggcaggactgtgttttggatccccagtacttagcaggctgtgtggttcttagtagattct

SEQ ID NO: 734843 - DNA, 423 bp, Homo sapiens
caccctgatttgctcattacacaatgtatatatgtatcaaaatatcacaggtaccccataaagatgtaaagttgttatgtgtcaattaaaaataagaataataaaaccaaaatcaataaattgagtaatttgttagaggcaaatgcccatatatcgtcaatttaatcagccattccttcactgatgtaacagaaacttaacagtcatgtgttatgtgttataygacagactcagtgttaggacagtaagttaagagatgaagacaaatgaacatgtggaacaacaatgagactgattttttgtactggtgaccatgggcaagtgacttaatctttctgagcctcagtttcctcagctacaaagtgagattaaaagtaacgatacgtatctcatgaggttattttcaacattaaatgagatgtt

SEQ ID NO: 734844 - DNA, 643 bp, Homo sapiens
caagaattttgcaggagagtgggagggggaggagaggcaggcatatatcgatcatggattttaaaaaatgagtatttttaaagttttccagtgaatgaactactcaagcaaaatagaaatgttttctttaaatttctacagaaagagtggtttgataaacaccacaaaacatatgttttacaacattggacagtttaaaattttatacttcatatggaaaaataagtgctatgttcacaggaagaaataaatgatcatataactatcattggtctgagccaaaatttattttctgttactggtctgttactgatatcaaatttcctttgcatgagaaaaagaaaaataaactaggaatctggagatacagactgtcatgtacttgttaaattaccttggacaagtaatttagtctgtgagtcatcattatatttataggtgggayggagatattttatttgctcttcctagatctcaggactgttgcaaaaggaaaaataaatgtaaaagttcttcaaaaagcagaaagcaccatataaaatgtactttattaattactgctaagaacattcaattcatggttactgaggagtttagtgcccacagacagtgaaaattatgcgtgaatttctggtaggtgtaa

SEQ ID NO: 734845 - DNA, 588 bp, Homo sapiens
ttaattcaatataatcttattttgtttaagtcagtgggaaataaattttggtatatggctccttttacttacatgcagaggaagttgtaccaattcagattacataatttctactgtgtataatcagtttccagtgygaaaaggtttaaaattcatatcatatcaccagttctgtatgaatccttaaaatcttaatgggactctaaaaaacaccttacagcatagataagctgtaaacaacattgttctccattgattcatgttcctccttggagtaattccacaattttatgtatccaaaaggccaaaaagttaataagatgaataaagattaatatttattgatactctggtttaaacattctcaaactctatgaggtatataattttattacctatatcttagcaatgaagtaaccaaggtaagaattttaattaaattataaagcataaataaacccccatgctaataatgagtagagtcaggatttgattccaggtagtccaaaaaaagaatgtgtgttctttccaccaagcaatactgtcttaaatattagagacactgaaggtcaaagcagcaccttaacc

SEQ ID NO: 734846 - DNA, 624 bp, Homo sapiens
aaagaggagatcaacatacactgaaaggaaaagccttaacctaaataaaggcaaccaattcacttcttttgatgccaatctctcctgagtcaactctcttccacttgttccctcagtatttataagggctagcatgcattacaatatgtctcatttcagtgaattaattttatatcttcctccagaggcttgaaagttgccaatgccttacccaagactccttamaggaaagttgaagtagaaagaaatcaaaataaagtgaaaatttttacacacatctcttatttctaaagcatatcttgtaatataacacttttaagacatcagagtaaaaataaacagctaatatgatcccatctcaaacttaatttaggaagtttccttttggcaatgagtagaatgttcctggttattgccagctgaccttattgaattcatttcaagaaatatacaaaatcccatatgtaggcagtagtaatatcagtatcagatacttatcagcatgctataattttcatagaaaagaaacttaacttcccattgtaggaagtcaattatattttatgaatgataccaataaaacttatataactccaccctgagagttcatataacaggactgag

SEQ ID NO: 734847 - DNA, 593 bp, Homo sapiens
gtacaattggcccattactgctaccaatggggcacaaggattggtccacctgacatccccatccccagcaaaacctcaccacagcctccactacaaatgcaacctaaaccactgagaacatcacagacaccatatatgctgtttaaagccaaagaaattgtacaggaactgcactactgcctgcatgcagaatctaagccaaagtgccctatccaaccaacaacatagattcatcttcaggaaaatgtcctcacctatgaaaacaaagtcaaaaaaattagaagtgactgttacatcagatgwgcagatagcaatgtaaaggcaaaaaaagacatgaaaaagcaaggaaatatgacatctctaaaggaacacaataattctccagcaacagataccaataaaaaagaaatttataaaatcccagaagaattcaaaataatgatattaaagaagctcagtgagatataagacaacacaaacaaacaataaaaagaaatcagaaaaacaattcaggatatgaattttaaaattacaaaaagatatcattaaaaagaatggaatagaaattctggaactaaaaactttatttaatt

SEQ ID NO: 734848 - DNA, 629 bp, Homo sapiens
ttctctgaacacaacagaattaaattagaataaaaaacaagatctctcaaagtcctttgggtttaatttgctcatctaggaagtagaaggaagaaaataaaaagcttaaatcaataaaataaaaaagacagataatataaaaattaaagctaaaattgtttctttggaaagatcaataaaattaaaaaccctctactaaatcttatcaaggtagcttyctattcatcaagacattattaagaaaacaaattgaaaagttgccaactcagagagcatattcacaataaacatatctgacaaaaatgtatatccaggatatatgaagaatgcccatgactcaaaaacaaaaagaaaatcttaaataaatgtggggaaaattttggacccttcactaacaataatacatgaatggcatataagaacaggaaaaaaaaggtcagcacattaaccaagaaatacaaattaaaccaatgaaatctactgtatatccaatacaattgctaaaatgaagaagactaacaacagtaaatattaactaggatgtggaacaaataaaatacttacatgttattggtaggagtgtaaaatggtacaaccactttagaaaaagccttgatagtttcattatg

SEQ ID NO: 734849 - DNA, 589 bp, Homo sapiens
actgcctctacttttccctctctacccatggcagttttgtgtattgtgaagtatggttgtcaagtggatgaggaaagagaagaactgattaagagcagaaagggcatggccctagccagctaagaaaagaattcacacagctttgggattttctgtgtttctttgccagtggatagagtgggrttgagtcacagtcttttcccatcttcttcccagatttctgtgctattctggttcagcaggcttagtttagattatgactctcaacccaaccctctccttgctgcagttagtggaaattccctgcagattctagcattttatttttctcttatccctatttttcagttctcttgtagatttttttgtctatgtgtttatttatgctaatttaatttaaaagttggaatacaacatttcaccagaatggcacatactaacccagatacttgctaatgactcactgtgttaaacactctgctagatactgagaataaaaagataaaaagagacagagtcattgccattggagagctaatccttgtaagggacaatacaaagaaagactctctaggcagaggacattgca

SEQ ID NO: 734850 - DNA, 604 bp, Homo sapiens
ctagtctccagaaccgtaagtgaataaatttttgttgttttaatccattacatttatggtaattttatagcaggccaaggaaatgaatacgggaagatatactcacttctagctctttttcctctgctgtttccaagaataaatctgggcggaagggtttcattccattggaattttccactctgaaaatcttctctggttgggtgagaaaaatataaattacaaagaagaatacagcatgaagaaatggaaggaatttcaacagaaatccagttgattcactcccctggatggctcttagctcagtgagagtgctgcagagcctagaccagcactcagtagacaggtgttgattcaatgaggcacccagtgaaagggtctcatcccacttataaccagaaggttaccttaaggataggctaccrggtggggcacagtgcctcaaagctgtaatcccagcacttcgggaggctgaggttgggggatcactcgagctcaggagctcagtctgggcaacatggtgaaaccccgtctctacataaagtacaaaaattagccaggtgtggtggtgtgcacctgtcgtcccagctacttggaaggctga

SEQ ID NO: 734851 - DNA, 637 bp, Homo sapiens
agtgacaggaaaattttgctttaggacatagggaactttccagtaacccttgctttattttacattatttaatttctacctattttaagtgtaagattgaccctcaatagcagggcttcttcctgtctttccatattgttactttcatgccaatgtggyggatgtgtccactgttgtactgttctatagtctagcagagtgacctatagttaagagctttgatagggatcctgctgtttcaaaatgctgtacatgtagttggtttcagttaacatttgttgaatgaattagagcaagtaaaaataattgctcattttagaatttgggtcctaaatggagaaaaattatcttacccttgacaaataaaataataatatataatttatactataacataaaataatagcttactggtgatagattcctggagaaagagctatttagaagggaattcccaggagacagcgtcagaacaaggacatttttcatatagtcaggggctgtgacattgtcctcaaagtactggtcactgtaataaaaagcacaggttcctcatgaaaattaggaaaaatagagatgcatcttctatagttcacacaaactataccatcatcattgaaaatagtttaaaacattt

SEQ ID NO: 734852 - DNA, 589 bp, Homo sapiens
gccatcaaacaggcctgcagttcctatacttcatttccattcatgctgtgagaagtatcgttagtgtgggtgaaatgatcaggcaaatatgggaaagatctagacaggagcagcctcttgtctgaatacagacaggtaatgattaatggcccagtcagataagtgaagtcacgtgatctggcttctgggggcaaggggcatgggcatggcagtgacaccttcttcaagcctaacttgactcaaatattactttggcacagcttgtcagtggggtctccaaccatttcagataattagcgattaaaaaaaagatgggatgtgaacaaaggtgctctctacgctccagcattttttctctttggctcagagaaatgtggaggaaaagatcaccacytagtgactacgccacagagggtgaggaataattgtgtatatcagactcatacaagtgaaacttcaagcttatcagaggtggttgaaggaaaagtaatctaggaccaaaggccattagcaactgaaggagaaaaatggggctgacattaccaggaacagtattattgagtctttagttgatttatcattttctgga

SEQ ID NO: 734853 - DNA, 610 bp, Homo sapiens
tcataaggaaaaaaatgtgtcagtggagaaaggtagacgaggaagaggaagtggcatgagccaactctttagaaacaagcagactttcagctttataggttcaaaatactcacaacacaaatgtttttgcatataagtttatgagcgtcctgggttccaatgctatggttatcagctgcttagtttccctgaacttcaatctcctcatcataaatggaatcataacactgcttttacttgttttacaaagatgtaaaaggaaggtttaaatgaggtaattatgtaaaaacaaatgttattttagrattctaaaactgagttttacaattgcatttgataatcagaattaccttgacttgccatagaatttccaaaggttcataagggatttcccttatgataatgttggttctgttatagcttatagtgtttaacttgcgtctttcagggaatcagggagagccatggaaattaaagcatggcctttggagtcgggtattatgtgtgtttgggaggccttggacaagttacttaggctcactgagcctcagtttcctgttctataaaatgggaataagaaagataagtaagatctacttttcagggctgc

SEQ ID NO: 734854 - DNA, 611 bp, Homo sapiens
tttttgaaatacaaagttactaatgtaaaccttggatttttgtagcttgatgtttaaactgcaaatagaatttgggtgtgttaaggtaatttgaggtgcgcattataatccctagtcattttagttttttattaaacatctcattttgtaatgatattgggaagttgaaggtttgtagttccttctagggttgtttttctcaaattctgatttttattaggcatccattctgttacaaactccccttgatcaattttttgttactaaaaagcatatttaatagttttcaaaataagttgctgctttttcctattggaaaatttttatctactggaaaatttgttgaaaattagtattcagagytttaaaaatggtaatggcattttagatagcaagatttgggtaactttggaataggaacaaatggcaagagaacgtaaagaattcttaaagaatttcagtaatctatctattagaacttgtttgaagcgtgctgttacttgaatatatttgtgctgaactaatgtaaccttagaaggaaggttagaactaagttaccggatattgtatttaagttgatttttccatcaaacagtggagttaccgtagtt

SEQ ID NO: 734855 - DNA, 540 bp, Homo sapiens
tgtgataaaatgagctaatataattgaaagtccttcataagatgtaaagagcactgtaaattggtggtcatattttataccattatgtgccagaaactcttctaaacttttttttttgagatggagttttgctatttttttaacaaaaaagtattttattattttgctgcaaagctgttgcttcacagtgtaaaaatagcaccagcaaatgcagtatattgcaaaattaagatagtgttgttcttcatytgacactgtacaagcaacaaaaacttcttcgctcccagttatttccaacggaaagatcattaagtgtttcaacccaaatccaggtatagatatacacaagttacaacattatagaaggcttaagaataacattatcattgaattatgtaattttttatatactttaagttctgggatacatgtgcagaacttgcaggtttgttacataggtatacacgtaccatggtggtttgctgcacccatcaacccgtcatctacattaggtatttctcctaatgctatccatcccct

SEQ ID NO: 734856 - DNA, 602 bp, Homo sapiens
ctctaaaatcagaatgcattttacagttcatggcatgtgacagcttaattggcatataaaataatggcatcaggtcagaagttacatggtattcaaagactgataattgaccattagatttagccaagtgtaggccatcagtggatttgaccagagggttaagacgtagggatggagtgggtttaggagcaaatgaaaggagagaaactggaactcttcagagtgttgctgtgaaggggaggaaagaatggggtagtggctggagaaggaagtygggatatagagagtttttgggttattaaaatggaggagatgaagcatggctgtgtgccgataggaatgtttctacagagattagcatatttatgatataggagagaatggctgagtagcccattggagaaaggagtgaaggcctaagtggtaatgccagccttaggtagcagaaaggaaggtagagctgttgggggcagatgctcaggtggatgaaacagatggaggagtttgctctactctgactgcttcagttttcctagtgaagtggaggaagcaaggtcattggctgggaggaaaccagggaaggaagggttagaatttagagg

SEQ ID NO: 734857 - DNA, 511 bp, Homo sapiens
ttgggaggctgaagtgggaggatcgcttgagcccaggaagcagaggttgcagtgagccgagattgcaccactgcactccagcctgggcaacagagtgagactccatctcaaaaaaagaaaaagagaaatgtaccacaaagctttgagtgaagctcttcctggggacaatgtgggcttcaatgtcaagaatgtgtctgtcaaagatgtttgttgtggcaaagttgctagtgacagcaaaaatgacccaccartggaagcagctggcttcattgttcaggtgattatcctgagctgtccaggccatattggtgctgaccatgcccctctaatgaagtgtcacacatttcacattgcttgctagtttgctgagctgaaggaaaagattgattgctgttatggtaataagctggaagatagccctaaattcttgaagtctgatgatgttgccattgttgatatggctcctggaaagcccatgtgtgttgagaagttcttggacaattctcctctg

SEQ ID NO: 734858 - DNA, 636 bp, Homo sapiens
ggcatgtcacaggatcagtgtagcctcatcccatttacatttgacatctctagagccataacgtgatagggatgcttaagggatctctgaaatgtggaaagattctattatgacatctgtgctcttagccaaagtgtggggaagggaaagaaacaggtatttcttaggaacctactactgtgtagggccttgtggttttacatccgcctcccaccttcacatagctgacttcgggaaattctttataaggattgttttcttcaaagacaatgaaaacttgtaaatacaggtttttttctaaataggtaaygaatacatgttgcaaaacgtttaatcaatacaaaaaagtagagttaaaaataaatcttctccagcccctgatggtgaaccacaatttcctctctctaggacaataactaaaaatgatttcttgtgcatcttccaggaatattctatgcataagtacaatttacataattcattcaaaattcattcaatatacactgaacaccaacattagctcactacgcatctattccatgctttattttttttttttacttaatgatatctagcagaaagctccccatcttagggcagtttggtctgattcttttttcggtccatataatattc

SEQ ID NO: 734859 - DNA, 484 bp, Homo sapiens
taatctgaaataaagttgtttaattattttcttgttaaatatgcaaaggagtccactttagcaggggtatccaatattttggctttcctcggccacattggaagaagaactgtcttgggccacacataaaatatactaacactaatgatagctgatgagctaaaaaaaaaaaaaaagaaagaaaaagaaaaaagaaaatcacaaaaaatctcacaatgttttaagagagtttacagatttttgttgggctgcatttaragctgttctgggccacatgtggctcatgggccatgggttggacaagcttgttttcacatttctccaaataagagtcccccctaagtgaaggttacttatctgcaagttattagaagaacatgtaaaaagttatatatctacatttgaataatttgttaatatgcttgtttatacatttaaaagactacataaaactaattactaattatataggaaaaacactaag

SEQ ID NO: 734860 - DNA, 620 bp, Homo sapiens
ttccaattcgcgaatgaagaagtcaagactcagagctttgcattgcttgtcccaggctacctggctgataaaagtccgtttatctagttaaccccttcctttacttcaaatctgagcttatttctcacctttttaatgaagtcaccctgactattgcaatctgtccccctctggtatcctaatctctctcacccttcttttctttctctctgtagcactggctgtatactctacttatttttatgtaattgtttgtcatctgtctctaccacaagaatattgaacagcttcatgaaggcaggaatctttgtgtgatgcatcccagtcacataaacccaacaactggcacatagtaggtgatsaatacatgtttgctaaataaatccaggaccaaaatccagttgttttttctaatcaagttttggttcagcctttccaaatcccagggaaatattttcaattcatggaatgagaagcagcagatgaacaagagaattatgaatttgggttgcaaattttgtttggtcttgtgcatggctcccacataacatgcagcatctgatactccatgagagtccgccaaagacaagttgcagcaatcttcctcatgcatgtatgca

SEQ ID NO: 734861 - DNA, 589 bp, Homo sapiens
ttgccatttgatcaaacttggaatatcaccatattaatataataaatgagctcaaaagtaaagaacaaaagtatatatgtaggagtatacatacatatgtaaaaatgctcatatattgcacccatgcatatacacctatagacaacttatttattcaacaaatgtgttaggtgcttatgtagtggcattagggatatgatgacaaaacatacagtctctgcattcaacaatttatagtctagtgagagagacagtcattactaagaataaagagctattaatcatggtaacagaaatatatattttcttaccaactttgcttctgtcagtaggcataattgctagcccatgtcctwgtcttctttgtatttgtgtgtccttttgagaaaacagaattcagccatttgctgaacattggccacctccatgcaaaacactgggttattctctgtggaaatataaaccatctcctcagtgtgtttactgacaatattatcaaggcaacaagcaagcaagaaaaaataaaataagtgttaaataaaggtggaaatgtagagaaaagagtaagtagttaccaaactaaaagagc

SEQ ID NO: 734862 - DNA, 602 bp, Homo sapiens
aaataaaagtgacctggcatttaatgataactcagtgattaatatgcagtataataacatgtggtttactggattattataactctccttatacattgaaagccatatttcatttgtaaaagtgtataattgcaatcaactctttgaataaacttctctcttctatagtcctattttgaaagaaagttcaaaaatgtttggcccatctctgttcatagttccaataattatgaatctgtcctaataaagtgtttggaagatttaactgtttagtttaaataacatttaccattttttttaattacagttttaatataggtaatatgcagaaaacttggaaacgacatgaaagttcaaaggaaaaataatcctcaaatcactggamcttttctcacattatctcttggctccaacacaaaataattttaggatttcgtcccttggtaatcattttgtctggactctatttctcatattttttttctcagccatttcttggttattttgtgttgtgattgcttataatatgtttccttgttttatcctatccttataataagatcttaaggatgattttatatatatctctctccttattatgc

SEQ ID NO: 734863 - DNA, 639 bp, Homo sapiens
acaaatatttgagcaccaagaatactggtgtgggcatcaggggttatagtgcaaatgaaataaacatccctaatctcgtggggcttgcatttgaatgcattatttcctttagttctcatactaagcttgagagctagtactatcatatctccattttattcagtaaaataacttaggtgccaagagattaaataacataccccaagaatatagcaggttaagtcrtgagactaggactccacgccaggctccctacaatcagagaccttgtccttaccacaaggcctgatcacctgggagccagaactccacaactcccagcccccaccacagatggggtcaaaaaggtaggcttagtggtcccaacttgttcttgatttcctcaacttcttcccctttgtcttcttagtttatagattctcaagagatcctagatatcccccaagctgagggaagggtgaagatgggcaggaaggctgagaatcacgggttgtgtgtgaattgggggctttctttgtgaccacagcctccatggatctaattagaggttttctcatgcctccttgaaagagaaagggtaactgtcaaacgtgtgagtcattgtgaggcaggagaattgggaattagggtaaccaaggg

SEQ ID NO: 734864 - DNA, 639 bp, Homo sapiens
acaaatatttgagcaccaagaatactggtgtgggcatcaggggttatagtgcaaatgaaataaacatccctaatctcgtggggcttgcatttgaatgcattatttcctttagttctcatactaagcttgagagctagtactatcatatctccattttattcagtaaaataacttaggtgccaagagattaaataacataccccaagaatatagcaggttaagtcatgagactaggactccacgccaggctccctacaatcagagaccttgtccttaccacaaggcctgatcacctgggagccagaactccacaactcccagcccccaccacagatggggtcaaaaaggtaggcttagtggtcccaacttgttcttgatttcctcaacttcttcccctttgtcttcttagtttatagattctcaagagatcctagatatccccsaagctgagggaagggtgaagatgggcaggaaggctgagaatcacgggttgtgtgtgaattgggggctttctttgtgaccacagcctccatggatctaattagaggttttctcatgcctccttgaaagagaaagggtaactgtcaaacgtgtgagtcattgtgaggcaggagaattgggaattagggtaaccaaggg

SEQ ID NO: 734865 - DNA, 499 bp, Homo sapiens
tgttttacagagaggtgattggtccgttttgacagggtgctgattggtgcgtttacaatccctgagctaggcacagaagttctccacttccccactagattagcttgatacagagtgctgattggtgtatttacaaaccttgagctagacagagagtgctgattggtgcatttacaaaccttcagctagctacagagtgccrattggtgtattcacaatcccttagctagacataaagattctccaagtccccaccatactcaggaacccagctggcttcacccagtggataccacactggggctgcaggtggagctgcctgctagtcctgcaccatgtacccgcactcctcagcccttgggctgtcaatgggactgggcaccctggagcagggagcagcggccctaggggaggctcaggcgcgcaggagcccacggtgggggcgggggcgtgggcggggtcggggaggcttaggcatggcctgctgtaggtccggatc

SEQ ID NO: 734866 - DNA, 618 bp, Homo sapiens
ctgtggaaggggccgcgttggtttcacaggactcattagagggagaacttctgaactgctgccgatgatgtcaggatgaactgtggtggacctaactccatctcatgcctccttctcagcaatttccactctctgccaacctcaacacctaccaactgccaggcactgtcagttctgatcctgggcttgcatttattttgattcagttcaaagaatttatggacaggaatcttatctgagctgtcactttcacatcatgttaccatccagcaggaagctggacttaaggtagcacaaagcacaaaggacaggaaaagtggatccctggcagacacaggctttcctggtttctcactgatcagtgtgtccctggaggctaatcatccagaagaaatcttgttatcctaccagaaggatggtactccaggcctgcsccagccacttggctcacatttcaaagaggaaatgacccacaggctcccgttctggccagtgctctgtctgcatctactcattactcttttatagcatcgatcagtctttgctggggggtggaaaccagacccagctcttcaggctggcaagttcccaaggctcgtgctcagcaggcaaatgggc

SEQ ID NO: 734867 - DNA, 582 bp, Homo sapiens
gcgggttataggagaagaaaccagtttttcttatctttcttgtatatattaatttcataataaatagacaatagagtctttttcattcttcaaaagaaaataaattaccttgttgagagaaacgcatacttctggaagtttgcatattttgtcctgagaaattctctctctttcctgctctccttctctttcttcctctctccaaagaaagagaagagatgctacaaaggagcagaaatttggctataaaaaaaggcaatttaaaaaattactttcttagttgaaatttgcactgacagaagctaagaaaagcttttgaccgtaagctggcaaagccccgagaaagtttgtctctaagttaaaagaaaaagggaaagttttaaagaaatatttaatcraattccacagacaagatttcggttaaaattcattattattaagggataaagtatttctttctagaattaagaagaaatgctttaaaatataaaaataacttattatgtaattttcataaattaacctgtaaataaaatgcactagctttattttttttaaatagagtgttgatggggagagaga

SEQ ID NO: 734868 - DNA, 593 bp, Homo sapiens
gcccctggggaattcctataaatgtgactccccagttttctgaatggcagtgtctgggagtgaggttaggtttataccctgaacactcccttcaggtgataccaacacacatctctatgaccataccatgtggactcaaagaaaagcatttagaaaccagacaaagctatgggaaaccagcttttagaaatgagaaaatagggttttttctcataagcaccaattattttagactgttttccctccaaccattttatttgtttgtttgtttttgagatggagtctcactctgtcacccaggttggagtgcagtggtragatctcggctcactgcaaactccacctcccgggttcaagcgattctcctgcctcagcctcctgagtagctgggattacaggtgtccatcaccacgcctggctaacttttgtatttttagtaggacagggttttggcatgttggccaggctggtcttgaactcctgacttcaagtgatctgcccacctcggcctcccaaagtgctgggattacaggcatgagccaccactcccggcttcctccaaccattttaaatattttgaaatctcttcttga

SEQ ID NO: 734869 - DNA, 613 bp, Homo sapiens
atggtttctctgcgtattttcacatcctcctccctctgtgtgtgtctatctctttgtcccaatttcttcttttagtcagagcaaaaaatcatattggattagggcccacatgaatgacctcattttaacttgattttacctctaaaaagaccctattttctattttctttccttccttccctccctcctccctcccttctttcttttctttcctctttctttccttcttttctctctctctttctctctgtctctctccttccttccttccttccttccttccttccttccttccttccttccttccttccttccttccttccttccatttctctttctcagagwttcactcttgttgcccaggctggagtacaatggtgcgatctcagctcactgcaacctctgcctccagggtgcaagtgattctcctgcctcagcctcccaagtagctgggattacaggcacccaccaccatgctccactaatttttgtatttttagttgagacgtggtttcaccgtatttgctaggctgatcttaaactcctgacctcaggtgatccccctgcctcggcctcccaaagtgctgggattgcatgcatgagccactgcacc

SEQ ID NO: 734870 - DNA, 625 bp, Homo sapiens
atagaaactttccaaactgaaaaagcaaagataaaaatgaatgaaaaaattagaatggactatataagaactatggcacaattacataaggtataacataccattaacttataattatttttatttttgtaaggtcggtagtgatgcctctttttaaatcctgattttagtaattataatcttctccctttttcttggtatctaaaggcttgtcaattgtagtgctctttcaaataaccratatttagttttgttgatttttttctattctctatttcatctatttctgctctattctttagtattttctgacttctgcttgctttgggtttagttttctcttcctttccagttctttaatgtgaaagactaggttattgatttgagatctgccctcttttttaacatagacatgcatagctgtaaactcatctctaagcactgctgtagatgcaacccccgttttggaatgttgtgttttaattttcattcatttcaaagtatttccttatttctcacatgatttattttttgagccatcgattatttaagagtgtgtatttaacttccaaatattcttaaattttccaaatttactgatgttattggcttctaatttaattcc

SEQ ID NO: 734871 - DNA, 645 bp, Homo sapiens
gcattatgaactagtcaccactgtaggaaattgagctcaatcccactggtatcctctacagagccatatggaatgcaccttataattgtccactggaaagatgaaaagagaaatgtttgtccgcctacttcccttctccattgatgaggggttgtaccatggttgttaaatccctcccagtttgcaattatgccagtgtccagaatttccacacagtaatatcagagaagcgccagggcaaaacaagagatacaagacacagcttagacactgactgtcaggggctccaagctggttatcacagcaatgatgtaaaaagtgggccattagggtttgtaagatttaccaaacatacagtatactctgttaaatttgaatttcaggtaaayaataaatacgtataagaatgccctcatgcaatatttgagacatacttatactaaagtttttcattgtgcatctgaaattcgaatttgactaggcatctcgtattttatctggcaacccaagtgcaatgtacaggtgggtacaggacgaatgcaatacaaagccccagcccgtatctaccatctcctttaaggactttatctatctaccttgaggatctttaaatttcccatttcaccaagccttgagtatagaact

SEQ ID NO: 734872 - DNA, 593 bp, Homo sapiens
atggggaggacggaatagagaggaaccgcggcctgcagacagaactgatggaccttgctcaagaattgacatcaggatgagaatgagggaaagtcagggatgtcttctccacccagtgtccctcaagcaactcaaatacaatgtgttccacgttgaactcatcctgtaagctcaggctcttggcctctcttatgattttatctaatgctttacaaagtacaagttcaataacaacacaatttgaactcatcatcttccccactaagccatccctcttccttctcttaatccttctttagccccctcctcttattccccattcctcctcctcctcctgtttgctgtctcagagaatggcactgcatccacccagctgtccaagcccaacccccggcctcagtcctgactcttcatttacccctwccatccaataagccaccaggtgctaggaatcagtgacctcatggaccaccctcaccctcggcccttctctccatctccccagccctggttcattcagatcatgctcacttctaccctggatccttgcaattcctgctgcagggatgttccacccaatcccacaccatgta

SEQ ID NO: 734873 - DNA, 605 bp, Homo sapiens
aagcaggggagtcagaacctcctggctgcttcatgttttccttaaggccgtggacactcaggaaattgacagctactgttctcattaggagcagagctgaccgttgttcccacagacacagagtaagccaagttctccgatgtggtgtaatcactcagcctggtcaccgtggctgttgcttggatccgtaaacctccagcaggtcagcaggtgtcgcrgaggactcagaggtcagcccaaggcctttctccgatgcctgaccaggagcattccatgacggagtaggcacccatctacatggaatgatatccgggacccctaagagaaagccctacccccaaacactcttccttccacctaagtctcttcagctttatgccatatttttggagaaggcactggacatagggcactgggtatggcttcttgtctccactatggtgccacattgtgatctgacctttgcccggtcacttcctatctccacatatcggctttcacctgtgaaatgggggagtaatggcaacgtggggagggttcaatgctggtttttatgtgatatctaacatggtgccagcaacacagtaggatcccaagaggtgtca

SEQ ID NO: 734874 - DNA, 552 bp, Homo sapiens
aaacattggaattaagtgaaagtctgtattctgaatgagagacatcctgctaccccacaacagccccttctcagaatgtagtaaattaggcaggagtctaacagaattgtctttggggaaactgatatgtcaaagagaaaagacctacaggtgctgaaatttcatcatcctccagtgaaactactgsctccttctgcagttatcctgtaatgaggcccacaagtcaatatctaactaaatatgctttttagtgtttcacttcaaacataagtagacagtcaagagtcactagacaggaaatgaaaggcaaaaactaaaactaacagaagggaaattgcagaataagatataagacaaagatcaggagaaaactccaatgaaaccataattaatatcctcagatagaagaaagacaacattgtatctgtgaaacaagaacaggatactaacaaaatgggacaatcagagaacaaggaagactacttaaaaataaaaatatgatcaaaacaactaaataatcaagaaaagattgaaaatataaagttgaatcca

SEQ ID NO: 734875 - DNA, 571 bp, Homo sapiens
ctaatctttcatcctaagttaggggctcctggtttgtgctgtgattcttctatcaaagcattattatactttattgtaattgtgtatttattagcagtcattcccggtagtataagctctaagggggcaagggccatatctatcttgttcttggtcctcagaaggggtacatcaaacagagttgaacagataagaggcagaatctctggtctctgccgctcacactttaaaggctgtgcaatgatctgcaaactgttttatacctaacattcactgtctttaaaatgagtcacatttagaggctatgaggtataagattacaaaaacatgtgcaatggaatttctgtattctcagaatttttgctaasccccaaagataagactagtggttaatcacattctattccattcccactctaaagaatgcagaaaaagagcttcccatcacccccttccaagacttgccaaaaaatggcatacttgctctcccacctcactcattcctgccaccccacacatcctatgcaagcaaatgagagctcatttaacaagggaatttgttgggagtgga

SEQ ID NO: 734876 - DNA, 541 bp, Homo sapiens
ttgaaataccatcctgtggaattgagatcaattccacgggagtgtcaatgtgcccctgttgactgcttggagctggacccattttaaggaagcagagttccctagaggattttgatcatgttaagtttaaaattcgattaaacttctamatggagatgttaagtaggcaggtggctacaggaatctggagataggagagcactctgggttggagataaaatactggaggattttggcatataaatggtactggatagggttatcttgagtgagagtatggagaagacaaaagagaacatatgctacggagaaccaaattttttgattaacactctagtcaggtaatctttgaagtcttgggtcagcaaatcatagcccccaggtaaaatctggaccactgcctggtttttgtgcagttcctgagctaagaataagaataatttcatatttttatggtagggagaaaaatacaaataataatatttcatggcacatgaaaattataagaaattcaaattgattttttaaagttttattggaa

SEQ ID NO: 734877 - DNA, 603 bp, Homo sapiens
gaacttcatactttattatcaatcatatgtaacaaatagtattttattaaatattcaataacatgctattacttgtattgtagtcttctgcagcaaattgggactcaacagaaaaatatttttatctttttctttttcccaagaatgaactatactcagagaaaattccttcagtcctattaaaaagaaagtaataaatgcagagttagtaytgaaacagagatgaaataatttaagattttaaatgtcaaatttatttaagttaaagacttttttttttttccccccaacagggtctcactctgctgcccaggctggagtgcagtggcaggaacacagacctcctgggctcaagtgatccttctgcctcagcctcccaagtagctgggactacaggcatacaccactatgtcaggctaatttttgtatttttttgtatagatagggttgcgccatgttggcaggctgctctcgaactcctggcctcaagtgatccgcctgcctcggcctcccaaagtgctgggattacaggcatgagccactgcacccggccaaagatatttttcaatacataaaaactactgtttaattatcataattata

SEQ ID NO: 734878 - DNA, 635 bp, Homo sapiens
gaaagttcttggattaccatggcatcttctctaggtaggtgacctgggtcacctactcatgacttgggtcatcttatttgcagaataattaagaatgagaactttcattctatctatgaagtggtacatgactctaattaagggattattactttaaatgaattacctctctttccttcatcttgggcaactcattaggaaaaaacctaccttttgacatttagaaaagatttttttttttcctggatcttggagttccaatctgttgcttcagttgttcccagtatctaygttgctttccccctcatcttcagggcttttcttgtatgtcatctctatggagacttctttggctgccttgtccaaaaaggtaacctacattagatgccccacctccattctctgctttattttttgccttaacgcttatcatgatctaacttactacatgtcttattgattcatctttttttttaatctcatgtgccagaatgtaggatttatgagagcaggaatttttgtctgttttgttcatgctatatccccagtgcctagaacaatgcctaaaacagagcatcagtaaatattagttgaattagtgaattaactccacagagtgatcagataagtgttag

SEQ ID NO: 734879 - DNA, 635 bp, Homo sapiens
gaaagttcttggattaccatggcatcttctctaggtaggtgacctgggtcacctactcatgacttgggtcatcttatttgcagaataattaagaatgagaactttcattctatctatgaagtggtacatgactctaattaagggattattactttaaatgaattacctctctttccttcatcttgggcaactcattaggaaaaaacctaccttttgacatttagaaaagatttttttttttcctggatcttggagttccaatctgttgcttcagttgttcccagtatctacgttgctttccccctcatcttcagggcttttcttgtatgtcatctctatggagacttctttggctgccttgtccaaaaaggtaacctacattagatgccccacctccattctctgctttattttttgccttaaygcttatcatgatctaacttactacatgtcttattgattcatctttttttttaatctcatgtgccagaatgtaggatttatgagagcaggaatttttgtctgttttgttcatgctatatccccagtgcctagaacaatgcctaaaacagagcatcagtaaatattagttgaattagtgaattaactccacagagtgatcagataagtgttag

SEQ ID NO: 734880 - DNA, 471 bp, Homo sapiens
tgcaggctactctgcagaggcaggaacgtctgagcggactttcagaccaggacatatctaaaatgacagaacttaaagggaagagttgtcatttttacttagaagctttaaagctgcagcattatctcagcgtctaaggcacttagagttctttgtaggaatggcttcaaacattttattaacaatatttattggacacccatgaagttttagatgctaggggggattcaaatatgaattcaacataattcacgcccttgaagtgctcaaagctgggcttgggagcaggcagtgagctgtrtgagaatataactaaatgcaaaacaatgtggtaagtgctccaccagaagctggatctaggccctatgggagcagaaagtaagatgtatccaattgtgttcaagagggaagaggaaagactctgggaggtgaaacctgagctctaccttgccctggaagagtaacagtaat

SEQ ID NO: 734881 - DNA, 488 bp, Homo sapiens
gtataaaggtattccactttgaaaagtaacttaggaaaaaacaaaaaccccaaaaaagcccacttaaaatttcacacattttttaaaagggaaacggttttattccttacgctttatttgaattggaaccctgcatttaaattttagcatgttgaggttctttagaaaggaaagataagtttacatacaatcccagacagaatataaaaaagactcatcaaaagagaattctaattccagtcawgtgaccctctttctacaaattgttaattaaaagctcaagggtaaaataggacaaaaaacccatttattcattttcagataaaggtcagttcttccatggtataacattattttccctagggcagttatattcatacatagaatctactttagcaaaaatattatctgtttaactggaaatctatacagataattaaattcctgctatctcacacagctacctctagtcttatggaataaatgag

SEQ ID NO: 734882 - DNA, 518 bp, Homo sapiens
taaagaaagaaatctatacacattttctttctggagacatgattaccagaaacatataacactggggcagtagcactcatctacctatttttttaaaagaaatttttgcttacctggaacttgctaagaataaagttaacatgcttatttttctwtttggtacttggaacaatgttaatgtacctcaaaattttagtgtaaaatcaaatgtattttctatcaagctagacatttttatatattcaaggttttgttgttttctggcaactggccaaagcaacccatttataaaagaaattggtatttctctcctggcagagataagagctctgtcagtcatcctttgcggattgttctctcatgaattgggggcacagggagaaaaagagagaatacatgacagttaaaaacaaatttataactacatacacatctcaacgtagaaacaattagtcatcactagtaaaagacacgaccttcaaatgcaagtgaacttgaaaaacagtagttctcaaact

SEQ ID NO: 734883 - DNA, 637 bp, Homo sapiens
taaacactaggttacattggcttaaagaatctgtcagcctcttgcacttctaagtacttattgcaatcctgtctgaaaatataatactgaagaacaaacaactttggaggtgatctcctcattggacaccatgttgtggggmaaatgaccatttgaacgcctcaataccttcttttgtctgctctcagcagcagccagctgtgcggacatcctttcttgcattttcttgcagtgggccatgactgcttcaaggatggagagggggttggtacaaactggcttcttctctttgtcaccagcacctgcttcatagtctctctggagtgccaggaacgggtcatttagattaaatctcccataccgttcctggataaatacctccttcctgcgagcctggaacaaaattagagaaatgtattgaagaaagaaatgaaaatatacagaaagatatttataagaaggttttgtgattatacttccaaatggtattctcaactgctgtgagtaatggcttatgatgtcagtggtgagtgagaggcaaatgtgacccccagtctccactagcctggaatgccattccatctgctttcaaattttcttcaagaatattgaattttacattacaaatgatgcaaat

SEQ ID NO: 734884 - DNA, 549 bp, Homo sapiens
ctttaaacttaaaaggtaaggtttatgagctaaaagcactcggtgtttctagattctttaaattcaatcatgtaatcaatacactgaataagtatcacttgagagatgcaatttcaaaagcaatttcattttgcccttcacatttttcttaatatttattcagtgtagcagttcttctcccacccttggattaacacttggataattctatgttttttyctaatcgttttaatttaataaaagacctacagtcactttgagccaaaatagcctctatttgattattagaatgtccatcttcattcggtggtacggcagcttccttcatcagctagcatctgctgcaggctaacatttaccactcagcaaagaggtatatatgaaaacctctctccttttcccaaaaccttctcctcctctttctaagctgttttagtcacctctgggttggaaaggactggaggtagatgatacaggagaggtgaagggagcaggaatgtcgtaccggactggttcaggtggtcagctagctttaccaacccagtgtga

SEQ ID NO: 734885 - DNA, 471 bp, Homo sapiens
attaggtttaaaagaaagacaaaaatatgacaatgttctcaaaagttagttttctatatgctgtatttgtacttccattattactgaccatatactaacatgatctaatcagacttaaacagtttttcaagattctgcacagaatatattatttaagtataaatccaacaataaaaatggtttccagatatgctttcacaaaccactggttacctaagaataataaaaaaaaaccaaaaaccagcattaatatagatctaactgtaagaagactgmtaaggaattctgtactcagctctaacccgctcaacacagctgtcactatcttgggtgccaatgatacaaaaagccacagcggatggcaaaatgttgagtcaactctgacaagatggactttttcaggaagaaatgtgagtcagttcttgagtacaaacacagaagcaagcatgaaaaacacttaggggtgtcaat

SEQ ID NO: 734886 - DNA, 592 bp, Homo sapiens
aaaaaagatataccattaactttataagtctttcccttattaataaatgtttttcagctttcagggtaaatttagatatgaatgtataaatattgtttgtagccctaaaataacaaatgtacaaaagccattcacttactgaagttctaaatcatatcctttgttttctcaagcttctaaatcctgaattgataccattttctaagcaatcctatcataaaacttatcaacacttgtgacattaatcccataaaacttatcaaagtttgtgayattataataaactagctaattatagtaatagctcctataaagagatgacttagaacatctataagaaaatattctttcaataatttaaaagaaagttaaaatttctactgagcattattattattattattattattattattattattattattattattattttgagatggagtctcactctgctgtccaggctggagtgcagtggcacgatttcagctcactgcaacctccatctcccaggttcaagcaattctcctgcctcagcctcagtaactgggattgcaggagcatgccactgcacccagctaattttcat

SEQ ID NO: 734887 - DNA, 622 bp, Homo sapiens
actttataagtctttcccttattaataaatgtttttcagctttcagggtaaatttagatatgaatgtataaatattgtttgtagccctaaaataacaaatgtacaaaagccattcacttactgaagttctaaatcatatcctttgttttctcaagcttctaaatcctgaattgataccattttctaagcaatcctatcataaaacttatcaacacttgtgacattaatcccataaaacttatcaaagtttgtgatattataataaactagctaattatagtaatagctcctataaagagatgacttagaacatctataagaaaatattctttcaataatttaaaagaaagttaaaatttctactgagcattattattattattattattattattattattattattattattattattttgagatggagtctcaytctgctgtccaggctggagtgcagtggcacgatttcagctcactgcaacctccatctcccaggttcaagcaattctcctgcctcagcctcagtaactgggattgcaggagcatgccactgcacccagctaattttcataattttagcacagacagggtttcaccatgttgggcaggctggtctcaa

SEQ ID NO: 734888 - DNA, 605 bp, Homo sapiens
ttatagctccaagaaacacaagttgacttggctaaaaattaaattccccaggacattaagagcgaatggtgggggcagttgttctcctgtactcccactatgcccagccccaaactccctaaagaaccagccttggccactgaggagtaactygccaactgcatgaaccactgagcatctggaaaaaataaacagaaagatcttaacattctcaccatctaccagctgaagatgactcactccatatcaaaagcaatcaagggaaaaggaatgtcaacagtttgaaagcagtctttattcaaaccctgccagtaattttaccaccattaaataaatgttccccagtccttgagagaaggtatacctcctgctactcccagagcaaaccagaaaaccttggaggctgacagaaaaggatcatggggcagactagaaagcaaagagtcctttcagggtaacttcatcttattcccagaataaagaacatgtgtgccccccagatgggtggcatatgtgcaaactgtgggtagggcactcctggctaccgttaagtcagaggtacagggacctaggcaaaaggtgaagggaagagctggtcttgctta

SEQ ID NO: 734889 - DNA, 605 bp, Homo sapiens
ttatagctccaagaaacacaagttgacttggctaaaaattaaattccccaggacattaagagcgaatggtgggggcagttgttctcctgtactcccactatgcccagccccaaactccctaaagaaccagccttggccactgaggagtaactcgccaactgcatgaaccactgagcatctggaaaaaataaacagaaagatcttaacattctcaccatctaccagctgaagatgactcactccatatcaaaagcaatcaagggaaaaggaatgtcaacagtttgaaagcagtctttattcaaaccctgccagtaattttaccaccattaaataaatgttccccagtccttgagagaaggtatacctcctgctactcccagagcaaaccagaaaaccttggaggctgacagaaaaggatcatggggcagacyagaaagcaaagagtcctttcagggtaacttcatcttattcccagaataaagaacatgtgtgccccccagatgggtggcatatgtgcaaactgtgggtagggcactcctggctaccgttaagtcagaggtacagggacctaggcaaaaggtgaagggaagagctggtcttgctta

SEQ ID NO: 734890 - DNA, 492 bp, Homo sapiens
gagccaccacgcctggcctgcctaaccatatttgaatacttgttcagtctagaaaacatgtacataaaatgattaaataaggaacattagcaaatgttatgagatcaagctggcaaatggtttgaaggtcacacagccccatctgcttcctgagatgatctgctgcagattcagttcacagcagaccactctgctgtggtgmccatccctctcgaaatcccactgtcttgcccacgcctcaccaccccacctgatcacttccaccccagctactttgcccaagcatcctgcctctcacttatatcaatgaattttatgcaaaagcacccatttatactcagccattacagttttacagtgatattgtggaaaacatgaccacactacccaatatctccaatttgaagaggcagagatgaaaaactttatagagcccagtatcaggaaaagtttctcttccctgaggaagtaattgctacagcttttttctac

SEQ ID NO: 734891 - DNA, 588 bp, Homo sapiens
atgtgctgcgacctctctcagggctcccccagccattccttctttccttcctgccttttagctctaaccacattaagctaagacaaggccagagggtgcgattgaatgagtattgagactgaggagaatgatagagagtgaagcagaaacaggagcrcagacctctgctgtagctttaatgcatacaaacatgtccctccgcacaactaacctgccctgcctctccatctctcaccaaggctgcgtcaaagcacagaggctccccggactcggagggggccagagactgagctctggtcacctgttcattcctcggttagctggaactttgccccgtttccagtttcttatagtgcatgcttgggaaacaagatttaaggagcctctgttttggaagggctgtctgtgattgaacgtgaaatgtgtagtgccattgggaccacgaagggaattcttgcacatgctcgtgctggtgtgggcatgggactggctggaaacgtctgtatgcagggagccagggtgagggcagagtgtggtgacagccgaacttggagtaatgtccgtgtagaaaaaggaccatgttcttat

SEQ ID NO: 734892 - DNA, 588 bp, Homo sapiens
atgtgctgcgacctctctcagggctcccccagccattccttctttccttcctgccttttagctctaaccacattaagctaagacaaggccagagggtgcgattgaatgagtattgagactgaggagaatgatagagagtgaagcagaaacaggagcacagacctctgctgtagctttaatgcatacaaacatgtccctccgcacaactaacctgccctgcctctccatctckcaccaaggctgcgtcaaagcacagaggctccccggactcggagggggccagagactgagctctggtcacctgttcattcctcggttagctggaactttgccccgtttccagtttcttatagtgcatgcttgggaaacaagatttaaggagcctctgttttggaagggctgtctgtgattgaacgtgaaatgtgtagtgccattgggaccacgaagggaattcttgcacatgctcgtgctggtgtgggcatgggactggctggaaacgtctgtatgcagggagccagggtgagggcagagtgtggtgacagccgaacttggagtaatgtccgtgtagaaaaaggaccatgttcttat

SEQ ID NO: 734893 - DNA, 626 bp, Homo sapiens
ggcacaagcacagcccctttcacaggcacagggaccctgccagggtggccgagtgagggtgagttctcacaacggtggtcagtctcagccctggttctgagatgcccactactcccttgaggtagctctttctggagtccctgttatctggctttgtgcccgacctccaagcccctgagagggagaggcttcaactgattttcctgagaggttcagtagcccctccgcaaatttctggatacaaacaaatgcgtgggctagcaggattgtctgatcctatcagcagaagcttctgggccctgactcctgcccagctcagatgccatctcatctgttgacagtcatctagcytggacgggtgaagaaaagctcccgtcacctcccactctgcaccggctccacgagctctcttgctctttttcaggtagtgctgcctcagggcctttgcccttgctgtttcttctgcctggggccctgttcccagatatctgcacagctggcatcttctcatcctgtaggcctcagcttggatgtcaccttctcagagaggcccactctgcagccctgcccccagatattcactaggacacccccttttcctttcaaggcactggtgacggtcagag

SEQ ID NO: 734894 - DNA, 505 bp, Homo sapiens
gtgcgttttttcctactgtacttgcctgagcctccttttcagtcgatgattttcccccttcagctgatttttgtattttcatgcatgcatacagttgcttcctccctgtggctctgaagctgtgaagtgggggctggctktggtttatggtgttttggtttgtttttaatgtgtcaggtcaggaattcactgggccaagaccgtggagttaatggtagcttaaataaggggtacagtgctttttagaatagtgggctctaatcttggtgggctttaaaatctcctgagggagttttaaaaattctgttgcctagtccacatcccggaccaattacatcagaattttcatggtaggacctaggtgtcaggagttttgagctcccagctgatttcgattgtcaccaactggagagccactgtttagaatcagcaacattatattcaggggagatggagagaagagagactgaccatttaactggaataaacttctgattgaatcaga

SEQ ID NO: 734895 - DNA, 505 bp, Homo sapiens
gtgcgttttttcctactgtacttgcctgagcctccttttcagtcgatgattttcccccttcagctgatttttgtattttcatgcatgcatacagttgcttcctccctgtggctctgaagctgtgaagtgggggctggctttggtttatggtgttttggtttgtttttaatgtgtcaggtcaggaattcactgggccaagaccgtggagttaatggtagcttaaataaggggtacagtgctttttaraatagtgggctctaatcttggtgggctttaaaatctcctgagggagttttaaaaattctgttgcctagtccacatcccggaccaattacatcagaattttcatggtaggacctaggtgtcaggagttttgagctcccagctgatttcgattgtcaccaactggagagccactgtttagaatcagcaacattatattcaggggagatggagagaagagagactgaccatttaactggaataaacttctgattgaatcaga

SEQ ID NO: 734896 - DNA, 639 bp, Homo sapiens
tatatatatttttttttttttcctggctctctgcatgatggggatttggatccctagctctgcctacctgcgttgccctctgaggaagtcaaggctatggctgcctgccttgcaggtctgctctgatggtcagagatgaaaactctcacagccacagtgtaatccaatccagtcacagtggcttctattccccagggaacaaaaaaaaaaaaaaaaaaaaaaagagcagacactggcacacacgatcaccagggcttcacctgctgctgcgtgccaggcagcagcctgagcacctctcgcccaccgactcattcatcctctcagtaaacccatcatcctcattcacagaagatcagaggcaccaagagcttaagtgacctgcccaggatctcacggctgctacgttcaaagcaagtgtcagtgcccaggcactatgccacactgcctctcaccaataagggggtgtttcgtgattaagttcatggctacacttcattcrattttgtaggaaagcaaaccaagacagtttctagggtgacggaggtgtcatgagaacagcagccattatctaatcatcatttgttccccatcatcttagttaatacccaaagcatcacagttgagagccccagctgccca

SEQ ID NO: 734897 - DNA, 618 bp, Homo sapiens
tgcaagaggccctgagttggtggagtataagataaaaatttgggtaggatagagttaagagtcctagctacttgggaggctgaggcagaggatcacttgagctcaggagttcaaggctgcagtgagctatgatcatgccactgcactgcattccagcttaggcaacagagcaagaccctgtctgtgaacaaaataatcataggccagatacggtggctcacgcctgtaatcacaacactttgggagtttgaggcaggagtattgcttgagctcaggagttcaaaaccagcctgagcaacatggtgaaacccgtctctaccaaaaaaaaaaaaaaaaaaaaattagctgggtgtggtggtatacacccgtgctcccagctgctcgggaggctgaggtgggaggattgyttgagcctgggaggcagaggttgcagtgagcctagatcgtgcaactgcatttcagcctgggtgacagagtgagaccccatctcaaaataataataataataataaataaataaataatttcggtaggatagaagttacagtttgtgctctggtctaggacagttttgggcatcccactcctgcctcttcttggatggtctaggaaggtgtc

SEQ ID NO: 734898 - DNA, 646 bp, Homo sapiens
gctggatccttctggctgaaaggcactttgcttctgttctgtgctactcagacgattcctcagaggcggcagtgtggatgagggaatgtgactttcctccgatcttgcctaagtgcaacagataactgctctccatccagcatctcctcaccctgctgggatcatcagcagcagcaggagccactctggaagcttaatccgagcctgatctccagggtcatgggcagccctgttttcttaaagtgaaaggtgaggaaatgtaggaagaggactaacggatgcgtacttggtgccaggtgctgcgctgggtgcgtcatatgtaactgcatttaatcctcacgtgctctggaggggacatcaagattcctgtgttctagataaggaacacacagggargctgccctccacgtggggcaggaagtggagggttggggtttgctcacacatctctgcgattccagagcccacgctctgcttcttggaaaacagcactgaaggaaccacttccacagttctccggccactctggccaatttgataagtttccaggagataagcctgaggcttaagggggtcctggatttactcgccaagcttggcgagaacccagctgtccagaccctatggctttcagcagtgccttgtc

SEQ ID NO: 734899 - DNA, 551 bp, Homo sapiens
atccatccatccatccatgtgtctatctacctttggattggacacacaaagctgatgacgtgaaactgcttcagtgcctcatcggcaccgttctcccccaaaactttgtcaagatggctgctgttggctgtgtattttcacggytgggcctttatacctgttggtgccaccagctgagttcctttcttcctgcgtttgcctgaacagtgccaattgttctcctgtatctgttgcaatctgtgtcagaaagggcggggttggggggaagggttttctatgaaacaaaacaaaacaaaaaacaagttgcagggaaactgctcagttaggcctagcatcagggaaggctccctgggtgggaaagattatcctccacaggtgagttggtagacaccattcgctgtgttgaactcaatggggaggtaaaatttgatggccagcaagccgggtgtcacaggtagtgtgctctccccatagacacctgcgcatcagatgtcagaactcttctgtgctctttggaacttgctccttgcagtggtgaataactttttaag

SEQ ID NO: 734900 - DNA, 494 bp, Homo sapiens
ctttgagtgctgattcctctgagacccagggccctggaaacttccagaaaaacaacccctcatttacatgcaattacccaagtgaatgtgcatttgagtgggggatctcttaatgtgtagggggaaaagatgcataaatatggtttttgggggtaggatgtgtggggtcagggatacttctatggagaaagtgcttattctgacattgtgggaactagaccctggcaggtgaaatattakatgtgttacatggatatagcattaatatcactgaatcatacaatgagaaggttattccttcttcattgcttctgaccatctcaaaagtgctagaatgccttccttacctcttttaacacctgccaatctcccttttataatttttttttggagacagggtctctctttgttgcccaggctggagtgcagtggcacgatctcggctcactgcaacctccgcctgccaggttcaagcgattctcctgcctcagctt

SEQ ID NO: 734901 - DNA, 622 bp, Homo sapiens
cgaaagcagctgggctaccacttgagagaaacggctgcgagcaggacctgctcaacatttatctcctggagtagtggttcccaaccagggtgaatttgcaccccactggcatttgccaatatctggagacatttttggttgttgaaatggctgggggtggagaatgctactaacatctagtgggtagagaccagggatgctgtgctaaacagcccccaatgcacaggacagcccccacagctgagatatatctgggctcaaatgtcaagagtgccaagggttgagagtcccagctctggggcgttcatgctctgaatccctgaccgggtccctccggagcgctcctctcctctttctctctctccttgctcctgaatttggctgaacttgaaaatcttccaccatttgaccagaaaaggatttcaagctgccttccyctttcctgagctggggatctgcactgagccaagcatctccttggaaactccttggcttcatgcaatttggaaaacaataaatttgcaaggttgcacaaaacatccagaagcctaaagctggctggaactactaaatccatttttttccttccacatcaaaaataatttcttggccttagaggctt

SEQ ID NO: 734902 - DNA, 575 bp, Homo sapiens
accctgttccagatcaaaggctaggacatttctagttccaggagcccccctcataccacctctcagtctacaccccctccccaaaggaactatcattcttacttctatcaccagccgttagatttgcctggtcttgaaattcatattgatagaatcatgcagtatgttcttttcttgtgcttggctgcttctactcaatatagtattggtgaggttcatccattgtattggtrtgtgtgtgttagaagttgttttttaccgctggatagtggtctattgtggggctattccacaattgatccatcctcctgttgatagatgtttaagttgttatgaacattcttgaacattcttgcacaaatcttttggtggacatatggactctttctcatgggcgttcccaggaacggaatccctggctcatagagtgggtgtatcttcagcttcagtaggttctgtcaaacggcttttcagaggttgacaaatattgacttccaccagccgcatataagtggtccagtttctctgcatcctagtcaacacttagaattgtcatctctttcatttagattaca

SEQ ID NO: 734903 - DNA, 640 bp, Homo sapiens
tcggccttcatccctgacttccttccaccatggaagtcccaaccccactgtcagccctaatccactccagcactatagtatagcaggagtttccctactcatccgcttctaccctttaatagaaaataaactattagtgcaaaccttcacattatgcttaggggctatgaccaccttatttacagcaatctgtgctccaacacaaaatggcatcaaaaaaatcgtagcgttctccacctcaagccaactaggccttataatagtcacaattggcattaatcaaccatacctagcatttcttcacatctgcacccatgccttttttttaaagctgtattatttatatgttcaggatccatgatccataacctcaatgatgaacaagacatccaaaaaacaggagatctattcaagactttactcctcacttcctcctccctaattattggtagcctcacacttacaggtatgcytttcctcacaggcttttattctaaagatcttattatcaaaaccgcaaacacatcatataccaacggctgagccctctgtattactcttattgcaaactccctagcagctgtctatagtatccgaattaattttcttcgctctgataggacaaccccgctttacaaac

SEQ ID NO: 734904 - DNA, 559 bp, Homo sapiens
gcacaatctctagaacttttttatcttgcaaaacggagactctattgaacaacagcaacccttttgcccctctccacagtccccaggaactaccattctattttctatttatatgagcttgactactttagatacctcgtacgctacagtttggatrtttgtcttccaaatctcatgttgaaatttggtcctcaagactgggggtggagcctaatgggaggtgtttgggtcacaggggcagatccctcatgaacatcttggtgctatcctcatggtaatgagtttccactctgttagttcctgaaagagctgattgttaaaaagaggctggcatctctccccactctctcttgcttcctcccccacattgtaatcttgcacatgccaagcttcccttcaccttccaccatgattggaagcagcctgaggcctcaccagaagctgagcagatgccttgtgccatgcttcttgtacagccctgcagaatcatgagccaaataaaccttttttctttataaattactcagcctcaggtattactttatagcaacacaaacag

SEQ ID NO: 734905 - DNA, 525 bp, Homo sapiens
tgatgtgtcaggcactgcactaagcattttaccaccattattctcctctaagctccatatccctaaaaaaaagtattataatccccatttataagtaaggaaactgaggttcagagatgtgaaatagtctgggcttggtggctcgcgcctgtaatcccagcactttgggagactcaggcaggcagatcacttgaagtcaggaattcaaggccagcctggccaacatagtgaaatcccatctcttctaaaaatacaaaaattagccgggcgtggtggtgcatgcctgtaatcctagctactcaggaacctgaggcaggagaatcgcttgaamccgggaggcagaggttgcagcgagctgagattgtgccactgcactccagcctgggcaacagaatgagcagaacaagacaccgtctcaaaaaaaaaaaaaaaaaaaaaaaaaaaaaaagatgtgaaataacttgtccaaagtaaactcagccagtaatgggtggcaaagctggatttggggccatgcaacatgtc

SEQ ID NO: 734906 - DNA, 614 bp, Homo sapiens
cccacattcaggcaggctgtgtaatgcacgctcatatatcctttgtcagggtgaacaattatccgtcacggccaattgtgtttcaggttatctacatctgcttcctcctcctatatcatttcaatcaaattctgggtattatttcatgtatagacatctttgtatttatctctaaaaatacaaaaaaaaatacaatatccttatcacccccattaccagtaattgctttgtgtcatcacagtcagtgttcaaatttccaattgcctcatacctttgaatagtttttttgattcaggatccatgtgagacccatgcattgtaattggttaatatgtctctatgttgcttttcctttaaattttaaaaattagggtaaaatatacctaacataacttgtaccattttaaccatcgttaagtgtacagttgagtggcattaagtacgttcacacattttgaggccaycgccaccacccctctccagaacttttccatcttccccgactgaagctgtcccctttaaacagtcagtgcctgctccccactccccctagcccttggcgaccattctactttgttcctctatgaatccactactgtcttaggtttcttttc

SEQ ID NO: 734907 - DNA, 585 bp, Homo sapiens
agcattgtttagttccgatgtttctccctgtccttgtgcttgattctttgtaggcaggtttatgtgaggagctgcatcttggtccgagggctggtggtaggggttgaatctgtgcctgcccagatacttgtgtgacagcatcctctcaatgcagccatctcctcagcaggacccggcctgcccctgtaatgtgattcctgttcctatttaaggcagggctcctccaatggggacagtgtgggagacagctgaccacctcattcttctcatcaagacactcattccccattgacacttgcacgctcttggttgcgggaggaggaaatccagctcagattgacaggaarcagatgacattcattgacttgcctgatggaaaagaccaagggtacagcttgaattttaggggcttagtgtcatcagactcagcccccccccccatctttctgtcgatttgcgttgctctgtgttggctgtgttcacgcccaggctgtggtggcaggggtggtgggttgcagctccaggcctgcatcgtcttggaaatgtccatgctgcccccaggggaaaggcccctgtttcttctga

SEQ ID NO: 734908 - DNA, 617 bp, Homo sapiens
ttccattctccccattactttcaggtacaccaaccaaacataggtttggtctttccacatagtcccatattttttggaagctttgttcattccttttcattattttttctctaatcttgtcttctcgctttatttcattaagttgatcttcaatctctgatatcctttcttccgcttgatcgattcggctcttgataacktgtgtatgtgtcatgaagttctcgtactgtgtttttcagtttcgtcaggtcatttatgttcttctctaagctggttattctagttagcaattcatctaacctgttttcaaagttgttagcttccttgcatttggttagaacatagtcctttagctcagaggagcttgttattacccaccttctgaagcctacttctgtcagttcatcaaacattctccatccagttttgttcccttgctggcaaggacttgtgatcctttggaggagaagaggctaatggtttttggaagtttcagcgtttttgcactggtttctccccctgttcgtcgatttatctacctttagtcttttatgttggtgaccttcagatggggtctctgagtggacatcctttttgttaagatattgatgctattc

SEQ ID NO: 734909 - DNA, 577 bp, Homo sapiens
ttcagtaatgacagcatagatccataatggacacatttgaagcgactgaaataaaaacacaaatctcttctactttccaaaataataaatttcatttttctttgtcctatctgatggcaaataaatacaatataatcaaaggtacaggcctctgagtgaatttagtatttttattactaagcaaagtagtttcctatgtgaagattttattttatgtttaagtttaaaatcgtttcaaaggaagcaagcccatacttactccataattagtggctcatcttgaaaagtcctattgagtatggtcatattgttaggatctgcaaaaaagatatatatatatatgaattagcaggcattttatattacttttgatatctatgcttaggaaaaaatattcttctactcttttctagatttatctctgatttattcyaactattatcattaatgagatactataaatctagttcaaatgaacatcaagcttgcaaagacaaaatattgggagaatacattctacagtgaagactagcattacaataacctccttttgaggtatgcatctaaatatttgcta

SEQ ID NO: 734910 - DNA, 650 bp, Homo sapiens
acatgctaagttctcgacagtgttagtccattgactgaaggcatcctgaagtgggtgggttttaggctgggttctgcagggtggataggatttggggatgcagaggcataaggaggcatttgaggaagagacaccatcacaggcacgtgtgcttctcgagacaatcattcatgcacagagaagtttacttcaccaagagatagttaactgagatgaagctgagatacaagggctgccccatgggtacgctgagtgcatgaatagtctaggcttgagggtgatgggagtgtcctcccgaagaggacatcyttagcctttgctatgcccatgatgatgttctcagcatcaagagcctttcggggaggaggcactggaggctgggtagaaaggaagggacagccagggtatgtgcagtagggtggtggcttgggtcccagttgggagaattatgcaggagagagattgccttttgcaaagttgctgggagctggtgaactttggatagcatcctccttcagttgtaaccaacaggtaggtcaccaaacaagacatcttctgagtgctccctggctctgtgtcctgtaactggtatgttgcttcctctctgcccaggtgatggtgtggatccacggaggggggctgatggtggg

SEQ ID NO: 734911 - DNA, 646 bp, Homo sapiens
accaatagcccttgttgtaacattggggcacgttaggcctcagaaaacagaacctctctctctttgaccttctcctgccctccttccatctgctcccttatctctccaaggtaggatttttccctggcttttctttcttggagctggcagtaacaaaattctctgacccactttctaattgtgagtcataaaacccccatttcagaaggagtcctgccccaggccctgggggaaggaatgctgcacagggagaccgagaagaatctgaacagacaggccttgctgggctttcccactcagcttattagtattacatcatactccattcaatcatggtggccaaacatgcctatctaatgacatctccatagaaggcccaagaggacagggttcaggagcttcaggagaggcaaacacatggaggttcctgagtaggaaatgtctgaggggccatctcagcttcagaactcttctagggtcagctaargtttggcctggcgtatcctgtcccccgctctggccggtgcttccattccctaaatctcttcactgcatgcatccccctcccactaccttcatgccatccttcatgcagcactacagggcattctttctaggtaatggggctggctgtggcctgggggca

SEQ ID NO: 734912 - DNA, 475 bp, Homo sapiens
gctgccccaacctggacccccaagtcttcccagcctcctcatcaaaacctatctttcgtgcacctccttccttcagagtgatgccagggcaatgttcaactatctgctctgagaaatgttccaaagagaggacgtargtgtgggaagaccctgggaccacgtgtcggagccggttctgatctcttgctctgctactaccctgtgtaattttgggagtggaagtgaggcagggaggtacaaagtggggcaaagaagtggagggttcttctgccagctacctgggaggaagggcaaacctcatgacacacagcattgaggggagactggcagtggatgctgaagacctggaagatgcgcaggacaaaggcaaagggggcagagaagaaaaatagaagagaaacaaaatgggccttggggcagatcccagaactggtgggaggggtggatctaagggcttgaggtgggaggtgagcct

SEQ ID NO: 734913 - DNA, 628 bp, Homo sapiens
cttttgaatctcgatacaagatatatgggtgttcaatgtactatttattcaaatttctttatatttaaaatgtttcaagccagatttggtggtgtgtgcctattgacccagctactagagaggctgagaaaggaagatggcttaaggccaggagttcaagaccagcttcaacaacataaacaagacccagtctctaatttacaaaaaaaaagtttcataagaaaaaatggccagggacrgtggctcatgcctgtcatcttagcactgtaggaggcctaggtaagcagattgcttgagctcaggagtttgagatcagcctggacaacatggcaaaatcccatctctccaaaaagtaccaaaaattaggcaggcatggtggtgtgcacctgtagtcccagctacttgaggggctgaggtgggaggatcgcttgagcccaggaggttgaggctgcagtgagccgagatcacaccactgcactccagcctgggtaaaagtgagactctcaaaaaaaaaaaaaaggtaaaaaataaactggaacataataaaataaaaaggggtctagatctaagtggtacccagaataggatcctgaaacagaaacattagtggaaaaattggtgaaataca

SEQ ID NO: 734914 - DNA, 576 bp, Homo sapiens
tttttattttgagtagagacagggtttcaccacattggccaggctggtcttgaactcctgacctcaggtgatttgcctgcctcggcctcccaaagtgctgggattacaggcgtgagccaccgtgcccagccaatttttttgtatttttagtagagatggggtttcaycatgtcggctaggctggtctcgaactcctgaccccaagtgatccacccacctcagcctcccaaagtgctgggattacaggcattagccactgcgcccagccaaaataataagattataaaacatgaatatagcctggcatggtggcttgcacctatagtcccagctactggggaagcagaggtgggaggatcactggagtctgggaggtggaggttgcagtgagctgagctcgcaccactgcattccagcctgggtgacagactgagaccctgtctcaaaaaataaaaataaaaagcataaataaggccaggtttgatggctcttgtaatcccagcactttgggaggctgatgggggaggatcctttgagcctaggagttccagatcagcctgaggcaacatagtgaga

SEQ ID NO: 734915 - DNA, 576 bp, Homo sapiens
tttttattttgagtagagacagggtttcaccacattggccaggctggtcttgaactcctgacctcaggtgatttgcctgcctcggcctcccaaagtgctgggattacaggcgtgagccaccgtgcccagccaatttttttgtatttttagtagagatggggtttcatcatgtyggctaggctggtctcgaactcctgaccccaagtgatccacccacctcagcctcccaaagtgctgggattacaggcattagccactgcgcccagccaaaataataagattataaaacatgaatatagcctggcatggtggcttgcacctatagtcccagctactggggaagcagaggtgggaggatcactggagtctgggaggtggaggttgcagtgagctgagctcgcaccactgcattccagcctgggtgacagactgagaccctgtctcaaaaaataaaaataaaaagcataaataaggccaggtttgatggctcttgtaatcccagcactttgggaggctgatgggggaggatcctttgagcctaggagttccagatcagcctgaggcaacatagtgaga

SEQ ID NO: 734916 - DNA, 634 bp, Homo sapiens
tgggggacattatgttaagtggaataagtcaggcacagaaagacaaatgtcccatgttctcactcatttgtaggagctaaaatttaaaacaactgaactcatggagatagagtgcagagtgatggtcagcagatgctaggaagggtagcagggagggaggggaagtggggatggttagtgggtacaaaaatatagttcgacagaatcagtaagatctagtatttgatagcacaacagggtgactacagtcaacaatcatttattgtacattttaaaataactaaaagagtataattggattgtttgtagcacaaagaaagaataaatgcttcaggtgatagataccccattttccctgatgtgattattatatattgcatgcctgtatygaaagatctcatgtactccataaatatatacacctattatgtacccataaaaattaaaaattaaaaaaagaaaactgaatgaatgaaggaataaatgaaaaatcggcttgattggagctactccttctgggtctgtcctccaggcccagccccttggagtcttgacaaggcagagagagggggccattcttcttgcagaaagccctcaggagcatcctctgagctgataagcactgacatctggt

SEQ ID NO: 734917 - DNA, 587 bp, Homo sapiens
ccacacacttcctctcggcagaagtgttctgttggccaggcaaagtggctcatgcctgcaatcccaacagtttgggaggccaaggcgggaggattgcttaaagccaggagctggagaccagcctgggcaacatagcaacaccccatctctaaaagaaaaaaaaaaaattagctgttcatggtggtacagcagccgtagtcccagctactctaaggccagaagatcacttgagcgcaggaattcaaggctacagtgagctatgattgtgccactgcattctagccagggtaacagagtgagaaaaagaaaagaaaagaagaaagaaagagttgtaygtttcctgccaagagtcaagagcaaattttacctgcctggctacctttttaggggaaatcccatggaccaagttaccccacaggctgacttcatgaggacaaatcagtcttggtgactaagcacccctttcctgagaactctgtgatgcacaccaggagtgcctcaccctctgggacggtgtgaagatcggcaacctgatttcatcacattcatactggctgacgaaaccccgctcccatgccaggtccagc

SEQ ID NO: 734918 - DNA, 587 bp, Homo sapiens
ccacacacttcctctcggcagaagtgttctgttggccaggcaaagtggctcatgcctgcaatcccaacagtttgggaggccaaggcgggaggattgcttaaagccaggagctggagaccagcctgggcaacatagcaacaccccatctctaaaagaaaaaaaaaaaattagctgttcatggtggtacagcagccgtagtcccagctactctaaggccagaagatcacttgagcgcaggaattcaaggctacagtgagctatgattgtgccactgcattctagccagggtaacagagtgagaaaaagaaaagaaaagaagaaagaaagagttgtacgtttcctgccaagagtcaagagcaaattttacctgcctggctacctttttaggggaaatcccayggaccaagttaccccacaggctgacttcatgaggacaaatcagtcttggtgactaagcacccctttcctgagaactctgtgatgcacaccaggagtgcctcaccctctgggacggtgtgaagatcggcaacctgatttcatcacattcatactggctgacgaaaccccgctcccatgccaggtccagc

SEQ ID NO: 734919 - DNA, 632 bp, Homo sapiens
tggatccctggagttgctttattttatagttccctggtgagttttggcattgctaaagggcctggaagcctagtttgggtgaggaggggaaagttagactactctgcctgagaaaatatcaggcattttggagggaagggaaaacaaagatctcaaaggaaacagcatgagaagagagtgataatggggcctaagaaggcacagccagcamggtggggactggccaattcacttttgggacagtgagctctaacatgcgattggcagtgctctcttcttcctctgttactccaagccctcagcaaaatcctagccacttcctgggttagtggcacaggacaaaattaaggaatcagaaagatgactcctacaggtaattaatggggccaacagcaatcttcacagtggagataccctgcaggagaaaagatgggagccagaggcagccaggaggcctcaggccttagatatgagatggaggaggctgggcttccccaagaactagggctggggtctccaagccattctgtttgggtactaaaggcagagggaacagcacatgtaaaggccctgaagtggagactgccatggatgttttggaaacagcaaagaggcccctggctctggagcag

SEQ ID NO: 734920 - DNA, 560 bp, Homo sapiens
cacttcagcctcctgagtagctaggactaaaggcatgcaccaccatacccagctaattttttcttttcttttttttttttttttgttttttgttttttgtttttagagacagagttttaccatgggctggtcttgaattcctggactcacgcgaccctcctgcctyagcctcccaaagcactgggattagaggcataagccaccttgcccagccaaaatgtcttttatttctactgttctagaaacaaacttgctcagtttacaagccactttggggtcttggtgtgtgatagttaattttatgtgtcaactttattgggatacagggtgcccagattaaacattatttctgggtgtatctgtgacagcgttggtaaagcagatttctttagagctcgtatgtgagcctgaagaagacttctgtctcctatagccacagagctgagactgctgaaaatcaaatgcagaacctcattctgtgactgactgaattgtatccagcctcacagggcatctactgttaaagtgagcatattgattgggaaacaataggatcctgg

SEQ ID NO: 734921 - DNA, 578 bp, Homo sapiens
aattctttttttagctcatcagctgtcattactgttagtgtattttatgtgtggcccaagacaattcttcttcttctaatgtggcccagggaagtcaaaagattggacaccccgatctagaatataaagaactgttttagctgggcatgctagcgacatgcctgcagtcctagctactcaggaagatgagtcgtgagtactgtttgagcccaggagggcaaaatggcagtgaactatgatcacgccactgcactccaacctgggtgacaaagtgaggcctcatctttaaaataaaataggccaggcacagtggctcatgcctctaattccagcactttgggaagctgagatgggcggattgcttcagctcaggagtttgagaccagcctgggcaataaggtragactctgtctatactaaaatacaaaaaaaaaaaaaaaaaaaaattagccaggcatggtggcatgcgcctgtggtcccagctgtgggatgctgactgaggtgggaggatcacttgagcctggggtgggggcagaggttgcagtgagtcaagatggcatcactacactccagcctag

SEQ ID NO: 734922 - DNA, 602 bp, Homo sapiens
ttatcccctcccacctcccacctggggacatttggcaacgtctggaggtatttttggttttacaacttggaaattgcaactggtgtctagagggttgaggccaggaatgttccttcacatcctacggtgcccaggagacccctgcgcacacataaaatgaagaattatctggtccaaaatgtcagtagtgcagaggctgagaaatactagtctagggcctctgctggaagactcgcagagtrtgggctggaatcatccgaagtcttgttcactcacgtgtctggcagttggtgcaggggttgtcaggaagaacacccacagtgacctcttcatgtgacgcaggcttcctcataacaggatggctgggttcccagggcggaagtcgagagaaaaaagagcatgcacacatgcgtcagggctggaagtcatactgccttttgtgacctagcccgtcactttgtattctgttggttgaagaagtcacaaagtcccaccctgatttaaggaaaggagaagtagatttcacatctttatgggaagtggcaaagttcttgaagatcacacaggacttgaaatattgccatggccatttttagaaaata

SEQ ID NO: 734923 - DNA, 573 bp, Homo sapiens
actaagtagactttatttcaggaatataaggaagatttgacatataaagcctttagtttaatttatcacattgacagagaaaaagagaaaagtataataatcacctcaataggtagagaaaaagcatttagtaaaaattcaatacacattgctatggactgaattgtatccctctaaaattagtatttttgagccctaacacccaatatgatgattattggtcaggaagtctttgggaggtaaatatggttgattagatcatgagggtggggcctttatgatgggattagtgaccctccaaaaggaagaatgctctttctccctttctctctttccctgtgaggattcatcaagaaggcagccatataytagccaggaggagagacctcactagaaactgcatcagctggcacttgatctgggacttgtagctttcaaaactgtgagaaaataaatttctgttgtttaagctacccagtctacatttttttttgttatggcagcccaaggtgactaacacacccatcgataataaaaatttatataaaactaggaatatgagaacacatcctg

SEQ ID NO: 734924 - DNA, 555 bp, Homo sapiens
acctttatagtatcatacagaatatgatagatagtatgataggatcctaaagatcctctggactccacctattcatttctctatccctccaatcccttatcttagtctgttttgtgttgctataacagaatacctgaaattgggtaatttattaaaaaaaaaaggtttacttggctcatgattcttgagactgggaagtctaagaagcatagcactaaaatctgctctgtgtctggtgaaggcctcatgctacattataacatggcagagaaacagaatatgtggatatgacacaagggaccaaccatgagaggcaatttcactttgtaacagcctggttctgtggkaaccagtgaaagctaatccactcttgccaggaaaagaactcaccagaagaacagcaccaacctactcacaatggtggagcccccctgacctaagtgcttctcactggaccccatctcttaaaggttccacctcttaacattgccacactgggaattaaagttccaacatgagttttggtggggacaaaaacaatggcaccctgaacac

SEQ ID NO: 734925 - DNA, 504 bp, Homo sapiens
atgggtgtggggatccttatttgggctgagggcatgtctgcctggtcatggtccacagggctatttctcaggtctgggttgtgggctcttggaggtttggtaggcctgggggtgtgcccaccagaggtggcctgtgggactgtttcttaggcccttattgggggcacagggtatatctgtggggcttaatggtgctgtagagctgtttctcaggtcctgggcatggatgtataaccattccactggcctggggtcatgtaagctgctcagagacccagcrgcctcttctgcttgggggagggtgtgcagcagtttggctggctcagaggcaggttcgccctgggcaggactggcagtctgttcctctggctggaagtgtggtgttgggagttgctttccctgctgtgcaaaaccagagtcacagccggtcttgggccaaagttccatgcaactgaggttgtggtgttcagccatgtgagtgggtttggcataatgaagatggag

SEQ ID NO: 734926 - DNA, 529 bp, Homo sapiens
gatccttgatgttactattgtaatggttttagggctccataaactgcacccagatgagaggaagaactttgataagtgagtgtgttccgactgctccaccaatcagctattcccctgtctctcttctccttgggcctctctattccctgagacacaatattgaaattaggccaattaataacactacaatagcctctaagtgttctagtgaaaggagtaattttgcatctctcactttcaattaaaagctagagacgattgagctcagygaggaaggcatgttgaaagccgagatgggccaaaagctaggtctcttgtgccaaccgttaaccaagttgtgaatgcagaagaaaagttcttgaaggaaattaaaagtgctgctccagtgaatgcatgaaaaataagaaagtgaaacagccttattgctgatatgaagacagttttagtaatctgtatagaagataaaactagccacgacattcccttaagccaaagcctaatccagtgtaaggccctaactctcctcaat

SEQ ID NO: 734927 - DNA, 633 bp, Homo sapiens
ctttgttctattcaggacttcaacggagtggatgaagcccacccacatggctgtctgcttcactcagagtccactgatttaaatgttaatcttatcccaaacaccatcgcaggaatatccagaataatgcttcatcaaatatctgggtgctgtggtccaggcaagttgccacataaaattaaccatcacatccccattcctgggtctgtcttcactgctagactgtggggtcctctgggccagggactgtcttttatctttctttccagcactcagaaagaacatacagcaggtactcaatacattcattttgatttgaaaaaaaacaaacaaaataaacaaacaccccaaattgctttcaaaaaagtattccttttattcctactgcaattctctgcattcccctactctttaataagaggaaacagaggcttaaggaaatatacccaygatcacaaaccagataagtggcagagttctaggctgtgtgctttttgcactatatagcacaatgtcctttgatttgataaaaatgtcagaggaggtggtccggggtctggggtattctgaatcaatgtcttacagaaactgttattcaaaatctagcccaactgtgctcagcaacaatgagaa

SEQ ID NO: 734928 - DNA, 620 bp, Homo sapiens
gttgaagaaaagaaacctaagacagtagtggattcatagaggaacaaagtagaatggtcgccaagggctagggggagtggggagcaggcactgactgtttaaaggggacagcttcagtcggggaagatggaaaagttctggagaggggtggtggcgrtggcctcaaaatgtgtgaacgtacttaatgccactcaactgtacacttaacgatggttaaaatggtacaagttatgttaggtatattttaccctaatttttaaaatttaaaggaaaagcaacatagagacgtattaaccaattacaatgcatgggtctcacatggatcctgaatcaaaaaaactattcaaaggtatgaggcaattggaaatttgaacactgactgtgatgacacaaagcaattactggtaatgggggtgataaggatattgtatttttttttgtatttttagagataaatacaaagatgtctatacatgaaataatacccagaatttgactgaaatgatataggaggaggaagcagatgtagataacctgaaacacaattggccgtgacggataattgttcaccctgacaaaggatatatgagcgtgcattacacagcctgcctgaatgtggg

SEQ ID NO: 734929 - DNA, 603 bp, Homo sapiens
ccatggtggtacctttagtcccagctcttggagaggctgagactggaggattgctttagcctaagaggttgaggcaaaaaagagagagaaagagaggtcagaattaccacccacctacccacattgaagccgtatcctactttggggtaatattctaaaattgcagtaatgggccaggcacggtggctcatgcctataatcctagcactctgggaggccaaggtgggaggaytgcttgagctcaggagtttgagaccagcctgagcaacacagtgagactttgtctctacaaaaaatacaaaaaacaaaacaaaacaaaaaacccacaaaaattagccaggtgtggtggcatatgcctgtagtcccagctatttgggaggctgaggccagaggctcacttgagcccaggagatcgaggctgcagtgagctatcatcatgccgctgcactccagcctgggtgacagagggaaaccttgtctcaaaaataaaataaaatcgcagtgatggatacacaagtccgcagatacactaaaaaccactgctgtgtacggtttacatgggtgaattctatgtgaattataactaaataaatctgttaaaaa

SEQ ID NO: 734930 - DNA, 513 bp, Homo sapiens
gtcagtggtaatatctcctttgtagtttttaattatgtctatttggatcctgtctcttttcttctttattagtctagctagcagtctatttgttttattaattctttcaaaaaaccaggccagctgtggtggctcacacctgtaatcccagcaatttgggaggccgagacaggcagatgccttgagcctaggagttcaagaccagcctggacaacatagtgagatcctgtctctattaagaaaaaaaaatttttttttaaaaacccacaactcctggattccttgatcttgyaaatggttttttgtgtgtgtctcaatctccttcagttcagctctgattttggttatttcttgttttctgctagttttggggttggtttgctcttggttctctagttcttttagttgtgatgttaggttggtaagttgagatttctctaactttttgatgtgagtgttcagtgatataaatttccctctgaacactgccttagctgtgtcccagagattctg

SEQ ID NO: 734931 - DNA, 513 bp, Homo sapiens
gtcagtggtaatatctcctttgtagtttttaattatgtctatttggatcctgtctcttttcttctttattagtctagctagcagtctatttgttttattaattctttcaaaaaaccaggccagctgtggtggctcacacctgtaatcccagcaatttgggaggccgagacaggcagatgccttgagcctaggagttcaagaccagcctggacaacatagtgagatcctgtctctattaagaaaaaaaaatttttttttaaaaacccacaactcctggattccttgatcttgcaaatggttttttgtrtgtgtctcaatctccttcagttcagctctgattttggttatttcttgttttctgctagttttggggttggtttgctcttggttctctagttcttttagttgtgatgttaggttggtaagttgagatttctctaactttttgatgtgagtgttcagtgatataaatttccctctgaacactgccttagctgtgtcccagagattctg

SEQ ID NO: 734932 - DNA, 623 bp, Homo sapiens
cctagttcttatttgattcttctcaattctctccaaaatgtcttcttatagttagcaaatattttggggttccaactatgagcaaggctctctagcaggcgcctgtaggagcggcaaacaagagacagagtccctgtgctcgtggggtgcccctggcagtcggcaaggaagatcacacacaagaacgtaaataaacactgtcatttcagagaccattaggatcaggaagaaaactaaagcaaggtggagggtggagagatgtgaggagtcattccaagcagatyggtccaagaggcctctctgggagatgatgttgggcccagaactaattgatgagaaggagcgaggcatgaggcacaggcagggaaggtgctccaggcagaacgagcacaagggcactgctcaggcataggcttagtgagcacttggaaaacgtggctggaggggctgtgaacgtgggtggggaaggggtaggagggagagggccagatcactgaggactctataagctgctgcaaggagctgaatgagatgggaatcacaagattcacaacagagaagcagtgtgattggacagaggcagggtgagtctgtcaagagtcctgtatggggcagatgacatt

SEQ ID NO: 734933 - DNA, 619 bp, Homo sapiens
gccagaaagtgaggaagttaaaaaaaaaaaaaactacattgaaaggggtatgttaagtggacacagcagcgaactgaaagaattcctaatgccccaaactgcaagaatttgagcaaygaaataaaaaagtaatgccttataatctaatgtataaaataagtatccatgaatctatactgatataaataaatgattgaataaagagaagagacaaatctttcttgcaagagaattcaaaataatttatgtgcttggctctcaacaagaggaagaataattcttcactccttaaatatatgctggacatagtgactccctgccaaagaatacagtatagaaaggagggaaggaggtggagattaactttacagtggagaaacctgaaaaactacctagccaggtgacgaaggtcagtatcaacagtgataagtcacactgatagcatgcaccattaatagatgtgttgaaaaagcactttacttctgcggtcttcctcccaaaagttcataactcgtctataatcatgagaaaatattagataaattctcatagaggggtatcctacaaacatttgacagtactccttggaactgccaaggtcatccaaaggaaacttctg

SEQ ID NO: 734934 - DNA, 560 bp, Homo sapiens
acattgcatagacttcaagctagcatgagaccctagaggctgtgtggtgtcactcctcggggaacagacttgtttctgctctcagcctggatcccaacttttcatgacagagacagggacatatttaggcaatcaaggraaacagctgcaaacttcacagcctcaaagagcaccactgtcactcactttgatgcaggaggttattgaggcctacatgctggtgaacctgccaagtaagtccccacttgggaggcatcgagagcccagagcaggaggaagaaaatgcaccagacacccagatgccatgtgaggatgagctgtgagttcgcacccacagctcaattagtattgctaacatgccctctccctcagcaccttcagaataagtaaataatccatctacctgaaatgaactccaaaaagagagaaaaagagagagcatttggaacatttgctgagacctaaattgaccaactttgatcaagatgagttagtaaaatagcaggctcctcatcagctgcattttaatgccatatttggagccactcagtcattataaa

SEQ ID NO: 734935 - DNA, 595 bp, Homo sapiens
aacatggtgaaactatctctacaaaaatacaaaaattagccaggcgtggcagtgcacacctgtagtcccagctactcaggagactgaggtgggaggatcgcttgagtccaggaagtcgaggctgcagtgagtccagatcacgccactgcactccagcctaggtgatagagcgaaaccctgtctaataaaagaaaaataaaattaaaaggctacatggatatctgggggaagaatagactcaatatcccccactcccattccaacactcaagaagaaaagaaaattcttgcaattatttttttactcaagtgattttgtgaggcttgacccaataatggaatggcttygccaaggctagagaactcactcagccggttttcccattacagacctcttgggtgatagcaattctgttaaagtggaaactgatggcatcatttgccatttttactgtccccatacatagtccttaccatggcatgcagacccctacgctatccagctcctgcctcccatttcataccactcctccttctcctgccaagttctagcccctggactttctgttgctcacatttccagttcgttcctgcct

SEQ ID NO: 734936 - DNA, 423 bp, Homo sapiens
accaaataccaaagttttcatcagaatgcctcgctccacgtgcactgatgaacaacacctgctcctgggtcacggggccggcagcctggatgtgttttacacagagggtggggtggagacacaggtgcgggaaactgtcccccaccgggtccagccgtttgggtggatgctggccggcccagctctggatgtgtgggactgggctgttcccaggyggctgcctctcctggttctcctctgggaagtcaacggctgactgataaggttttgcccagctccctgaagcctggtcttggttaactgggagcgtgtcgtagggagtggggttagggaagagatggggacatctggtttttgtcctgcccactgtttgggacaggatggttcagtcagaccacatttgcaaagcgagagccgtctgtg

SEQ ID NO: 734937 - DNA, 616 bp, Homo sapiens
tgcaagtatctgtttctttatctggggtcctaccctctttcaacacagtgcttggaattcaataggtgataaatatattttttgttaaattgaagctgcctgggagtggtggttcatgcctataatcccagcactttggraggctgaggtaggaggattacttcagcccaagattttgagaccagcctaggcaacatgggagaccccatccctactaagaatacaaaaaaatacaaaaagccagatgtggtggcacacgcctgcagtctcagctactcaggagggctgaggtgggaggatcacttgagtccagatcaaggctgtaatgagccaagatcgtgccattgcacttcagcagcctgggccacagagcgagactctgtctaaaagagaaaaaaagaaaaagaaggctattgccacaccagccaccaaagcccctctgagggaatcctggcatgctttggtctttggtttggaaaagttaccagtttcagacttagcttttcttgcttgtgatcaagtcctggtcctgtggtggcagaagtttctgtagttttctcttcagtgaaaaaccatttctagatctgcattaagaggactaaactgaatgcgtggg

SEQ ID NO: 734938 - DNA, 616 bp, Homo sapiens
tgcaagtatctgtttctttatctggggtcctaccctctttcaacacagtgcttggaattcaataggtgataaatatattttttgttaaattgaagctgcctgggagtggtggttcatgcctataatcccagcactttggaaggctgaggtaggaggattacttsagcccaagattttgagaccagcctaggcaacatgggagaccccatccctactaagaatacaaaaaaatacaaaaagccagatgtggtggcacacgcctgcagtctcagctactcaggagggctgaggtgggaggatcacttgagtccagatcaaggctgtaatgagccaagatcgtgccattgcacttcagcagcctgggccacagagcgagactctgtctaaaagagaaaaaaagaaaaagaaggctattgccacaccagccaccaaagcccctctgagggaatcctggcatgctttggtctttggtttggaaaagttaccagtttcagacttagcttttcttgcttgtgatcaagtcctggtcctgtggtggcagaagtttctgtagttttctcttcagtgaaaaaccatttctagatctgcattaagaggactaaactgaatgcgtggg

SEQ ID NO: 734939 - DNA, 616 bp, Homo sapiens
tgcaagtatctgtttctttatctggggtcctaccctctttcaacacagtgcttggaattcaataggtgataaatatattttttgttaaattgaagctgcctgggagtggtggttcatgcctataatcccagcactttggaaggctgaggtaggaggattacttcagcccaagattttgagaccagcctaggcaacatgggagaccccatccctactaagaatacaaaaaaatacaaaaagccagatgtggtggcrcacgcctgcagtctcagctactcaggagggctgaggtgggaggatcacttgagtccagatcaaggctgtaatgagccaagatcgtgccattgcacttcagcagcctgggccacagagcgagactctgtctaaaagagaaaaaaagaaaaagaaggctattgccacaccagccaccaaagcccctctgagggaatcctggcatgctttggtctttggtttggaaaagttaccagtttcagacttagcttttcttgcttgtgatcaagtcctggtcctgtggtggcagaagtttctgtagttttctcttcagtgaaaaaccatttctagatctgcattaagaggactaaactgaatgcgtggg

SEQ ID NO: 734940 - DNA, 616 bp, Homo sapiens
tgcaagtatctgtttctttatctggggtcctaccctctttcaacacagtgcttggaattcaataggtgataaatatattttttgttaaattgaagctgcctgggagtggtggttcatgcctataatcccagcactttggaaggctgaggtaggaggattacttcagcccaagattttgagaccagcctaggcaacatgggagaccccatccctactaagaatacaaaaaaatacaaaaagccagatgtggtggcacacgcctgcagtctcagctactcaggagggctgmggtgggaggatcacttgagtccagatcaaggctgtaatgagccaagatcgtgccattgcacttcagcagcctgggccacagagcgagactctgtctaaaagagaaaaaaagaaaaagaaggctattgccacaccagccaccaaagcccctctgagggaatcctggcatgctttggtctttggtttggaaaagttaccagtttcagacttagcttttcttgcttgtgatcaagtcctggtcctgtggtggcagaagtttctgtagttttctcttcagtgaaaaaccatttctagatctgcattaagaggactaaactgaatgcgtggg

SEQ ID NO: 734941 - DNA, 521 bp, Homo sapiens
gccaggaggctgggtccagatggcggcagcagggtctatttctggctattcgtaaccccaggccagggttttagatgggttttaaaacatttagatgaatgagttgtgtgctcctggtcagcggcacttgctgtatcgtgtgcccttcacaaataaacctagctagcagatgtagcgtgggccctgcccgtgggggcccattgacattttgctaattactcaaagaggaggcctggagcctgaacgatggacgtctgatggctcatctcatccagrgattgcctcgtgcctgttacgagtctgtccccagctgccatcctgccagctctgccttctttttggagaagattagatgattctcatgtaccgagcatgcccagtacagggcagggcctgggtgagtgctcaggttggtgcagtttgtacctgaatgatgactgtggagggctttgtcgtgagcctggccactgggaggggaggatgcaaagataagttctgtcctccacagtcaaagatctcag

SEQ ID NO: 734942 - DNA, 549 bp, Homo sapiens
agcagatgggcttcatccaggcctcaactgtcagcctggacgaccccagatcacacgggcgtgggccgtggtcagccgggagcgtccacgtggtcagccagcctgatgtgttcggtgactcagccaaagcttaaaacacggaagccgggkagcgctgggcggctgcgtgtcagagaatgagtgtttcccgatggaacggcgggatagaaatggccgcagactctccctgcttccaaccaatttcgctttgcggtgctcacctgtaagcgactgtccaaaagtccacagatgcgcagggctctgggtgagacctctgccagggtggcgtctgctgcagtcctttgctgttaatatagttgtgtgcctcacaccactgcttctagtgtcttccgtgtggattggtaggcaccattagtatcgtaatcattcttttaaaaccaaacaatacttgtgtgcaccctcagttggctgctgctgtaaatgttctccgtaacccaacctgctggtcgagaaggatcctcgttcggccacttctgaattgcaagctac

SEQ ID NO: 734943 - DNA, 549 bp, Homo sapiens
agcagatgggcttcatccaggcctcaactgtcagcctggacgaccccagatcacacgggcgtgggccgtggtcagccgggagcgtccacgtggtcagccagcctgatgtgttcggtgactcagccaaagcttaaaacacggaagccgggtagcgctgggcggctgcgtgtcagagaatgagtgtttcccgatggaacggcgggayagaaatggccgcagactctccctgcttccaaccaatttcgctttgcggtgctcacctgtaagcgactgtccaaaagtccacagatgcgcagggctctgggtgagacctctgccagggtggcgtctgctgcagtcctttgctgttaatatagttgtgtgcctcacaccactgcttctagtgtcttccgtgtggattggtaggcaccattagtatcgtaatcattcttttaaaaccaaacaatacttgtgtgcaccctcagttggctgctgctgtaaatgttctccgtaacccaacctgctggtcgagaaggatcctcgttcggccacttctgaattgcaagctac

SEQ ID NO: 734944 - DNA, 575 bp, Homo sapiens
tcagacattggacaacagatagctcaagactgtgatccctgtgagaaaggacacaagtgtcccatggaggtgccagctcactgccatgaggggagaggagatcaaggtgaccatcttgctgagtagaggagatagaaacgagttcagggaggacaaatagcaagaaccagagggcagagtactggagaggaaagcactgcccaaagagagcgccagaggtctgcagagagggcccctggggttttggctaagcgttgatctgtgtgtgcgtgtgaagaaacagctgaaggctggggaaacacccacctgaaaggagcaggcagaacaatacttggagctcacacagggtgggggacagggtgggggacagtttrtgttcccaccagccagaatgggaagactttataatatgagaatcctcagaagggtgttgcctgagaaatggtggtaaattagccatagcctaaggctgttttggacccaccctgacaacatttaaaagcaagtctcagaaagatcgaactgattccaaataacttcattgcacataaagtccaacgctattcaaaggagta

SEQ ID NO: 734945 - DNA, 592 bp, Homo sapiens
taatggcgtccacacttggcctttcccctctttccttataaatcagccaacattgggaggccatgggcttcgccagaagcctctggagacagagctgctcctttccagcaggccaggctgaccggggaggctgcagccccatcgtgtgctgggggaaggtgagccaggctcccatcacgtgccgggagctgatcttggcaggtcgcgtcctcccgaagcctgcacttcagccccagggttttccgaccgcctctgctcccagaggggaccmgcaggggcgaagaggccgaagacagcaccgagacctcagtgtcgggcgcgggtgctcccaaagcgcagcgggcccacctcccccggcagaggatcgtgcggcagtcaaagtcgcacacggggcttctgagatgtgcggcccgggcctaagagctgcatgtgttgaagccgctccgggttggaaaatgtatgtaaagtaaaataaacacggctctcgctgggagggctccggcatccagggttctggcggagcggggggatgcggtcagccaaagcatttgaggaagcggctgtgactcacggggcctgagctgcagaggag

SEQ ID NO: 734946 - DNA, 592 bp, Homo sapiens
taatggcgtccacacttggcctttcccctctttccttataaatcagccaacattgggaggccatgggcttcgccagaagcctctggagacagagctgctcctttccagcaggccaggctgaccggggaggctgcagccccatcgtgtgctgggggaaggtgagccaggctcccatcacgtgccgggagctgatcttggcaggtcgcgtcctcccgaagcctgcacttcagccccagggttttccgaccgcctctgctcccagaggggaccakcaggggcgaagaggccgaagacagcaccgagacctcagtgtcgggcgcgggtgctcccaaagcgcagcgggcccacctcccccggcagaggatcgtgcggcagtcaaagtcgcacacggggcttctgagatgtgcggcccgggcctaagagctgcatgtgttgaagccgctccgggttggaaaatgtatgtaaagtaaaataaacacggctctcgctgggagggctccggcatccagggttctggcggagcggggggatgcggtcagccaaagcatttgaggaagcggctgtgactcacggggcctgagctgcagaggag

SEQ ID NO: 734947 - DNA, 639 bp, Homo sapiens
caggcaccactgccagggattctgagacaggaggtctgggatgccccagaacttgcgtatcaaacaaactctcagggatggccagtgccacgggtctccaggctgggaacatggatcccagtccaggctagctgccyctgtagccctcgggagcccattagaaatgcagaccctccccctgcccagatccactgcacgagaatctacatgtctatgagattccgggggcacctgtctgtggagtttgaggagcacagccttagatgctagtccccggtgtgggcaccatgcaccactccttctgcatttgtgtcactacctgcttctgcacgtaggaggcacctcaaatgccatttagaatggatgctcagtaagccaaatgtggcctcctttttcccttttggaaaggaaggtccttctttctcaaaccttgtgtctagaatgttccccaatgaggggaggatgtctcactaaaaacactgaaaggacattgcttatacactggccttctgtagagagcctctggagcctcgaggaagtgtagctcctaacgcagtcggctgcactgactcaattatacatctattggaccttcccaagtgcagagctgccactgtcacttctgatcgtaacaaccca

SEQ ID NO: 734948 - DNA, 639 bp, Homo sapiens
caggcaccactgccagggattctgagacaggaggtctgggatgccccagaacttgcgtatcaaacaaactctcagggatggccagtgccacgggtctccaggctgggaacatggatcccagtccaggctagctgcctctgtagccctcgggagcccattagaaatgcagaccctccccctgcccagatccactgcacgagaatctacatgtctrtgagattccgggggcacctgtctgtggagtttgaggagcacagccttagatgctagtccccggtgtgggcaccatgcaccactccttctgcatttgtgtcactacctgcttctgcacgtaggaggcacctcaaatgccatttagaatggatgctcagtaagccaaatgtggcctcctttttcccttttggaaaggaaggtccttctttctcaaaccttgtgtctagaatgttccccaatgaggggaggatgtctcactaaaaacactgaaaggacattgcttatacactggccttctgtagagagcctctggagcctcgaggaagtgtagctcctaacgcagtcggctgcactgactcaattatacatctattggaccttcccaagtgcagagctgccactgtcacttctgatcgtaacaaccca

SEQ ID NO: 734949 - DNA, 614 bp, Homo sapiens
agacaggaggtctgggatgccccagaacttgcgtatcaaacaaactctcagggatggccagtgccacgggtctccaggctgggaacatggatcccagtccaggctagctgcctctgtagccctcgggagcccattagaaatgcagaccctccccctgcccagatccactgcacgagaatctacatgtctaygagattccgggggcacctgtctgtggagtttgaggagcacagccttagatgctagtccccggtgtgggcaccatgcaccactccttctgcatttgtgtcactacctgcttctgcacgtaggaggcacctcaaatgccatttagaatggatgctcagtaagccaaatgtggcctcctttttcccttttggaaaggaaggtccttctttctcaaaccttgtgtctagaatgttccccaatgaggggaggatgtctcactaaaaacactgaaaggacattgcttatacactggccttctgtagagagcctctggagcctcgaggaagtgtagctcctaacgcagtcggctgcactgactcaattatacatctattggaccttcccaagtgcagagctgccactgtcacttctgatcgtaacaaccc

SEQ ID NO: 734950 - DNA, 542 bp, Homo sapiens
atagagctgctagggtgccccaggccttgtctctgtttttctgggcatcctgggaactgggcagagtgggatcgtgacacctgtggaccaggagagattctgggaagcccctgccgttctgtttcccacttctttcaggccacttggccagcaccgctaggccctcctcgtccctcttcgtggaaaaccatgcagagggaggcaggtagagaagagaaaagatgtctgacttcaagcttctaaaggattttctccgacaggaggaagagatacttttcaaaatggttgtgagccgccttggccagaacgcaggaggaccckgttaagaggaaatcaggcacaaggcgcccacacagccagggtgggagggcattccaggatggtcacagctgtctccgctgtggtctcaaatgactttgcttggccttctggaatctaaagggtcctggagtggggtgttcactggatttgctgccgagaagtctgcagcttttcactgtcactcttgagacctggatccttcagacgtggaaaagggagtg

SEQ ID NO: 734951 - DNA, 542 bp, Homo sapiens
atagagctgctagggtgccccaggccttgtctctgtttttctgggcatcctgggaactgggcagagtgggatcgtgacacctgtggaccaggagagattctgggaagcccctgccgttctgtttcccacttctttcaggccacttggccagcaccgctaggccctcctcgtccctcttcgtggaaaaccatgcagagggaggcaggtagagaagagaaaagatgtctgacttcaagcttctaaaggattttctccgacaggaggaagagatacttttcaaaatggttgtgagccgccttggccagaacgcaggaggaccctgttaagaggaaatcaggcacaaggcgcccacacagccagggtgggaggkcattccaggatggtcacagctgtctccgctgtggtctcaaatgactttgcttggccttctggaatctaaagggtcctggagtggggtgttcactggatttgctgccgagaagtctgcagcttttcactgtcactcttgagacctggatccttcagacgtggaaaagggagtg

SEQ ID NO: 734952 - DNA, 620 bp, Homo sapiens
cagttagagaggaaagttagaatccagtaataaagaatttcgctgctctgttgcttgggagcacatttgttctctcattaaaagcagcttcaagatggcttttttgttgttgtttttcataagtaatcattaataagtaatcattggaaagccccaccacacccaaccaattagctgcgtgtggtggcaggcatctgtaatctcagctactcaggagactgaggcargagaattgcttgaacctgggaggcggagtttgcagtgagttgagattgcaccgctgtattccaacctgggcgacagcgccagaccctgtctcaaaagaaaaaaataataataatataaagtgaccaggtgtgttgactcacgcctgtaatcccaccactttgggtggaagcaggaggatcactggagcccaggagtttgaaaccagcctaggcaacatagtgagaccctgtctctatattaaacacacacacacacaaaggcagccagactatgcactaggaactgccctgggaatccctttgtgttctcacaacaatcccatttcacagatgaagaaatcaaggcacagaaatattaagtaacgtgtccaggtgcggtggctcacacctgta

SEQ ID NO: 734953 - DNA, 363 bp, Homo sapiens
cacataattgtatgatacagcttacatacatacaactttgggaattattaacataatcatatgctttagagatacaatctaataaccaaactaatgagaaacatacatttaaatgttgtaatgattatgcacattctaataatttggagcacttctctagttttagaataactcagaactcattgattggcattgtattgagtctgtasatcaatttgggggaattgccaagttaacagtattgagtattctgattcatgaacatggtatgtctctccatttatggaggtctttaatttctcttagcagtgttatacagttttcagtgttcagctcctgtgcatattttgttacatttatctc

SEQ ID NO: 734954 - DNA, 621 bp, Homo sapiens
aataagaaaattatccagccatggtggtacctttagtcccagctcttggagaggctgagactggaggattgctttagcctaagaggttgaggcaaaaaagagagagaaagagaggtcagaattaccacccacctacccacattgaagccgtatcctactttggggtaatattctaaaattgcagtaatgggccaggcacggtggctcatgcctataatcctagcactctgggaggccaaggtgggaggaytgcttgagctcaggagtttgagaccagcctgagcaacacagtgagactttgtctctacaaaaaatacaaaaaacaaaacaaaacaaaaaacccacaaaaattagccaggtgtggtggcatatgcctgtagtcccagctatttgggaggctgaggccagaggctcacttgagcccaggagatcgaggctgcagtgagctatcatcatgccgctgcactccagcctgggtgacagagggaaaccttgtctcaaaaataaaataaaatcgcagtgatggatacacaagtccgcagatacactaaaaaccactgctgtgtacggtttacatgggtgaattctatgtgaattataactaaataaatctgttaaaaa

SEQ ID NO: 734955 - DNA, 539 bp, Homo sapiens
aaaaataaagatttttcacaatttaaaaataaagtctacttcatgcagagggcaaaactcaataccacagagatgccaccagaggcctgataaataaatggattaagaaaggatctggataaagtttgcagggtcacaaaagacgtaggtaaactctgggctatgcctcactatagtagatcagatttgcccagttgtaagtaacagaaattgactctggctagctgacacacaaggagaaaaagggggaattcagcagaargcaactggagaatcacaaatatataaaggaacagttaaaaacaaaactataggaggagaagtatgaaagcagcttcagggacctcaacattcaaagcccatggactttttcttcaaggagctcttgaatataactgagctccatggaccccagtacttgtgtctctgttgttcacacctcagattcctgggactcagtatccaatggtcccattttggtcagttgtctgtttttatggcagttatggcaggatcctagaacacagactcaattctta

SEQ ID NO: 734956 - DNA, 613 bp, Homo sapiens
ttccaattatacgtatgttggactattttatataatctacaagatccttgaggttctgttcattttcttatttttttctctgatattcactttaaataattttattggtctatcctcatgttcacttgcccttttctctgtcattgctactttgtttttgtaggggaagaaaaatatatatwtttttctcgaccctcataaattttcagttacagacttctgtaaaaaaagacactttaacaacagaaaaacggaagtttattaacatggatatttcatatatacatgagagatacccagagaatgagtaattctcaaagaggtggctttgaatttcagcttatatagcatcgtcaacaaagaagagtaaatttttagaggaatgacaagaaaatgaaaagagttttgaatctctagggccattaaattgtgagaaggcatataaattatataaatatagatttctttggtgttatctccaggtctacaagggtctaaagttaacttttgttctccctggcagagaaaggaggtgggatatcttttggttttattaatttgtgttcagcttttaggcaaatgaggggtaaacacaagagttttcctgcatctg

SEQ ID NO: 734957 - DNA, 532 bp, Homo sapiens
caatatcttacacagcaattaccccatattttctttataaccatcttttaactagtaaattggaattttgtctgtgtgggaggcatcccatgactatctgcagggatctcagtttcacagatattgattactgtaagctaagtgacaatgatgattcacatttaaattcttattaaatttaatgcaaattgatacaaattacatacccacatataagataatggtatactagctatgacttacaactagaatataactaagttatagcttttgaaatgaaattaattgagcctaaggaataattctattaggcattgatatttatttaattttaagagaatatttatatttaagcagtacctgaaaagttacttcattttcacaagattctaagagtataacrttgtcatttggtacatcagtgccttgggcctatcttgccctattatttttaacaagagtagggatggaaactgtgagataattgtctgttgcaataactagctatgctgttttggagaggaagtccaat

SEQ ID NO: 734958 - DNA, 445 bp, Homo sapiens
aaaataactagtgtgtccttcaacttacttgccaaaacctactcttttaaatattttctcaggagaaaagtcattttaattttaacttaaaaaaaaaaaaaccacaacttttcaggtaaattgccaaacagatgtttagtgcttagagtctcagggcagcctttgtgttgtggttgcaaacatacctatcttctagatcagaggtcaggaaactacatctctgtgtcacaaacacgactgccgtgygtttttgtaaataaagtttaggataaccacagtcattcattgcatattgtccactgtctactgtctacatatattgtgtactgtctctgggtgccttccctgctatggcagagttgagtagttgagatagagacagcatagcccacaaagcttaagatatttgctctctagcccttgacaaagaagtttgccaactcct

SEQ ID NO: 734959 - DNA, 506 bp, Homo sapiens
ttcattttcttttcctaaacactagttgaatgcatttaaaatttgttctcagattccctctgataattctatgctgattgaatttataagatcttaaaagggtaaaaatatcacaaaaatagcttgttgagatcctgcagaaaaacatgttttatagccacactcatgctttgtgtcagaacttttctccttcagagaaaattgctaacattatctaaaaagagagttttttcagttcygacttcgcttttaagttttaaaaataataaaacattaaaaagatgaacataaaaaacaagctgtatgtttaatgaggaaaaattattactgtatcattatcatagacatttccaggtcagcttctggatttttttctctgatgatgattctcattttaaaagtgatgaaaatgagagatgaaactatagttcacaagcggctttttcagtgtgagaaattgaaggaacgcggggcagagaataaggtctcacaagatgggagtgtgg

SEQ ID NO: 734960 - DNA, 608 bp, Homo sapiens
atattaatttttaatataaaccatttacaaatatgaacatgctaggttcatggtccacattttttaaaggatctggtactcctgacatgcaaagctccaaagcagtaccaaccttcgctatagatatgttccccaaccctgtatggggtagggaaggctggctaaagttcggttgtagctttgaggttatgatttagtgacattaactgtaaccaccgaaagwacttgagggaagtatctcttaacctctttttaaatttttcatttgagctacaaatatgggtattgaaagaagttttgacaaagctttttttttatctatgctttattgaaaataaatagtctttttaaaaatgttttattttttaagagacagagtctcacacagtcacccaggctggagtgtgatggtacaaaatcatagatcactgcaaacttgaactcctggactcaagggatcctcctgcctaggtctcccaaagtgctaggattacaggagtaagccaccacgtccagcctgaagtaatgctgttaactgcctcttggtgtttgttttctgccaattgcatgccattttttccttttgtaatagtgtctattagatagta

SEQ ID NO: 734961 - DNA, 508 bp, Homo sapiens
aaaagcgcagtattagggtgggagtgacctgattttccaggtgccgtctgtcacccctttctttgactaggaaagggaattccctgacccgttgcgcttcccaggtgaggcgatgcctcgccctgctttggcttgcgcagggtgcgctgcacccactgtcctgcacctactgtctggcacttcccagtgagatgaaccyggtacctcagttggaaatgcagaaatcacccgtcttctgcgtcgctcatgctgggagctgtagaccagagctgttcctattcggccatcttggctcctcccctagttttttttttttaaacatctttaagagagttgttttaaactctttgtcgagtagatctgccatcaggtcttttctaggagcagttcctgttaatttatttatttttccttcgaatgggccacactttcctgtttctttctttgccttgtgactttttgttgaaaactggacatttgaatctaagaatgtgataaccctgaaaat

SEQ ID NO: 734962 - DNA, 562 bp, Homo sapiens
tagtggttttctatttacaagtcactttgcatttatctgacaactctaaactaccctttaaatttgacaggtaagaattctcatccccaatttgctgatgctaaaggtgatgatggagagattaagtacctttccagtgcctcagagtcagcctarccctcctggggccagctcacttcctgctaggccagaattcctggtttctgtactccacagtgccttttggtaaagagaaacctcacctgtccctcctggtgtactgccactagccacgacttactcagaacttacattctgtaattgatatcttaaataagcacagggttttttccactttctaaataagcaataatcagccaccctgagagttccgctgcccctgtgtcctcccatactgagatgctccgggctgaggcatttgtggctttgaagtcccactgaaggattgtcgggggacagggtggcaactgtgcatgtgactgacagcaagaggaggtgtcctgagacccaacacctatttcagagccactttctccctctcccacacaactgatggcttccg

SEQ ID NO: 734963 - DNA, 613 bp, Homo sapiens
actggtttcgggagtctgctccgatagttcctgaacaggggagaactggcatagcttgttggtcccatccagagtagtggaaggtttgtagtattccaaagcatcttctgatgaggagaagccatgtaaggatgctgccatgctggctgaatatgaaactgatttgatatccagagagaaggaacgcttgagcttattgctgtcttccagcctgtctgcggacaggtgcagcccactgagcgcctgtaccagcgggctgtcctctaacagcgacggctgcacgctgggcacgctgggyacgctggcgggatgcacgggcctttgtcctgctgcctctgaggtagcagagtcggcacagggtggactgaggggcgtctcgcttttctgtccaccctctgagacagcagggacaggttcatttggcttctccaggtgcagcagcttgagtttgctctttggccctgatgctccagtctggttcttaatcttcttctcatagtccaggagttggcccagaaaattgaagtttggagatatagtaggtcttttttctttcacaaatctgcagagagaggaaaaaacaaaaacccgaattttacaactacactttatc

SEQ ID NO: 734964 - DNA, 609 bp, Homo sapiens
aactcagtaaacatctttgggtgcatccccgtattaaactaaagaagaagtagaaaactgaaggcaatggccctgttgcttaactgtaaggaacatgtaatttagaaacttcttctctttaacatggaaaactaaccataagtatgtggatcaacgttcttctttatggagtattaggagtgaagtgtcatgatgttatggtgtttttaacggctcagcaaaagaaaaaaaattatatagtgagatgaagtagatatgacaaaatattagttrttgaatctaggtggtgggtatttgggtatacatttttcccctacttttctacatttaaaaattttcataataaagggtaaagcagaaaaatcctaagtgtaaaaaacatttataaaactatacaaaaaataatttcaaggttcattctctattaatggtattggagttggtaggaaataattaaaataggagtataaatccagaagcccgcagaggccaggcaggtaatgtgggtgagtggagctgccgggcattggacaggagggagatggtggggactgagcaaacaggcaagtgcacaactcattgaaagcattccaaaaatttaaaaaatct

SEQ ID NO: 734965 - DNA, 518 bp, Homo sapiens
cacccagtggatcctgcaccagagctgcaggtggagctacctgccagtcccacgccctgtgcccacactcctcagcccttggctggttgatgggactgggcgctgtggagcagggggcggcgctcggggaggctcaggccgcacaggagcccacggagttcggggaggctcaggcatggcgggctgcaggtcctgagccctgccctgtgggaaggcagctaaggccctgtgagaaattgagcacagcagctgctggcccgggtgctaaaagcccctcactgctcsggcggtggggccagctggctgctccgagcgcagggtccgctgagcccacgcccacctggaactcgcactggcctgcaagcaccgtgcgcagccccggttcccgcccatgcctctccctccacacctctccctccacacctcccggcaagctgagggagccggctccgccttggccagccgagaaaggggctcccacagtgcagcggcgggctgaagggctcctcaagtgccgc

SEQ ID NO: 734966 - DNA, 518 bp, Homo sapiens
cacccagtggatcctgcaccagagctgcaggtggagctacctgccagtcccacgccctgtgcccacactcctcagcccttggctggttgatgggactgggcgctgtggagcagggggcggcgctcggggaggctcaggccgcacaggagcccacggagttcggggaggctcaggcatggcgggctgcaggtcctgagccctgccctgtgggaaggcagctaaggccctgtgagaaattgagcacagcagctgctggcccgggtgctaaaagcccctcactgctcgggcggtggggccagctggctgctccgagcgcagggtccgctgagcccacgcccaccyggaactcgcactggcctgcaagcaccgtgcgcagccccggttcccgcccatgcctctccctccacacctctccctccacacctcccggcaagctgagggagccggctccgccttggccagccgagaaaggggctcccacagtgcagcggcgggctgaagggctcctcaagtgccgc

SEQ ID NO: 734967 - DNA, 518 bp, Homo sapiens
cacccagtggatcctgcaccagagctgcaggtggagctacctgccagtcccacgccctgtgcccacactcctcagcccttggctggttgatgggactgggcgctgtggagcagggggcggcgctcggggaggctcaggccgcacaggagcccacggagttcggggaggctcaggcatggcgggctgcaggtcctgagccctgccctgtgggaaggcagctaaggccctgtgagaaattgagcacagcagctgctggcccgggtgctaaaagcccctcactgctcgggcggtggggccagctggctgctccgagcgcagggtccgctgagcccacgcccacctggaactcgcactggcctgcaagcacygtgcgcagccccggttcccgcccatgcctctccctccacacctctccctccacacctcccggcaagctgagggagccggctccgccttggccagccgagaaaggggctcccacagtgcagcggcgggctgaagggctcctcaagtgccgc

SEQ ID NO: 734968 - DNA, 624 bp, Homo sapiens
cactgtgtgattttgaagttgacaataggaacaatgctagatttgaaatcgaaaatgctctaactataaagtataggtttcagttataagaggtgattactttatgaccaagtgttcgtgactctaaaatacctgtcttggccatgcatggcggttcaggcctgtaatcttagcactttgggaggctgagggccagatcgcttgagctcaggagttcgagaccagcctgggcaatatggtgaaaccccatctctaccaaaaatacaaaacatttgccaggcatggtggtgcgtgtctgtagtcccagctacttgggcgactgacgcaggaggatcgcttgaatctgggaggttgagactgcagtaagccaagatggcatcactgcactccagcctgggtgacacagtgagatcctgtatccaaaaaaaaaaaaaaaaaaaaaaaaaaaaaaaaaaaatatatatatatatatatatatatatwatatatatgtaataaaataactacctctattttaatttgaaattatttattttatcagaaaatcactatgaattttcagttcagaaacataaaacttttataaataccatatcaattaaaaggcatagttttaccacaaat

SEQ ID NO: 734969 - DNA, 573 bp, Homo sapiens
tttgcttgtaagatggataatagataaagctaggttgaactaaacaggggaatggctctgagttctgaactcccagatcgttccaagcagactttttccccatgtcatcatagtcagtttccagggatgagtgggacagtcaagtttttataactgctttcctttagtattataatctttttcattcttctcaaatcaaaattmtgaattttctagtacagcttgctttttcgtgagtctgctttttttaaaaaatggattattttctgcagctatctcacataggagaaaaaggtaaagttttataaaaataactatatatcaccttctcccatctctcccacaggcctgatactgtgtaaaatatgtcatgggcagaaaatatatattctgaatatatatgattttcttttgtcttacttttggctacttctctgaagttgtaaacaaaaggacatgctgatccagtgtttaggacctgctaaaaggttgtgaaactctttgtgactctaagcccatctcccacctccagcctatagataagatgaggaatgttggggataagaatcactt

SEQ ID NO: 734970 - DNA, 658 bp, Homo sapiens
ccattttacctttcctgaagattgaggacagtaaggggtatgaaggttttaccaaataccaagagcctgagaaactgcttgggtgatttgactaataaaggccagttcatttttggactgtacagaggtgggaaggccaaacctaagaattttgtcttacagaagggaagaaatgaccatggtggccttttcagactctgtgggaaaggcctctacccatccagtgaaagtgtctacccagactaagaggtattttagttttctgactcagggaatgtgaataaagtcaacttgccagtcctgggtgggggcaaatccccaagcttgatgtgtagggaagggagggggcctgaacaatccctgagcagtagtakaatagcagatggaacactgagaagtgatttccttgaggacagatttccacaatggaaaggaaatgagaggttttaagaggcgggctagcggcttgtaacctacatggaagaggttatgaaacaataacagaatagaatgggcctgtgaggctggaaggagatatttttcttagtctaagaaccattcgccttgtgtgggaagagattgataggtggaagtttcagtgggggagtaggtgggagtgaccgatgagaaggagaaaaactggctgtgagggacagaa

SEQ ID NO: 734971 - DNA, 589 bp, Homo sapiens
ttcccatacgccccctgcaccaacaccatgtacagcctcccccactgtcaacatcccacaccagagtggtatatttgttacaaccactgaacctacattgatatagtccatagcttacattagtgttcagtcttggtgttttacatgctatgggtttgaacaaatatataatgatatacatccaccatggtagaatcctacagaagtttcattgccttaaaattctcagtgctttgccattcatccctccttcccctggtaaccactgatctttactgtctcaatagttttaccttttctagagatcatatagttgaaatcaaaccttcccctgggaaccactgatctttttattgtctcaatagttttaccttttccagagatcacatagttgaaatcgtagttgaatttgcatttaacaagttcggaacactcttyttttagaatctaagaagtgacgtttccgaacctattgaccttttataagaaaatatgaatatccagccctaaaaactagaaacaagctatctgtaaaaacgctttgtgatgtgttgctttatatcacagaattgaacctgtgatataggtt

SEQ ID NO: 734972 - DNA, 463 bp, Homo sapiens
acccccaatttttttttaatcagtcaggcatggtgactcacacctatagtcctagctacttgggaggctgaggctagaggatcacttggtcctacacatttgaagctgcagtgagctatgatcatgccactgcattctacctgggatgacagagtgagagtctatctctggaaaaaaaaaaaaaraaagaaagaaagaaagaaaaataaaacctaaatagtgttcctcagtaagagtgctttagacaacaaagggacaggcgaaggccaagtgtcacctatgggagagtggcagtggttactgccatgggaaaagggaaaataaggtgagagaaaaattttgccgagtttcatcattatgaaaactgcttcttgataccgtttaatgtcatttggctattaccgttttgacttgccagtatctgtattgctagttaacaaactgttgcaaaaatgcaactgct

SEQ ID NO: 734973 - DNA, 584 bp, Homo sapiens
aaaatagcttaaattggttatgcattgcattaatgtagaataattcagaaaaatacaatttttccaactaaaaacttgataccaaaaaatgttcttccaacttttaaaaaatttatgctgcatgccaaaaatcttgaacatatttcataaaataaaatttagcaactgactaaaaatgtctggctatgattaaacatttttgtggtaacaacatcttagttatacaagatttgggtggatattagctsactggtttagtacttactgacttacttaaatttcatgacaagaatgtacatagaagcctaacaaccatatttcatccaatctaaaaacaccaattgagagcctgagaatatgacaatactagaggtacaacgcaggatacatcgcctgctcttgaggcctctaccatctggtgaagataagacatttactcatatttatattaaatcaagtaagtaaaaactgtcagaagaggggtataaaataaatgccacaggagagtaaaggaggaacaatggctagatgagttaatcacaagagaatgagtcttgaaagaaaatgttgagagctaaagatac

SEQ ID NO: 734974 - DNA, 623 bp, Homo sapiens
ttgcctgtgtcaaatgtggctgaagatccagtttggcaagactgacatccctggtgacctggagaagaattgtttcatggagtaggagggataatgtgtctctgaagcgggttcagaagaagatggcagataaggagtagagacagcctacatggagtcccttcaaagattttctttttgaagcaaagctgcattgttattgtttgaagttttatttttaacttttcatttctcccagtgctgggattacaggtgtgagccaccgcgcctggcctgtttcatgttttcatttctcttcttccacrttggaaaccctagttcccaaaatatcaatgaatttactcatttgctcaatcctataatgcacacaaaatagtttcagaattgctacacctctaccatacaaataatagcctactacacagagttcaagattattttttcagttctttaatctttaatcctgtgctcaaaacttacttggtttttttttttttcttctgggagtttatattattcacataaatacacggtttgttgttgctgtttgtattgttttggagtcccactctccacatcttgttaattttatttttgaacataaaaaagactaacagtttcca

SEQ ID NO: 734975 - DNA, 616 bp, Homo sapiens
ttcatttttaatggggtaatatgaattcatcaacatggacagattcatacacagaattacaaacacaacttgcacacatcctgtagatataaacagtcctttgcatactatgtccggggttggtgccacgttgcccctaggtgtccatcaacctgctcaggggccggcaacgccccctggtggctgccacaagaacagtttaattctaatttcacttcattaccttcacactcgccctaaaaagatttatgcacatgccaagttcccttttttccgttcccattggcaaggaacttcatcccatacatgctcttttatatgtgcattacaaaagtaacaacactycagaagtattagaaaacaaattcagctgtaatttctatcatcgtatcctaacaacaattatttacacaatactctgtgcttcacgctcctgtttgagaggatgtttgacccatcaggcttccctggcacatgaacaaaactcagacacagcctcagctagggggcaaagcagtgtcaacacgcaggcaccctgggcagtatcattccccgaagcccctcatacttaatgcagtcaagagagaaccctagattccactccacctagattcca

SEQ ID NO: 734976 - DNA, 658 bp, Homo sapiens
cttggatcctataaaaagaccactgtaggatcaggatttgaccagtttttttttttttttttttttgacggagttttgctcttgtcgcccaggctggagtgcaatggcatgatctcagctcaccacaacctccgcctcctgggttcaagtgattctcctcctgcctcagcctcccaagtagctgggattacaggcatgtaccaccacgcccagctaattttgtatttttagtagaaacggggtttctccatgttggtcaggctggtcttgaactcctgacctcaggtgatcctcctgccttggcctcccaaagtactaggattacaggcatgagccaccgcgcccggccttgaccaattttgattgtggtattagcagtgagagagagagagmgagagagaaagtcttgtagatacttcgtcctcagagacagaatttacaaggagccagaaaacctggtctaagagttctaatttctaatggtaaatctgttggtttgggccagatcagggggtgtcatttgaactttctacacattttatcttattaagtttcactgggttataaaaataagaaagtaatagtgttggtattaacaagttaaacagtagaaagatttataaagaaaaatgaacatccccccttcctccccaatgcc

SEQ ID NO: 734977 - DNA, 482 bp, Homo sapiens; identical to SEQ ID NO: 734837

SEQ ID NO: 734978 - DNA, 635 bp, Homo sapiens; identical to SEQ ID NO: 734838

SEQ ID NO: 734979 - DNA, 618 bp, Homo sapiens; identical to SEQ ID NO: 734897

SEQ ID NO: 734980 - DNA, 564 bp, Homo sapiens
cagccttccagagaagctaatccttaggattttctctgccaccattcattaaactcccccaactcccaggtcccaggggtgcactcttatccactctgccttaaccagccagccctctccttaactccaaataccctgacamcctaacgccagtgcccatttatcaatcttatctttcttgccctctttgtagtactggacctttgatccctccctcctttctgaacctctcccctcccttgcttctatctctcttcctctcctgtgctggtacctatgtgtccactccccattgggcatgtaccccaggacttatcctcatctttctttcttcttcttgaccaactggttgcaccattgggatgtgataataagggctgaataagatggtgcatgggaacaggagtcccctgcacgtctacaggtggccaaaacttggctcatgctgtcctccctagaaggcctgaactaaaaccttcagagcctcctcctccattttggaagggctccctctagaccaggggcaagtttgttttatccctaaaggatgagttctcctctctt

SEQ ID NO: 734981 - DNA, 640 bp, Homo sapiens
ccccaaagtccctctaagtcctttcccagtcaattgtcactttcctccactccagccctagctaatcacagatctactttctgtcattatagattagattactgttttctagagttaagcatatgtaatctgcactctttgatgtctggctttttttattcaacatgttttgaaatctatccatcagtatgtatcagttagttcattcctatataatgccgaagagtatcccactgaatggatataccatagtttgttgacatatkcatctgttcatggacatttgggttgctctcagttttggactattaagaataaatcagccgggcatggtggctcacgcctgtaatcccagcactttgggaggcgaggcaggcagatcaccaggtcaggagatcaagaccatcctggccaacatggtgaaaccccatctttactaaaaatacaaaaattagctgggtgtggtggtgcatgcctgtaatctcagcaactcaggaggctgactcaggagaatcgcttgaaccagggaattggaggtttcagtgagccgagatcacgccactgcactccagcctggcaacagagcaaggctctgtctaaaaaaaaaaaaaaaaaaaaaaaaagaataaaatctactctg

SEQ ID NO: 734982 - DNA, 498 bp, Homo sapiens
ctaacttcaaagttcttacagtcttatcgtaagacaagattatcctacatcaaacaattaaagaactgcacaagatagaacgtaattaagttctaaatcatctagtttaggttataagtgctggagtttcagagaagggaaagatcaatgtgggctggaggagttaagaatggcttaaatataattccctgacattacagtaccgtggaaacaacagtgctgggcttaaaatgaagagatgaaagccaacacattgagccttatttacccagtgtcgtgcagcagaccaccatgattttgggggactgaattagtaacgttggccttargggttaatgctgttcaggtggacttatttgtgtacaattaataatgggttctgacataattaattctcatcatattctttttgtaatgattttttctatcagcatgaacattcacggaacgtaaattgaaccattttaaagtatacaatttggtggcatttagtacatt

SEQ ID NO: 734983 - DNA, 619 bp, Homo sapiens
agggctgtcccacaaaagctgtggcccttactaggagaacttggctgccccaaagagtggcccatgcaaggaggaagcagtggtaagagggtgattgccctgacctcactctttcctcccaccctctgatctcctggcagagacttgcattggcccaacccaacgggagctagaggacaaagaagcccaccctagacctttaggtcagcctcccaggcccagagcagctgaaaaagggtagagagtggttgtggaaatgtctggcacagtgcccctgctctgtgtccccaggccccctaggtatttgctgtactcttgggatgcttatccacttatattccgtttgtctgtattagacccttggaagcaggggctgcacctactccagtgggctcaacacatgttggaaggtttggggctgctggtctcggctcaagaacaatgatgtggtgcaggcrtcactgggactctcttggcctttcctttatttttgtcacctcatggtggcatgatcctggtaccttattgtcctgtcctcagtgcctaacatggtccctggaacctggagggtactcaataaattaggagtgaccaaaggcatgaattcatgatgccttga

SEQ ID NO: 734984 - DNA, 619 bp, Homo sapiens
agggctgtcccacaaaagctgtggcccttactaggagaacttggctgccccaaagagtggcccatgcaaggaggaagcagtggtaagagggtgattgccctgacctcactctttcctcccaccctctgatctcctggcagagacttgcattggcccaacccaacgggagctagaggacaaagaagcccaccctagacctttaggtcagcctcccaggcccagagcagctgaaaaagggtagagagtggttgtggaaatgtctggcacagtgcccctgctctgtgtccccaggccccctaggtatttgctgtactcttgggatgcttatccacttatattccgtttgtctgtattagacccttggaagcaggggctgcacctactccagtgggctcaacacatgttggaaggtttggggctgctggtctcggctcaagaacaatgatgtggtgcaggcgtcactgggaytctcttggcctttcctttatttttgtcacctcatggtggcatgatcctggtaccttattgtcctgtcctcagtgcctaacatggtccctggaacctggagggtactcaataaattaggagtgaccaaaggcatgaattcatgatgccttga

SEQ ID NO: 734985 - DNA, 634 bp, Homo sapiens
gcacattggttcatccaacaagcaataattgagcacctcttctgtgcaagcacatacaactacgtaaaggttagacatatgggccctgctttcaaggagctctgcaggggagcagataatacaaggtaagaagatgtaagacccaggagaggatcatctggacaaagtgctctggaattggcaagatggggaaagaaaataagtcagggaaattttgcatgtcacttaatctcttttttcatctctccatctataaaaaggaagawtgaccctctcttttcttacctcttggagttggtaggagaccccaagcaaattatagacataaacaagtgttggaaaatgcaacccactctcaaaaccagagtctgacaaaggtgatggtgacagtgacaaaggtaagagtgagaaggattctcagaaacttcgtggattggtagtttagataaaccatgggcagttccaggtgctccagcttcatggaagatcacctggggcttgagaactgtgtcaggatttcaaattcccaactccactgtagtgcaggctctcaacagaaacacagttgactgagcacaccttaggagaagttgaaatattacatagaaaagtggtacagagtggaaacttgtct

SEQ ID NO: 734986 - DNA, 646 bp, Homo sapiens
tcatgctccctgagctgctatgggctagcccctagtgactaactttaaggcaggtgcttgaggttacaatcttctgctgggatacactgcttggtccaacttgggaggagctacaagttaaaccatctgtagggacctgctcttaggacaaaagagctcttctttacagaactcagcaaagggggagagaaaattctcaagtcatggtgcaaggttgcctgacacccaaacctgggagcatcaaataacagctgcagacaagataagccctcgccttcatgatcaattggtacctcggaagtgtctgtatagatacaaccctcttctgggaagaagaatatcccccagaagaaaccttttaaatgcccggtacttctaaacctgactgtgtcataccttctctttctctcggggttagaaataaatgcattttttttaaaacttgcstatttactgaggactctcaattaaccagaacccacctaatcagaatttttctttaactggatagttccctcttgaataaaagtgtttaataattcaaatagcaaacatttgcatggtactgaccatgctccaggcactccactaagcatattacctctaagctgcatgattacccgcaaatatgaggcaggtgctatga

SEQ ID NO: 734987 - DNA, 667 bp, Homo sapiens
gcctctttttttctttatactttcttcttttctgcaactgataattaaagctataagaaagttaaattactattattattattagaaagctcccatgctagccagttctggttggatataggtcagctgtgtacaaatggacacactgtgaggctttgtgcaataatataaccactacttgagaccaaatgatgggtgatacatatcctaaacctctccctcatcatttttatggttaaattacaatgattgagcatcaagcttgcctaagatttgactactctacttctttgccttattttctgtatattaagttgcaggraaggtttttactttgcaatttatttttcctcttgaatagtgattatgtgaagttctaagcatcacaatgctgcagtgtataattcttcaaagcaggagaatcagagtgtagcaatggaatgcagaaaaaagcaatacgagaaaggattatttgtttgcatctgtaagaggataaagatggtttgaacatttgcttcatatggcactgatatgagcatacttacctcatttgaggtgaggtttccccagaagcagacagtgagaccagtgaatgcatgtagttgattttggaggtgatgctaggatgcactgataggaaaatgaggaagtgatcatgagaatggca

SEQ ID NO: 734988 - DNA, 632 bp, Homo sapiens
ctttggatatgtgtctaggtcataaaagcgaaagacactgacatagatgcttgtctggtccttggtgacatgcatttacattccaaaggctagggtgagaacccaagtgcctttctattcaaggagcaaaggtttctattcctcctttaaggaggggaaggaaaaggcaactccgtctctttgacgtgaataagcagataaatctatttccttatctaaaatacagactatgattttctgagatatgacctggctttcattgcatcactccaggaggagtagtraaacaataaatatatgggaaattaataaagatgaacagtaaaaatgaaacagtatctcatctcagtctgatttctgggacatcagtacttggcccatttcaaaagaaatagtctatcttgaaacaggttatgtacatgggataaaactcattactactaaattaggctctttacctattcactttggccaatacatattacagtttacaaatccatatgacttgtatttgaaacaaaaaatcttaccgagaagtatactttttatttttaaatgtgcttaatattaatttttaaatttatgtatgataaaattattatttgtttttatacatttccatgaagtttaac

SEQ ID NO: 734989 - DNA, 568 bp, Homo sapiens
tttaatttcatttagcttttatcttaatactgtttatgtcttcccatgccttttccttatttttaaaattttaaaattttttttatgcttcttgtaaagagtaggagatgctttttatttagtcttgagtttatctggtaattatgtgtgaaagtatcttatatttattgtattaatgataaatttaagtttmttttataccatcttttaaaacagctttattaaggtataattaacatagaatagattgcactgattatagtatatacaaagccaccaacactatcattacagatgttatctatcaactcaaaggtttccttatgccccttaggaattccttccttccacatcccacaccaatcattgatctgatttttgtcactatagattattttgcattttcttgttatataaatgaatcatacactaaacattctttagttgttcaatttcttccattcaacataattattttgagatctatcaatgaagttagtgtagaaaacatctattcttttttattgctaggtagtattccatgacttattcatgttacaccatatgt

SEQ ID NO: 734990 - DNA, 555 bp, Homo sapiens
tacgaatatttggaatactgttttaatgtacttctctgccgatgctaaaatcagtgtcaattctggagagatttcactccatgatttctctccacattatgggttctagtaaatgaaaaatgtaaaatttattttgatggatactggttatgttttatttgyataataactaatcagctttattccaaaatgtaattatgctacttggaaccaatttgattctttaggaattttttaattaaaattatatgtgactttttttttgggacagagtttttgctcttgtcacccagggtggagcgcaatggcgtgatcttgactcactgcaacctctgcctcccagattcaagctattctcctccctcagcgtaccgagtagctgagattacaagcacgtgccaccacacccgtctaattttgtatttttagtacagacagggtttcaccatattggccagcctactctcgaactcctgacctcaggtgatctgcctgccttggcctcccaaagtgctaggattacaggtgtgagccactgcgcccagcccttaatta

SEQ ID NO: 734991 - DNA, 540 bp, Homo sapiens
ttttcccctgatactgtctctttttggacactgtctctggctatgaatgaatttgcttttcattctcattcctccctgagattcggaacttgcttcctttgtgctatttttggattcatttgcctctccgaacccaacattttcagctstcttactaacaactaccaatgtctgataaaattctgtgaaaccccattcttacattacttcatatgatatatttctgggccaacactggacctgtgtatacagagatataaattcaaatgtttctgggttttgaactttcataattttcattaattatatgactgacgaaatgtaatgtaggtatttccctttagagaaatatgccctgaactcatcccacatccttacacacttagtaactcaaagttaagttatataagtatgctcactttagaacaacacgtccagtctctgtctctcctcttcgctgttcgttcctgttattttcttccctattagtttaagttattcacgctaagaaaatagaaaatgtatgaaaaccagtaaaca

SEQ ID NO: 734992 - DNA, 622 bp, Homo sapiens
tttgaaatctcactttgcatcttagatattctatgcttgcctctatcataaagagatttgaggcattgaagtgtgccttaaactatatggttttaaaaagaactgtaattgcagctgactaatagatgatagaaatagacatgtacatctgtgttctataaaagtcataactctacatatattttcaaaacaaaaatgtgttatacaatgccttctactgtgagttaaaaagagatattttaaacgcctctgaaaaaatgtttgaaaatgtcatttttggcaagggggagggtgacatacatctgaggaaagtgaatgaaaattattatgccagcatccctatccattctgctgaaaaattttgatatttgccctgtcatatccatggatacttattargtgtctagaattttgactgcattcttcattgtatgttttagagccaactacctgattcagagtgcaaaatccatgaaataatttccacaatgattatgacaaatttaaactccagcaggaaagcttaaaacaatttgattgcacaggttgttagataaataacattgtcagtacagtctaaagatcccagaaacaagattgatttctttgttcatactaacaa

SEQ ID NO: 734993 - DNA, 576 bp, Homo sapiens
gccaaactaaataaaattaagaagggaaaaatgggagttggaaatcactgagggtgatatttttataaaggtatagtctgagttgttattaaagaaaaaatattttagttcagaagttagcaaaaatgaaagagagaaacagggatatgacattagaaatagttttayggtaccataaacatgtaagaatgcatttagtttagcttgtatattttgtcagtttacaaactggaaatctttataacaattactttgaaaagttaccacttgatttatttttttttgttctttaaaaatgggaaggaatttgacccatcatgacaaagaatgcacgcttattttttgaaggaaacatgagctagagtaagcgtgtgatgtcttaagtcagacctaccagaatttaagtagttgcctcatactctgctagttgcttctttagggtaggatcttttaactcttcttagcctcagttaccttttcttaaaaagtagttgacaatatgccatataattattataatgattaaatgaaatagtatttttaaagtgcatggtatattacagatggacaataaat

SEQ ID NO: 734994 - DNA, 581 bp, Homo sapiens
tcttactggttggcaagagagaagtctctgtctcagtagcccggactgtgatgtaatcatatcaccaccagccaaggtgacctaaaaacctgacatattcagagttcagaattcagaagcatgcttgctatgcaaagttttctgagaaaatgtgagcggatttgcaacattgtagctctctagtcaaggaaaaaatgctgtcactttgctttccctgtctgtagaacctcctggatatgtgtattgatatctttygtaagtttaaaaatatttggccattaaatgctgcagtattctttctgttcataacttttctctttgattctaaatacatgtcagatctttttactgactcctacatgcctttgaggtttttcactatttttatttattttcttgcctcagttcaggtatttttttatggacctgtcttctattatgtttattctgatgttaacactacccactggtttcttaattttatttattaaattttcctatttcttaaatttatgttgttataaaatgtagaacataattgacgttttaaatcagttactagaatcacttttctgataaca

SEQ ID NO: 734995 - DNA, 581 bp, Homo sapiens
tcttactggttggcaagagagaagtctctgtctcagtagcccggactgtgatgtaatcatatcaccaccagccaaggtgacctaaaaacctgacatattcagagttcagaattcagaagcatgcttgctatgcaaagttttctgagaaaatgtgagcggatttgcaacattgtagctctctagtcaaggaaaaaatgctgtcactttgctttccctgtctgtagaacctcctggatatgtgtattgatatctttcgtaagtttaaaaatatttggccattaaatgctgcagtattctttctgttcataacttttctctttgattctaaatacatgtcagatctttttactgrctcctacatgcctttgaggtttttcactatttttatttattttcttgcctcagttcaggtatttttttatggacctgtcttctattatgtttattctgatgttaacactacccactggtttcttaattttatttattaaattttcctatttcttaaatttatgttgttataaaatgtagaacataattgacgttttaaatcagttactagaatcacttttctgataaca

SEQ ID NO: 734996 - DNA, 581 bp, Homo sapiens
tcttactggttggcaagagagaagtctctgtctcagtagcccggactgtgatgtaatcatatcaccaccagccaaggtgacctaaaaacctgacatattcagagttcagaattcagaagcatgcttgctatgcaaagttttctgagaaaatgtgagcggatttgcaacattgtagctctctagtcaaggaaaaaatgctgtcactttgctttccctgtctgtagaacctcctggatatgtgtattgatatctttcgtaagtttaaaaatatttggccattaaatgctgcagtattctttctgttcataacttttctctttgattctaaatacatgtcagatctttttactgactcctacatgcctttgaggyttttcactatttttatttattttcttgcctcagttcaggtatttttttatggacctgtcttctattatgtttattctgatgttaacactacccactggtttcttaattttatttattaaattttcctatttcttaaatttatgttgttataaaatgtagaacataattgacgttttaaatcagttactagaatcacttttctgataaca

SEQ ID NO: 734997 - DNA, 463 bp, Homo sapiens
tatttatttatttatttgtttgtttatttatttttaacttaggaggtactctgaaaacaaattctagtatcgtttggttggttttttaataaaagaaaaatctatcaatttgggtatggccccttttgccaacgccatgcttcacgtagggrgcctgacatgcagaaaactctccaagctattgattggataaagagccagagctgactgaattccattcttcttgagcctctcattctgtgtttctcgaatttttaccaaagcatcttgacacacaaatatctgactcaaggaaaaggaaaaacaactgctttttctccagctgcttttatataaattggctcttaaactttctaagtttattatggatatgaaatatcgatcaaacaaagcagcaacattgaatgatgtcacatggtcgtttgtgtctgtcacccatgtatgtctctagttcctgagttga

SEQ ID NO: 734998 - DNA, 655 bp, Homo sapiens
gcactctagccctggtgacagagcgagactctgtctcaaaaacaaaaacaaaaacaaaaaaataatgttttattatgtttttctgatgattaaagtatacataggaaactatggaaaggtaagaataaggaagtaaaattctattcatatgtaattttcccaccatcaatgcctgaaagaacatttgggtgcattttcttcaagtattttttatgcctttatatgtttatgccctaggggctttaaaggagcctgaaccactgacattggtgatgtgaatgtctcttcattttccaggattgctttggaatgacattatatatatatatatwtatttatttatttatttattatactttaagttctagggtacatgtgcacaatgtgcaggtttgttacatatgtatacatgtgccatgttggtatgggatctaattaaactaaagagcttctgcacagcaaaagaaactaccattagagtgaacaggcagcctacagaatgggagaaaatttttgcaatctactcatctgacaaagggctaatatccagaatctacaaagaacgcaaacaaatttacaagaaaaacaacaaccccatcaacaagtgaatgacgttcatgaaaccaaggtcaaggaccttccagtgtaggcagga

SEQ ID NO: 734999 - DNA, 637 bp, Homo sapiens
acatttcttttgattaaccattttggaaacactctttttttagaatctgcaagtgagtattttgagctctttgaaggctatattggaaaagaaaatatcttcacataaatacttgacagaagcattctgaaaaacttctgtgtgatgtgtccattcaactcacagagtttaacctttcttttgattgagcagtttggaaacagtcttttgtagtatgtgcaaatggatatatggagcactttgaagtctgaggtgtaaaagtaaatgtcttaacataaaaaccagacagaaaaattctgagaaacttctttgtgatgtgggcattcatctcactgtgttgagcctttcttttgatttaacagttttgaaacacagtttttgtagaatctgcaagcggatatttggtacaatttgcagcctatggtggaaaagcaaacatcttcatattaaaactagacagaarcattctgagaaactgctttgtgatgagtgcattcatttcacagagttgtgcctttcttttggttgagcagttttgaaacactctttttgtagaatgtgtgaggggatatttggagcgttttgcaccctatagtggaaaaggaaataaattcacttaaaaactacacagaagcat

SEQ ID NO: 735000 - DNA, 590 bp, Homo sapiens
aaattactttgtaacgtgtgcattcaactcacagagttgaaccattctttgattgagcagtttggaaacagtctttctgtagcattgacaaatggatatttggagcactttgaggtctawgggggaaaaggaaatatcttggcataaaagctagacagaaatattctcagaaacttctttgtgatgtatgcattcaactcacagaattgaacctttcttttgattgagaactttggaaacactctttttgtagaatctacaaatggatatttggagcactttgggggcaatagctgaaaaggaaatatcttcccataaaaacttgacagaaacattctgagaaactcctttgtgatgtgtgcattcatcttacagagttgaacccttcttttgattgagaagttttgaaacactctttttgtagaatctgcaagtgtatgtttggagtgctttgaggcctattgtggaaaaggaaatatcttcacataaaaactagacagaagcattctcaaaaacttatttatgatgtgtgcattcaactcacacagttgaagcttccttttcattgaagagtttgaaaacactcttct

SEQ ID NO: 735001 - DNA, 539 bp, Homo sapiens
cctatggtagaaaaggaaatttcttcacagaaaagctagacagaagcattctcagaaacatcactgtgatgtgtgcattcaactcacagagttgaaactttgttttgattaactgtgtggaaatactctttttgtagtaactgcaaatgggtatttgaagcactttgagtccaattgctgtaaaggaaatatcttcacataaaaactagacagaaacattctgagaaacttctttgtgatgtgtccattcatgtcacagagttgaacttttcttttgattgaacagttttgaaayactctttttgtaaaatctgcaaatggatatttttagcacttacctcctccagtggaaaaggaaataacttcacataaaaactggacagatatgtggttggagccaagatggccgaataggaagagctctggtctacaaacagctctggtcccagtgtgaggggtgcagaagtcggatgatatctgcatttccatctgaggtaccgggttcatctcactatggatggccagacactgggcacagg

SEQ ID NO: 735002 - DNA, 539 bp, Homo sapiens
cctatggtagaaaaggaaatttcttcacagaaaagctagacagaagcattctcagaaacatcactgtgatgtgtgcattcaactcacagagttgaaactttgttttgattaactgtgtggaaatactctttttgtagtaactgcaaatgggtatttgaagcactttgagtccaattgctgtaaaggaaatatcttcacataaaaactagacagaaacattctgagaaacttctttgtgatgtgtccattcatgtcacagagttgaacttttcttttgattgaacagttttgaaacactctttttgtaraatctgcaaatggatatttttagcacttacctcctccagtggaaaaggaaataacttcacataaaaactggacagatatgtggttggagccaagatggccgaataggaagagctctggtctacaaacagctctggtcccagtgtgaggggtgcagaagtcggatgatatctgcatttccatctgaggtaccgggttcatctcactatggatggccagacactgggcacagg

SEQ ID NO: 735003 - DNA, 606 bp, Homo sapiens
gtttttgtagaatatgcgaagggatatttgggaactcattgagaccaaaggcaaaaacacgaatatctcagtataaaaaccagcaggaagctatgtgagaaaccactttctgttgtgtgcattcatcttgcagagttaaacttcctgtggattcagcaattttgaaacactttttttggtacaatctaggaagggatatttgggagagaatwgaggccaatgatgaaaaaggaaataatttcagataaaaactagaaggaagctttctgagaaattgctttgtcgtgtgtgcatttgtctcacagggttaaacctttctttgcattcagcagtttggaaacactagttttgtagaattagtgaagggatatatgatacttcatggaggccaaaggtgaaaaagcaaatagccctagataaaaactagaaggaagctatctgagaaatgactttataatgtgtgcattcatcttgaagagttaaacctttcttttcattcaacagtttggaaccactgtttttgtagaatctgtgaaaggatattttggaatgcatcgaggcctgtggtgaaaaaggaaatatcttcagataaaaactagaaagaag

SEQ ID NO: 735004 - DNA, 606 bp, Homo sapiens
gtttttgtagaatatgcgaagggatatttgggaactcattgagaccaaaggcaaaaacacgaatatctcagtataaaaaccagcaggaagctatgtgagaaaccactttctgttgtgtgcattcatcttgcagagttaaacttcctgtggattcagcaattttgaaacactttttttggtacaatctaggaagggatatttgggagagaattgaggccaatgatgaaaaaggaaataatttcagataaaaactagaaggaagctttctgagaaattgctttgtcgtgtgtgcatttgtctcacagggttaaacctttctttgcattcagcagtttggaaacactagttttgtagaattagtgaagggatatatgatacttcatggaggccaaaggtgaaaaagsaaatagccctagataaaaactagaaggaagctatctgagaaatgactttataatgtgtgcattcatcttgaagagttaaacctttcttttcattcaacagtttggaaccactgtttttgtagaatctgtgaaaggatattttggaatgcatcgaggcctgtggtgaaaaaggaaatatcttcagataaaaactagaaagaag

SEQ ID NO: 735005 - DNA, 634 bp, Homo sapiens
caactctgtgagttgaatgcacacatcccaaagaagtttctcagaatgcttctgtgcagtttttatgtaaagatatttccttcagcacaatgggcctcaaagctctccaaacacccactttcagattctgcaaaaagagagattcaaaactgctcaatcaaaagacaggtactattctgtgggttgaatacacacgtcataaagaagtttctcagaatgcttctgtgtagtttttatgtgaagatatttgactttccacagtaggcctcacagcactccaactatccacttgcagattctaaaaaaagagagattcaaaactgctcaatcaaaacataagttcaactctgtgagttgaatgcacacatcacaaagatgtttctgaaaatgcttctctgtagtttttatttgaagatatttccttttccacaatatgactcaaagggctccaattatccagttgcagattctacaaaaasagtgtttcaaaactgctcaatcaaaagaaaggttcaactctttgagatgaatgcacacaacacaaagaagttcctcagaatgtttctgtgtagtttctatctgaagatatttgcttttccacggtaggtctcagagtgctccaaatatcaacttg

SEQ ID NO: 735006 - DNA, 573 bp, Homo sapiens
tagtctttatgtgaagatatttccttttcctcaatatgactcaaagagctccaattatccagttgcagattctacaaaaagagtgtttccaaactgttcaatgaaaaaaaggctcaactctgtgagatgaatgcacacatcacaaagtagtttcacagaatgcttctgtctagtttttatgtgaggatakttccttttccaccatagggcccaaagagccccaaatatccacttgcagattctacaaaaagagtgtttcaaaactgctctatcaaaagaaaggttcaactctgtgtgttgaacgcactcatcacaaagaagtttctgagaatgcttctgtctagtttttatgtgaagatatttcattttctgccacaggccccaaagcactcaaatatacacttgcagattctagaaaaagagagtttcaaaactgctctatcaatagaaaggttcaactctgtgagttgaatgcacacatcacaaagttgttctgggaatgcttctgtctagtttttaagtgaagatacttcctcttccaccaaaggtcacagagcactacaaagatccact

SEQ ID NO: 735007 - DNA, 547 bp, Homo sapiens
aatgagaacacgtggacacaggaaggtgaacatcacacaccagttaccgttgtgggattgggggaggggggagggatagcattaggagatataccaaatgctaaatgactagttaatgggtgcagcacaccaacatgrcacatgtatacatatgtaacaaacctgtatgtggtgcacatgtacactaaaacttaaagtataataataataaaatttaaaaaataaataaataaataaataataaaaaataaaagaaaaaaactaaaaagatttctgacaaactgctttgtgatgtgctcattcatctaacagaattaaaccctgttttttgattcagcagtttggaaaaactttttctcctcctgctaatggacattttggaacttattgattccaacggcaaaagagctgtctgagaaaatgctttgtgtagcatttgtaactctcacagagttcaaacttacttttcattcagcagtttcgaaacattgtttagtagaaactgcaaagggacattcgggaacaccttgaggcctatggtgaaaaa

SEQ ID NO: 735008 - DNA, 547 bp, Homo sapiens
aatgagaacacgtggacacaggaaggtgaacatcacacaccagttaccgttgtgggattgggggaggggggagggatagcattaggagatataccaaatgctaaatgactagttaatgggtgcagcacaccaacatgacacatgtatacatatgtaacaaacctgtatgtggtgcacatgtacactaaaacttaaagtataataataataaaatttaaaaaataaataaataaataaataataaaaaataaaagaaaaaaactaaaaagatttytgacaaactgctttgtgatgtgctcattcatctaacagaattaaaccctgttttttgattcagcagtttggaaaaactttttctcctcctgctaatggacattttggaacttattgattccaacggcaaaagagctgtctgagaaaatgctttgtgtagcatttgtaactctcacagagttcaaacttacttttcattcagcagtttcgaaacattgtttagtagaaactgcaaagggacattcgggaacaccttgaggcctatggtgaaaaa

SEQ ID NO: 735009 - DNA, 576 bp, Homo sapiens
aatctgcaaagggtgtatttgtgagcgctttgaggcttatggtgagaaagtaaatatcttcacatgaaaactaaatagaagccttctgagaaagcactttgtgatgtgtggattcatctgacagagttgaacaaccttttgattgaaaattttggaaacacagtgtttgtagaatctgtgaagggatatttgtattagcagagatgcctgaggtggaaaagtaatatgttctgacagaaacaagacagaagcttactgagaaactgcttartgatgtgtgaattaatatcagagatttgagccattcttttctttgagcagtttggaaccacatttttgtagaaccttctaagtgatattagggagtgttttgaggccaatgatgaaaaaggaaatatcttcacataaaaattagtcagaagctttctgaaaaacttatttgtgatgtgtgcattcagctcacagagttgaaccattcttttgattcagcagtttggaaactgtctttttgtagaatcttcaaagggatatttgggaaagctttgaggcctatggtgaaaaggaaatatcttcaca

SEQ ID NO: 735010 - DNA, 576 bp, Homo sapiens
aatctgcaaagggtgtatttgtgagcgctttgaggcttatggtgagaaagtaaatatcttcacatgaaaactaaatagaagccttctgagaaagcactttgtgatgtgtggattcatctgacagagttgaacaaccttttgattgaaaattttggaaacacagtgtttgtagaatctgtgaagggatatttgtattagcagagatgcctgaggtggaaaagtaatatgttctgacagaaacaagacagaagcttactgagaaactgcttagtgatgtgtgaattaatatcagagatttgagccattcttttctttgagcagtttggaaccacatttttgtagaaycttctaagtgatattagggagtgttttgaggccaatgatgaaaaaggaaatatcttcacataaaaattagtcagaagctttctgaaaaacttatttgtgatgtgtgcattcagctcacagagttgaaccattcttttgattcagcagtttggaaactgtctttttgtagaatcttcaaagggatatttgggaaagctttgaggcctatggtgaaaaggaaatatcttcaca

SEQ ID NO: 735011 - DNA, 506 bp, Homo sapiens
cagaagcttcctgagaaacttctttgttatatccacactaatctcactgagttgaaccatacttctgactgcttagtttggaaacagtctttttgtagaatctgaaaagggatatttgggatcactttaaggccaatggtgaaaaaggaaatatcttcacataaaaactagaaagaatctttctgagaaacttatttgtgatgtgtgcrttcatctcacagagttgaaactttcctttgattgagcagtttagaaacagtctacttgtagaatctgcaaagcgatatttgtgagcagtttgaggcctatggtgaaaaaggaaataacttcatattaaaactaaacagaatcttttgggaaaacttccttgtgatgcgtgcactcatcccacagggttgaacaatccttttgacagaaaattttggaaacacagtgtttgtagaatctgccaagggatatgttcattcacatagatgcctgaggtggaaaagtatatcttcttatgg

SEQ ID NO: 735012 - DNA, 506 bp, Homo sapiens
cagaagcttcctgagaaacttctttgttatatccacactaatctcactgagttgaaccatacttctgactgcttagtttggaaacagtctttttgtagaatctgaaaagggatatttgggatcactttaaggccaatggtgaaaaaggaaatatcttcacataaaaactagaaagaatctttctgagaaacttatttgtgatgtgtgcgttcatctcacagagttgaaactttcctttgattgagcagtttagaaacagtctacttgtagaatctgcaaagmgatatttgtgagcagtttgaggcctatggtgaaaaaggaaataacttcatattaaaactaaacagaatcttttgggaaaacttccttgtgatgcgtgcactcatcccacagggttgaacaatccttttgacagaaaattttggaaacacagtgtttgtagaatctgccaagggatatgttcattcacatagatgcctgaggtggaaaagtatatcttcttatgg

SEQ ID NO: 735013 - DNA, 483 bp, Homo sapiens
acgtttctgtgatgtgtgcattcatcacacagagttgaaacatatttttgattttgcagtttggaaacagtctttttggagattctacaaagggatatttgggagcactttggggcctatggtgaaaaagaaaacatcttcacatcaaaactagaaagragctttctcagaaactgccttgtgatgtgtgcattcaactcacagaggtaaaagtttcttttcactgagcagattggaaactctgtgcttctagaatctgcaatgcgatatttgtgagtgctttgaggcctttggtgaaaaaggaactatcttcacataaaaattagacagaccctttctgagaaactgctttgtgatgtgtacattcgtttcacatagttgaactagtcttttgattcagcagtttgtaaacagtctttttggtgaatctgcaaagggatatttggaagcgatttgaggactatggtgaaaaaggatatatct

SEQ ID NO: 735014 - DNA, 640 bp, Homo sapiens
tattgtggaaaaggaaatatcttcaaataaaaactacacaaaagcattgagagaaactccttagagatgagtggattcatcacacagagtggaaactttcttttgattgagcagttttgtaacactctttttgtagaatctggaagtggatactttgagagatttgaggcctattatgaaaaaggaaatatcttcacataaaagctacacagaagcattctgagaaacatctttgtgatgtgagcattcaactcacggagttgaacttatcttttgattgagcagttttgaatctctctttgtgtagaatctgcaaattgatatttggagccctttgtggcctatggtggaaaaggaaatatcttcaaataaaactacacagaagcattccgagaaaattctttttgttgggtgcattcatctcacagaggtgaccctttcctttcattgtgcagttttgaaacactgctttgtaaaatctggacgtggatatttggagygctttgaggcatactgtggaaaagcaaatatcttcacataaaaacttcacagaagcattctgagaaacttctttgtgaggtgagcattcctgtcacagagttgaacctttcttttgactgagcagttttgaaacactctt

SEQ ID NO: 735015 - DNA, 581 bp, Homo sapiens
cttctgtctagttttacgtgaggatatttcattttcagcaagaggcctcaaagcgctgcaaatatccatttgcagacactacaaaaagagtgtttccaaactggtcaatcaaaggaaaggttcaattctttgaattgaatccacttgcagattggaaaacagagtgtttcaaagcagctcaactaaaagaaattttcagctctgtgagatgaatgcaaacatcacaaagaagtttctcagaattcttctttccagtttttatgtgaagatatctccttttcagctstaggcctcgaagtgctccaaatatccaccttcagattctacaaaaagagtgtttccaagctgctcaatgaaaagaaatgttcaacactgtgaagagaatgcacacattacaaacaaatttctctgagtgcttctctctagtttttatgtgaagacattttctcctcagctataggcctgaaagcactcttatatccatttgcagatactaaaaaagagtgtttccaatctgctcaatcaaaagaaaagttcaacactgtcagttgaacacacacatcccaaagaagtttctgaga

SEQ ID NO: 735016 - DNA, 581 bp, Homo sapiens
cttctgtctagttttacgtgaggatatttcattttcagcaagaggcctcaaagcgctgcaaatatccatttgcagacactacaaaaagagtgtttccaaactggtcaatcaaaggaaaggttcaattctttgaattgaatccacttgcagattggaaaacagagtgtttcaaagcagctcaactaaaagaaattttcagctctgtgagatgaatgcaaacatcacaaagaagtttctcagaattcttctttccagtttttatgtgaagatatctccttttcagctctaggcctcgaartgctccaaatatccaccttcagattctacaaaaagagtgtttccaagctgctcaatgaaaagaaatgttcaacactgtgaagagaatgcacacattacaaacaaatttctctgagtgcttctctctagtttttatgtgaagacattttctcctcagctataggcctgaaagcactcttatatccatttgcagatactaaaaaagagtgtttccaatctgctcaatcaaaagaaaagttcaacactgtcagttgaacacacacatcccaaagaagtttctgaga

SEQ ID NO: 735017 - DNA, 614 bp, Homo sapiens
catggtttttctgcaggtttatattgaaagtgtggggtacctcccattactcctccttacatttgttttaaaggagaaagagagaggccagataccaaatgtcccattttatctgtagctcaactttctggaagttaagcagcccagacttgagtttctagatggttgcaaccagctgcatgtctgaggcacagaggggggtatttataacccatggtaacattaaatgcaatgccttgttctcctggttgagcagggcaacgtttatctgtagytccaggtatccacacactattgttagtggagatttctgctgcagcctctatccaggtgagaggtcgaataagcggaggaaaaggcacataagcccaataagaataattatgtgtagcaggtaaatcagtgtgagaggacactggtgagacagaaaatataaggaggagaatcattaaattaaacctagtgtaagtgagatttagtgctgaaggaggaagagaagaacagagagacgttattttcaggctaatagaaatgatgagatttttaggtttttaaggagaaaaagaaaggtaatcaggagaagtgtgattagttagatgggtctccattgccat

SEQ ID NO: 735018 - DNA, 622 bp, Homo sapiens
cacactaaacatttgtgaaaatccacagaccttttcagcacaaataatgatccttaaagaaattattttaggaagctggaggatcccaaaatgtaaccttactgtattacaaaataatgatctttaaataaattattttaggaagctgcaggatcccagaatgtaacctgactaaattacaaatgtatgaaacaaccttactcaagaaggtggaggataaaagtgctgacttcattaattaattttggaaatgagttgaatccrtgaaaccaaaggcagaaggaactttttataaatcctacataatagttgatagtgttggattgtatcacaaagtataaaagaaaaacccatgagtgcatactggtatcaattaattattttatatataaataaatgcaggagaatagaaaaatctcccacacagaaggatttcaaataatttatgtagatacgctgccctcagggaagtggggcctaactcctcacttcttatgtttaggctgcctatgttcactttgctgtaaagagaacagtacagacagggagtaaaagaataactttatggcggagaaatctgacaaacactatctcacccaggtaatcaaagctaacatccaca

SEQ ID NO: 735019 - DNA, 622 bp, Homo sapiens
cacactaaacatttgtgaaaatccacagaccttttcagcacaaataatgatccttaaagaaattattttaggaagctggaggatcccaaaatgtaaccttactgtattacaaaataatgatctttaaataaattattttaggaagctgcaggatcccagaatgtaacctgactaaattacaaatgtatgaaacaaccttactcaagaaggtggaggataaaagtgctgacttcattaattaattttggaaatgagttgaatccatgaaaccaaaggcagaaggaactttttataaatcctacataatagttgatagtgttggattgtatcacaaagtataaaagaaaaacccatgagtrcatactggtatcaattaattattttatatataaataaatgcaggagaatagaaaaatctcccacacagaaggatttcaaataatttatgtagatacgctgccctcagggaagtggggcctaactcctcacttcttatgtttaggctgcctatgttcactttgctgtaaagagaacagtacagacagggagtaaaagaataactttatggcggagaaatctgacaaacactatctcacccaggtaatcaaagctaacatccaca

SEQ ID NO: 735020 - DNA, 565 bp, Homo sapiens
cagaacacaaggtgggttgatttctttctctttttttctttttgagacggagtcttgctctgtcgcccaggctggagtgcagtggcacgatctcggctcactgcaagctccacctcccgggctcacgccattctcctgcctcagcctcccgagtagctgggactacaggtgcccaccacaatgcccagctaattttttttgtatttttagtagagacagggttccaccatgttagccaggatggtctcgatctcctgaccttgtgatccacctgcctcggcctcccaaagtgytgggattacaggcgtgagccagcgcgcccggccaacgtgggttgatttctttgccacatctgtgctgccccacggagatttggatcctcccctgtcacatttagccagacaccataataaagtcatatacttattatttttctaaatgattttaaaaattaaaaacataaattgaatatatttttcttttttgaggtagcttggggtcctaaccattatttccaatggaattactatggaaaaatatgtttaagtgctaaaaagttgtaagc

SEQ ID NO: 735021 - DNA, 639 bp, Homo sapiens
gatcatgtggtttgtttttaattctgtttatgtggtatatcacatttattgacttgtgtatgttaaaccatctctgcatccctggtatgaaacccacttgctcgtggtgtattatctttttgatatgttgttggattcaattagctagtattttgttaatgattttagcatctatgttcatcagggatattgggctgttgttttcttttttggttacatcctttcctggttttagtattasggtgatgctggcttcatagaatgaattagggagggttctctctttctctatcttgtggaatagcgtcaaaaggattggtaccaattcttctctgaatgcctgatagaattctgctgtgaatccctctggtcctagacttttttgttgtcggtaatttttaaattaccgtttcaatctcactgcttgtaactgatctgttcagggtacctaattattcctgacttaagctaggggttatatttttccaggtatttatccatcttttctacattttctagtttatgtgcataaaggtgttcatagtagccttgaatgatcttttgtatttcagcagtgtcagtattggatatttcctttcttctgctgggtttgcatttggtttgttcttgtttctccag

SEQ ID NO: 735022 - DNA, 639 bp, Homo sapiens
gatcatgtggtttgtttttaattctgtttatgtggtatatcacatttattgacttgtgtatgttaaaccatctctgcatccctggtatgaaacccacttgctcgtggtgtattatctttttgatatgttgttggattcaattagctagtattttgttaatgattttagcatctatgttcatcagggatattgggctgttgttttcttttttggttacatcctttcctggttttagtattagggtgatgctggcttcatagaatgaattagggagggttctctctttctctatcttgtggaatagcgtcaaaaggattggtaccaattcttctctgaatgcctgatagaattctgctgtgaatccctctggtcctagacttttttgttgtyggtaatttttaaattaccgtttcaatctcactgcttgtaactgatctgttcagggtacctaattattcctgacttaagctaggggttatatttttccaggtatttatccatcttttctacattttctagtttatgtgcataaaggtgttcatagtagccttgaatgatcttttgtatttcagcagtgtcagtattggatatttcctttcttctgctgggtttgcatttggtttgttcttgtttctccag

SEQ ID NO: 735023 - DNA, 603 bp, Homo sapiens
tcttctttcatctagatcaggttctcagccttcccttatctttcatgaacttgcttttttgtttgtttttagattacaggccagttgttatgtagaatgcccttcagtttggtttgtttgatgctacctcataattagattaaggttatagttttggcaggtgtaccatagaaatgatatggagtcmttttcaaggcagtgaggtcagtgcatccctttattggtattgttaactgtgattaaatggttatggttgtgttcatcagaggaactcaccatggagttactaattttccctttgtaatcaataagttattttcatgggggtgctctgaatctatgtacatatcctcttctttatcaaacttctatccactagttttagcatccattgataattcctgtctaaatcatggttgcacaaagatgatattctgatgttatcatttctgctataagagagagctatcccttctcttttatttatttatattcgtatgagctcatagattattttattctatggctattctatagtgatattaccactgtaatattgtgctgtaataccactgtgatgataataaataattaccattattt

SEQ ID NO: 735024 - DNA, 603 bp, Homo sapiens
tcttctttcatctagatcaggttctcagccttcccttatctttcatgaacttgcttttttgtttgtttttagattacaggccagttgttatgtagaatgcccttcagtttggtttgtttgatgctacctcataattagattaaggttatagttttggcaggtgtaccatagaaatgatatggagtccttttcaaggcagtgaggtcagtgcatccctttattggtattgttaactgtgattaaatggttatggttgtgttcatcagaggaactcaccatggagttactaattttccctttgtaatcaataagttattttcatgggggtgctctgaatctatgtacatatcctcttctttatcaaacttctatccactagttttagcatccattgataattcytgtctaaatcatggttgcacaaagatgatattctgatgttatcatttctgctataagagagagctatcccttctcttttatttatttatattcgtatgagctcatagattattttattctatggctattctatagtgatattaccactgtaatattgtgctgtaataccactgtgatgataataaataattaccattattt

SEQ ID NO: 735025 - DNA, 600 bp, Homo sapiens
cttgaactcaggagttcgaggctacagtgagcactcctgccactgcactccagcctgggcaacagagtgagacctcacttcttaaaaatcaccagaaatccaacaaactaattatagctattgtttctagcctttcaagcaaattgacacacttatatacatatttagctctacataaggcattgtacataaacaggatcatagtacatatactctttcaaacctatttttaaaaacatttcttcatgcaccagtatattgtagaaataaaggtcaccatcattattctttgcaactgcttaagattgtttctcaaagtcctatgtgacaacatgatcaagagcttcctttatatttttaaaaaagtataaggatccccttggataatatcagaagataygatttctgggaagtcgcaagcaatacccattgacatattgatgtatatcagtaaactaccctccccagatgtatgctctgtcatgacatacattcatcatcactggttttataaacctttaccaatctggtaggcaaaataatcctggtaatttaatttctgattttttaaatatatttttaatctttagtatatgttta

SEQ ID NO: 735026 - DNA, 589 bp, Homo sapiens
gtatagtatgtcctgaataaatatttgcagcctgtgaaaatgaactgtgaattaatggagcttcactaacaggcaaatccagagcttgttgctaaccattggttaactggctgggagtcttcctgcatatttctgaattctcagccctgaacaacgctccttttcaaagcttgcttctctttgaaraacagaaaggaaatgattgcccattatccctttgtacccagtttcagcccatgagatggcacctcgttctaatccaaagttgaaagctgtgtctgcatagacttttggatcttagagctgagagaagcttcacaattctccgggcgcagccccgctgtcttcagtctgggtatcagatggattttgcaagctagacacctgagaaccagggggattaatagacttgtatggggttgcacagctgctggcaggcaagtgagtctagtgggcgatagaagtcctgttttaaaggtggaaagtccttccttctcagctggatcgggatctcagccctctgaattcccagttggtgcctctacgatgccatgctgccccagggaaaaggaaacaaggctttgttctc

SEQ ID NO: 735027 - DNA, 698 bp, Homo sapiens
aattgtttctttagacaatattatatcttttaaaagacactaaagaatgagaagagacaaaacatttatacagtcttttatatttgcccacatatttaccatttgcctctttctgtccatcctggttatcatctgatgccattttatttcagcctgaagaacttattttggtatttactataaggcaagtctcctagcaacactgctcaatttttgttcaactgcaaataacattattttgcctttgtctttgaagaatagctctgttggatatataatttttttttaagatagagtcttgctctgttgcccaggctggagtgcagtggcatgatcatagcttgctgcaatctcaaacccatgggctcaagcagtcctcctgcatcagccttcctagtagctaggactacaggcatgagccactgagcccagctagaattctttyttgacagaattctttcagcacttccaacatgttgttccactgccttgtgccgtctattgtttctgatgagaagtcagttactaatcatactgctgtttccctgttaggtggtaagtcatttttcctcttgctgtttttgattttgtctttgtttttggcttttaatagtttgattgttatgtgtctaggtgagagtctatttgcacttatcctacttaggcattattgaacttcttggatctacagatcaatg

SEQ ID NO: 735028 - DNA, 645 bp, Homo sapiens
attcaaaagatactcaaaattgagaacagctgccttcaagtgggacaaaacgtgagggaaagctttacaaagtggaaaattacaatggttcccccgagcctggcatgaggaatgaaacatcagattaatctcacacacaaaataagaagtatattaacaattactgtcattccagaaagagattaaacatgagcattgrtgaaagattactttggttcagagaactggggctttttcctcgcaacaaagatcattattattggcaagaagatactttacccttttaatcacaaatccactctcaggttttgccagttgggcaaggactaaatttgaggtgagctgatcattgaggacttccctggagcctgggtaaccttggcgagtctggttgagctgggaatgtaacaggcttactactttttgcttttgtgtgattccatcttcctatgctccagctgtgaaaatcatttctgtccagcacctcaggttatttgaagattggttacatcctccccactttggtatttctactgtaaacaatactggaatgaggtatttaatgaggacttttgaaatgggatccagtttcaatgggatgcctgagagtgtcaggggaaagataccacatcccctacactttat

SEQ ID NO: 735029 - DNA, 645 bp, Homo sapiens
attcaaaagatactcaaaattgagaacagctgccttcaagtgggacaaaacgtgagggaaagctttacaaagtggaaaattacaatggttcccccgagcctggcatgaggaatgaaacatcagattaatctcacacacaaaataagaagtatattaacaattactgtcattccagaaagagattaaacatgagcattggtgaaagattactttggttcagagaactggggctttttcctcgcaacaaagatcattattattggcaagaagatactttacccttttaatcacaaatccactctcaggttttgccagttrggcaaggactaaatttgaggtgagctgatcattgaggacttccctggagcctgggtaaccttggcgagtctggttgagctgggaatgtaacaggcttactactttttgcttttgtgtgattccatcttcctatgctccagctgtgaaaatcatttctgtccagcacctcaggttatttgaagattggttacatcctccccactttggtatttctactgtaaacaatactggaatgaggtatttaatgaggacttttgaaatgggatccagtttcaatgggatgcctgagagtgtcaggggaaagataccacatcccctacactttat

SEQ ID NO: 735030 - DNA, 628 bp, Homo sapiens
tccctatcacactacacattccttctttaaattctccactttctggcttaattgtgctttcagaatttgggacatgtactgttagatagacacaatgctaaagatcccagatcctagtttttgcattttgcaacatggcggcacgtttttctgtatctgactctaggctcagcattagctagatccaccaagatgatggccaagttagatgaatcaccagactgtgatgcatagttaccaagatatgccagacattttcaacctttcatcctttattcttcttgtcttctcagcctggaatagccttaaataatccagctactgaaatcctgctcattatccttaagacacagttcatatgccaattcgtccctgaagtctcctttagtscttccaagttttgagttgtcagatttagcaaatgaaatagagaatgcccagttacatttgaatttcagatacacaatgaataatcttttctataagtatgtcctaaatatttcatagagcatacttatactgaaaaattacctgttgtttttaaaatttaacttgatgtcccacattttaatctggtaatcctaccctagttgggtttaggtataacctcttcttgcccgacattttg

SEQ ID NO: 735031 - DNA, 508 bp, Homo sapiens
catagatggaaaacatagcccatatgatttctactttttggaaagccttgagttttctttagtgtgtcaataaatgattaatttctgttaaatcccattgacactgaacagaatattttctctatttgtaacctgtaattttccacatggatcttttaagcaaatatcattaatcatattatcccagtcctctatatccttatttattttgtctatttgctktgtctgtgattgagctgagtgtgtgaaactcttgttataatcaaaatcttagttttcccttgtacctctaatagtttcttctcagacgatttgatgtttgctcaatatttagaaggtcaaaaaaatgactttaaaaatatgttgactggctaaagcacaattggtaattacactgtgatgatagcatttgcccctatcagatgtgtaagaggcactctttcattgcaaatcattttcttaaaaatgttatacgaaacacacttgcttccctgaagttttctccttg

SEQ ID NO: 735032 - DNA, 508 bp, Homo sapiens
catagatggaaaacatagcccatatgatttctactttttggaaagccttgagttttctttagtgtgtcaataaatgattaatttctgttaaatcccattgacactgaacagaatattttctctatttgtaacctgtaattttccacatggatcttttaagcaaatatcattaatcatattatcccagtcctctatatccttatttattttgtctatttgctgtgtctgtgattgagctgagtgtgtgaaactcttgttataatcaaaatcttagttttcccttgtacctctaatagtttmttctcagacgatttgatgtttgctcaatatttagaaggtcaaaaaaatgactttaaaaatatgttgactggctaaagcacaattggtaattacactgtgatgatagcatttgcccctatcagatgtgtaagaggcactctttcattgcaaatcattttcttaaaaatgttatacgaaacacacttgcttccctgaagttttctccttg

SEQ ID NO: 735033 - DNA, 508 bp, Homo sapiens
catagatggaaaacatagcccatatgatttctactttttggaaagccttgagttttctttagtgtgtcaataaatgattaatttctgttaaatcccattgacactgaacagaatattttctctatttgtaacctgtaattttccacatggatcttttaagcaaatatcattaatcatattatcccagtcctctatatccttatttattttgtctatttgctgtgtctgtgattgagctgagtgtgtgaaactcttgttataatcaaaatcttagttttcccttgtacctctaatagtttcttctcagacgatttgatgtttgctcaatatttagaakgtcaaaaaaatgactttaaaaatatgttgactggctaaagcacaattggtaattacactgtgatgatagcatttgcccctatcagatgtgtaagaggcactctttcattgcaaatcattttcttaaaaatgttatacgaaacacacttgcttccctgaagttttctccttg

SEQ ID NO: 735034 - DNA, 606 bp, Homo sapiens
tgtatttcccattccaacatttttcttttatttgtcgtcatctgggattttatctcagtgtccacctcttccatacacctcacatgtgtggtgagggaaatgtccccactcttggctctaggagcggggacacctctgcctcaggcctacactaatcgacrtaatatcatccactcatcccagcaatggatgcagttatggttacatggtctaatgtgggccaatgagaagggagaagatatgggctaagggtttccttacttctgtgagagaacttccagaaccgtcattctttttctttctgaatgcaggagaggaaacgtgctccttgcctctctccctctatctgactcagttccttatcatcctcatatatgtactgatcggtggaaactaaatgcacccagaaccctagaagctgggaaatgcagtctttgactttccagcctgttcgggattggaaggtgctagaaggggctgaaatgagcattgaatgagccagtttgcagcatctgctgtatcaccttctttgttactttaagagtagtgactattgatcatgtttttgaaatctacaagaacttcgaatagtgagcaaaagagtta

SEQ ID NO: 735035 - DNA, 606 bp, Homo sapiens
tgtatttcccattccaacatttttcttttatttgtcgtcatctgggattttatctcagtgtccacctcttccatacacctcacatgtgtggtgagggaaatgtccccactcttggctctaggagcggggacacctctgcctcaggcctacactaatcgacataatatcatccactcatcccagcaatggatgcagttatggttacatggtctaatgtgggccaatgagaagggagaagatatgggctaagggtttccttacttctstgagagaacttccagaaccgtcattctttttctttctgaatgcaggagaggaaacgtgctccttgcctctctccctctatctgactcagttccttatcatcctcatatatgtactgatcggtggaaactaaatgcacccagaaccctagaagctgggaaatgcagtctttgactttccagcctgttcgggattggaaggtgctagaaggggctgaaatgagcattgaatgagccagtttgcagcatctgctgtatcaccttctttgttactttaagagtagtgactattgatcatgtttttgaaatctacaagaacttcgaatagtgagcaaaagagtta

SEQ ID NO: 735036 - DNA, 449 bp, Homo sapiens
ccaagtccggctggtggggatcccagtagataggagggagaaacagcaagaggctgctggaggctggctggaactggggcagggacgctcgtgcgcttccccgaagtctctctttttaggtcctttgctgctgctagccccaggtccttgcagtaccccytctgcttccccctacccacccatggcatgtatttagtgcctttgtgcataaacacctctcaaattatcctgattgagggtacttctttccactgagacatcaacactggtacctgatggataaggcaagtctgagtttgcacctggcccctattcacagtaaggatgtgagaaagttacttaacctctctgagcatggcttgactcatccctaagatggggatggatgatactgaatcatagcattgtgatataacccgaaccaggcacctaattaatacccatttctt

SEQ ID NO: 735037 - DNA, 585 bp, Homo sapiens
tggcatcaccagtcactggggaaagggttttctgtttattgaatgtgccaggccagttggttatctgtaccaatagaacttggatctttaccttaaagaatacacgaaaatgcctgtaatcccagcaccttgggaggctgaggcgggcggatcacgggktcaggagatggagaccgtcctggctaacatggtgaaaccccatctctactaaaaatacaaaacaattagccaggcatggtggcggtcacctgtagtcccagctactcaggaggctgagggaggagaatggtgtgaacctgggaggcagagcttgcagtgagctgagatcgcgccactgcacttcagcctgggcaacagagcaagcctccgtctcaaaaaaaaaaaaaaaaagaagaatacacaaaaataaattccaaatgaattagagatctaaacatgaaaagtaaaacattgagggaaaaatgaagaaaaaaatattaacacaggtacagaaaagaatttcttaaataaaatacagttagcagaaactataaaaagtttgattaatcttgaaaatgtgttaaattaaaatattgttatagataa

SEQ ID NO: 735038 - DNA, 524 bp, Homo sapiens
gtgaaagatatggcatcaccagtcactggggaaagggttttctgtttattgaatgtgccaggccagttggttatctgtaccaatagaacttggatctttaccttaaagaatacacgaaaatgcctgtaatcccagcaccttgggaggctgaggcgggcggatcacggggtcaggagatggagaccgtcctggctaacatggtgaaaccccatctctactaaaaatacaaaacaattagccrggcatggtggcggtcacctgtagtcccagctactcaggaggctgagggaggagaatggtgtgaacctgggaggcagagcttgcagtgagctgagatcgcgccactgcacttcagcctgggcaacagagcaagcctccgtctcaaaaaaaaaaaaaaaaagaagaatacacaaaaataaattccaaatgaattagagatctaaacatgaaaagtaaaacattgagggaaaaatgaagaaaaaaatattaacacaggtacagaaaagaatttcttaaataaaata

SEQ ID NO: 735039 - DNA, 555 bp, Homo sapiens
aaagatatggcatcaccagtcactggggaaagggttttctgtttattgaatgtgccaggccagttggttatctgtaccaatagaacttggatctttaccttaaagaatacacgaaaatgcctgtaatcccagcaccttgggaggctgaggcgggcggatcacggggtcaggagatggagaccgtcctggctaacatggtgaaaccccatctctactaaaaatacaaaacaattagccaggcatggtggyggtcacctgtagtcccagctactcaggaggctgagggaggagaatggtgtgaacctgggaggcagagcttgcagtgagctgagatcgcgccactgcacttcagcctgggcaacagagcaagcctccgtctcaaaaaaaaaaaaaaaaagaagaatacacaaaaataaattccaaatgaattagagatctaaacatgaaaagtaaaacattgagggaaaaatgaagaaaaaaatattaacacaggtacagaaaagaatttcttaaataaaatacagttagcagaaactataaaaagtttgattaatc

SEQ ID NO: 735040 - DNA, 524 bp, Homo sapiens
gtgaaagatatggcatcaccagtcactggggaaagggttttctgtttattgaatgtgccaggccagttggttatctgtaccaatagaacttggatctttaccttaaagaatacacgaaaatgcctgtaatcccagcaccttgggaggctgaggcgggcggatcacggggtcaggagatggagaccgtcctggctaacatggtgaaaccccatctctactaaaaatacaaaacaattagccaggcatggtggcggtcacctgtagtcccagctactcaggaggctgagggaggagaatggtgtgaacctgggaggcagagcttgcagtgagctgagatcgcgccactgcacttcagcctgggcaacagagcaagmctccgtctcaaaaaaaaaaaaaaaaagaagaatacacaaaaataaattccaaatgaattagagatctaaacatgaaaagtaaaacattgagggaaaaatgaagaaaaaaatattaacacaggtacagaaaagaatttcttaaataaaata

SEQ ID NO: 735041 - DNA, 564 bp, Homo sapiens
gtgctttttagagatttacattttactagtgtgaggggaactgagcagagctcatggaaaaactgttcctgtttattgaaataaaaattccagaattttttttcagtctcagtatgattttctctaaaactaaagtacaaaaatgtttatgcagtttccccttttcaattccctcagcagccgaggtcctctcttgggtcctgattttccttgcaaactgaccaaaggaagcttccagaagcaactgtccactacaagaggaaggtgtggccatgagggaagacggaggctccagaggtcctggctctgcagagaccgcggtgctgcctcccagcctgcctgamacctgacttggtttgcaccagcgggtgcccaggcctccacagagtcttcggttctccaggtttcccatgccgccattcttgatcagttttcatctcacctctgtggtttctacctcctgtagatgcttcaactccgccactgaagccaatgctgcctgcttcctccggtgacagcagcaaagcaggcagcagtggccttggaggctctggctggacccac

SEQ ID NO: 735042 - DNA, 564 bp, Homo sapiens
gtgctttttagagatttacattttactagtgtgaggggaactgagcagagctcatggaaaaactgttcctgtttattgaaataaaaattccagaattttttttcagtctcagtatgattttctctaaaactaaagtacaaaaatgtttatgcagtttccccttttcaattccctcagcagccgaggtcctctcttgggtcctgattttccttgcaaactgaccaaaggaagcttccagaagcaactgtccactacaagaggaaggtgtggccatgagggaagacggaggctccagaggtcctggctctgcagagaccgcggtgctgcctcccagcctgcctgaaamctgacttggtttgcaccagcgggtgcccaggcctccacagagtcttcggttctccaggtttcccatgccgccattcttgatcagttttcatctcacctctgtggtttctacctcctgtagatgcttcaactccgccactgaagccaatgctgcctgcttcctccggtgacagcagcaaagcaggcagcagtggccttggaggctctggctggacccac

SEQ ID NO: 735043 - DNA, 600 bp, Homo sapiens
ttacaacactatttacaatagcatacgtggtatcaacctaggtgcctatcaattatggattggataaagaaaatatggtgcatatatatatgaatactatatataaaaaagccataaaaaagaatgaagtcatgtcctttgcagcaacatggatgctgctggaagccattatcctaagcaaatgagtgcaaaacagaaaaccaaataccacatgttttcacttataagtaggagctaaacattgggtacacatggacataaagatcggagcggtcgacactggggactacaagaagsgggagggagggaggaaagggttgaaaagctacttattgggtactatgctcactaccttagcgatgggttcaatcctaccccaaaagtcagcatcacacaatataccttgtaacaaacctgcacatctacccctcaatctaaaataaaagttgaaaaattttttaaaaatacacagaggccgggagcagtggctcacgcctgtaatcccagcactttgggaggccgaggcgggccgatcacgaggtcaggagattgagaccatcctggataacacggtgaaaccccgtctctactaaaaataca

SEQ ID NO: 735044 - DNA, 548 bp, Homo sapiens
ttcatccaagacaaactgattttattaacacaatgaccagacatgtataaatgataatatgagtttattttataagcttggatctcacatttccattttattgtagagattcatactcacccaattctaacaagagttggataaactagggtcttcctaaaataacaatgattattcttcacaaaagagtcacaagcaaagtctacacttgaaaatgtccagattgtctttcaygctgtgtgcattaagcaatgtttcgtttttagatctggtatatggacactatggatgaatatgtagattaattagaacaagtttatcaagttctttgagagtcttggaagacaaagtaaagtaattcaaggattcagtccagactaaatagtgtggcctaatagatcaaaaccctgcaagaaaccaagctgtggaaaagtaataatgtaaataaaaatgtgatttcagtctctgcttggcgactgtcctccctcaggccactaaggctcggtgccatcagatgcattaatgctgagaaattggtcactcgtggg

SEQ ID NO: 735045 - DNA, 652 bp, Homo sapiens
atttctaagatattattttgtgcttttatttgctaagcctttaatgcttattttttaaaaaagtaatttcattcttctattggtttatgtgacacttctttatttaattgtatccctttattaatttgtaaattttacatataatatctaaatttttgtttctttgtttgttttggagacaaggtcttgctcagttttctaggctagagtacaatgatgtgatcatagcccactgcagctttgcactcctggcctcaggggatcctcccaccttagcctcctgagtatctgcgataacaggtgaatgtcaccacatccagcttatctaattttttaagagagtttctttgaattattaacatctatattttcttaacacaataacaaattaatcaatacttctrtatacctcttgagcaatgcaaggaagtttaaatgttttaatgacaattaaagcactgccataattactcactattatccttaattctttatacagtcatcgtgtgcattgatttacatgcatgcttacaatctctttgcattcaattttttctatggttgtacaatttttctgaagtaaagcttctatcagcggggtttgtgagtggtaagcaatcacaataattgtctaaaaacagacttattttgt

SEQ ID NO: 735046 - DNA, 562 bp, Homo sapiens
aaataaaataaaatagaataaaataaaaaatgttttataatctgacatatcttcttgcatttcttatcagtttattctcatgcacgagtttcttctgattctctttgtctggtgaggtaaatttcttataatagttacccaataaataactgtaaaaggaataaaggatgactgcactgtgttttcattactatcccattaggtcaaagttaggttaattatgtttctttaaatagtagtgactgaaaaaatccaaagcagggtaaacattcaaataatatttcaaattccattttargacaggctcatagtttatttaacctgggagttacatctctgctagggcaacaataagagtcctgttgaaaaatttgagagtttatatgctgttacactcacaaaagacaggctgtgccctcacacagcaagactgttatatgcaacttatggtttcatgaattttacctaaattcttcctgattacatttatatagttggcctgcactatttttggagaatattatgttgcataaatacagcactggctggccttttattgctc

SEQ ID NO: 735047 - DNA, 608 bp, Homo sapiens
attctgttattgcaattttcacgttcttgaaattcttccttgttttgtttcactcagcaacttttgtattcagtttactgtttccaaaactcatcctgtttcttttattcttgactcttttctttcctaatggctttctctttgagtatcatgaaagatacatcctcttgcacagtactcaattgaggctgccaagctarttcttagaattccttctgattcctctaagtacagagctttcccttggggaagtaaaaaggttttcttacagtgtccagcactagaagagcaagtaatgcatcattcactgtttagttcttgccttgctattttctgggagttttagtctaaagagagaaagatgagtgggttcggggcgggtagaggggagagtgaggagggtgagtaaacagcctctggctgctcaggtttatggtcttccagatcagggtctctgaggctctgcaagcataagtttaatccatgtttgtgagccatatatttagttgaaatacttcttagagtctagtaataagttgtctgtaattcttattattttactggtggtgtgagtttcatatttttctatgactttataggtattttag

SEQ ID NO: 735048 - DNA, 576 bp, Homo sapiens
tcaaaaccgggtcgggggggaggggcacccgctgaaaacacccacaagctcccagtggggcagggaaggcagggaaggcatggtgatagctgtcagcaggagtgggtggggagtggaaggcagggtagaccgccaaacccatcttggggccatagtgagatggcccctgggatgcttcggctggccagtgcccagccttgctcttgtaggagctccctgggcccctgggttccccactctgggccaccacaatccatgcagcatgcaggtttgttccgtttcccagatggagaggctgagggcttaccacaggkttccgtcaaggacgcaaaagggccagcctgactctgagctcagtagccccaccctccacagcctcccttgccgccttcatctgctcacttcctcagtcactcaacaaacactctgggaggcagactgtaacaccctgcatacctctgctggacccccattccacatatccccactggttacaggtggggaaactgagtgcctgggaggcgggccttggcctgagtcccccagtcagtgattccaggataaagggcatagcca

SEQ ID NO: 735049 - DNA, 477 bp, Homo sapiens
gtggggtgagaagtggagggtgagaattggggtgggagttggggtgtcacctcccaaaccctctcaccctcagattaagaagcccctcctatgggccctggaggaacaggcctttgacccaccccaaccccactggtgtcttgggcagggagatctcgaggtgggggcctcagctccccrtaggaccgtctagccctggaccacctgaccacagctacagtgggacaaggcccctgttgcctgtctgctgggggccgagcgtggtatggaggagccagcagcccccgccttcatcacagaggaggaatccgaggcccaggagggtgtctctggcacccaacacgtgagaccctttgaaaatcccccgagtgtgtggggggctgggatgaacatctgggggcggcagcagcaggtggcccacctggccaaacacactcctgtgtccccttgtttttggcaatttcaatgaccaaaatc

SEQ ID NO: 735050 - DNA, 575 bp, Homo sapiens
cctgtagaaaacagtgtggtgggggatgctcggcctgcagatcagacaggccggggtcaaagccccgaactaccacctgaactagtcctggccgagtggcgctgatgctctaggccgagggcccccttgacagaacagccatcatctagctccgccgcagggtaggggaggtggcagtgtgggccrcagccctcggctgaagcgggggccaagcggggctctgcctggtgcagggggtttcctctatggggcaggggctcccaaattagccctggtgacatctggagctcacctctgggggctctgggggctgagagagcaggcggggcccagttctatcaatcatctgccttgttcctgggggatcgcggtcagtcccagcctccccacaagtcctggggcggggcaggcctgctggaaacccaagatgcagagaagagcgccaagcacctgagacagggctctgagcacggaaggcaaggacgcctccctcagcctcagctggggagccagtggccctgcatgcactttctcccgtctggggagcctgagccctgacccagtcccgaggccca

SEQ ID NO: 735051 - DNA, 658 bp, Homo sapiens
ggcttgggggtgagtctggggtgctgatttcaccctcctgggccaaagtctccccgtgactttatggactgtctccctgtgctccctgagaccctggttctccctcaccagcctgggtccttcttgtctcagctcagctgtcacctcctccgggaagcccccaagcccttgagtgggtgcccagcaggcatggtcagtgctgaggctacaagccctgccggcacccggcagggaacacaaggccaggtcaggctctggggacagtagacaagcttatccctgcacactggggactgcccacctgggggagagagctaggtcaggctggggagacgtcaggggatggccgggcacccctccctgaggagagctccacctgagcaagagtrtcaccaggcccactccagacacatgcactgcctcagacgggctggagagagggtgtggccgggccatgggatgaaccattctgggcggttgtcctggcatcaccagacatgtggctctattaagcatctcgactccacaggagcccatgtggcatgtcctctgacctcctgttcacttctgaaaggggcggccctctgagattctgcctggaacctgtcagccctcctgacaaggtctctggttcccggccatcacaggcacccagcca

SEQ ID NO: 735052 - DNA, 640 bp, Homo sapiens; identical to SEQ ID NO: 733580

SEQ ID NO: 735053 - DNA, 640 bp, Homo sapiens; identical to SEQ ID NO: 733581

SEQ ID NO: 735054 - DNA, 511 bp, Homo sapiens
ggggcacataggggctagtgtgagccctgcatgaggattaacagggcatgcattgcaatacagagcacgaagctgctgtgaccttcccctctgatcgctgtcacagggcctagcctgcacgtagcctcctgggcaggcacacccctggacccctccctggtgctctgctggargccacgctgggctctggaatcttactgcacagagctcctggagacccaccctcaacccttgggccccctcttccttcctgggtcctggagggggctgttagggggcatgaggccacgcagcccttgagcacctactgtgtgcaagggcctggcgtttgtgaagcaggctgcggccatcctgggtgggagtcagggaatgggggtcccggaagtgctggcttttctggtggctgtgggggatcagggggccttgctgtgtatctgtgagctgagccatcctctgaggggctgagcgctggcaggaacctatcacgtttcccaggggcagggttgggcat

SEQ ID NO: 735055 - DNA, 511 bp, Homo sapiens
ggggcacataggggctagtgtgagccctgcatgaggattaacagggcatgcattgcaatacagagcacgaagctgctgtgaccttcccctctgatcgctgtcacagggcctagcctgcacgtagcctcctgggcaggcacacccctggacccctccctggtgctctgctggaggccacgctgggctctggaatcttactgcacagagctcctggagacccaccctcaacccttgggccccctcttccttcctgggtcctggagggggctgttagggggcatgaggccacgcagcccytgagcacctactgtgtgcaagggcctggcgtttgtgaagcaggctgcggccatcctgggtgggagtcagggaatgggggtcccggaagtgctggcttttctggtggctgtgggggatcagggggccttgctgtgtatctgtgagctgagccatcctctgaggggctgagcgctggcaggaacctatcacgtttcccaggggcagggttgggcat

SEQ ID NO: 735056 - DNA, 455 bp, Homo sapiens
gacattttcaggaaactgaatccacaggctggagccttctgcttccccacaacccaaacggcccccagccagccaaacagccacgagaacccagctgctagcaactgccagcaggaaacccactaccagccgctcacagatggacagcccatcccaggagctggccccacctccccgcccctctgctgaccaacccagcagctccttgggtgggtgtggccaccctgctgccccaacctgctcccggaccctgtgccaggaggtgcttcrcctcagcggggccttgcctcccccagagccgctctgctgcctgaccttgcaatgtcatgggtcctctgggcactggcgcagttgggtgggatcagctttggccagcaggtggggggcaggtgggtaaatcctccctctctgccatctccgcttccttcctcctgcccggcttccctgcctttttc

SEQ ID NO: 735057 - DNA, 504 bp, Homo sapiens
acgaggcagcatgctcacagacacacgtgcacacacacaagcacactcagaacaagctgtggggcctgcggtgaggacaccaggcaggcaaggcggctgctgcagaaataattagtcactggtagacaggcctggctcaccttctccaaagccaaaggggggctaccagcccccagctctgggaaagggctctgagggcccgcccccaccttgcagtggttcctgggacctgcagggagcatcccaagcacggsccgtggggtgcgggactctgccatgtgatccctgaggctgggcctggccggacgtgccttggcccctgcaaaccgtgcacatccccaggtcccccagcacagcagcagtgcagggagtggagacgtgaagatggggagtggagacgtgaagatggggaagaaggaggttggaggtgcagggccgccctgtgttcttgttggagtgggggtaggagcactccaggtctggttgggccctgtgagggtgttg

SEQ ID NO: 735058 - DNA, 572 bp, Homo sapiens
actcccaggccctcagcttgcagcgcagagaagggtgactgctctgctgttaaaacaatttattttgctcttcaaaaagctaacagctgtttacagtcagcatgtgggagctgccccctgggtgatggattctgccaatccagccctcccttgccttccggcgaggaggggtcatcccaggcttcgggtcaggatgggcagagcagaccactgggggccaggccatgatgttcctggccactccaygtcccctcggctgccgtcctgtgtgctgccctgggagagtgcaaggaagggtggccccctgaggctgatacgaaatggtacggtgatgtgagggggtcaggagggaggaccactgtgggaggcgtgaggtgcagtggaaaggtcagggagaccttctgagaaggccagcagggagggctgcccagggcctggagagcgtgcatagctgggggcagggtgggggcagccggcaagggcaaagcccagtgggtgtggcgatgccctgggggatgggccccgatgcccctaaactggttcggctctctagaccagactagtgtgctatg

SEQ ID NO: 735059 - DNA, 499 bp, Homo sapiens
tataactttatagcttagatgatatataaaaaataaagatcagatgtaaccagaaactgagtttctttttttttattttttgagatggagtctcactctgttgcccaggctggagtgcaggggcatgatctcagttcaccacaacctctgcctcccaggttcaagtgattctcctgcctcagcctcccaagtagctgggactacaggtgcctgccagcatgccgggctaatttttgtatttttagcaaagatagggtttcactatgtcagccaggctggtcttgaactcccgaccttgtgatctgcttgccttggcctcccaaagttctgggattacaggcatgagccactatgcctsgcccagaaactgagtttctactctggcaagttaaacaaaaaattagtacatatcaggctgggtggctctaggccacatgcaagcaagctgcaaactgaattgcctctgcagctgcagaaggctaatttctacattgatatt

SEQ ID NO: 735060 - DNA, 578 bp, Homo sapiens
atttttgtatttttagcaaagatagggtttcactatgtcagccaggctggtcttgaactcccgaccttgtgatctgcttgccttggcctcccaaagttctgggattacaggcatgagccactatgcctggcccagaaactgagtttctactctggcaagttaaacaaaaaattagtacatatcaggctgggtggctctaggccacatgcaagcaagctgcaaactgaattgcctctgcagctgcagaaggctaatttctacattgatatttggaaamactaacagctagaaaacaccactctactcatttttaaaaataagatcatattaaatgatgttacatgcatcatttatatattgctcgcagtgccagcatcctcaaatatggttttaattttggtagatatcttgctagggggagcacatttccaagttatccagatatagggccctctttccttctctttctgtccacgtgcaaccagatgctttgtggagttaaagttgacatttatttaaatgccacttggtgtctggtttttcacctttaatttagggttttctagctgggatgtaaa

SEQ ID NO: 735061 - DNA, 578 bp, Homo sapiens
atttttgtatttttagcaaagatagggtttcactatgtcagccaggctggtcttgaactcccgaccttgtgatctgcttgccttggcctcccaaagttctgggattacaggcatgagccactatgcctggcccagaaactgagtttctactctggcaagttaaacaaaaaattagtacatatcaggctgggtggctctaggccacatgcaagcaagctgcaaactgaattgcctctgcagctgcagaaggctaatttctacattgatatttggaaacactaacagctagaaaacaccactctactcrtttttaaaaataagatcatattaaatgatgttacatgcatcatttatatattgctcgcagtgccagcatcctcaaatatggttttaattttggtagatatcttgctagggggagcacatttccaagttatccagatatagggccctctttccttctctttctgtccacgtgcaaccagatgctttgtggagttaaagttgacatttatttaaatgccacttggtgtctggtttttcacctttaatttagggttttctagctgggatgtaaa

SEQ ID NO: 735062 - DNA, 644 bp, Homo sapiens
tttgaattttaattttttgatggaggtaacggtgactataattctgttacaagaatgtagaaagtcacgcctgtaatcccagcactttgggaggctgaggtgggtgaggtgggcagatcacaaggtcaggagattgagaccatcctggctaacacagtgaaaccccaaatataaaaaaattagctgggcgtggtggcgggtgcctgtagtcccagctactcgggaggctgaggcaggagaatggtgtgaacccgggaggcggagcttgcagtgagccaagattgcgccactgcactccagcctgggcaasagagtgagactccgtcaaaaaaaaaaaaaaaagaatgtggaaagtaaaatgtgaaagttcccctccttgtctatgccccttattgactttgatatagattctttatagtttggtatatattctcccagacccttttctgtgtatatacttacacaaatatattttttctgacataaatggaatcatgcagaacatattgttcaacaacttgattttaaagggatgatttacttcactattttttcaggcttaattttatggctatatcagaactgatttggttattttatagctggctgaagctgtaatttgtgaaatcattggggagtagtga

SEQ ID NO: 735063 - DNA, 567 bp, Homo sapiens
caacattacatatggtggtgtcgatggttttgttatagataagcttatcaggttaagaaatttgtctgcgtttcctagtttggtataaagattttaatataaatgaatgttgtattttatcatcttatttttttcctacatctgctaagrtaatcctgtgttttccctttttcaatctcctaatgtggtgaatgacattaaaataccttctattgttaaaatattcttgcaacgctgtatagaaccaatgcctttattctgtattgctgatggatttttgaaaaatatgtaggtggacttagttttctaaggggaatagaatttctaatatatttaaaatattttgcatgtatgttctgaaggacattggtgtgtcatttctataccatctggctactagaggagccgactgaaagtcacactgccggaggaggggagaggtgctcttccgtttctggtgtctgtagccatctccagtggtagctgcagtgataataatgctgcagtgccgacagttctggaaggagcaacaacagtgatttcagcagcagcagtattgcgggatcc

SEQ ID NO: 735064 - DNA, 648 bp, Homo sapiens
acgctgtatagaaccaatgcctttattctgtattgctgatggatttttgaaaaatatgtaggtggacttagttttctaaggggaatagaatttctaatatatttaaaatattttgcatgtatgttctgaaggacattggtgtgtcatttctataccatctggctactagaggagccgactgaaagtcacactgccggaggaggggagaggtgctcttccgtttctggtgtctgtagccatctccagtggtagctgcagtgataataatgctgcagtgccgacagttctggaaggagcaacaacagtgatttcagcagcagcagtattgcgggatccccacratggagcaagggaaataattctggaagcaatgacaatatcagctgtggctatagcagctgagatgtgagttctcacggtggcagcttcaaggacagtagtgatggtccaatggcgcccagacctagaaatgcacatttcctcagcaccggctccagatgctgagcttggacagctgacgccttggatcatctgccactgatctctggtcaacatttttatcacccaacacaaaagaagcagagatttatcaagttacttaaacaacctgaccctttcatcttttgctacacatactcttgtaattga

SEQ ID NO: 735065 - DNA, 612 bp, Homo sapiens
aggaagcccagaagatgtttctgtaagaaattaaggattcgtttgttggggagggctgctggcatgcttgaaaagtactgtgacggctgaattttgtgggcttggggagattgcagattctctgatttcaaggggaatgatgtgatcctagagttgcaaagaacaagtgacagtggaggcgcttatgctttgtgaytgcactagagacaaggaagacacaactagaataatggggagcaggaatggagcggccaacagaatatgtgactgttagggatctttgatgaaggctgattctcagggagtgaactagatcagtgaccaactatttgtctttatataactgggtaatgtggatggattctaataaagggactacttacagcacagcaggaaagtcacaaagaaaccagacagaagagtgtaagtagtaaggggccaagcagtcacctgactagagacagtgccagcttgccaagaaggcaccagacagaagctgtgatcttcagcaaagggacacagtctgcctgtgctgaccctgcaggggcagaggtgggggatacacacactcttctctcacctatcttctgccaccccctccattagctgaac

SEQ ID NO: 735066 - DNA, 646 bp, Homo sapiens
cgtggggcaggcaggtgtccagataggcaatgcccgctgggaactgtactgccttgaacttgcaattcagcctgacggtcaaatgccaagtgacaaaaccatcggtggtggggatgactccttcaacatgttcttcagtgagattggggctggcaagcacgtgcccagagcagtgtttgtggacctggagcccactgtggttgataggtcctcgggcactggatggcagctttcctgggagagtgggagagcattggtaaaaccccacgtgcgctcctgtgaatccccctgcagaatggatgggatagacaagcaaatgcccatggcattgytagggcggaaactgaaagtttcatgtttagtgtatgtgagactcagctcctaatttaggatgtatgggaaaagctgctttgccagcagtaagatgggctgtggagagattcccctgtggctgcctcagccctgcacaggtggccctgcctgcagggtgtggggcattgattccctcctgaatgctgtgcactgtctcatgctggtgcatgaagagtcttgatgtgcatcttaggcgtagaaggtaagtacagaacatccatttccttcatccagattagaagtcccagatagtttccaaagagagctgcaaaga

SEQ ID NO: 735067 - DNA, 619 bp, Homo sapiens
cggataaacacaacgtggggcatccataccgtggaatattattcagccttacaaaggaaggccattctgacccaccctacagggaccttgaaggcattatgctaagtgaaatgaaacagtcacaaaaagacaaatactgaatgtttccacttatatgaggtgaatgggggagaagagaagagaagagaaataatggagagttagtgtttaatgagcacaaagtttcagtacgggaaaatggaaaagttctgaagatggatggtggtgatggctgcacaatattgtaaatgtacttaatggcacaatgtatggttaaaatggtatgtgtattttaccaccattaaaaaaaaaaaagaaaggcagggcacggtggctcrcacctgtaatcccaacactttgggaggctgagacaggcaggtcacaaggtcaggagtttgagaccagcctggccaacacggtgaaaccctgtctctactaaagatacaaaaaattagccaggcatggtggtgcatgcctgtaatcccagctacttgggaggctgaggcaggagaattgcttgaacccgggggggcagaggttgcagtgagccgagatcgcaccattgcactccagcctggga

SEQ ID NO: 735068 - DNA, 597 bp, Homo sapiens
aaatatttggccaagtgttttacttatttcttttaaattagggatgcttatttaatttatttattgacttttttgagacagggttcccactctgttacccaggctggagtgcagtgctgtgatcatagcccactgcagcctcgacctcctgggctcaaacagtyctccggcttcagcctcctgagtagctgggactataggtatgctccatcacaccctgcttatttaaagcatatttgttgtagagacaggtcttgatatattgcccaggctggtcttgaactcatggcctcaagttgtcctccagcctcagcctcccaaagtgctggaattacaggcgtgagcagccattccaggccttatcaactttttaaatgtttactaaggaactgttttatattattaattttctttactctttgcttttttattttattgatttctcttttttatttcctctgtttactttggctttagcttgctctttttttttttttgcttctttggagtactgtttttgagccttttttcaaaaaacaggcatttaaagctataaattttccctaaaaaacttttaaatttccttctaacccatag

SEQ ID NO: 735069 - DNA, 595 bp, Homo sapiens
ttaagttgatattggaatagttaagacttttggatcaggtgaatgtggtttgcatacagaaaggccatgctttatttttatttttattttttgatgggggaagcaaagggaagacttttaaaggttgaattgtgtccccaaaagctatgttggagtcttaattctcagtatctcagaaggtgaatttacctggaaatagattgcagcagatgaaattaattaagttaatacaaggttatactagattaggatgggcttctagttcaatatgactgagattattataagacaacaaaataaatacatgaaaaaacacaaaaatgcagggagagttctatataayggtgaattcagagattgaaattttgcagttgcaaaggatgaaaagttaaagattattggtggtaccagaagctaaaaccatggaacatattctcccttacagtcttcaagaaagcatgagtatgctgacacattgattttggacttctagcctcagaccattgagagaaaattaatttatgttgttttcagccacccagtttgtggcactttgttatagcagccctgggaaactagtgcactaaatgtatat

SEQ ID NO: 735070 - DNA, 531 bp, Homo sapiens
ttgccagtgttttattgaggatttttgcattgatgctcatcagggatgttggcctgaatgaagtttttgttgttgttgttgttgtatctctgccaggttttggcatcaggatgatgctggcctcataaaatgagttacgsgagagtccctccttttcagttgtttgcaatagtttcaggagaaatgctaccagttcctctttgtacctctggtagaagtcagctgtaaatatgtctgtttctgggcttttgagctagtaggctatttattactgcctcaatttcagaacttattattgactgatttagggattcagtttcttcctggtttagtcttggtggagtgtaatgcctccagaaatttatcactttcttctagattttctggtttgtttgcatagaggttattacagtattctctgagcattgactgtattcctgtggggtcactggtgatatcccccttatcgtttctgattgtgtctatttgattcttctctcttttctcctttattagttcagccagtgttct

SEQ ID NO: 735071 - DNA, 531 bp, Homo sapiens
ttgccagtgttttattgaggatttttgcattgatgctcatcagggatgttggcctgaatgaagtttttgttgttgttgttgttgtatctctgccaggttttggcatcaggatgatgctggcctcataaaatgagttacgggagagtccctccttttcagttgtttgcaatagtttcaggagaaatgctaccagytcctctttgtacctctggtagaagtcagctgtaaatatgtctgtttctgggcttttgagctagtaggctatttattactgcctcaatttcagaacttattattgactgatttagggattcagtttcttcctggtttagtcttggtggagtgtaatgcctccagaaatttatcactttcttctagattttctggtttgtttgcatagaggttattacagtattctctgagcattgactgtattcctgtggggtcactggtgatatcccccttatcgtttctgattgtgtctatttgattcttctctcttttctcctttattagttcagccagtgttct

SEQ ID NO: 735072 - DNA, 617 bp, Homo sapiens
tcttgttatttaaaaaatacagttctaggggtattgctgccatcaatagtgattgctctgttggaaataggtaaatcgaaaactttctggaaagtattcactattctagatgccattaagaacattcatgattctrggaggccaaggcgggtggatcacgaggtcaggagatcgagaccatcctggctaacatggtgaaaccccgtctctactgaaaataccaaaaatgagccgggtatggtggtgggcgcctgtagtcccagctacttgggaggctgaggcaggagaatggcgtgaacccaggaggtggagcttgcagtgagccaagattgcatcactgcactccagcctgggcgacagagcgagactccatctcaaaacaaacaaacaaacaaaaaaacagaattcatgattcatagaaggaggtcaaaatatcaacattaatgagagtttggaagttgattccaaccctcatggatgactttgaggggctcaagatttcagtggaggaagtaactgtagatatggtataaatagtaagagaatgaagttagatgtggagcctgaagatgtaactgaatcactgcaatctcatgataaacttgaatggatgagga

SEQ ID NO: 735073 - DNA, 602 bp, Homo sapiens
tatgttactcttgtgctgttgtttttcttagagtggagaaatatttctctaaccttgtctgtttttcaaacataagaaaatgaaaacctgagaaggctacatatttgcttatgggaatgcagaccatttctaactatataatatggaaaaacttgtatatgtcttcatcatacatttagcactatttactctcttccatttcctacccagcctctgtggagaagagaatttgtgaccccatgtgattataccccagaatgggagcagatccctcactcagacattcagcactttccacsgcagaggcccaggtggactttttaacctcactactgctgcacctattctatcttcaaccaagattgttgtggctgaaacttcttatgcactgtcctgcaggcctaaaatctttttcctatagccccactcttttcagacttcacagcccacccacactttttctgtgaaaagcctttctatcttcaaattggcccttgtcaaaggcgactgtccctagtaatcgttactgatctgtctgccagatgtggcttccttcctctcagcttccgtagctttgttcttctactgcacttatggggcct

SEQ ID NO: 735074 - DNA, 599 bp, Homo sapiens
aataatgccacacatctccaaccacctgatctttgacaaacctgacaaaaacaagcagtggggaaaggattccctatttaatcaatggtgttgggaaaattggctagccatatgcagaaaactgaaagaaaacccttccttacaccttgtacaaaaattaactcagatggattaaagacttaaatgtaagacctaacgtcgtaaaaaccctagaagaaaacctaggcaataccattcaggacataggcatgggcaaagtcttcatgattaaaacacaaaagcaatggcaacaaaagccaaaattgacaaatgggatctaattaaactaaagagcttctgcacagcaaaagaaactatcatcagagtgaacaggcaacctacagaatgggagaacatttttgcaatctacccatctgacaaagggctagtatccagaatctacaaataacttaaacamatttacaagaaaaaacaaacaaacccattaaaaagtgggtgaaggatatgaacagacacttctcaaaagaagacatttatgcatccaaacaacctatgaaaacacgctcatcatcactgatcattagagaaatgcaaatcaa

SEQ ID NO: 735075 - DNA, 586 bp, Homo sapiens
gttgactattttcctatttttttctattctctatgtcatttatttctgctctaagcattattattttcttccttcagctaactttgggcttagtttattccttttatagttccttgaggtataaaggtaggttgtttctctgagatcatcttctttttaaatataagtgtttaaccctataaactgccctctttgtactgcttttgcaccaacctaatacattctataactttttttttttttgagatggagtctcgctctgttgtccagactggagtgcagtgccacgatctyggctcactgcaacctccgcctcccgggttcaagtgattcactggcctcagcctctcgagtagatgggattacaggcacctgccaccatgcccagctaattttttgtagttttagtagagatggggtttcaccatgttgcccaggctggtctcaaactcccaacctcaagtgatccacccacttcagcctcccaaagtgctgggattacaggcatgagtcactgcgtccagcaacatcttataatttttgatatgttgtgttttcattttcatttctaatcttttgatttctt

SEQ ID NO: 735076 - DNA, 586 bp, Homo sapiens
gttgactattttcctatttttttctattctctatgtcatttatttctgctctaagcattattattttcttccttcagctaactttgggcttagtttattccttttatagttccttgaggtataaaggtaggttgtttctctgagatcatcttctttttaaatataagtgtttaaccctataaactgccctctttgtactgcttttgcaccaacctaatacattctataactttttttttttttgagatggagtctcgctctgttgtccagactggagtgcagtgccacgatctcggctcactgcaacctccgcctcccrggttcaagtgattcactggcctcagcctctcgagtagatgggattacaggcacctgccaccatgcccagctaattttttgtagttttagtagagatggggtttcaccatgttgcccaggctggtctcaaactcccaacctcaagtgatccacccacttcagcctcccaaagtgctgggattacaggcatgagtcactgcgtccagcaacatcttataatttttgatatgttgtgttttcattttcatttctaatcttttgatttctt

SEQ ID NO: 735077 - DNA, 615 bp, Homo sapiens
tgcctgcttctgaaattgttttaatctctgccacagaatgcttctggcagggtttttcaactggaaaataggaaatgagttagaaacaatggaggaacgtgaataatctcacttaagacgtttgatcttgagatgagatgaagttgaaatcgatttcccggttcacagccagacagcggcgggtgggaggggagagagctgggggagatgggacatccaggcctgtctgggctccagctctgctggaacaaggacccccccgctcctgcaaaactctgacaaactgcacagtgggtgagaggttgccccagccccatcacctcaaaggcaggcatgaccgaagctctttggtttttccaagtctatgttaatggttgacaaaccagcccacacatctgtttaacagatattcactgtgtgcstgctacgtgccatggcctgtcctcagggaactcacaggaggtgactgtgaacaggatggagagtgaggagctaatgtttgtggaggactgtctatgtccaggcatgggttaagaaggctgcatccatgatgctacacagaaccgggagtcagggattcttgtgccctcttttcagatgaggaaatggcctcag

SEQ ID NO: 735078 - DNA, 562 bp, Homo sapiens
gagttataatttaagaactcaggtttttgtactctgacttgagaaatgaaacagcaacatgttcttaaaccatatacacactggcacactcaatttttctgttctattttgtgacaaaagtaagatgcacccaacccctctccatgagctcaagccagagccgaatgcattcacaaagtttatcaggtktgaatcatcacaagtcactgttcacttgacttctcattaaattaaatggtggggcagatgggtcctggttggaagcacccagcacaggttctgcatggatgtgtagaccacttccatggggtcagaggaaggagttttgagcccaaaccctaccctgctagaaaggccccactggggcatttctcctacctgtgattgcacattggctccgacttgggacccttggtaagaatccccattcagactctgcatgttcatgaacatgtccccagaatttgggaggttaaaagaaccagaagaacctggaaaggaaagagttaagtagctgaataacagagagctacacacataatcctcaaagacctagaggcag

SEQ ID NO: 735079 - DNA, 592 bp, Homo sapiens
ctctacatatttaatatttccttctggactaaaccatcattatagttagtttaaaactaatcaaagcaatacaaatacttattttgataaataaaaatatacttattttgaccatcaaatgtaggtttcatcatacatgcatttcttaattgggagtggggtggttgtacagtgctgattaaaggaggtttggttatcaccaatatttcataatgtctcttgttgggcacccaagagggtctcatacytcggggcaatgaaccaggtgggagtatccctttctttcataaagtaagaaaagggcaggaagggaaaagaaaaccaacacaatgcttccatcacagccactttctggggcaggtggatttaggaaggcgtacacatatacgtaaggaaagctggccagtgaaaaccatgaaaccgtgcatacctgagtcctctttggaaaaccttcagctcctctgtacagtatgcgtccccccaagtttgcagagtgctgccttaagtgttcaggctaactctggttacattttaacttctctatgtgagcacagcatgggaacccctcatactgggtatgcgtaaagacttt

SEQ ID NO: 735080 - DNA, 642 bp, Homo sapiens
gctgctgtggtcccggagggagtggccagggctgcggcctgatgtggcgcacgcagatgtctcacccggccccatctctggcagaactgcaggctcagtgatgcctcaaacccatccccagcccctcccccaccacctggaccttgccgcccctgcccccacctggccgtcccccgagccagggagctggggagaggaaaccacacaccgaggccctatstgatactcataagtttgctcaagcttatgtaaatcacacaaaaactgacaagttttcctattaaaagataattgtaatcagggtgccggacgtgcggtgtggggctgattggagatagacggacagtacgaaaagatggatcgttttaatttgcaccaattatattgaagttcatgggatcatcttcttcaatcttcatgaatactttattttctggctgctacagagctattaaaaagaatgattgaggcacacggcaggccgggtatattttatgaaatatcacctttaaagaatttgagtacgccattttcataatgagttttctagtacctaatcctcttctctattactacatttaagaagtggattgatctgggaagtgcccaaggtgcaggtaatgatacattttgccaggcgca

SEQ ID NO: 735081 - DNA, 621 bp, Homo sapiens
agtgtcagccccagagtatgtggagggctatgtgagctggtgagtataataccccaagctatctccaatattagctattcttcttctctggctttctccacccctagaggccaaccaagtcctgtaatgacacacatggtctctcttgggtcctcttacccttccaagtcctggtgtgttgcattctcctgcctctctcaactcccaggactgtgcaataacatcatctgtgaagcttttgaagcatcagggatgtggttgccaccatgtgggagggggcaggccatcctctctgtcctcactgtagatcccagggcagtgccaccttctggaacctgccatagcacaggatgctgtgccctggagcagtgcttcatcctggaggcagtggccaggcargcagtggaggaggcgtgatacagattcctcctgtgcacagggaggcgaggaggctgaaattccaggagaaatgcctcccacacagtgggggcacccctgcgtgctcacctttgaggcaggcaagcctagtggtcaggtctgtggatgttggaaccagcctgcccaggttctgctcctggctctgccacttcctggctttgcagccttagacaaattttttca

SEQ ID NO: 735082 - DNA, 599 bp, Homo sapiens
cagctcagagaaaaacaaattgacgtgtaaatcagtccaagtcaccctgcaggaggagcggccacgtggagatagaggccaggagagtgaaaactgaggctccagccaacatcataggtaaagggacccagttgtcccaggcagcatacagatatttgaaccgtgccagctgcgtctgtgtgagagaggccagccgtgccccttaggcccctgtcaagccaccctagtcaataccacgtggaacagggatgacccatccccatgacctacagaatcataagaaataggaktgttttaagccactaagttttggggtttttgtgatgcagcaatagattgttgagagacatagactttctgctatgtctctagacttctcaggggttaggttgtcctaatgagttgaggtcagaggtcatttggccagcccctgggccctgggggacacagagagaaaccagggttttcaggagactgtgtagctaagaaggacatgagctgtggtgacagtcacacccagcttcctggatctgccacttaccagctgtgtgacctagggcctcactgagtttctttccacctcggaaagtggagataat

SEQ ID NO: 735083 - DNA, 637 bp, Homo sapiens
acaacacacctgctagaatggccagaatctcaaacacygacaatgccagatgctggagaggatgtggagcaacaggaactcatattcattgttggagggaatgcaaaatgctacagtgactttggaagatagtttggcagtttttaaaaaaactaaacatattcttaccatacaatccagcagttatactcttctgtattttcccacatgaactaaaaacttaggtccacaaaaaaacctcacacaaatgtgtacagtagctttatttataattgccaaaacttggaaggcactaagatgtctttcagtaggtgagtaaataaactgtgacacatccagacaatggaatgttactcagcaataaaaaggaatgtgccagcaagccatgaaaagacatggagggaacttacatgcattttgctaagtgaaataagccagtctgaaaaggctgcatactatctgattccaactatataacatgctagaaaaggcaaagctaaggagacaataaaaggatcagtggttgacaggggttagggggagggaaagataaaaggcagcgtgcagaggatttttagggcattggaaccattctgtatgatactacgatggtggatacatgtcattgtacatttgt

SEQ ID NO: 735084 - DNA, 656 bp, Homo sapiens
gtcccaagctactcaggaggctgaggtgggaggatggcttgagtctgggaggcagaggttgcagtaagccaagattgggccactgcactccagcctggatgacagagagagactctgtcttaaaaaaaaataaaataaatggcaaaagagttggacgctttaccaaagaagatgtacagatggcaaataagcaaatgaaaagaacatcatacgtcactagataactgaaaattaaaacaacaatgcaataccacaacacacctgctagaatggccagaatctcaaacactgacaaygccagatgctggagaggatgtggagcaacaggaactcatattcattgttggagggaatgcaaaatgctacagtgactttggaagatagtttggcagtttttaaaaaaactaaacatattcttaccatacaatccagcagttatactcttctgtattttcccacatgaactaaaaacttaggtccacaaaaaaacctcacacaaatgtgtacagtagctttatttataattgccaaaacttggaaggcactaagatgtctttcagtaggtgagtaaataaactgtgacacatccagacaatggaatgttactcagcaataaaaaggaatgtgccagcaagccatgaaaagacatggaggga

SEQ ID NO: 735085 - DNA, 637 bp, Homo sapiens
acaacacacctgctagaatggccagaatctcaaacactgacaatgccagatgctggagaggatgtggagcaacaggaactcatattcattgttggagggaatgcaaaatgctacagtgactttggaagatagtttggcagtttttaaaaaaactaaacatattcttaccatacaatccagcagttatactcttctgtattttcccacatgaactaaaaacttaggtccacaaaaaaacctcacacaaatgtgtacagtagctttatttataattgccaaaacttggaaggcactaagatgtctttcagtaggtgagtaaataaactgtgacacatccagacaatggaatgttactcagcaataaaaaggaatgtgccagcaagccatgaaaagacatggagggaacttacatgcattttgctaagtgaaataagccagtctgaaaaggctrcatactatctgattccaactatataacatgctagaaaaggcaaagctaaggagacaataaaaggatcagtggttgacaggggttagggggagggaaagataaaaggcagcgtgcagaggatttttagggcattggaaccattctgtatgatactacgatggtggatacatgtcattgtacatttgt

SEQ ID NO: 735086 - DNA, 499 bp, Homo sapiens
acccataactatatagacctactatgtacccacaaaaattaaaaattaaattaaattaaataaacaaatgagagaaaagagataaatctcccatgcagaagaattccaaataatttgtgtaaataatctgccctcaaggaggtgaagtgtgactccccatgccttaaatgtggcgtgcaygtagaaacttccttccaaaaagcagagtatgaaaaaggggggaaaggagtaacttcacagggagcaagatgacaaaattccttcatacagatgatcaacatcaacagagttgtcatgttgatagtatttaccctggatatgacgtgatgcaaaaatgacatattacctctgtggtttccccttcaaaatccataacttcagtttaatcatgaaaaaacccaactgagggatattctacaaaacaattgacctttacccctcaaaactgccatcaaaaatgaaaaaaaaaatgagaaactatcacagtaaagaggcgcct

SEQ ID NO: 735087 - DNA, 524 bp, Homo sapiens
cacaagtccaccccttgtcaacttgaacccatacacatggactaaagtagctattatcttcattaatttctttcttctgttttcgattttgctctttttttttttaatttcttgcattagatacttagctcatttattttcattcttgctcacttaataataaaagcaattaaagctgtgaattatcctatgagtacaggaatagctgcatcccctgcgtgttaatgtgtcattttgtcattgtcttttttctaaatattctgcaactgcygtgtggtttcctgtctcacaaaataattgtttagcagagtgatttttcattttcacaaagatgtttgtcttacgctctttgtaattaatttctagtttcattgcactgaggtcaggaaaatgtggcctgtataatttcttcatttggtggaagtattgtgtgtcttctttctggcttagttaacaatcaattttaaaaatatttcatggacatctgaaagcaatgtacatttcttgttgaggcaaaaacctca

SEQ ID NO: 735088 - DNA, 452 bp, Homo sapiens
tacagtgctgaggttgagaggccctaacgtagttaatctttcctaacccttgtacaatttatagatggccaggtcagtgtgaaaggaaaagcaatacctaaacatgtcctgtgcttattgtggtgacacctcagtgtcgactctctagacagcacaagcatctacccagacccaggaatgttccttcttctttgttttatatagataagtaactatgctcattggaattctgggtatcaatcgggttgaagcaaggaaartgaaggccagatatttcactctctagtctcttagtaagaacctcacaatagacttggcattttcatcaagaaaaaaatcttctcaaacagataaaataaaatcacgaagaatagaagagtcactggcattattaatgacaagagcaagtaagccttatttgagcataaataggaggataaccatgaataaga

SEQ ID NO: 735089 - DNA, 452 bp, Homo sapiens
tacagtgctgaggttgagaggccctaacgtagttaatctttcctaacccttgtacaatttatagatggccaggtcagtgtgaaaggaaaagcaatacctaaacatgtcctgtgcttattgtggtgacacctcagtgtcgactctctagacagcacaagcatctacccagacccaggaatgttccttcttctttgttttatatagataagtaactatgctcattggaattctgggtatcaatcgggttgaagcaaggaaagtgmaggccagatatttcactctctagtctcttagtaagaacctcacaatagacttggcattttcatcaagaaaaaaatcttctcaaacagataaaataaaatcacgaagaatagaagagtcactggcattattaatgacaagagcaagtaagccttatttgagcataaataggaggataaccatgaataaga

SEQ ID NO: 735090 - DNA, 681 bp, Homo sapiens
aattcattcccctttcttccttttctcactcctggcattgctaatctgctttttgtctctatggatttgcctattctggacattgtgcatacgtagcattatacaatgtgtgacctttttatctggcttcttttacttagcacaatgttttcaaggtacatccatgtgctctcctgtaggagtctttcttagtctcatacaaattatatttgttaaattaaaacttcttatagtatcgatactatgcaaatgctacgactatggctgactttaaactactaacttgacawcacagaatatggggctgggaagataatgcacttcacattagcacatggtcttataggattcccagtgtacagatacattagtcacaaacaatctctagaccctgggcagtaatttgatgtactaaaaataattagaatgtgaagagttttgagtgtttcttactttttaaatgtgatttatataattataagtttatagccattaatttctaataattgttgctttaatgactggctcacaaattccctgaaaatttaacaattgacagtcatatgctggaaggagctgccttctcataccattagtagagccaggattggagtgctgaacatcttccttcagagactgagcatgcaacctctggccacctaccttccagaactgtctact

SEQ ID NO: 735091 - DNA, 591 bp, Homo sapiens
gtctcacacctgtattctcagcactttggaaggctgaggtaggaagatcccttgagcccaggagttcaagaccagcctaggtaacataggaagaccccatctctaccaaaaaataaaagaaaaaatatagccaggcatggtggtgtgtgccttcagtcccagctattcaggaggctgaggcaggaggattccttaagccagggagrtagaggctgaagtgaatcatgattgcaccactgcactccagcctgggcaacagagcaagaccctgtctcaacaacaacaacgagttgtttgttgtttagcccaggatttctatctcctccatctgatgtggtcagtgactcagatgtatgaagatattgagcaggagtcaccagttcagtaggggatactcagtaaatcagaaataagatccagagaaggggtgagcagaactaacccatgacctcaagttcatttgtaggatagattttaggagacataactgcaaggataaaaagcaccacaccaagaagggttaatccagtcatcagttcttgacaccaaaggtcattcctgatgtttctgaagctcaccagggcccagagg

SEQ ID NO: 735092 - DNA, 626 bp, Homo sapiens
ttggctttttgataataacctgaattaacaagttttaaagatccattgcctgtggaacaagaaagggaggaaaaaatgtcaaatgactagaatgcttttagtccctgatcctgggaaggcggttattgatacccacaaccagattccctaaagtgagaagagctttgtgagagaaatcaagctcccctgaggtctgtgacttttgaaatgtctttaggacattgaaaacactgatctagagccccgaggagcagccacctctcagctccaacatcctttctatctcacgtcccacctcttccatgaagcgtgccctgacccctcagtctgcactgtgttgtccgtcgctgacccattgttgtgggtggacacagtgccctagtgttctgtgatgcagtctcctattatctcatatgttgggttccgctgagctgagctctccctcactagtgatgacatctgtattatttatgtctgagaaggttrtgaactcctgaagcttcatctgagttccagtccctggggatttgggggaatttaactccattgaggattagaaggtcattgcttctctatgattttggctatgcccttgatgtctctaagatgaagaagcaacaacaatg

SEQ ID NO: 735093 - DNA, 635 bp, Homo sapiens
agaggcggtgaatccgagactttcattcaggtgacgatccctcgcgggcactcactctcgctcacactacaatcagatcctccatgcggctttcatatactctgtcacactcgcagccagaatcccctcggatggactcttgcaaacctccagccccatcccgggatccgtgcgtyttctacagccaccacttgggccagcgtccaggacgcccaagcgtaacctccccactctaaaccgttaggaatcagtggctggactcaccgcgtcataaaagcataaactgtgacccgatgagtccgcgcactcggaaaacaagagaacgctcccacgtctccgggcgcagcttgtgccagcgactactaggtcagggggcgcagctgagagaattcaagcaacctccccgcaaccggttccgccgcgtttgtgggctggtagcccggaatacatttcccagaggccttcgcggccgacgtgcttcgcgcaggaacgcagccgcctcccgactggaggacgcggtagcggagctgctcaaagcgaggtgctcagccctgggaggctcagggctgcccgaggggcttagtcccagagccagtgctgtcaggggctgagcatgtgaatagggcagtcggaag

SEQ ID NO: 735094 - DNA, 671 bp, Homo sapiens
ttccagagctttcccagctgagggcaggcacacagatgcctagttcgcctctaagatttcaagggggtgttcttttgtctcactttcttgaaactttttttaaactggtatctgtttataaagcgtttctttctctctttctttcttctttctttctttctttcttttctttccttttttttttttttttttttgagttgctctgtcatccaagctgaagtgcagtggcgcaatcatggctcactgcagcctcaacctcctgtgctcaagcaattctccmgcctcagccttccaagtagctgctgggactacaggcacacacaaccgtgtccggctaattttcaaaattttttgtagagacagagtcttgctatgttgctcaggctggtctcgaactcctgagctgaagtgatcctaccaccttgatctcccaaagtgctgggattacagacgttgagccaccagtcccagctgttttttcttttttcctatacactgtgtgcttgagtcgaaaagttcattcagttcatcttccaaacacctccgtgatgcacctgtttagtacctgacacaggtgctgggcattgggctgtgaacctgcccaaacatacttagcaaaagtgagcagcaaagatggcatggtgagcaatggatcctgaaggaaaaaggac

SEQ ID NO: 735095 - DNA, 594 bp, Homo sapiens
ttagatggtactgaagaattggtttccctctttgaagaattgggtttgttgatcctgtcaatctttgtccgctctgtgccacagtgtttttagaccaaacagatgaaggttgcaatggcagtttcctcatagcagaggctcaagatgtcaatgcctcatctgagacgtctgtcaagkcagggttcctgggcataggaagggtaaaattctgagagttatgcctatgaatatgtagagccaaaagtgggaaatgaaagagaggttggaaggagagagatcagaagctgtgaggccctggattgtgtaaagtagaccaaagtggggatcaaggataagtgtgtgtggatactaagacctttgccctagcagtcaacagattggagggtgccatgaagtatgcagagggcaggtgaagacatgtgtagatcatccctttatgcaaccagtgcttggaagaatctatatccaccccctaccaggttggatgtgctgtgccatctgtagagaactgtcaataatattgtaactatgcaaagttcagatatcatatttcaaaaccttaaaaacatgtattttgttgcaccaacctaagaa

SEQ ID NO: 735096 - DNA, 630 bp, Homo sapiens
attgctggcaggatgtcgtcaattcctgggaatataacaggaaacacaactgaagtggatgataaacaatagcaacaaaaacaaatgttatttgggaagtaatcgtattggatgttctaaatacaaatgtgaaatccaaggcttaaatgtaattactaatgtaaaggtttacattgaaagtcactgataggttggttgagggagcatttggtataaaaataaaaaataaaaatctacacgagggctaaaccttaaagcctccctgaagaagaatttctatacttcagtatacataggaaatatttgagggaatcattaaaaattcagatccttkggacccatcttctatgtataataaaaattgcccttgttaaatgagagaaatttattgaaaattatgactaatcaaaataatgaaagttatgtaattaatgaaatactactttatgagattggcggttatggggaaaataagatatcatatattgctgcaacatttttgaaagacactttagcagaatttatcaaatgacatcaagagtcccataatttttcatttaataattctgcgatttgaatttagtctaaatgtgtatataaacatatacacaagaatttcagttttacact

SEQ ID NO: 735097 - DNA, 581 bp, Homo sapiens
atcttgatctctgagggcaggctttttttaaaggagaatagaatgctctagtggtatttcaaagcagtaaattcctcctttggtaggaaatatgaggagggttttctctgatcttcacctgagaaactgatggggaactcatgaaggtaaaactgctaaaaatgtgttggcctccctaagaatgagackccagaattcttaacactcaagctcatctatactgagcctccagcagtttgttaatcagttttagttttcctgtcaggtttgactccagcagtggggtaatgctcttggcttctgctccaataagctatgagtctctgtagtcacctggctatccaattttcaggaagggggcttgccctgtgacttaaattctctcatggatctaagaagaattatgcattttgtgtttgttcagcttttttcttgcagggagaatggggaataatgactttcttgctctacctgtcagtccagaaaccagaattccacaagacttttttgggtgtcttttatctttcactatcaatgaatatataagatgctcctctaaaggcaacctttgtggctaagca

SEQ ID NO: 735098 - DNA, 581 bp, Homo sapiens
atcttgatctctgagggcaggctttttttaaaggagaatagaatgctctagtggtatttcaaagcagtaaattcctcctttggtaggaaatatgaggagggttttctctgatcttcacctgagaaactgatggggaactcatgaaggtaaaactgctaaaaatgtgttggcctccctaagaatgagacgccagaattcttaacactcaagctcatctatactgagcctccagcagtttgttaatcagttttagttttcctgtcaggtttgactccagcagtgggstaatgctcttggcttctgctccaataagctatgagtctctgtagtcacctggctatccaattttcaggaagggggcttgccctgtgacttaaattctctcatggatctaagaagaattatgcattttgtgtttgttcagcttttttcttgcagggagaatggggaataatgactttcttgctctacctgtcagtccagaaaccagaattccacaagacttttttgggtgtcttttatctttcactatcaatgaatatataagatgctcctctaaaggcaacctttgtggctaagca

SEQ ID NO: 735099 - DNA, 628 bp, Homo sapiens
tagattgatattattcatgactttatgggttttacacatttttaagattaggtttatttcattttcgttggatatcaagatatgttaatatcagtttttgaaatttattcaattttatcagttttatgattattcttttacattttgctttctcttattcaaacttataaaaaggtttgtttatatttttgaataattattttccctaggaggaccattaaataccagttagtcttggcgtgtgtgaaaatattttcctctttcatcaatgaaaattaaatttatatagaattttaggataaaccttctccccacctcaaactctgtaaatcatttactatcctcttgcatttaatactttaaaagtctactgtacaaccttgtttttttttrtttgataaatttttccctttaaatgattgcaggtctttatccccttttaaatatctatttaaatatctatttagtcagtttgtgggttcttctgtatctaaatgtggatctatgaacatcaaaatgcctacattaagatcatcatcaaattagttttatcttataaaatatttgtcttgtgattttaaatggtaaattattttaattcattatttatgtgttgtagtaactaata

SEQ ID NO: 735100 - DNA, 525 bp, Homo sapiens
ataattgcacctatcttgcttctgattgttaagcaccatcaagcagcctctattttttgaaatccaatcattgccattgttacaaggaacctaagtctgtagccacataatctgcttcaactcttacttacaaaagagagtcaccattgaacttaaaaatacctgttcttcattttatcaaaccattccttactgctttggtaaacgcagcaccttcagggtcctacgtcaacaaagttacttagtgagatttttgaccattatacggyatatttattctattattcacaattccttgagaattttgattccttatccatttgtaacaactttcctggcatttgtatctcaggtcattgattttcctgaacgtgcaacaagcactatggtagtatatttgtgtcatctcccagggtcttttttaggatgttaaatgctcaggttagtgctactatagtaatataatctttgagatcaatttctactctttcatcattattcagcatcctgaggatccagtcccat

SEQ ID NO: 735101 - DNA, 471 bp, Homo sapiens
tcctgccctgccgtcttctgactttgaggcctcgtatcccagtccaagaccatttcaaacggtagaactggtgccagacacttggaggaggcagggcaaagactcgccagtccgtataaacccttttggagaagccaagatgggatgagctccgcagcacgttcccgccagactgctgcaggcagagttccgcggaaaactgaaccccgggagtcctcaggggcccatctaccccggtrcaccgccccctcctttcactgcggggactcggagctgtgggactggagcgcgcaccggcagacttgcgcgcaggttggagttggcgcacacccgcgccagccggggagcggcgtttacgcactggtaccgcgagcgctcaaagcatctctcgggaagtgctttaaggctgggaaatttactatacacttatgccgggcaaaaattggatcccacgccggggaggagaatctg

SEQ ID NO: 735102 - DNA, 623 bp, Homo sapiens
ttccattggtcgatgggcctattttttttacaagtacaatgctgttttgatgactatggacttaatagcatagtttgaagtctggtaatgtgatgtctccagattcgttctttttgcttagtcttgctttagcaatgcaggctcttttttggtttcgtattaatttgaggattgttttttctagttctgtgaagaatgatggtgatattttgatgagaattgcattgaatctgaagattgcttttggcagtrtggtcattttcacaattgattctacccacccacgagcatgggatgtgtttctattcaacatagtattggaagttctggccagggcagtcagacaagtgacaggtctcacacaattcccacacagcctgcaaggccattctcactcccatcatgcccctgcaacagcactgagtttatttctaggcagtcagaagcagggctgagatgttgccccaggccgcaaggtttccctctgaaaaagcaaacagggctttcaggttttgcacctccccacctgctgcggcttctgtgcttgtatctgcattccgcgtttacccccttccccagattccgtccaggaaacttcatgttcagtcaaaattattacaaag

SEQ ID NO: 735103 - DNA, 634 bp, Homo sapiens
agataaactgtctggtgtgcattatgtctttttcaaattaggttgtagttccctgagagcaggaaccatgttattctactattcattttctagcacctccttccatacagtgctttactcaagtggatgagcaatacatacgtattaaactggattgatttgcataaaaatagttggttttaggaaggtagtatgaggtgggatggcakcaacagaacagaaatcatcaaactgtaaatcttcccaacacaaaacaggaataaaaattaaatagtaataacaagaagccaggagaagaagagaaaggcagctggcacttacacagtgtctatatatgccagaactgctctacctgctttatgtgtaggcaccctgtttgacctttcgtcagcacttctaacttataacatgagtactgactgagtttataactgtatgtgaatgttattcctctcactaagcaacatttatctcacttcagccattttccacacagatgtttacgtactgagcggtgagacccctctgtactggaggtggtgtggatggcagtgtggtctgctcagccagagtagggacagaggctatgatctgtccgaagagctgctacacaaaggctttgtttattagaggg

SEQ ID NO: 735104 - DNA, 545 bp, Homo sapiens
tccgttttagggagcacacagtctttttacctgaggtcactaacatttcatcagttgagattttcttccaggatatttttttatcatcgaaattcagggatgttatttaagcatatcactcaaccagcatccttatctattcagctaagctcaagctcacaaagctataaccaaagaggcctttagcagcctgcagagatgacacaaagttcacacaccactaaatcatttttattattaattaattattgtttattaatattagcagcagagtcttcgcatcctcactgctatgttgtgcacaattctaaaaagcatgaggttttgatctccatgcccagtgcygattcacagcatcatcagtggacccacttcaaaaggtgccagctgatagcaagggcgccatcaacaagaccataaaaaatgggtgcaaagtcagatggatttgaaggcctgcgacagtttagggtaaagtgaaggaggggatgcagttgactgttgtttgagctgttctgtctcatgtgtgatcaaacagtgacccatat

SEQ ID NO: 735105 - DNA, 579 bp, Homo sapiens
ttaacccccttgctacactgactttgaacggatcatcagatatacgtagcaaagtgcttggcagaatgcagatgcccgtaattgttcattccttttcctttctaagactttcatcaagaggagtctaggaaactaaacagtcaactccagaattttgccataacattccttaatgactaatactgtatgaaatatatgatattcatgtactttgttacatattataggtgacgtgttttcaatgttactaccttttttgtttgtttctgggcaagatgtgaggtgattcctgtagatctgaatttsaagcaatctaacatttgtaagaacaatctagtatttttctagaaggtgggaagtaggattaattcctcctgaatcaccttagggaatctactaattttaggctacagaaatatgttaaggatttcaactcctgcccctagctaccactcagaacaaatgaggtaactgcgaaatcaaggtgcttgtttatgattatgtctgattgggagaatttgtggcaacccaaatatggaaacataaataatatctcatgccataaactggtaaacattt

SEQ ID NO: 735106 - DNA, 618 bp, Homo sapiens
ggtcaatatttatttatagttattcatatatatatcttttcctttgctcttcattccttcttttacttacttgctttcattgaacttattttttttttgtatgaaaaattccctttgttatttcatttagtttgtgtacctgtggagtgtattttacaawacactcattttggcattcattttgaaaagaaaactatactggatagaatattctagtttggacattatttctttaagcatttaaaaaatatcccaatattttctggcttccacttagtatgttgaaatgtcagctctgcagttttatcattgctcctttaagctaatgtgtctttccaaggccttttcccaggtcctcctctcccagccccatggtggtttttaagaccataattttaggcgtttttactgtgagcatttaagtgatggttttctttgtgtttttcctgcttatggtctttctaaatatttaagcttatatttttctttggttttggaaaattcatagccagtatctagttttatattgcttgatcccaactaattatctcctctttttgtttggactacaattgcatgtacgctggataacttcaccacgttctatatgtctcaagt

SEQ ID NO: 735107 - DNA, 518 bp, Homo sapiens
ggcctgttctggggctccagagaagtttccctgaggcatcatacccagccacatgagggattccaaacatcagtgtcacctctgcctccagcttccaatgagctgcccatcccttagctttcctcctctccctccatcatgtcttcattccctgggctgcctttgttaaggtccttggtcccctggtctcactatactctttctcctttaatygtcttatttgttccatggtttctggattacaggcatttgtccaaaatagtcacagcagaaaagaaactcagaatacctaaggttggagtgagacaaattaatttttttgaacgtttgcgtttaacacactgaacagtggaagtttagcatcccatcatttcattatttacccactttggctggagtgggcttcagagatagccaagcattctctggctgtcctggattgctatggagggccaaatcttgtattacatggttgtctgccttatgtaaagtaactaacatcagattctccatgcaag

SEQ ID NO: 735108 - DNA, 616 bp, Homo sapiens
actcaaataataaaatacttaaatcaggactatgaactcgtgaaatccttctttttaagaatgtatagcaatacagatttatttgggggtctgggacttatcttttaaaaataatatgtattatatatattaatgtatcatggtgtgtcatatactactattgtgctaaatattttattttgtactattaggatctgcaactggaatatggacaaggacaccaaggtggttactttttaggtgcaaacaagtaagtaaagttcttttaaaacttaatttaaattcaagaatkattaagttgcctttaatattatattttaatatttaaggtagaaaattgtattaggctggtagatatattttacaatatgcatttcacctttttccattgcttccttgctcattatttagttaatagttgtcctaatgggaagcatcaacataatttttttatatcaagctacattgctgatcttgtatgttagagaaaaccacatgtattgccactgaaggcagatacatgttttagcactttatttctaaaactgatctgtttatttcttataaaacttgctttggtacatctctaagatgggttggtcactaaaaacagctg

SEQ ID NO: 735109 - DNA, 654 bp, Homo sapiens
aaatagatttaaagtgtctgtgaaagctggcaggaaaaaaggtgaggattgggcagtaaaataaggaaaccaatttatatgcatttagataattacgtgttagtttatttgtaattatgcatctttcaaggtgttctatttaatatcatcatagactaattcttccattataatcagcatttgtgagaacctttctggaaaactcaattcttaaacctaayggataaggaatatgaagaccttaagcatttagaaaagaacatttgaaggaagctcaaacattgttatttggagttatgctcacttctatttacttccatttaggatagactctaatagactctagagagaccagaagaaatggccctaaacttcagaaagatcatttgaagttgaataaggtagaatttcccatcatcagttgctatttgagatgaaaagtgacaatgaaacaggtagcgaggtaatttttctagagtgtttgaaaaacaaacaggttttctgactttgatgcagatctgattacctaaaggaagtacttacctccagcctttgatctgtatatgtatttattggtgaaacgtatctaatgcatcattttgtattaagaatgaatagtaagttctctcatgagagtacattgaacagccatca

SEQ ID NO: 735110 - DNA, 624 bp, Homo sapiens
ctatgttgcccaggctggtctcgagctcctgggctcaagtgatcctcccgcctcagcctcccacgtagctgggactacaggtgcatccaccatgcttgtagccttattttcttaatgggaaagagggtctgagagaagggatgctgtgtgcccaatgggtttcgcctgcagcacgctgcctcctccccgggaaagcagggcgtgcacattgggattggacgacaaaagcagagtcatctacagttcatgggcacgctgcaaagaagggagacgttaaactctcgaaagcagcagacacsccccaccaggaagagacatacttgtaaaaatcaaaggagggcgaaggcatgagaatcgcttgagcccaggaggttgaggttgcagtgggctgagatcgtgctactgcattccagcctgggtgacagagaccttgtctcaaaaaataaaaattcaagggaggccaggtgtggaggctcacgcctgtacccagcactttgggactctgaggtgggaggatcacttgagcccaagagctcaagatctgtctggacaatatagcactaccccatcgctacaaaaaaaaatttttttaagtagctgggtgtgatggaatgcacctgtagt

SEQ ID NO: 735111 - DNA, 543 bp, Homo sapiens
aatcacctgtggtcactaaactcgtcctatcccacagcccctgcacatgatgacttaagttttgtgaatgttttttggagatagtaaagtcagtatctctttcaacattttgttccttatctttagtgatacccagctctgtacaaattctgtccacgtaagcaaagtctttttttttttttccagatagggtctggctctgtcactgaggctggagtgcagaggttcagtsatagcttcaactcctgggctcaggctgtcctgctgcctcagcctcttaagtacctgggactacaggcctgcacaaccacacctagctaatctttttattttttgcagagacagagtctccctattttgcccaggctagtctcaaactcttggtctcaagtgatcctcctgcctcagtttcccaaagtgctgggattacaggtgtgagccaccacactcgcctgcaaagtcttactgataaaagatttgaaggaaggatgtgtcagagaacttcttttttcttataatatttacttaatcttattggtttgg

SEQ ID NO: 735112 - DNA, 618 bp, Homo sapiens
acatcctgtttctctgtattattacagcacaaagcatttatcatgctgacaatgacagtgacatttcaggacctaaacaagcttagttgttcacagcttacaggagagaaggctcctaacactctttatttatttatttatttgtttgtttatttattttgtttttgtttttttttgttttgagacagagtttcgctctgtcgcccaggcagacagagtgcagtggcaagatctcggctcactgcaagttccgcttccmgggttcacgccattctcctgcccagcctcccgagtagctgggactacaggtgcctgccacggcgcctggctaattttttgtatttttagtagaggcggggtttcaccgtgttagccaggatagtctccatctcctgacatcttgatccacccacctcggcctcccagagtgctgggattacaggcgtgagccaccgcgcccggcctatttatttgttttttgagacagagccttgctctgtcatccaggctggagtgcaatggtgtgatctcggcttattgcaacttccacctcccaggttcaagcaattctcctgcctcagcctcccgagtagtcgggactacaggtgtgcactacca

SEQ ID NO: 735113 - DNA, 618 bp, Homo sapiens
acatcctgtttctctgtattattacagcacaaagcatttatcatgctgacaatgacagtgacatttcaggacctaaacaagcttagttgttcacagcttacaggagagaaggctcctaacactctttatttatttatttatttgtttgtttatttattttgtttttgtttttttttgttttgagacagagtttcgctctgtcgcccaggcagacagagtgcagtggcaagatctcggctcactgcaagttccgcttccagggttcacrccattctcctgcccagcctcccgagtagctgggactacaggtgcctgccacggcgcctggctaattttttgtatttttagtagaggcggggtttcaccgtgttagccaggatagtctccatctcctgacatcttgatccacccacctcggcctcccagagtgctgggattacaggcgtgagccaccgcgcccggcctatttatttgttttttgagacagagccttgctctgtcatccaggctggagtgcaatggtgtgatctcggcttattgcaacttccacctcccaggttcaagcaattctcctgcctcagcctcccgagtagtcgggactacaggtgtgcactacca

SEQ ID NO: 735114 - DNA, 638 bp, Homo sapiens
tgagtcaccacgcccagccatggcttgttatcatttaattatacatatattttagcagaattcaggtccatcccataatcccaatcttgtggtttttcattacttttaccaaagtggtttcggtcccttttcattactttcacaaaagtggtttcagtaacccccttctagcaaagagggggttagtttcatggagggcctattatcattcttgcttcaaagttaaattataaactaaatgcctcccatggttagcttggcctacacccaggaatgagtgaggacagccagcctatgaggcaaaaccaagatggagtcagccatgytagacttctcttaccgtcataatctttgcaaaggcagttttactctgacatcaaaaggtgaagcagaggacacaaaaatcctcgctgcacatcctccatgagtcagccaaaactagtccagcaatggtggtcagtttttaggaagggatgctttgtgaaactggcaagctgtcaccctgaaactgtaaagagggtgggggagtgcagtcactacctcaggtgactggctaatagggataaaggaatggggtgtccatttcttgttttctaaagctggtttctgcctactctttaggaaataattctggttaa

SEQ ID NO: 735115 - DNA, 651 bp, Homo sapiens
tctgttcaatacctcagccaaaggatttagaggttaatttgagaaacacaacactgtgggaggtggcaataggtcatgagcctgcaaatgtacacgaggaaagcaagccttgcggtgtctcttttctcctctcccctttcccctctccccctccttctgccctctctcttctcctgtcttccttttcccttctcttcactcccctgtcccctctcccctctggtgagttcatttcgttacccattggaaaaagcctaatcaaatgtgcctttgttagcagtttacaaagcgaatgctgaatgtggtttgtgtgccttgaatttgtaatggaattagagggcagccagaggactgtgaatctccttatgggtggaaaccattctgtttagtaaacttgaagcttttgtcagttgaaacctctsagaaaataaagctgaagtgggtgaggccagtgttctttgcccatactttattcactgtttggatcacctgtttcagctctccaggcagtgacttcttatataattgtttttcatagggcagtccagatgaaaagagtaccaatgaatctgcctccagctgaataaaccatggagaggaaaaacccatccagagagagccccagaagactctctgccaaagtaggcaaag

SEQ ID NO: 735116 - DNA, 644 bp, Homo sapiens
ttttgcttggtaaatcacatctcagctggaagcatggctctccttattgaaaggaaaagaaagaatagagacaggaaacggagcccacatgagattgctccggccccaccagtgctgccagtgcttctcctgggcttcctttctcccagttctttttctccctgccttcctctctggcttccttgtccctttcttgtgtctgtgtttatatcccttctttgttgtargctaggctggcagctccagaaggctgagaacagcccacacacacagttacggagtgagtaggcttttccagcagagccacattctttaagacaaagacccgccagaaaagctgctgggcctgatcaggagctaagagacttggggacaagctgacctaagggagtagtctaggagttttgtttcgttttttaaaaacatactagaatctagcgtattctaaaattaaaataatgatacacatttaaaactctgcatgttgtgtaatgtcttgattatggctgcttggttttagatatttttcttttgagagtctgattccacctctgtcattagacagtgtgatcttgtacataattaaccacaatggatatcagtttcttcatctttaatatgaagggtttatgtgaaatgattct

SEQ ID NO: 735117 - DNA, 644 bp, Homo sapiens
ttttgcttggtaaatcacatctcagctggaagcatggctctccttattgaaaggaaaagaaagaatagagacaggaaacggagcccacatgagattgctccggccccaccagtgctgccagtgcttctcctgggcttcctttctcccagttctttttctccctgccttcctctctggcttccttgtccctttcttgtgtctgtgtttatatcccttctttgttgtaggctaggctggcagctccagaaggctgagaacagcccacacacacagttacggagtgagtaggcttttccagcagagccacattctttaagacaaagacccgccagaaaagctgctgggcctgatcaggagctaagagacttggggacaagctgacctaagggagtagtctargagttttgtttcgttttttaaaaacatactagaatctagcgtattctaaaattaaaataatgatacacatttaaaactctgcatgttgtgtaatgtcttgattatggctgcttggttttagatatttttcttttgagagtctgattccacctctgtcattagacagtgtgatcttgtacataattaaccacaatggatatcagtttcttcatctttaatatgaagggtttatgtgaaatgattct

SEQ ID NO: 735118 - DNA, 580 bp, Homo sapiens
ggaataaaagcaagaccctgtctcaaacaaaacaaaacaaaacaaaacaacaaagaagttcacattccagatcatgaccttgggcaagttgctctttgtgtctcagcaccctcatctgtaaaatagggaaataaccccaacctcacagggctgtcgtgaagattaagtgagtacttggcacctagtcagtgtatataagtgttgagtggttattataatttgtggtatttstaggacagaaatctgcttagaagaggagatggtcttccttttctgagatggcgtttcactcttgtcacccagactggagtgcaatggtgcaatcttggctcactgcaacctccgcgtcccaggttcaagcgattctcctgccttggcctcccaagtagctgggattacaggcatgtgccaccacacctggctaattttttgtatttagtagaggaggggtttaaccacgttggtcaagctgacctcaggtgatccaatgcctcagcctcccaaagtgctgggattacaggcatgagccaccacgtcaggcccaggttaggcattcttagtgacaggatgagacaggagg

SEQ ID NO: 735119 - DNA, 608 bp, Homo sapiens
atcacttacaacatattgtctgtctaccacactaaaacggtagctgcaggagaacagggaccctggctgtcttgcccactgctgtctttgctgcatcccacagagggtctggcacttatagggacacaagtaatayctgtgggtgataaataacagctttgcccttgtctagtctacaggggtatttgttttttgttattcattttttaatttttatttttttgagacagagtctcactcagtcacccaggctggagtacaatggcttgatctcagcttactgcgacttccacctccagggttcaagcaattcttgtgcttcagcctccagagtagctggaattacaggtgcacgccaccacacccagccaatttttgtatttttaatagagacaggagtttcaccatgttgtccaggctggtcttgaactcttgacatcaagtgatctgcccacctgggcctcccaaagtactgggattacaggtgtgagccactgcacccggcccctacaggggtatttggaatccagtcctccttggaaacagaaagatggacatgaaaactgcctaagggcctcctgaacccaatcagaggaggagtgcatgta

SEQ ID NO: 735120 - DNA, 579 bp, Homo sapiens
aagtgccgggaggtaggagccactgcatctggccatcttttttgtcttaaaaattaacttgacttttggcattattcactataacatatatgtcaatcatctcaaattacttataattcaacagttaactttttttctgaaatctttgcttaaaattgatcttcctgaaagttgagtctcaaaaaccctctggctcatcccagggaccccgaggkcacaaacaccccataggttaaagagctatgggagcagtctatggggtaagaatatggcatataactctatgggggaaagataagagcagggatttgggtttacatcctgactctggcagttattagctgtgtgaccttggctagatcacttaacctctctgtgcttcagaatctcagcctataaaatggggatgatgatgatgatagcacccgccatacacatggtttttatgatgattcaatacattaatgtatgtaaaatacttaggacagtggctgacacaatgtagatgtttgcgattatttttctgtagaagaccaaaacacagccgtctaatcatccccagaaattgaaatgagagat

SEQ ID NO: 735121 - DNA, 591 bp, Homo sapiens
tgtctttccagagattacatactagaatgtcatctcatgaaggcagcaactttatctaaatcactgcatctccagcacaagaacagcatctgacatgtaaaagacactcaataaatatttgttcaatgaatacatttatgtcacacaatcacacgattaacttccataactgagtaccaataaccaaacagaaaargcatttttgcaatgaaaccctagcagagaaccatgatacactattacttggcaatgacttctaattggattccctaactactagaaacttctaggcacctgctgtccacagactcagaagttgtagctcagattatgtacctagaggaaaattaacagagcatgcttctttgggccagtcccattcaaaggacaaacaagacataaaccaaacttcagagttaaactatttagatgcagggactatactgaagaattcctaacaatatataacatgatgaactcaggagctctcttatgatccagttttaatcacatctcaaaacttgacaagacaaaaaaaaactcactggaaagatgaacactaatgaataggcttatgctttaaggcaagat

SEQ ID NO: 735122 - DNA, 574 bp, Homo sapiens
cagccattctaccataggtatatatccaagagaaatgaaaatatgtgtccacacaaaaacctgtacacaactgttcataatagcattatttagaataatcaaaaaaatggggccgggcatggtggctcacacctgtaatcctagcactttgggaggccgagaccagcagatcacttgaggtcaggagttcgagaccagcctggctaacgtggtgaaaccctatctctactaaaaatacaaaaattagccaggtgtggtggcatgcgcctgtagtcccagctactcrggagactgaggcaggaggatcgcttgagcctgggaggcagaggctgtagtgagctgagaacacaccattgcactccaacctgggcaacaggagagaaaccctgtctcaaaaaaaaatttttttaataaaaaataaaaataatggaaacaacccaaatgcttatggacataacaaatagaatgtaaaacaaaatgttgtatgtacatacaatggaatgttatttgccaataaaaaagaatgaaatattgatacatgctacaacatagataaactttgaaaatatattct

SEQ ID NO: 735123 - DNA, 603 bp, Homo sapiens
tcctcctcattccacaggacattgcagccacactggcctctctaccctttcatccctccaggctcattctcatctctgcatcttctgcctagaatgctgttacccaagttatgtaggtatcagctcagaagttaccttctttgagaggtgttttttgatcaacttttcttaaaarcaaacaaaaacaaacaaaaagaacttccataattattctaacaattatttatttgcagtgctaataactatgtgaaattatattattcatttatttgtgtatttttattatcatatccttcccctggactggaaactcttaaaagcaggaagccctgtcttactgctgtatctccattccctaggatggtgcacggatgtataatcacaaattactcagtgcaagtgaagaaaaactacagaagttatgtgagtttctatggcattgaaaaatagaactcaaccttctgtgaatggacccaaagaatcctgtttctttttctcagtataagactttagccaatagctacatttggttaagatttaataatctagcgctcaattggacatttctgtcttatttcctttggaaaaatttaaccaagtgac

SEQ ID NO: 735124 - DNA, 600 bp, Homo sapiens
tagaaatactctcccttggctccttcaactttagccattttatcagagttataggtgaaatgttgaaaatctgtatttgggcagagtgcagtggctcacacctataatcctaacactttgggaagccaaggagagaggatcgcttgagcccaggagttctagaccaatctgggcaacatatggagaccctgtctccacaaaaaaataaaaataaaatttagccacgcatgtcggtatgtgcctgtggccctagatacttggaaggctgaagtggaaggatcgcttgagccagggagtttgaggctgcagtgagccatcattgcaccacygcactctagcctgggcaagaataataataataagtaaaaaatttataaatgttgtaaatgaaaaaccgtgtgtgtgtgtgagagagagagagactttaccattccttttgcaagtccagcataggtagactaggtagtcaggcacctattgcttcattctttttttcttttttcgttcttttggaaccacagccaacactgaaagagtcccattttaacatcccacttagtttctttcattcctgatagaaaagaggctgagagtggaatc

SEQ ID NO: 735125 - DNA, 600 bp, Homo sapiens
tagaaatactctcccttggctccttcaactttagccattttatcagagttataggtgaaatgttgaaaatctgtatttgggcagagtgcagtggctcacacctataatcctaacactttgggaagccaaggagagaggatcgcttgagcccaggagttctagaccaatctgggcaacatatggagaccctgtctccacaaaaaaataaaaataaaatttagccacgcatgtcggtatgtgcctgtggccctagatacttggaaggctgaagtggaaggatcgcttgagccagggagtttgaggctgcagtgagccatcattgcaccactgcactctagcctgggcaagaataataataataagtaaaaaatttataaatgttgtaaatgaaaaaccgtgtgtgtgtgtgwgagagagagagactttaccattccttttgcaagtccagcataggtagactaggtagtcaggcacctattgcttcattctttttttcttttttcgttcttttggaaccacagccaacactgaaagagtcccattttaacatcccacttagtttctttcattcctgatagaaaagaggctgagagtggaatc

SEQ ID NO: 735126 - DNA, 473 bp, Homo sapiens
tgtactccattctcctcatttcaaccagagtaatctttctaaaacaccgatctaaacaatggctttacacttgtccttagaacaaagtccaagcttattcgtctaactgtataaggtcttttctgatcttgaatattctatatcctcacctctgacaccttctgccttcaggtctacactggcatcgtcataatcagttcccagaatgkgtcctgtaatccttctcctagcttttacatatgctgttcctcctactggaaattttctttcctcgtgccattacatggctgacatttgttcaaccttacagtctcagttgggtgttatctgcttccaagaagactcctgaactcctaagtctaggttgggttctctcctctcccagagcacctttcctcccccttaccccagcccttataatgctgtattgcatctgtctatgccccagcaaattgcacactccagcagcaggg

SEQ ID NO: 735127 - DNA, 659 bp, Homo sapiens
ccttcaaggactggcctggagcatttgaagaaggcttaaaaaggctgaaggaaggggatctgccagtcaccatcctgttcatggaagcagcaattcttcaggaccctggagatgcagaggtgtcattctcccttcattctgccagactcagaaagggcatgtgctaacaagggacagataacacagaactctgctgggtcagcttttcatcaagtaaaggttcccagaggagttaacctagcttagtctacttgtttaaaagttacaaatargtacccgttttctaaccaaatttctaattggcagtgtttacagtgcctataaataaagattgggggcaggaaaagaaaaatcaaaattaccaacctgaaggcttatcagtagttttctttttttgagacaagtcttgctctgtcaaccaggctggtgtgaaatggcgcaatctctgctcactgcaacctccgcctcccaggttcaagcgattcccctgcctcaccatccctagtagctgagattacaggtgcctgtcaccacgcccagctaatttttgtatttctagtagagacagagtttcaccatgttggtcaggctggtctcgaactcctgacctcaagtgatccaccggccttggcctcccaaagtgctgggattacaggcat

SEQ ID NO: 735128 - DNA, 554 bp, Homo sapiens
actggttgaaattaaactgttttgaactaagaagtagatatatatatatatatatatatatatttttttttttttttttaaagagtgttcatagataaactctggcataaagtttgtaaaaaagcaattttttaaaagcaaaacgtataacctcaggtacaaaaatattgcatgcattagtattgcaaatttgcctactcaaatattamccaaagcatgcaagataacttgactgaatttaaatttacacagtgcatgattaagtctcataggttagcctgttgttccttgcctctatacaagggagcatttttatgaactttgtgttacagtttttctatttgcttttcttatcctatccttgagattgttttcatgctatcacactgaactttacagatattcacacatctggtttctacagtgttaccagtgccaaactaatcctctgaagaatctgggacatctaaacactttttcaaaaaccagttgaggcacaacagatcccaaacttaaacaaatccaagtgtctgaatgctactaaactaaatcat

SEQ ID NO: 735129 - DNA, 474 bp, Homo sapiens
ttttaactttagtgtaacattcttttatcttcattactttgccaggcctctgattttacaactcttcctcctacttatcggctctcactccccatcccctcaccctcactctgacgctttcttcccaaggaagccctggcaccccaccccttcctctgcctccctctaattcagtacagtcagatgctcccttgggccctcattctggctcccaagtatccagaggtcatgggtttgtgattcagatgactaaactcatgctacccaagtacaaygcacaagcctttttgattctgctgagtaacacgaatcatggggttctttcttatgcaattaatcaccctcaaagacaacgtggagtagttttttgtttttttgtttttttttttttttttttttttttttcttaaaaagacagtagtttttgtctaaagaacgaaatcaagcaatagttcagacattgactacatgtat

SEQ ID NO: 735130 - DNA, 501 bp, Homo sapiens
taatcttgctggtttcaagattagaaaatggcattatttgatctgaaatgtttgagaagacacgaataaagttacttgggcagacttggcttgctttctttcctttacacatacctgttattttcaaagcagaatatttttcatgaaaacacacacaatttaaagaacaagaataaaatgaagcaaggtgtcaccaccacctatgccaggmaactgaacgccgccccgaagccttctgtgccctgctctggagtccccccgctccccctgggagggcgctacgaggtcacgccaagcgcatcccttcctgcctctgtccatggctgtatctgcaacagcgagtttagttttgcaggttttgctctttatccaaaggaaacgtgttgttttctgtaacttgcttctttcactccacatgtctatttttatttatttatttattttgagacggagtttcgctctgtcacccaggctggagtgcagtggcgcaatctcggctca

SEQ ID NO: 735131 - DNA, 616 bp, Homo sapiens
acctgatgtaaacttctattgaaagtccccccaccccacaacaggccccggtgtgtgatgtgagattatttctaagacttattaatcctttgtgtctcctcttttgagaattttctgtccagaatcgttgcccttttatcttcctagtgtttttcttgattgccttctatgctgagaattggctggaaaatactaagttatttattttgtattcttcccattctggtatgtaaaaaaaagttctattttgtttaaaataatcttacaggataaaaatcttgggctgggcacagtggctcatgcctataatcccagcactttgggaggctaaggtgggcaacattgcttgagcccaggggttcgaaacmagcctaagcaatatggtgaaaccccgcctatacaaaaaatacaaaaattagccaggcatggtggcacaaggtgtggtgccagctacttgggaggctgaggcaggaggatcatctgagtcaaggaggctgaggttacagtgacccacaattgcaccactgcactccagcctgggcaacagagtgagacaccgtctagaaaaagcagaaacgtctctagtgactatacttgaatcattctcaaacttact

SEQ ID NO: 735132 - DNA, 658 bp, Homo sapiens
gtctggctgatgctaaggggcagaggggatccctgctggactctgcatcccctatgctgcacgcttccttcccatcctggcaggaccaagctgctgggtctgagttttggggctctgggaagtgggctcctgtgactgccatgcactccccatagtgggagacacacccagacatccctgggctagcctctggtgaccaaatccccctggtttgctggactttcctagtttagtgcttcaagtcccacgtcccgggaaacctgtcacttttaggaggtggattgctcaagttgtcccgattccaggttgtacagccttccccggggatgggctaggccagctgcaccctgggccctgagctctccttgctgggctcatctcaggtggcactgggaggtgacctcatttagaccctgagcagaaatagaacagcagcgccaattagcagctgctcaggagccaggggcatgtggatctgccccagcctctccgcagagggatgtttgtgrgatacagaaaattccacgtgcaatcttcttccacagagaggaagggttgtgaggatgccacttccttggggacgcacccagttttgcttcttgcttgtccacttgtcaagggtgagagcatttggggccgggaggcacagaccctcaga

SEQ ID NO: 735133 - DNA, 696 bp, Homo sapiens
aactgtgctatgcactgagctacattgaactacatgataaggcaaacaaaagtgcagcaggccaggcacagtggctcacacctataataccagtactttgggaggctgaggcgagaggatcacttgagaccaggagatcaacactagcctgggcaacatagggagaccccatctctgtgaaacttttttttttttcttttagccagtcatggtggtaaacactcttagtcctagctacttaggagactgaggcaggaggatcacttgagcccagaagttcaaggcagcagtgagctaggatcacacaactgcwctccagcctagaaaacagtgagaccctgcctcaaaaaaacaaacaaaaaaaaattgggatagtatttcaggatggctggatttgcaatgccatttgggttcctcgggaagtgttttctgctttctttgctttcagatggcctgctccgggcttagaatatctctcacaggaccttactgagtgagctgccacactcccacttggtgggttctgcctcctaagtttcctggtgttgtaccgtccataggcaccgagcctgtgccccaaagtaaaaagctgactgttctatctgtattggtttcctaaggctgctgttggcagaatgctgcagacttagcggctgaaaacaatacacatttaccctcctacaatcctggaggtca

SEQ ID NO: 735134 - DNA, 696 bp, Homo sapiens
aactgtgctatgcactgagctacattgaactacatgataaggcaaacaaaagtgcagcaggccaggcacagtggctcacacctataataccagtactttgggaggctgaggcgagaggatcacttgagaccaggagatcaacactagcctgggcaacatagggagaccccatctctgtgaaacttttttttttttcttttagccagtcatggtggtaaacactcttagtcctagctacttaggagactgaggcaggaggatcacttgagcccagaagttcaaggcagcagtgagctaggatcacacaactgctctccagcctagaaaacagtgagaccctgcctcaaaaaaacaaacaaaaaaaaattgggatagtatttcaggatggctggatttgcaatgccatttgggttcctcgggaagtgttttctgctttctttgctttcagatggcctgctccgggcttagaatatctctcacaggaccttactgagtgagctgccacactcccacttggtgggttctgcctcctaagtttcctggtgytgtaccgtccataggcaccgagcctgtgccccaaagtaaaaagctgactgttctatctgtattggtttcctaaggctgctgttggcagaatgctgcagacttagcggctgaaaacaatacacatttaccctcctacaatcctggaggtca

SEQ ID NO: 735135 - DNA, 560 bp, Homo sapiens
cctactcccttctccacctcaccctgactggcattagctggcatagcagaggtgttcataaacattcttagtccccagaaccggctttggggtaggtgttattttctcactttgcagatgagaaaattgaggctcagagcgattaggtgacctgccccagatcacacaactaatcaatcctccaatgactttccaaatgagaggctgcctccctctgtcctaccctgctcagagccaccaggttgtgcaactccaggyggtgctgtttgcacagaaaacaatgacagccttgacctttcacatctccccaccctgtcactttgtgcctcaggcccaggggcataaacatctgaggtgacctggagatggcagggtttgacttgtgctggggttcctgcaaggatatctcttctcccagggtggcagctgtgggggattcctgcctgaggtctcagggctgtcgtccagtgaagttgagagggtggtgtggtcctgactggtgtcgtccagtggggacatgggtgtgggtcccatggttgcctacagaggagttctcatgc

SEQ ID NO: 735136 - DNA, 442 bp, Homo sapiens
ttaaatatattaaatatttaaatatattaaatatttaaatatattaaattcattcagtcaacaaatatttattgaatacctactaagttctagtcatcatgctaggcactgactgttcaagaataaacatagacaagacttctgccctttcagaaaccagccaagattcttcaacccaaggcagctgtgaagtataacacatctctggctcaattttctccatatggtttggggttccatgaatgagtctgtgggaagatttcctgtacgtagaatgcatgyataaaggaataattattctatggttcgaaagagaaaaaaagtaagatcaaagtgtagaagctatgttaagaaagattccagtttaatgatttttgaaagagcagtaaaaataagaccaagatgtggaagctgtattgagaaagatccaatttaattctaa

SEQ ID NO: 735137 - DNA, 564 bp, Homo sapiens
tgtttgaaaccatgcttggctggaccaggacccatggcaagagcacctgggcaccagtgtttagccctggtctgcaggaaggaggacagcagactttaggaccccacagcacggcagtgctgaccatttcacccacttggcctccttgagaaatatggatggggacccctctggggatgggcaaggccttccaggataggctcagttttggtcccctgctttttgaggttgggttaaaattccgaccatggcagaggaagcacagctcaggttcccacacctcacttttcacagcctctgarggcagcagtgcacgtggaggagacgtctcccatgaggccaaggcctccagtgctcaccgatgccctctgcgaagttggggtagaactcgtcagtgaagaggggctcgggcagctcacggaaatacagcttcagcgtgcctgcgatggcgttcacgtccatctcgctcatcatcactgacacgtccttgttatctggaaagagcacggaaatgcagcggcctccttgaagatcctgagtgagtcacccaccatccctgccttg

SEQ ID NO: 735138 - DNA, 603 bp, Homo sapiens
gccactatgaaatcaacttttgtgaaatatctgttcaagtattttacccatttgtccatttgaagtcagcccttattgattcacagttctttatctattctggatatgagtcttttgttcaacacatgaatttcaattatcttccccaacctggagtgccctttcacctttgtactggtctcttttgatgaatagaagttcttaatttcaatgaagcccaattttaaaatattttgttttttatgcctttttgtttcctatttagaaaatctttatctattcccaactatcaaaaatgttcctacatcttcrtttgaaaatttaatcgttttacccttcatttgtatatttacaatccttttggagttaatttcataaatggggtaaaataaggggcaagattctttttccccccatatgactatctacttgatactgcaccatttattgaattggtcatttttttccccattgcactgctctagctccttttgacatgaatcagactgatcatataggtgtgggtgtttttggtctctttcttctgttccactggtcatcttgtgccaatatcacactctattaattaccatggtttaacag

SEQ ID NO: 735139 - DNA, 577 bp, Homo sapiens
ggttggcacatgctgccagctactcgggaggctgaggcatgagaatctcttgaaccagtaggtggagcctgcagtgagccgagattgcaccactgcactctagcctgggcaacagagcacagcaagactctgtctcaaaaaaaaaaaaaaagaaaaaaagggaaaaggcaattcagaatggaagaagatatctgcaattcctttattcaataaaggtcttgcattttaaatatagaaaaaaatcatcaagaaaaacaattcaataaaaaagagcaatgtatttgaataggcagcccacaaaagaagctattcagatgattaataaayacttaaaaaggtgctcaaattattaatagtcagggaaatgtaaattcagtatctctacatacctacaaaaagggctaaaattaaaaaaacaaaatcacagtacaaagttttgacaaagatacagaatagtctgaagtctcatacactgctgtaagaagttcaaatttttatatccagtttgaaaagctccttgatagtaactactgaggcttgacataggcacatcttatgacagcggtttcactgcaac

SEQ ID NO: 735140 - DNA, 607 bp, Homo sapiens
gcatttaaagtgaaacatgctaactacaatcctccttcttaaataatgataggttctgaaatatcaacttgagctctaaaccaaagatgagttgacagtttcaattgcttggagagagtataaatatcaagcacatcatcctctcatagaaaaattcccagcctttgtctttgatacaattactgtgtcagaataaagccactcaacttttccattaacatctcaaacacattatatatcatcccaattcacaagactatccctacatggtcgcaaaattctataatctgagagaatcaaagaacttgacacttagaagtcattaggagaaaaggaaaggtattctatggaargagtatatctggtcatgtaacaaggtgaagaaagacagcttggaaatagaaaagaaagagacaaaactagtagagaccagcatctctacagagacaggagaagatgggaccaaaatcccaggataatttattctccacttttccttcacaactcagttaaagacttttccttctctaagatgcctcccattaccagtccatcttactgattattaccttattatgtttttaaagtattttgctttatacagcat

SEQ ID NO: 735141 - DNA, 608 bp, Homo sapiens
atactgtgtgattccatttatacaaagtttgaaaaggacaaaatttatttgtactgatagaggtcaaaatagtggttacctttgggtggagggtaactaataaggctttagggaggctggcaatgttcacacttctagtggctcatgagttttcaatttttaaaaaagttatcagaatttatttttaagatttatgatttataacttcacaaatcataaacgtatgtatctttaagacataagcaccttttgttataaatcataaactctatctttaagacttatgcagtcttgctctgttgcccaggctggagtgcagtggcacacaaacttcttatgaaaatagtcctattttcatggataaattcttcttcttatgaaaatatgtsctattttcataagaagtttgtgaaataagataaaattagttgctctttttgccataggggtttgccataggagaactgtggataccaagtagttgcctaatactaaccctttttaatttttaactcctacaaggtttcgaattaagtttgtatgtaaaactccaacatttatatctccagtactgacttcttatgtcagtagatgttgtacgatgaaaa

SEQ ID NO: 735142 - DNA, 606 bp, Homo sapiens
caggaacaaacacagaaatgatcaactagagactagtaagatcatatatccacagaagtggcttggaatggcaaagacaacacagaaggaatgaaggtagggtgacacctctctgaatatacctaatagtccaggtctggcgtttggaatcatattaatgttttatttactaaaaaaaaaaaaatgaaataaggacaggagagggaaattctgaaatgaactacaaacagaaacaaataaacatacttgtatttcaaatgattaataatcacactgaagggggaataaataaccaaatcaactttagaatacaatcttyggatcatgtgctcttgggctgaagacgaaaagaacacaaaagaactcttagactctagttacaggtttctttcttcacagagatatggtctatcaattgaaaaaccgtttcctgctattctaggtttgagcaaataagtaaatatataatggaagtcaggtttctcacagtcagagggtaataaaacatataagaagaataaaataaactgttgaatttgactagaaatggaattagtgtgagttcatactttctatatatttagagagatatagaaatatagatgt

SEQ ID NO: 735143 - DNA, 616 bp, Homo sapiens
atcaactttagaatacaatctttggatcatgtgctcttgggctgaagacgaaaagaacacaaaagaactcttagactctagttacaggtttctttcttcacagagatatggtctatcaattgaaaaacygtttcctgctattctaggtttgagcaaataagtaaatatataatggaagtcaggtttctcacagtcagagggtaataaaacatataagaagaataaaataaactgttgaatttgactagaaatggaattagtgtgagttcatactttctatatatttagagagatatagaaatatagatgtataagtatgggatatgtgtatgatataaaaacacacatatgtaaatatataaacaacatacacaaatatatacacacacagggatgtatatgtatgtgtctatatattcatttgtttcctaattccacctgctgaaaggggctaaaagcaatttctttggaaaggacaaaaacatacttttagataatttctcagtgtcaaataagaaatcatactgaaaatcatgaactatactggaactgaaccacaaaaaatacactacatataaaaatgtgtgtgatacaacttagcatttcttaaaacaat

SEQ ID NO: 735144 - DNA, 616 bp, Homo sapiens
atcaactttagaatacaatctttggatcatgtgctcttgggctgaagacgaaaagaacacaaaagaactcttagactctagttacaggtttctttcttcacagagatatggtctatcaattgaaaaaccgtttcctgctattctaggtttgagcaaataagtaaatatataatggaagtcaggtttctcacagtcagagggtaataaaacatataagaagaataaaataaactgttgaatttgactagaaatggaattagtgtgagttcayactttctatatatttagagagatatagaaatatagatgtataagtatgggatatgtgtatgatataaaaacacacatatgtaaatatataaacaacatacacaaatatatacacacacagggatgtatatgtatgtgtctatatattcatttgtttcctaattccacctgctgaaaggggctaaaagcaatttctttggaaaggacaaaaacatacttttagataatttctcagtgtcaaataagaaatcatactgaaaatcatgaactatactggaactgaaccacaaaaaatacactacatataaaaatgtgtgtgatacaacttagcatttcttaaaacaat

SEQ ID NO: 735145 - DNA, 609 bp, Homo sapiens
tatattattttattttattccttataatccttggattgggtttcaacattcccctgaatctcaatcatcttcgttcctattcatagtctaaattctacttctaccatttcagcctggttaagaaccattgctggaraactagtgtgggtgtctgtaggtaagaagacactctggctttttgagttgccagagttcttgctctggttctttctcatctgtgtgggctcatgtcccttcaacctttgaagttgctgtcctttggatggtggggtttttgttttgttttgttttttgcttttatctccattgatgtccttgggggtttgtggcataaggtggggtccatcgactggcttcatttctagtagattttgaggagccaaggctcagctcaacactcccacactgtatactctaactctaaggggctggtatcgggtcactggctttgttctctggtccctcaaagttgggacctgctgtgttaaatgggccaaagtgttcctggtccgatggccacaacactccaacgagtggtgccagccaaagcgcttcatcaggcagtggcaatgtgattaatgcttgtttgcatgtgccagcagcagtggt

SEQ ID NO: 735146 - DNA, 609 bp, Homo sapiens
tatattattttattttattccttataatccttggattgggtttcaacattcccctgaatctcaatcatcttcgttcctattcatagtctaaattctacttctaccatttcagcctggttaagaaccattgctggagaactagtgtgggtgtctgtaggtaaraagacactctggctttttgagttgccagagttcttgctctggttctttctcatctgtgtgggctcatgtcccttcaacctttgaagttgctgtcctttggatggtggggtttttgttttgttttgttttttgcttttatctccattgatgtccttgggggtttgtggcataaggtggggtccatcgactggcttcatttctagtagattttgaggagccaaggctcagctcaacactcccacactgtatactctaactctaaggggctggtatcgggtcactggctttgttctctggtccctcaaagttgggacctgctgtgttaaatgggccaaagtgttcctggtccgatggccacaacactccaacgagtggtgccagccaaagcgcttcatcaggcagtggcaatgtgattaatgcttgtttgcatgtgccagcagcagtggt

SEQ ID NO: 735147 - DNA, 609 bp, Homo sapiens
tatattattttattttattccttataatccttggattgggtttcaacattcccctgaatctcaatcatcttcgttcctattcatagtctaaattctacttctaccatttcagcctggttaagaaccattgctggagaactagtgtgggtgtctgtaggtaagaagacactctggctttttgagttgccaragttcttgctctggttctttctcatctgtgtgggctcatgtcccttcaacctttgaagttgctgtcctttggatggtggggtttttgttttgttttgttttttgcttttatctccattgatgtccttgggggtttgtggcataaggtggggtccatcgactggcttcatttctagtagattttgaggagccaaggctcagctcaacactcccacactgtatactctaactctaaggggctggtatcgggtcactggctttgttctctggtccctcaaagttgggacctgctgtgttaaatgggccaaagtgttcctggtccgatggccacaacactccaacgagtggtgccagccaaagcgcttcatcaggcagtggcaatgtgattaatgcttgtttgcatgtgccagcagcagtggt

SEQ ID NO: 735148 - DNA, 620 bp, Homo sapiens
tgaagtttgggataggaataccttattttacaaatagccagtgcatccctttctcctcactacagcctgtctgtctcacaggtacatacataccaggatatcaggaagagggcttaccagactgcaacagagcaggaagccaggaagctcttccttaatggatggacagccagtgatctgcccaaagaatgaacrgtggacaaacaatacacctaaaggatactgatgccttatacaggaagcaaggattatgaaaaagtatgtccatttcatatgaaatatacttaacattttgtattgagctgcattaaaactgcaacaataaggaaatttattatgatttaaaagagcactcatgcaggtcaatacgtgttgctagaaacacttttccaaatgacagaaacagatttcttcctatacactaagctcatgaagggcagaatctatgtctaattcatcctcaaccccaccccagtacctaatataataccttccccaatataaccatttaatgggtatctgctgagtgactatatggataaacaagatggtggtattacaaagtgttttttaacattttgtgatataaaccatatgtaattttaacttgtatgtattct

SEQ ID NO: 735149 - DNA, 622 bp, Homo sapiens
aacacttattaattccaaaatgaactcaatttcaaatgagaaagcctataattatgataaaaacacaaaaatgggccaggtgtggtggctcatacctgtaatcccagcactttgggaggtcaaggagggcagatcacaaggtcaggagatccagaccatcctggctgacgcagtgaaaccctgtctctactaaaatacaaaaarttagccaggcatgctggcatgcgcttgtagtcccagctactcgggaggctgaggcaggagaatcacacttgaacctgggaggcggagtttgcagtgagccgagatagcgccactgcactccagcctgggcgacagagagagactctgtctcaaacaaataaacaaacacccaaacaaacccccacaaaaatggaatggaaagtcaaacgctctctggaacatggaggaatgctactttttttttatagctgatgaatttttcctttttcatcatttttatgagaacaggcacagccaagttttacacattaacttcagaggcaaagcagaaaacaggtgtgtgtgtgtgtgtgtgtatgcacatacacatacattcatgttgcatgttttccccttggccatcagacatagcttcaaa

SEQ ID NO: 735150 - DNA, 611 bp, Homo sapiens
cctttgaagatgtcagtacactgagtaagaagttgccataaaagagcttgccagagaggtgaagcagctttttaatggctaaaaaaacccttgcagacacatccttgtgtttttaatttgtcagagtttctgcagtattttctgattaatgacacatgattataacggcatagcaggcatatttttatacttggttaaatgaatagtttatttcacattcttttagagctagataagaatagggacactttcctaggaagtccaaaactattctgattgattgacatatttatgctaattttgtgggactggcccaattcggaattaytatatgttgccagcttttgttctttaatagtctgtttgctaataacattacaattcacatgtggtagttaaaatgcaattcactacagtttcattcttttcatgtacatggaacaatatgtgcctgaataattaatttgtgcaccaagtcatgtcaaaccaaattaatgttttaagacattcctgagctcaatctacacaaccgcgggctgccatagggttcagaagagaaagggttgcttaggggaaaaaaatgcagctataactataatataacattaatg

SEQ ID NO: 735151 - DNA, 611 bp, Homo sapiens
cctttgaagatgtcagtacactgagtaagaagttgccataaaagagcttgccagagaggtgaagcagctttttaatggctaaaaaaacccttgcagacacatccttgtgtttttaatttgtcagagtttctgcagtattttctgattaatgacacatgattataacggcatagcaggcatatttttatacttggttaaatgaatagtttatttcacattcttttagagctagataagaatagggacactttcctaggaagtccaaaactattctgattgattgacatatttatgctaattttgtgggactggcccaattcggaattactatatgttgccagcttttgttytttaatagtctgtttgctaataacattacaattcacatgtggtagttaaaatgcaattcactacagtttcattcttttcatgtacatggaacaatatgtgcctgaataattaatttgtgcaccaagtcatgtcaaaccaaattaatgttttaagacattcctgagctcaatctacacaaccgcgggctgccatagggttcagaagagaaagggttgcttaggggaaaaaaatgcagctataactataatataacattaatg

SEQ ID NO: 735152 - DNA, 495 bp, Homo sapiens
aaaaggagttggtttactttctatatgaaaaaaatacatttacttaacaaataaattttattttctgctaagaagtgtgcaaaaatgaaaaacatgcaaataatagatttatatctgctatcccaaaccactctacagcagggccaccatgtgtattccatagataaactatacaaccctagatggtggcatttacataaactatgatgtgaagacacctccagggtatattcagtacacaacttgtacaacaaaacactgtcttcctactctccagaagaatctcattggatctgatgaaagcagctcttcaagtatttatatttgtctygtcttctctcctcagaaacacctcttcaccacctgcttcatttatgttctgtcaccactattttttcaaaaccattttgttacttatgcacagacagttatttctgtgaactgaggagcacgttgtagagcaatgccgaagatgtaagcaaacactgagaatag

SEQ ID NO: 735153 - DNA, 503 bp, Homo sapiens
ttaaaattttatgtattacttgcagtatctctatctctttgcttcatgattgtaacacatgctcttgtgtggtagtttaacatatatttactgaagatgcacattaatattgataaatggtagtattatttcagtcttacaatatgctgaaccttttcctgcaccttatcttattattttaaagaactgtatataagaaatactactatactaattttactgacaataatataaaaacttagaaaaaatatgcgtttgcaaatcttacaaagctattaagtaaatagaaacaaatgtaaagacttatcccagaatctgaatgccgctaacattkgttaactgatacttaattccagtatagggatcttataatctaaataggactacagaagtgaacaagacatcaatataataaagattaccaaatagggagtgtattatgcatatatgaaaataatttgagtttaataccttaataaagtaatatgataaaattcacaact

SEQ ID NO: 735154 - DNA, 615 bp, Homo sapiens
catttaaataaatattttgaaaagagaagaataaagttctttaacaatgctgttttaaaggaataaataaaatttgtggagataaaaatacagggctgggtgcagtggctcacacctgtaatcccagcactataggaggccaaggcaggcggatcacttgaggtcaggagttcgagaccagcttggtccacatggtraaaccccatctctactaaaaacacaaaaagtagcctggtgtggtggcagccgcctgtaatctcagctacttgggaggctgaggcagaagaatcgtttgaacccaagaggcagagattacacggagccgagatcacgccattgcattccaagcctgagcaaagaagactctgtctaaaaaaaaaaaagaaaagaaaagaaaagaaaaaaattacggtagcttaaatgaaactacagtgactgggttcaacagccaattaggcactattggcgagaaatagttgaagacagttatcatgaggtcaatcaaagcatcaagatgacaggcagaattatgaaattggagaatataaaacataatttgttcatgatatcatgttagaaaaatacatttttaattcagacataaaacttcagaaa

SEQ ID NO: 735155 - DNA, 570 bp, Homo sapiens
gaatataaaacataatttgttcatgatatcatgttagaaaaatacatttttaattcagacataaaacttcagaaataagttccaaagacgttaaaattaacaacttatcttcatcaaaatcttcagtaaaaaagtaaamagtgaagtcccataattgggagagttatttatcaaacatataatttacaaaaagatttagagcctggaatttttaagtcttagaaaatagtaagaaaatgtcaatattccattagaaaaaaaaaagaatggaagacttgaaggaaaatctcatgaagagatttgcaacctgactcgtttttaaggaactgcaaattaaatcttcaataaaaaaacttttaccaggactgaatttctaaaaattctaaagatggacaattttaggtgttggcaaggaagtagtgttcttggaacttttgtatacttcttgtggttaaaaaaagatagtcactttggaaatgcacccagaaaaataactgggattgtctgttgtattactccattctcacaatgttatagagaactacctgagactgggtgatttatgaagga

SEQ ID NO: 735156 - DNA, 620 bp, Homo sapiens
gcagtcttgcttcagggtatatgtccaaagaaaatagaaccagtatgttgaagagatatcttcacacttatgttcattacagtgttattctaatagccaagaggtagaaacaatctaaatgccccttgagggatgaaaggatgaagaaaatttgacatataagtaaaactcacattcccagtggaatactattcaccttaaaaaagaaggagctcctgttacaacaacagggatgaagcttgagggcattatgctaagtgaaataagccagacaaagaaagacacatactgtgtaatctcacttatgtgtaaaatcaaaagcaagttgaacttacaggagtagagtagaatagtggtggctaggggctggtgggargggtaattggagagatattggacaaaaggtacaaacgtttacttatatataaaacgaataacttctggagatataataaatagtagggtaattatagtcactaacattgcagtgcatatttgaaatttgataagagcagattttaagagtcctcacttccccacatacagatggcaaccgtaggtggtgatggatttgttaattaatatgatggtaataatcaatatgcaatgcatacatatat

SEQ ID NO: 735157 - DNA, 620 bp, Homo sapiens
gcagtcttgcttcagggtatatgtccaaagaaaatagaaccagtatgttgaagagatatcttcacacttatgttcattacagtgttattctaatagccaagaggtagaaacaatctaaatgccccttgagggatgaaaggatgaagaaaatttgacatataagtaaaactcacattcccagtggaatactattcaccttaaaaaagaaggagctcctgttacaacaacagggatgaagcttgagggcattatgctaagtgaaataagccagacaaagaaagacacatactgtgtaatctcacttatgtgtaaaatcaaaagcaagttgaacttacaggagtagagtagaatagtggtggctaggggctggtgggaagggtaattggagagatrttggacaaaaggtacaaacgtttacttatatataaaacgaataacttctggagatataataaatagtagggtaattatagtcactaacattgcagtgcatatttgaaatttgataagagcagattttaagagtcctcacttccccacatacagatggcaaccgtaggtggtgatggatttgttaattaatatgatggtaataatcaatatgcaatgcatacatatat

SEQ ID NO: 735158 - DNA, 629 bp, Homo sapiens
tcaacagagaacagtcctcgcaaatgtgtgagatggtatgtggagtattacacacgcagagtactggtttaggccaagatgaggaaggcttctcactctgaaatcaatatttctttttttgagaggtgatggtaaatcaactttagtgagtggtctctcttgtggtacataaataacccgtgggctgccagatacagtttttgatgttttataacaatactagagtacctcatgtttctgcatcatctattactttgtcaatatactgaaattcacaaaagggagctgttactgctaacttttgaatttcctgtgatcttaaaggttaccatcacataggtttttagatttagcaatttaaaatatttttcaatgacytaacataatgcacttaatttggttgtttgctatgaatttctagactgttacattctgcaggtgaatgaaaaaggaattgattattttagcgttgttgtaagtgttaaatttattaaaaatagtaactcacatcagaggactgattcagttatactcacagttctttcatatgaatatctacattaaaaagttatattctatatatattagacattttttgcaaaagaaaagctggatataacatcaagttg

SEQ ID NO: 735159 - DNA, 629 bp, Homo sapiens
tcaacagagaacagtcctcgcaaatgtgtgagatggtatgtggagtattacacacgcagagtactggtttaggccaagatgaggaaggcttctcactctgaaatcaatatttctttttttgagaggtgatggtaaatcaactttagtgagtggtctctcttgtggtacataaataacccgtgggctgccagatacagtttttgatgttttataacaatactagagtacctcatgtttctgcatcatctattactttgtcaatatactgaaattcacaaaagggagctgttactgctaacttttgaatttcctgtgatcttaaaggttaccatcacataggtttttagatttagcaatttaaaatatttttcaatgacctaacataatgcacttaatttggttgtttgctatgaatttctagactgttacattctkcaggtgaatgaaaaaggaattgattattttagcgttgttgtaagtgttaaatttattaaaaatagtaactcacatcagaggactgattcagttatactcacagttctttcatatgaatatctacattaaaaagttatattctatatatattagacattttttgcaaaagaaaagctggatataacatcaagttg

SEQ ID NO: 735160 - DNA, 627 bp, Homo sapiens
acgttgaaggggtgggaagttatgttcaactcccttgtgagcagagtatttttgtgtgtgtatattttctaaaattattctccacagcagacttgtctaccatctttcatttattttttaatatattatatccatatggactcatggatacttatttcttaactcagggtatagtcaaatactacattacgtaatgttttgctcaaagtatttcaaatctggacattaggagcactatcatttgacccttgtgttccttttacacattcctatcattttacatattttttaacccttcttatttcctgcactataagatactgcaggatccacttgtatawgcccagcgccagtcctggaatcaaccatttctccaaggaactctgattcctttcatgggagagcagcattataaatcactattccatcactaggcattcttactgctattggagtattgttccttgtgctctttcaccagtaccatgtggtcttgtataatgctactttgaataacgtaactttacagtaggtcttgaatttagggagtgaagttctttcaactgctgtatttcagtaatgtttaagctactgtaggtcttttgcctctccatattaagtttagga

SEQ ID NO: 735161 - DNA, 664 bp, Homo sapiens
tgcatctttagaaaatcataagtagaaaacaatcagtgtataaaggaaatggagaatggatacttagaattaggagggagtaaaacatttactcattcaacaaatatttattgaatgcttttcacatgtaaggtactkatttgtgttaaaattacagttgtaaacactttgagtgaagtctctcatgagattatattctagttgaagaggggtagataggaggacaggagagtggaagcagataattacaagcaaacaaaccaaagaataagatcttctcatactacagcgatttcaatcataaaaaaaaaatagaaagaaaaatagcagaggaatgttctgataaagaaaatgaaaacatttcaagtaaaagaaagtaattgtcatttatgacagctgcattagataaaacattaggtcttacaaataggttttttggatataaggaaatggattttgttgatgaccttaccaaaaacactagaaaaagttcctttactccttcttctggcattataacccttttccaaatggaaattgtcctgaccgagcagcaatcggtggacacttcacccagatctggtccaaatattaataccatatcaccctggctgagtaatggatttggagatgggatccattcaaaattgtggcaaatagaatc

SEQ ID NO: 735162 - DNA, 631 bp, Homo sapiens
taaaaactgacaacaaattaggaatatagggaacattctcaacccaacaaagacattgttaaaaaaacctccagtgcaatacattaatacaaagaagaaaaacagcacaatgttgggaaacaaaatagtgaaactgttctatactcaggtaatacgtacgtagaaaattatatttttaaaacatcttaaactagtaagtgaatttagaaaggttgtagaatattaggtaaatattttgaataattgtattttatatactgacagcaaacaattggagaatgtaatttagataaacaactttagttgggcacagtggcttatgcctataattccagcactttgggaagctaaagcaggaggatcttttgaggccacaatttcaagaccagcctgggcaacatagcaagaccctatytaaaaaataaaaaaagaacaattttactttttacttacaatagtaaaacattctggggaataaatttagcaatagcacattctatgctaaaaatacaaaatgttgccattgcacaaaaaaaaaaaaaaaaaaaaaaaataagtaaagacccaaacaaatgtactctgttcatggatcacaagactcaatgtttttagaagccaattttccccaaac

SEQ ID NO: 735163 - DNA, 550 bp, Homo sapiens
aaagtcaggaaacaacaggtgctggagaggatgtggacaaataggaacacttttccactgttggtgggactgtaaactagttcaaccattgtggaagacagtgttgcgattcctcaaggatctagaactagaaataccatttgacccagccatcccattactggggatatacccaaaagactataaatcatgctgctataaagacacatgcacatgcatgtttactgcggcactattcacaatagcaaagacttggaaccaacccaaatgtccaacaataatagactggattaagaaaatgtggcacatatacaccatggaatactatgcagccataaaaaaggatgagttcatgtcctttgtagkgacattgatgaagctggaaaccatcattgtcagcaaactattgcaaggacaaaaaaccaaacactgggtgttctcactcataggtgggaattgaacaatgagagcacgtggacacaggaaggggaacatcacacactggggcctgtcatggggcggggggaagggggaggaatagcattaggag

SEQ ID NO: 735164 - DNA, 608 bp, Homo sapiens
atctagggtgtttgagtaaaattttaattgttctgactcagagttaacataattaaatctttacaagagtgccagttgtggctgaagcctgtaaaccccacaatttgggacactgaggcaggaggatcacttgaggccaggagtttgaaccagcctgagtaggwcccagcctgagaccacatctctacaaaaatcttaaaaattagccaggtgtggtggcatatgcctgtagtcctagcgactccggatgctaaggcaggaggatcactgagtccaggaggcagaggctgcagtgaaccatgattatgccactgcactctagcctaggtgacagagcgagactctgtttaaaaaaaaagaaagataaaaaggaaaaagaaaaatattttacaaaattgactagtaaataaaatgttgctagaaaattattgtattgaccttaattgttctttttgtgattattttattggaaaaactaaacttgcaaaatatttttaaacttacttgacgttgtaccaaacatattggttttgtaaatagaagataattcccaatcaaactttcctgagggttttttgattgactatgttatagaaatatttgattat

SEQ ID NO: 735165 - DNA, 608 bp, Homo sapiens
atctagggtgtttgagtaaaattttaattgttctgactcagagttaacataattaaatctttacaagagtgccagttgtggctgaagcctgtaaaccccacaatttgggacactgaggcaggaggatcacttgaggccaggagtttgaaccagcctgagtaggacccagcctgagaccacatctctacaaaaatyttaaaaattagccaggtgtggtggcatatgcctgtagtcctagcgactccggatgctaaggcaggaggatcactgagtccaggaggcagaggctgcagtgaaccatgattatgccactgcactctagcctaggtgacagagcgagactctgtttaaaaaaaaagaaagataaaaaggaaaaagaaaaatattttacaaaattgactagtaaataaaatgttgctagaaaattattgtattgaccttaattgttctttttgtgattattttattggaaaaactaaacttgcaaaatatttttaaacttacttgacgttgtaccaaacatattggttttgtaaatagaagataattcccaatcaaactttcctgagggttttttgattgactatgttatagaaatatttgattat

SEQ ID NO: 735166 - DNA, 568 bp, Homo sapiens
tgtagttaatatattgcatgcaaagtttgtgtgcaatgtcacacaagggctgttgagatacccacgtatattttgtctcttcaaaagtgaaaacaaactatgcttgggaagctgttgaaataagtactgaatagaacatattcactaaacctataatagcaaaatattttccagttattgataggaaccaacaacttcagtaatattgatatggaggtcttaatcaggggcatcagggtatttaggctgtggtaatcaactttcccwtgccaattattttttatcaggtttaaacactgaacaaattggactatttaaagggaaggcagtaggaacaatagttgtttccttcagtaggtgttatatgatggttcttaattactgtagaccttgttttaatctaagttgggctgtattaactattgtaattagaaggacaggtccaaggggctccattttaccaagctgattgtaaatgccagataattaatattaatttattactaattggttcaaaatgtccgtatcaggtgctataggtcaatgggcactctgaccacaaggaatt

SEQ ID NO: 735167 - DNA, 622 bp, Homo sapiens
ataaagacttcctctgggtcaatacctagtagggggattgctggatcaaatggtggatctacttttagttctttaaagtatcttcatactgttttccatagttattgtactaatttacattcctaccagaagtgtaaaagtgttcccttttcatcacctcacaacatctattttttttttattttaaaattatggccattcttgcatgagtaaggtgatattgcattgtggttttgatttgaatttccctgataattagtggtgttgagcatttttttcatatgtttgttggccatttgtctatttctttttgagaattgtctattcatgtccttagcccactttttgatgtgattattatttttttttcttgctgatttgtttaagttacttgtggcttctggatactagtcctttgtcaaaygcatagtttgcaatgattttctcccattctgtgggatgtctgtttactctgctgattatttcttttgctgttcagaagctttttagctttattaagtataatctatttatctttgtttttgtttttgttgaatttgcttttggtttattggtcgtgaaatctttgcctaagcaaatgtctagaatttttatggtttca

SEQ ID NO: 735168 - DNA, 501 bp, Homo sapiens
cagccgcctctgcgtgaattactctttctctattacaattcccctgtcttgatgaatcagctctgtctaggcagcaggcaaggtgaaccccgtgggcggttacagtaaggttaaatctttctcctgtgatctggattttcaggttccccagtgaggatgtgtgctcgaggtggactttcccccctcacactttggctactcagttttttggccgtcttatggagtttgcagtgacaakctgcctctttcaaagggtctgtgaattctttcagttttcctggtatgttcctgtggtagttcttcagcaaatgtttacaaagggagtctctacacgctgttctgtctatccgagtgggaactgcaagttagtactgcctcctatctgcctttttttcctgtaagttattttttgagtaaatttaggtaatttatatttttctaaaaaatctgttttatccagattttaaggctaatatgaatatgttttagcgaaggatttta

SEQ ID NO: 735169 - DNA, 478 bp, Homo sapiens
tcactacgttggccaggctggtctcaaactcctgacctcaggtgatctgcccactagggcttcccaaaatgctgggattacaggtgtgagccaccacacctggcccaccaatctaatttggtgtctatatatttgcctattctgtatatatcagataaatgaaactatagactatgtgatacttttgtgactgacttttcacttagcataaatgttttcaaggttcatstattttgaagaatttgtcagtacttcatttatttttgtggccaaataatattagattgtatgaatttaccacagtttatcaatttatctgctgataaatatttaggttctttctacttttctctatcactactatgctaaaaatgtttgtatagaagtttcttcatgggcatatgtttttattttggggggggtacatacctaggagttaaattgctaggacaaatggtagctctatatttaatcattt

SEQ ID NO: 735170 - DNA, 623 bp, Homo sapiens
ataaaagatggaaaaataggagatttcataaagagatctttgtattaagtatttttgataattttagaacctattaatagtttatacatgtatatacatgcctatatatgtatatgtaattgcatatttatcttgtatatgacatatttcatatataacatctcattatatatcacatttaagatatgtaacaatcatatatgtaacatatgtttttaagaaaaaagtagagacacaaccctaatttttatgtgagtttttacatcttrcatgtaaaatttaaaatttagcaggttaaaatttacattatcttagtttatttttctatcaatgtttagaatcatctttattcctagaggaaatctttaaatgtgtttctgaagactctcataataagactcaagccatatatcttttcactagggagttatagaatattcattcatacaatcccttaactgttcaggaatatatattaagagataatgaatcagtaatacacctattttcattcctttaaataaatgggtttatatatgaagtaagaaagttatctgtgtgaagtactgagtaattcaaaaattttgacaagtaaactactgtagcattaaaaacacaaatac

SEQ ID NO: 735171 - DNA, 626 bp, Homo sapiens
tgttagtttgataggttttcattatgggtgattagacatttttctcttgcccttgttaggatacactatttatctttggctttaggcagtgtgactatcatgtgtcatggagaaggcctttgcactgcatattcctgaagattgctgagactcctctatctgaatttctaaatcttttgcaaacttgggaagctttcatctatcattttattaaataggttttcttttttttctttttttttttctgagacagagccttgctttgttgccaggctggagtgcagtggtacactctcagctcactgtaacctccacctcctggggttcaagttattctcctgcstcagcctcctgagtagcagggactacaggcatgcagcatctcacacccaggtaatttttgtatttttagagatggggtttcaccatgctgaacagaatgatcttgatctcttgacctcgtgatcggcttgccttgacctcccaaaatgctggaattacaggcatgagccaccatgtccagccttaaataggttttctaatccttcctttgtctcttcattctcagtgatcccaataattgtaatattaaattactttatgttgttctaaatgtcagaaaggct

SEQ ID NO: 735172 - DNA, 583 bp, Homo sapiens
ccacacacttcctctcggcagaagtgttctgttggccaggcaaagtggctcatgcctgcaatcccaacagtttgggaggccaaggcgggaggattgcttaaagccaggagctggagaccagcctgggcaacatagcaacaccccatctctaaaagaaaaaaaaaaaattagctgttcatggtggtacagcagccgtagtcccagctactctaaggccagaagatcacttgagcgcaggaattcaaggctacagtgagctatgattgtgccactgcattctagccagggtaacagagtgagaaaaagaaaagaaaagaagaaagaaagagttgtaygtttcctgccaagagtcaagagcaaattttacctgcctggctacctttttaggggaaatcccatggaccaagttaccccacaggctgacttcatgaggacaaatcagtcttggtgactaagcacccctttcctgagaactctgtgatgcacaccaggagtgcctcaccctctgggacggtgtgaagatcggcaacctgatttcatcacattcatactggctgacgaaaccccgctcccatgccaggtc

SEQ ID NO: 735173 - DNA, 583 bp, Homo sapiens
ccacacacttcctctcggcagaagtgttctgttggccaggcaaagtggctcatgcctgcaatcccaacagtttgggaggccaaggcgggaggattgcttaaagccaggagctggagaccagcctgggcaacatagcaacaccccatctctaaaagaaaaaaaaaaaattagctgttcatggtggtacagcagccgtagtcccagctactctaaggccagaagatcacttgagcgcaggaattcaaggctacagtgagctatgattgtgccactgcattctagccagggtaacagagtgagaaaaagaaaagaaaagaagaaagaaagagttgtacgtttcctgccaagagtcaagagcaaattttacctgcctggctacctttttaggggaaatcccayggaccaagttaccccacaggctgacttcatgaggacaaatcagtcttggtgactaagcacccctttcctgagaactctgtgatgcacaccaggagtgcctcaccctctgggacggtgtgaagatcggcaacctgatttcatcacattcatactggctgacgaaaccccgctcccatgccaggtc

SEQ ID NO: 735174 - DNA, 666 bp, Homo sapiens
ctcacattggccctcattaaatgaagctgagatgccagagctctcactgcagatgatggacgaaaggatcaacgaagtggtggctgaattgcagttcctatgccaaaggaggtctgtttactacagcagactaacacaacctcagctatgtggtttgcaatttatttctgatctgccaaacgtgttctttccaatactgttgtttgtttcctgggactgccataacaaaytaccacaaacttaatgacttaaaacaacagaaatttattctctcacagttctagaggccagtggtctgaagtcaaggggtcagtaggctgcctctggaggctctagggaagagtccttcctctcctggtggctgccggctgtctttggcatttcttggcttgtagacacatcactccaatctctgtcctctcctgtatgtattcctctctcttctcttataaggaaatttatcattggatttagggcctaccctaatccaagatgatcgtatcttgagatcctttatttaattatatctgccaagacctttattccaaataagtccacagttctaggttccaggtgggcatatcttttctttggtggggtgggggcaggtgcatcatttaacccactacacgtgcccatcacaaatgaggatcagaagctgtttgc

SEQ ID NO: 735175 - DNA, 580 bp, Homo sapiens
aattttgagagagaatatccttttaatactgaagtgtgaaacagccaccaagggaaatgggaaagggaatttataagaaactgaaaatctaaaatctgcaatcaaaccaattggcataatgatgacattttctctcttctttgtctgaatgcaagacacattcaatcagtttaatatcactttaaatttgtaattctaaaaatggcttcagaggagaacttrgcggctaccataagtttactaaggacaagtcagaactagctaattttatatccactttttatactattcattcactcattagtttcctgcaaccaatacagactgagaatctaccacttacatagtaacgtaacctgtcagccactgggaatacaaaatgagtaaggttaaaaagacagggtctctgaagaaaagcagagatttcagcaccaaataaaaccagtcagctatatacagatatgaatgctacagacacagggaatcctgatcacaacagggcatctgaccagtttcttaccgtggacagggtaagaaagtgtgattaactatgattcttaactggctgaacaataggatc

SEQ ID NO: 735176 - DNA, 630 bp, Homo sapiens
ggtatttaccaaaaaaagctgaaaacttatgtctgtcccaaaacctgcacacagatgtttataccagcttcattcataattgccaaaacttggaagcaatccgggtgtctgtcagtagcgaatggataaataaaccatggtacatccagacaacagaatattactcagcactaaaaagaaatgacttaccaagccataaaacaacatggagaaactttaaacgcatgtgactaactgaaagaagcccatctgaacaggctccatatggtatgatttcaactctacgacatactggaaacggcaaaactgtggagagagtaaagaggtcagtgattgtcaggagttggggtagggagggrtgaatatgcagagcacagtatttttagggcagtgaaactcttctgtatgttataatgatgaatgcatgtcattatatatttgtccaaactcatagaatgtataacacccagagtgaacctcatgtaaactatggagtccggtgataatgatgaaccaatgtaggttcactgacacaaatggacccctctgatggggatgctaatgggggaggcagtgcatgtgtagggtggggtgtatacgggaaatctctgtaccttctgctctgttttg

SEQ ID NO: 735177 - DNA, 653 bp, Homo sapiens
gttttatgggtattgggagtgtgggaatgtgataacctaaacaacctttgctctgaaattccatttttccctctttccctgaagtgtactgacctgtactacagagttaatttcttttgtatttttttaagaaaatattaaaaatcaatggtctcaaaaaaaaaagattttcttcttytttttttctagaagttttatggttttacatttaactccataaaccattttgaattcattttggtatatggtatgagacttgggttgatatccatttttttgccgacgcatgtctaattgctccagtactatttgctgaaagatatctttcctccactcaattgtttctgcacctttgtccaaaatcatgtgtaacatgactgggcatatttactcaggtctgtgggttttccattctgtttcactgatctatgtgtctatcactgtatccataccacagccttgattactgtagctatgtagtaatcttgaaattgggcagactcctcccatcttatcgttctttttcaaaattatttgagctattctagttcctttgcctttatatatacatttcagaataatctcatttacatctaatgtcacaagtaaaatcaaatcaaaattaaaaaatttattttatttattttgaaatt

SEQ ID NO: 735178 - DNA, 624 bp, Homo sapiens
atttttttttcaagttgtcccaatattcaaacataggatttaatataaaaaataaaaccttagagtgtttcttggctctggaaggcsccacccttcaggggacctagagggaagaggtctgaggataggccagtgagctctcagggtcccttcctgtttaacatctctggaagtgtcccagctcgtctcagctgcacaaagagcaaatgttctatccacatttgaactacaaggtttaagcagcttgccagggccaaggtggtgtgacaaggtctcagcatgtaagactcacaagtggggcacaattctgagcaatggggtctggatccttgatgagcctccccaggtggactggctgaacctcatggggcctcatcaatgcattcaatgcagggtctctggagaagcatggattctgctcactgagcctgtttctctgacctgggacaggccttgacacctaggcctctcactctttgcacatcctggggaaggaaattaggcaggagaaggcccctcttcgagggcttccttacctccctcttgagtggggccacgtatgcccaggagttggtggcagggtcgtagcgctccacagcattcaggtcattgtggtagtcacgg

SEQ ID NO: 735179 - DNA, 560 bp, Homo sapiens
ggccagcaaggcctgttccttccctgggatcccatgtctggttgttacaccaggcctgagtaccccaaagtcgtaagataaaagagaggcacctccctaaaacatcatttttccataatgaacataattttaaacatcttcaaattggaataaaccaaggtattatataggatgcacgtgatttttttttcaagttgtcccaatattcaaacataggatttaatataaaaaataaaaccttagagtgtttcttggctctggaaggcgccacccttcaggggacctagagggaagakgtctgaggataggccagtgagctctcagggtcccttcctgtttaacatctctggaagtgtcccagctcgtctcagctgcacaaagagcaaatgttctatccacatttgaactacaaggtttaagcagcttgccagggccaaggtggtgtgacaaggtctcagcatgtaagactcacaagtggggcacaattctgagcaatggggtctggatccttgatgagcctccccaggtggactggctgaacctcatggggcctcatcaat

SEQ ID NO: 735180 - DNA, 678 bp, Homo sapiens
gcacaaaggatcctgagcacaggctgcagtgcctctgagtgcactcggtcatctctggtttagcgggcacccaggcctaaccccagcagagctaatgcccaccagcaggacagagtccatttgggttcactgagaacaagatgctttccttcttggaagggctggcagaaaaggccgggtggtggtggcaagcccactctctgaagatcttacaaagacgggtggggaaagatggcctgctgcagggctgctcccacgcttgccctgtaagtcggcaagaccctcagragccaggccataggctgggcccaggcccctcagcaagcaagacatgccgtaggcttctccctcgtagagcattagttctgtgattcaaacccactgtgagttcttacatcttcaagttggctcatggggtccatacctgtccatgttctcccccaaatccaggcagaaaagcttctctgcctgccacacccttcagaccccacaccagcccgaccctcctgctgccccgcctggacacctctcctctggtttctgtccccatcctcagatctctcttgtgtccacactagctccctcgggaagctcactgaacactgacaacaccttggaccctccagcagggctctccccatcaatgctagacttgcaaatccaactgcccaatagatg

SEQ ID NO: 735181 - DNA, 694 bp, Homo sapiens
gagggaggagagtagcttgaacccaggaggcagaggttacagtgagctgagatctcacctctgcattccagcctaggcaacagagcaagactccatctttccaagaaaagacagcaatttattaagcacctagacccaaacaacttaagcatttatgtcctaggaacttactagccatttgagaaaatacacacaagttgaaaatactattaatatattaaaacaaaataacatttttatttctttgccaaataaccatctcactcacttatggcgcctgttaggcactgcacctctcaaaccttggaatcagactaaacagcaccacctttatttcttctacaaactgatttttgcctgtacttagcaactgctaaaaacccagtttcacaaaaatatgacattatagaaagggatytggcaccatctaatgttgaaacagaactaccaggaactaggagttccagggtatctgacaaatgtacctgtgtttctcttggaaatttaaaatacctcactgtgcccaccgtgtgccacagtgtctcagggcatcagcacagtgtggaaccttattgggaagttcctctattacattgtaagaatacaccctaagttattcaacaggattcctattagtaaataccaagtaatttataattgtcactttcaaacaatgttgcaataaaagtccttc

SEQ ID NO: 735182 - DNA, 666 bp, Homo sapiens
  misc_feature 1, 2, 3, 4, 5, 6, 7, 8, 9, 10, 11, 12, 13, 14, 15, 16, 17,18, 19, 20, 21, 22, 23, 24, 25, 26, 27, 28, 29, 30, 31,32, 33: n = A,T,C or G
nnnnnnnnnnnnnnnnnnnnnnnnnnnnnnnnntgtcttatttatgacaattgtcatagtacaaatactagacagtagttgcatttaaatgaaagaagggttcagaattgaagcattgtaagatcctagtatgattcagcaagagagtaactgtgttttttaactatattttatcttatttatttgatttgattgtgattgattagagacagcgttcaccctgtcacccaggctggagtgcagtggcattattttggctccctgcagcctcgacctcctggactcaagtgatcctcctgcctcaacctcccaaagtgttgggattacaggcatgagtcactgcatccagcctatatttctaactttagacttcaacttatatagcttaaaataattttggtaaatttttaaaaaataaaatacaaaaaaaagaaaaataataattggggtagtcacacacamaaaatagacataaagcatagattttaaacatatagtgagaaaataatgaaacgagaaaaaacattaaccctctggaaggcatgagaggaaaggaggaaaagtgagaaagataactgtgaagtaaataagagtaggaagaaaatccaaatgtattagtagtcatactaaatgcaaataggctaaattctccaataaaaggacaat

SEQ ID NO: 735183 - DNA, 472 bp, Homo sapiens
ttccatattattagtacttattttatcattttatttcatgtgtcctatttactgaatttaatatttgaataatagtttttcttgtaagatttcttttggatgatacgtgttttgttctgctaaattgaaatttgtactttgtactttttctttgttcatagtctttaactgtagcgtcataccccacatytctttaccactagtgagttaagattatcagcaactgtattgtcttcctaacattataaaatattttaaaaaggtttcatgtttgtttggctcctcaactcctcattttaccaactggaagcaaacacactccaatatacacttttaattcattacactgaacctgagaaaacaaaaagtttaagtatacttttaaatgaaactacaaattagaagagtaaaccagggtaaatgattttcaaatcagtaaaagaaggtgaactcaatacaaaatgcctctttc

SEQ ID NO: 735184 - DNA, 472 bp, Homo sapiens
ttccatattattagtacttattttatcattttatttcatgtgtcctatttactgaatttaatatttgaataatagtttttcttgtaagatttcttttggatgatacgtgttttgttctgctaaattgaaatttgtactttgtactttttctttgttcatagtctttaactgtagcgtcataccccacatctytttaccactagtgagttaagattatcagcaactgtattgtcttcctaacattataaaatattttaaaaaggtttcatgtttgtttggctcctcaactcctcattttaccaactggaagcaaacacactccaatatacacttttaattcattacactgaacctgagaaaacaaaaagtttaagtatacttttaaatgaaactacaaattagaagagtaaaccagggtaaatgattttcaaatcagtaaaagaaggtgaactcaatacaaaatgcctctttc

SEQ ID NO: 735185 - DNA, 569 bp, Homo sapiens
aaataaaaacatatgtccgccctaaaacctgtacacaaatgtacatgccagcattattcataataggcaaatgtctaatatgatgtttatccaaccagtgtatttttcatctcagatgtaatagctttcattcccataaatgtgatttgtgtctttgttaaatgttttacttattattttgtgagcaaattgaatattgttttaatcctgtttttgtctcctctttattcctgtttttttwaaatctgctttatatctattgcaataagagtaattgtcttttctgttaactctgagatctgtgtcagttcaagatcaatttcaactggtatttttctctttattatggttaatatttgcctacaattttgcatgactattgatttttgtttagattcctgatattactttctgtatttttaaaaatttctatattttcttattttttggtcttgtgatttctgtatgaattttagcattatcttatcaatttctacaacaacaaagatgataagaatgtgattaagagtgaattaaattgaattgaatatgcattataattaaggaac

SEQ ID NO: 735186 - DNA, 585 bp, Homo sapiens
gttttacctttgaggataaattaatccaactgctgggaatgtgctcagaagatagactgcagctgtcatcctttcagggattgcctcatcagagagtcaaggtcttcctcagatgactcacctgcaatgactgagaggagttacgaagctctgaccatcctgactccactcaggaaaactgctcacttaagctccaaactcctcattgtcattggccagtgctgttgtcaggaccgaatcacaggttagtttccctctctggctacacctgctcttttcatcccttctgcagcgacagatcccaaagacactgtcattcaaatgtcttgcttcttaacctctgccttagagtgtgctttctagaaaagccaaccygtggcaagggttatgatccacagaaagaggaagttattttggttttggagatgtctactgggaaggtaagaataatagcctggagatagaaaggaaattatgcctgtaaaatttggttcatcttaggtagaaaatgaagggatgagaatgagtgagataaaaagacagtacaaacagctgaataaaagaacttggttaaaataggaatct

SEQ ID NO: 735187 - DNA, 626 bp, Homo sapiens
catgctcctttgcagtcaacctatccctcagccttctgctgtaagcagccacagctcttcattctctcactctgtattcactgctttctgttctagtctcacatacatgaagttatacactatgtactcttttctgcccagctgtagatttttcatagatgcccttgatgaggatgaagcaaactataaggattgattttcaatgctaaatctcccttgaattcctgctatggaaccaattagttgtaatgttttatcattttatattttgtagtattatatttcctaaatcttaagagatgttttgaaaatatgttcatgagggatattgctctatagttttcttattttgcagtttcttcttctgactttaggatgagcataatgcttgcctcatatattgagctagaaactatttmtatgctcttgaatcatgtatgcagaattgctattatttttctcttctcctatttctttatagaaggacatttgtgtgtccttccaaatctgccacacagaagtcaggcagatatcactaatatctgcctgtcttctgtgtctcccatatccaaactattaccctgctatttgtatattacctctcatctatacatgaagtggtcctc

SEQ ID NO: 735188 - DNA, 603 bp, Homo sapiens
tggattgaactcaacaaataaaagcaaattggacagaaatgtgcaggttatgttacttttcatcgaaaaactaaagaatataagcatatacatacacgttcatatttaaacatggaagaatcaaccaaaatattttgaacagttatgaaaagaggaagggaacagtattgagcagtaaggaacagaagttcatccttttctaacataccttattgaaatataaaaaaatacatatttttaaatcaagctattaaaaacaagtaaaaagtgaaytaaaaatgaactaaagtgtatctattggtgacaaaaccttgcagagtggaactattccaagtacttttaaaatgcaacacacgaaacgacaactcaaacactatgcaagctgaaaataaaagtactatgagaaaatctaaaattacctcctttcagtgatcatattggtggtggcacttttcatatagttgttttaatattcttagatataggatagataattatgttgtgaaccagaattttcagtagagagtggaatttatcaatctaagtttgatactggaaaagtaaatgtatgttaacagtcaatggtgatgtatttggaagtat

SEQ ID NO: 735189 - DNA, 603 bp, Homo sapiens
tggattgaactcaacaaataaaagcaaattggacagaaatgtgcaggttatgttacttttcatcgaaaaactaaagaatataagcatatacatacacgttcatatttaaacatggaagaatcaaccaaaatattttgaacagttatgaaaagaggaagggaacagtattgagcagtaaggaacagaagttcatccttttctaacataccttattgaaatataaaaaaatacatatttttaaatcaagctattaaaaacaagtaaaaagtgaactaaaaatgaaytaaagtgtatctattggtgacaaaaccttgcagagtggaactattccaagtacttttaaaatgcaacacacgaaacgacaactcaaacactatgcaagctgaaaataaaagtactatgagaaaatctaaaattacctcctttcagtgatcatattggtggtggcacttttcatatagttgttttaatattcttagatataggatagataattatgttgtgaaccagaattttcagtagagagtggaatttatcaatctaagtttgatactggaaaagtaaatgtatgttaacagtcaatggtgatgtatttggaagtat

SEQ ID NO: 735190 - DNA, 585 bp, Homo sapiens
ttaataatccttttgtatttttttaagctgaagaatccaataaggtgaaaagtttatatctataagaacacagaagaaaatgtataaaccaactccatgcctagtactcaatcctaacttactatgtaaagcaactcactccacctgttcccttgggcaatagtttgacttgaaggatctaataagatagattttttttttaacttttagtcttcaaagtgtctttgaataaaggtsaaaatataaaattctagcatatcccaaatgcaaaatggaaaattaatgtcatctagcaattagaaaaattatctgccatagtagagcctttataatagctgcacatttgtctttcttgacctgataggcttagatcatgtctaagtcacaatcatctcatttacagcttctagcacagggctttgcagctaagagtgtcagtaaatacttgaacacccataaactatagaatatatgaagatcaaatgtgtatacatattactaaaaaagttcttactttttttaagaattaaggagtattttgaaaatctcaagtttcacttgcatgcaaccatggtttactaaagt

SEQ ID NO: 735191 - DNA, 540 bp, Homo sapiens
cccagccactcgggaggctgacgcaggagaatcgctttaacatgggaggtcgaggttgcagtaagccaagaccgtgccactgccctccagcctaggcaacagagggagactccataaaaaggacaagggaacaataagtcagaataatgccgatagactacttaacaaatcattgtaaatatttgccatattacattaagaaraacagatttaataattgtttagtactacttgtaaaccaaaaatgaaatcctaagccccccaactgtctgaatggatgtccctcatggccaaggggactccagagaaacctgaaaaactgaatttccagccacgatgggaagggaggtgggacaaacctccttaaacctcttctctctgggagtttaggcataactggccagcattaacattgaaattggcatcataagactgaaaaaacagacgctttgtggcaataagacaccaagttccaacctgactctggtatagagtcacatgtagaccctgaaggaaatcaaaatatcttacttcaacata

SEQ ID NO: 735192 - DNA, 589 bp, Homo sapiens
attgttcattctcactatttacaactatacaaaaaaacagtgtgaaagactttcttgagaacaaaggttaattttaaaaaaactctattttttccaaatgtgtttgaaaacaagctaacttaagaactcataagaaatcagtctcttcaaagtttgtctaaacaacatatccccaaacaatgatkcaaaataacattatattcttttaattatactctgctgcaatagggtatgactaaattattgatcacaatttaaactggttcttgtggcaggccccataaaggaaccacagggcattcaaagaaaagtgtggcattgggtactgtgcagctcttttgcaaaccaactttcaaatttcaggttaaaatcaaatgcttatctaagcaatcatcagaaaacactgacaataaatgcatccaaatctgaggacatgggggaggcccttcagggtggtatggcctagacaaatgtatccaaatcgaaggagaaactgcctttaaaaaaaccgttaagagacagtagcccttttctctatactaacaatttacagtaggaaagatcatttccattttccattcagattaga

SEQ ID NO: 735193 - DNA, 542 bp, Homo sapiens
taataatcaattttaaaacaaaatttatctacattatttgggccctaatggtatgttaaataataagaaaaaataaaatgtaagtcattctcaaaattttactctatgaggtataaaatgttaattcccttgacaaattgagygccaacaatttgtcagtctaggtctaaaattctaaggatacaaaggcaaataaactgaggtctttcatttcaagaatacactcaggagagagatgtgtcactactttcaacctaagttgaaaggcaggtgtctaccaggtgtgcatacatgaaggtcatataatgttttgaaaaatgtacacataccactttcagacaaacactgagagaaatacaccctttagaaaaatataagacagatatgtaatagtttccagtgctgatttcctcttaaacttgtaactaatcagagagggaaaaaaaaaatttatggctagcaaagaatctttagaaatgaaaatgaattatgggccgggcacagtggttcacgcctgtaatcccagcactttgggaggctga

SEQ ID NO: 735194 - DNA, 532 bp, Homo sapiens
ctctattgcttacttgttgcacaaccataggacaaagtgctcaataaataataaatgtagttagggtaaattttgtaaaagctacaagacgatcttattcctgtaccttcttcctattaagctatacaagtatgcaattagcatacagaaagaaaccagagtgtctgtgaagaggttgaagcctcacaggcgtgtttacaatggaatgaagttttggaaagtacggcagaaatggttacatgaaagtwgagagcaggacaagaggatctaggaagtagagcaaagcagcatgatgatcagactgcaggagatgacaggttcacagaggagttttcattttcaccacagccttagggttttaaaggaaaaaaaaaagaaataaaattaaatgccttccatgttccctacttgggaccaaaacttcctttgaggctaaaactggctagggtctcagagggcagagtctgccctatccagctagtccagctgaacagcagcaggaaagggaggggtggccgaccccggcctgtgc

SEQ ID NO: 735195 - DNA, 601 bp, Homo sapiens
agattactgttaattattttagatgtgctaatggtattatgtttatattttagagtctttattttgtagaaatacacactgagatatttacagataaaataatatgctgtccaggatttacttcaatataatccagggaagggtggatagggaaatggctgggtatacaggtaaaatgagactggccatgagctgattgttgaaactgaataacaggcactaaggagtcagtatactattctacttttgtacatgcttcaaattttccataaatttatttctcaaaagtccatttgataggaaaaaaatcctctgaataaayagaaatataaggggtaatctggaatatccaaagttcagaatttaatcacaacgttttttcaatccaaaaatatgtgattcataaaacatacctttaaaaactagtaacctactatttaaaacagtaacctctattgaacctctatttgaaaacaatatcactatttaagaattcaataaactataacaatatcactacttaagaattcaataaattcccaaagtccattataaaacagttccttgataactgaaataatgtcactttgatcaatgtcca

SEQ ID NO: 735196 - DNA, 505 bp, Homo sapiens
agtatcagctacataaccataataataatcatactataggacaggcatggtggctcacgcctgtaatcccagcactttgggaggccgaggtgggcggatcacgaggtcaggagatcgaaaccatcctggctaacatggtgaaaccccgtctctactaaaaatacaaaaaattagccgggcktggtggcaggcgcctatagtcccagctactcgggaggctgaggcaggacaatggcatgaacccaagaggcagagcttgcagtgagccgagattgcgccactgcactccagcctgggcggcagagtgagactccatctcaaaaaaaaaaaaaaaaaaaaaactataaaattatgatataacaggatttaacatataacaggagaacaaagtgaaaattctttgtgcatactcgtggtagagtaagaaaactaaatatccatcttccacaaagggaagtaaataaacattgtgtaaaattggaatcaagaagtacaatgtaagctt

SEQ ID NO: 735197 - DNA, 498 bp, Homo sapiens
atactcattatgcatataatagactaagaattaatatctagattatataaaaatgtcaacaacaaaccccctatcaaaagaaaagaaacaaaaccagcatttcatagatgagaaaacatgaatggccgataacatatgaaaagctactcagtttcatcagtaaccagggaagtacaaattaaaaccagagtgacatgttcttttacacctaccaaacgagcaaacatttaaaagtctcacaccatcgagagyactaacgagaatgtgaaacgagagacactttcataagctgctgttgggactgtaaactggcacaaatactctggaaaacatttgacattatctagtaaagttgaagatgtactaacctgacaatccagcattggcactcctagttacatatcctatagaaacttttgaacatatatatcagaagaatgcataattatttctaccacagtactatctttataacaaaaaatttagaaacaaaccaaa

SEQ ID NO: 735198 - DNA, 559 bp, Homo sapiens
ataaaaccattcatttctcaacagtctacattagcacacttttgttaaaatcgccctgaattcaaaaactaaacaatttcacaaagcagagacctatttttacaattctgatttcatcaatgggttatgctttgtggtataagagcaaagcgacacaagaaatactctttatgattttgtgtctggcttatttaacaagaaaattctaattaaaaaaacttgttttagactgcatgttattaaaaatgagttaggtcattttttccacacaaacggaaatatatatatattggtaaactgcctttgacttggagattttacacacagaaaatggaaatatatatactgatactctgcctctgacttggcaattggacacacrcgtgcacgcacacacccacacacaggtgtacatatctattccaaattaatgagtaaatccccctggattatactcccagtcaactgacaactatttcttacgtatcctttatattccatatgttataatatgcactaggggatatgagagttcacatgatataataatgcctgtcta

SEQ ID NO: 735199 - DNA, 636 bp, Homo sapiens
taacaatccagaaaatttcttagattatcttcaagatttcaattctttaattgtagccaaaattcttttgaatccatccatttaatgttttgcttttattattacagtttcaaatctagaagttctatgtgctctttttcaaatcttactctttttttcacaatttctccttcctatctcatgtctttatttctttcctcatatcctaaatatttaaaatattcattttatagcctgcatctgatcatctattaccagaggggaagtggagcaaggyctgccacggagttttgctcaaagtttagtttccttttgtgttttataaagttggattgtaaacttatcctcatcaaagctttatctataagaatcttgtacaatctagattaaagtgagtccttcagagaggttttgcttttgctgctaccaagcaaactaggtatcaccagcccatgtccagttttatcacaggtcacagaggcgtattaattgaaagcacaaattcatgttaggcaagcctgttgtttgactgctcagaaagaaactccctgcccccacattccccactcccctagaatccagaatacatacccagggagtcatgctcctctgctaccttcatgtgccaatgataag

SEQ ID NO: 735200 - DNA, 595 bp, Homo sapiens
tttttttcttttttttttgagaccgagtctcactctgcctcccaggctggagtgcaatggtgcgatctcggctcacggcaagctctgcctcctgggttcacaccattctcctgcctcagcctcccgagtagttgggactgcaggcatctgccaccatgcctggctaatttttttgtatttttagtagagatggcgtttcaccatgttagccaggatggtctcgatctcctgacctcatgattcgcctgcctcagcctcccaaagtgctaggattacaggcatragtcaccatgcccagccaacgatgatatttgacaattgtcagcacaaacatcatagaacagtatttggggagagggatctaaatgggtcacaactgcagactctcttctagtaataacagtagcacgctgggcaatagcaataattaagggacaggccaaagaacatgagccctaggagaagagtacaatgaatggttaagacaacaacaagaaacaccttaaaaatatcacagaagccgaagaagaattacaagaaagaagcagtgaataatgtcaaaaagcaacgatgttaaactacaaatgaagagaat

SEQ ID NO: 735201 - DNA, 541 bp, Homo sapiens
gacaaaaggctgccctgttcccactaacaaagctaaaaggtaaacctcaagatcatcaaagttcttgagtaatttaactgcaccccagaaaaaagcttcagaatactttcagggataaattaaaaaaaaaaaatcttgaggggaggagccaagatggctgaacagctctggttgcaaacagcaacagctctggtctacagctcccagcgtgagcgatgcagaagatgcatgatttctgcatttccatctgaggtaccrggttcatctcactagggagtgccagacagtgggcgcaggtcagtgggtgcagcgcgccgtgcacaagccgaagtagggcgaggcattgcctcactcgggaagcgcaaggggtcagggagttccctttcctagtcaaagaaaggggtgacagacagcacctggaaaatcgggtcactcccacacgaatactgcgcttttccaacaggcttaaaaaatggtgcatcaggagattatatcctgcacctggctcggagggtcctacgtccacggagtctccctgatt

SEQ ID NO: 735202 - DNA, 614 bp, Homo sapiens
tgatgctgtaacaggaagtgctactgcttcgtaaagcatccctgatcactcgtgctgaagaggagctatgctctactcatcctcaatccctaccacagttccatgcacgttcgaggtgcccaaccaatggtgcgtggaaagtggaggaaagcactcatgcaccaacaaataggacactgctcatctgaactgcttccaagtgagctgaaaatgaatatcaagtattcaaagaaccctcacaacggaaataatttctagaagtacatcttactgctctacttgtcatttagggtaaagcttcaattagaataaaagagttctgtccttaacgatgggttgaaacagcagttgaatccttcaggwcctcggtaaacacagacctgggcttcttccaggttagcaagtgaaagtccatctgcactacctgcaggaaacttcataatctcttttttaaatgacacaagaggacctaatttatgcagtcagcaaatattttcagtatactcactatacaagcgccgccctaactgggatctgaacataaggaagagatggtctctgtctttaagagttactcggatatttattaaagaaggaaatgagggaaaaaggca

SEQ ID NO: 735203 - DNA, 591 bp, Homo sapiens
tcattaacatatgtcttaaatgacaaggaagaggtgttgaagataaaattactttttcctatgagtatgaatcagcaacatgcagtaacaagcaagtaataatagttctgcgtgtgagtgcctacagagggtaagaaaaatagcatcagattgaaaaagcaagtgcacctgcagaagggacccaggaggctgcagagcacagctcccttgagcatcatctcaaagtgtctcagagcacagtgaccctaattctggcaagtcaggttggcatgagatggatggagcacactgaaatctccagatggtcagacagcccaccctcagctgcccctggagctcggcaraggcaagctacaaggcactgctacttggccaagagtttaaaacaacagcttctgattctacagtgtctgtggtttcacaaccacttaaccttaagtaaggaacagctagagttagctgaatgaataaatacacgttaacgttacataaagagggaaaaaaagcaatacttgagcacatagacttcaaatagtgtccagctagctgtgtccttggcatcccagtgatctgggtctttatctttgattt

SEQ ID NO: 735204 - DNA, 582 bp, Homo sapiens
tatttccttagtccctagggtatgtgtctcaacagctcttaacctctattaaatagtgtccagggcttccaaccaagtctcgtgagagggtcatgctcctgtcccagtgcccagagctggtgctgcttcctgctgctgctgaagccccagctgcagagcactgttgggatcggccatcaccaccaccttggttgctggtgcgatgttcggttgatgcccgtagagactcacagtgccctgaagtgagcacatgatgcttttacatactccctgcaaatcaaccttgtggccgtgacatagcagccccaacaaccaaaacaactttggtagccccatcaatctgtgacttytaaattttctttagcatcttcccatgtttttgctttttttttggtttttttggttttttttttgagacagtcttgctgtgtcgcccaggctgaagtgcagtggtgcaatctcagctcactgcaacctccacctcccaggttcaagctattctcctgcctcagcctcctaactgggattacaggcataggccaccacgactggctaaattttttttttttttgtatttttagt

SEQ ID NO: 735205 - DNA, 651 bp, Homo sapiens
gagtcttctgtcatccttatctttggtcttctgtatataatgtgtcttttcttctctggctacttttagtattatctcttcatcactaattttgagcagtttgattctgatgtgccttagtgtactcattttcttcatatttttgtgcttaggatttattgactttcttggacctgtaggtttttagttttcatcaaaaccagaaaattttcagctattattcctttgaatagcttttctgtccctcccsctactttagggacaacaattacatataaatcaaactgcttaaagttttcctacagctcactgatgctcttttcattcttgtttttaattctcttttctctttgtgttttatttttggatcagttctattgctatgtcttcagattcactaatcttttcttttgccattaatctcatcagtgtaattttaatctcagatattatagtttttatctctagaaatctgatttatggttttaaaatagttcctgtctctccttaacttttcaaatatctggaatataataataactactattttaatatccttgttactaattcctatatctgtgttagttttttttatcagtttcaactagtttattttcctcttccttattggttatattttcctgtttcttt

SEQ ID NO: 735206 - DNA, 651 bp, Homo sapiens
gagtcttctgtcatccttatctttggtcttctgtatataatgtgtcttttcttctctggctacttttagtattatctcttcatcactaattttgagcagtttgattctgatgtgccttagtgtactcattttcttcatatttttgtgcttaggatttattgactttcttggacctgtaggtttttagttttcatcaaaaccagaaaattttcagctattattcctttgaatagcttttctgtccctcccgctactttagggacaacaattacatataaatcaaactgcttaaagttttcctacagctcactgatgctcttttcattcttgtttttaattctcttttctctttgtgttttatttttggatcagttctattgctatgtcttcagattcactaatcttttcttttgccattaatctcatcagtgtaattttaatctcagatattatagtttttatctctagaaatctgatttatgkttttaaaatagttcctgtctctccttaacttttcaaatatctggaatataataataactactattttaatatccttgttactaattcctatatctgtgttagttttttttatcagtttcaactagtttattttcctcttccttattggttatattttcctgtttcttt

SEQ ID NO: 735207 - DNA, 601 bp, Homo sapiens
tgtctaagtaaagaaactttaaaagggagagttaagagtgggagctatagtggaatagaggtagaagtacattgaaaaaagtctgaaataagaggtaggcttaagaagatatttatccagggcaccccttttcattggcctcagctatattgccttcttggcttcctgttcattgcacttttttgtttctttgttttcagggttggttcccttgttaaactctctgacataggacctcctcatttatgactcaratactggcattttaccagtcctggcagatctggctacaaagagttgctatgtcaggacgcatgctgatttggtgattgttatatctatttccactatactatacacagctttcttgactgtccatgcttgaagttttgaaggaacatatcaccttccactgtgtatttgaagccatggttttattgaggcaatctaattttaaagaccaagaaacaccacccagaatcagtttcactgtctgcagcttgaaacagaagttatcattcttttagcaaatacttattatttgctaaaagaatgctagatatggtttggatatttgtcccatccatctcatgttgaaata

SEQ ID NO: 735208 - DNA, 596 bp, Homo sapiens
tgtatctgcatactactggattagatttaacagacgcaatcttggctgaataatgaaaggagtttggcatgagttccagtgtcaaagcagaagtaaaagcaaaaccagtgatgggcataggcttgaaatataatatattaatacactcaccaggtagtgctgcattaataaataaactcagaaatcttagggagtgaaggcaacaaaggcttatttcttgcttgcataaagtcctatatgggttaggcgattctctgggcagcactccctctgtcttgttatgctgccatctcaacaggtggcctccagggttgccaaggcaaaggactagaggtcacttccttatgctgtggcccaggagaaactcatatgacttctgcatacatttcacyggctatgactagtcacatagtcatacctaactgcaagagacctggggagtggagacttcctgagtgacaggaggagagaagggtataggtgagcactagaagcctttaccacacataggaagcgagtgtgtatggtcagcatggaatcgggaatggccagagtctgatgttattaatattcagcatgagattaatttatattga

SEQ ID NO: 735209 - DNA, 593 bp, Homo sapiens
ggagatagactgtctaggtccaaatctcgtctctgtcattagcaaagaatgagaccctgagcaagggacttaacttcactatgcctcagtttcctcatctgtggatataataataacaccttcctgttagagttgttgtgatgattaagtgagttaatacatgaaaagtgcttagaatagtgcctggtgagtggaaagtgattaaaaaacatcagctatgatcactctacttcaagactcagttcaaatgtaactgaaacttccctaaacttgcttcttttctgggtgccttcagcactcagcaaatgtctctgttataacatttatcatggyatataataattgttaatttacccattcttctctctcgttagactgtgattactcaagggcaatgtactgctcaccatttactctagtccttgacagagtgtctgacatagaaaatacattaccaaatgttttctgaattgatgggcagagccagggtggtagaaattgctacaattcaccaatatacagttcttttgtccttcctgtgcacaaagcaaagctatgtttcccagctccctatgcatctagatgaaccacat

SEQ ID NO: 735210 - DNA, 656 bp, Homo sapiens
tacaacaaatccacgtgggcagagtaattattaaataaagtggagggggccacagagccaaatgaagatacagagccctgtattgagcctcctttcctggaggctcaaactgggaagaaaacctctttattcattttaaaaacaaagccttcactccattattattattataatgttcattatgggaaatttggaaaaatatataaaagttgaaggcataaataattcttaatattttgctttatttcctttcaactttttttttcttcctatgcttggttttttactttgcatagttgtgatcatatagaatggataaacttgcagactgcctataaattggcattctttcattgtgtatgtgttactgccayggacatctttgtgcataaaactcctctttatttagggttaaaaaaataaattctcggaagtgaaataattagttttaaactataagtaatttaaagcttttgatatatactgaaaattgctttcgcaagagattatttcaattacattctcactgacaatgtatgaaattgccctcaaaagttaatcttaaaaatcatgagctgggtaatatgattttaagatagtcaatggtgagatcaagttatgtatttcttggaatagatgagatatataaaaagaga

SEQ ID NO: 735211 - DNA, 636 bp, Homo sapiens
ttgccatgttgcccaggctggtcttaaactcctagtcttaaggaatctgcctgcctcggccttccaaagtgctgagattacaggcatgagtccccgcatgaagcctaaggtcctttaaagatcacagtgtgatgcaatagtgttttcaagcaagtgggggccatcactgcagctaacagtaatctggatcttgacttagcctctgcatctcaggtgaccaacttaattcctgggctgtgtatagtggcttggaatgcagatacacaaaactacaagaagtttctaatgaagtggtgcttgaactctgccttacaggcaygtggggagtagtccattggcatgaaggtgagaacgcagaaataaaaagcgggatggaggccatttttatgtattttaacttccagtgcatcttgtgctttagatgactaatgccctctgtgaacttctgcgagtggaaccaaaactgtttaatgaataagtgacttttagtgctttatttttacctagagcttcatttgaaatagatcatcattagctttatggttttaattgtattggaatttcttattgtaacctattgctttattgcattagtccattaacctgggtgctacggagcatagttttagagcctgt

SEQ ID NO: 735212 - DNA, 636 bp, Homo sapiens
ttgccatgttgcccaggctggtcttaaactcctagtcttaaggaatctgcctgcctcggccttccaaagtgctgagattacaggcatgagtccccgcatgaagcctaaggtcctttaaagatcacagtgtgatgcaatagtgttttcaagcaagtgggggccatcactgcagctaacagtaatctggatcttgacttagcctctgcatctcaggtgaccaacttaattcctgggctgtgtatagtggcttggaatgcagatacacaaaactacaagaagtttctaatgaagtggtgcttgaactctgccttacaggcacgtggggagtagtccattggcatgaaggtgagaacgyagaaataaaaagcgggatggaggccatttttatgtattttaacttccagtgcatcttgtgctttagatgactaatgccctctgtgaacttctgcgagtggaaccaaaactgtttaatgaataagtgacttttagtgctttatttttacctagagcttcatttgaaatagatcatcattagctttatggttttaattgtattggaatttcttattgtaacctattgctttattgcattagtccattaacctgggtgctacggagcatagttttagagcctgt

SEQ ID NO: 735213 - DNA, 610 bp, Homo sapiens
aaatccaaagcacagaactattctgcaagaaccatgctgccatccaaagcaaagctaagctccaattctcatcttctcctgtatttgtttcaggatatttttcaggcattcttttcatctttcattaaactagtaagttttttagaatatgaataataaaaaatgcaaaatgtatccagtgtgatggatggcaatatattttaaaacatacatgtgctraaactaaaggtgacccaaaaatgagaaatccactccaggagacagtcttcatcactggagtcaggcattcaaatcacgtgtggtatcttgtgatggttgttcacagcagagagctggaggcgttactgacctttctgtggcatccacaagggtttaccacattttctcaaacacaaatgcatctctgcacagaaaatgaaactttcaaagtcttttggagaaaagagcctttctcagctgaatctgcagcttagaagggtgctcattaaacgagaaaggagcaggcatcttggagtcctcttttggggcagatcaaatcaatcactcctggccttcaaatagagatgagggatcccatgaccagatttctcacagcctatatgagctttga

SEQ ID NO: 735214 - DNA, 565 bp, Homo sapiens
aagtgatgtcatctctccaaaatctcagggcagaaaataaaatctggtaatggtccattctgacacaaactacagcatttttaagagtgtataagaggaggctgggcacactggcttgcacctacagtcctagcactttgggaggccaaggcaggcagatcacctgaggtcaggagttcgagatcagccttgacaatatggtgaaaccccgtatctactaaaaatacaaaaattagccaggtgtggtggtgcatgcctgtactcccgctactcgagaggctgaggcaggagaattgcttgaacctgggaggtggaggttgcagtgagctgagacagtgtcattgcactccagcctggggggacaagagtgaaactccatctgaaaaaataaataaataaataaataaagagtgtataygaggaaaattatctggaagactatagtggccatgagtttatagatgttagcttttatgtggctctctaagaattagtctctgtgttggcttgactgtttatccctttcaaaaatcatgctgaaatttaattgtcattgtaacagtat

SEQ ID NO: 735215 - DNA, 607 bp, Homo sapiens
ttttccattatttcagccaaaacaggatttgtatttaaatagggcctaattccaattctgtaatgacgtttgaaagtcactctatggaacattaaactttggatggaaactttggacaggttctcaaatgatgtcagattcaaccagtggtgggtaatttcaataaaaagtcttaagtgttcaccaggctcaaaaaggtagagcagggagagaagagggagagaggggggaaaagggggggcagtgagagagggggagagagagatagagagacagagacagacagtgagagacagaaaaagggagaaagagcacctgttggggagtgctatggcctgagtgttgtgtccctccaaaataagtatgttgaaacctaaccyccaaggtgagggtattaagagacggagcccttaagagatggctaactcatgagagaataggattaacacctttataaaagagtcttgaaagatccctttccccttcatggcaggcactgcctatgggcttccaccagacaccaaatctatgggtgcctgcgtcttggactttccaaccttcaaaactgtgagcaataaatttctgttgtttataaattacccaacct

SEQ ID NO: 735216 - DNA, 607 bp, Homo sapiens
ttttccattatttcagccaaaacaggatttgtatttaaatagggcctaattccaattctgtaatgacgtttgaaagtcactctatggaacattaaactttggatggaaactttggacaggttctcaaatgatgtcagattcaaccagtggtgggtaatttcaataaaaagtcttaagtgttcaccaggctcaaaaaggtagagcagggagagaagagggagagaggggggaaaagggggggcagtgagagagggggagagagagatagagagacagagacagacagtgagagacagaaaaagggagaaagagcacctgttggggagtgctatggcctgagtgttgtgtccctccaaaataagtatgttgaaacctaacctccaaggtgagggtattaagagacggagcccttaagagatggctaastcatgagagaataggattaacacctttataaaagagtcttgaaagatccctttccccttcatggcaggcactgcctatgggcttccaccagacaccaaatctatgggtgcctgcgtcttggactttccaaccttcaaaactgtgagcaataaatttctgttgtttataaattacccaacct

SEQ ID NO: 735217 - DNA, 630 bp, Homo sapiens
tgcctgcctcctttctctttatcgcatatgtaagaaagatgtcaacacttacagacttaattagaaagtcgtagaaaaacctgtcagctagatttgcagaatcctgacacagaagtcctcaggcacgcagcacctgggcagtgatactggtggctctgcaactcaccttctcacctggcctttgcctgaagccagaagctgwtatgataggggagggagggagattcctccaggcacttccttttcagtctatcctctaaggggtttcctgacactagataatgatgctaacactcaagagaagaagtcactaaacagataccaccttcttaatttgcagagaaatgatctggaatgatagtgagtggcagaaactcacactcctagacagaggggccatttctttttgtaggagccaagcacttgccacgcacaccccacacctattctcagctctctgagggccctggtggtgaactccagtggcatcctttcacaaagagatcaaccttctttccactagccatgcggaagctgatttgctacatcacaacagtgtaaagctatcagcatattattaatcaattatatttatgccataggcaaaatctgcccatttgtgaagaagtc

SEQ ID NO: 735218 - DNA, 493 bp, Homo sapiens
gttctgtttactttaagctcaagaacaggtaaaactaatgtatgtgatataaataagaatagtggccacctaaatggtttagagattcactgtaagagggtaaaaggtaacttttgggggtgatggaaatgttctaaatctttatttaagtattggttacgtggacatactcttggccaaaactcatcaaattatatactcacaatatatgtatttcactttgtttaaaatttcacctaaaaaaagtaagaatctakgatttctggtggctccaacatcctataaatattaatttctaatgtcaaaggataatctgaagtttactttatgagtgaaactagtcaataatataactttattaacatgtagtactacttcctcaccaaaagtttgtgagggagagagagagaatgggccagaaataacttttctgttagatgtatgtgctaacatcattgcctcccacctccacctcattgttttttaacactct

SEQ ID NO: 735219 - DNA, 619 bp, Homo sapiens
ataccttgtaatattggcctgcctattcacatttacaagttgaggcactgaaattatccttgaaaggttggaataggctgagcaagttgccttggagacttcactgaaaagcagtcagtcagaaaaaggccttttattgagactctcayatgtaaggatttggaaaactttttatccaagaatctttctttctcaaggtgctaatattctgctctcctgcctgtgctgaaccttctgtgtagatttactgaatcttctggttttcagctctgtaatttacttttactctctgctatatatgatgtccctgggtgtggagcttcccagttaatttctccaaagaacaaacttcagttattctataagaaaagaatgggaggtgatggggagaatatcacatgaccatgttaggtggaggaggtccaaggatcccaaaactcactgctcctatgacccttctgaataaatgcatttggggagtgttcagacttgcctgctgtttctgtaaaacacactacttataagaccgttaggagttctaaaatattaatctacttgcttctggcttatatccccctctgtgggatggtaggtaatactttctgctgtttttttttta

SEQ ID NO: 735220 - DNA, 632 bp, Homo sapiens
aattacataaagtcctgaatcatgcaagtacctgcaggcaaaaggcagaaggaaaagcacatgcaagggcctacttcgtgtgactaaagaagagaaatgcaaagatggcctggagaggaatgagtgaggtggagcatgctgggaggtgaggcagaaagaaggcagaggcctgatcacagagggcctgtcttttaagtcctacaagaaattctgcatttagactgtaagaaggtgaagtcaattggaagggctgtaaatagaagagtgacataatgacaggatgactctggtgkttgtatgcagactagacactagaaagctagggtgaagcatggagaccagttcaaaggctactgtaataatgcaggagacaaatgatggtggcttagaccagggtgttggcagtataggtagaacaaatgaatggattctggatatgttttgaaaatagagctgaaaggatttgcaggtggtttgggtatgaaatagacaagatgtgagagtcaaaggtgactcctaggatcctggtcttagaagtagaaaagatggtgttgccatttagttaagacagggcaggcagccaggggagcagttttggggaagatgggaatattagaagcttgattttagac

SEQ ID NO: 735221 - DNA, 612 bp, Homo sapiens
aactataataaacttttgaaaaaaaaatgtaggctcaagtcttcatgacattggattaggcaagggttcttaaatatgacaccagaagcacaagcaaacaaaacaaaacagtcaacaaattagacatcaaaattcaaaatatttgttttaaaggagactataaagaaagtgaaaagacaacccccagagtggaaaaaactatttgcaaagcatatgtctaataaaggactagtatatagcatatatatagaactctacaattcaacaacaaaaccataaacaaaccaattttaaaatgagcaaagggcggggcgtagtggcacatgcctgtaattccagccatttgggaggccgaggtgggcagatacctgaggtcaggagatcgagaccagcctggccaacatgacaagaccctgtctctactaaaaatacaaaaattagcagggtgtggtggcaggmacctgtaatcccagctactcaagaggctgaggcaggaggacctgagaggcagaggttgcagtgagccgagactgggacattgcactccagcctgggcaacagatcaagactctgtctcataaataaataaataagcaaaggacttgaatagaa

SEQ ID NO: 735222 - DNA, 597 bp, Homo sapiens
ttgattgggaaaggctgggatcctgttagttgggatgggaatgtgtggggagaccgatgaagctgaaacactgaactcctaaattctgacaagtctttattgccaaaagaagtgtcctccctaaccccggtgacagtggccacctcacccacagaagtttctacctcygactgaggggattaaccctgaattgtctaagaaaactgtaatggcctcccctgaggcagttgtcgggcaagacaatgctgattttccttcggacccaccacctctctcccctctttgcttctagacctataattggactcaagttccagaaggcacctaaaggtgaggtatgaagagtgatccataaggaggtacattatactccaaaagaactatttgagatttttactttctacaagcagaagtctgaggaacatgtatggggataaatattaaggatgtgggataatgtagaaagaacttatagttggaccagactgaatttattgatgtgagcccactaagcagagagtctgcatttagtgttgcagctcagagagttagaaaagacaccaatagtttggttggtggggtgaaacatcgatcaaa

SEQ ID NO: 735223 - DNA, 671 bp, Homo sapiens
ataaagatagtttgtagctgggagaatctctacattgcttccctaacctatgaagtgagggctattgtggtagtgaaggacaaatgaaagccatcagagctgcctctacctaggaaaatgtaaatcaaagcaataccacatgcctggtgggattgcagagattggtgctaccataaaggacttgaaagatgcaggggtggtgattcccatcacagcccattcaattctctggtttgccctgtacagaagacaggtgratcctggagaatcaaagtggattatcaaaaacttaatcaagtggtgactctgtagctgctgcaccagaggtggtttcattgtttgagcaaattaacgcatttcctggtacctggtatgcagctattaatctggcaaaatgctttatctccctacctgtctgtaaggcccaccagaagcagtttgcatttatttagtgaggccagcaatacacctgcactgccctacttcaggggtgtatcaattctacaacaccatgtcataatttacttcacaagaatcttgatcatctttcccttccacaatatgccacactggtctattacattgatgacgttacgctaattggacctagtgagcagaagtagcaaccatctagacttactggttatacatttgcttgtcagagggtggga

SEQ ID NO: 735224 - DNA, 656 bp, Homo sapiens
agtccagaatgcataattgtaataaagatagtttgtagctgggagaatctctacattgcttccctaacctatgaagtgagggctattgtggtagtgaaggacaaatgaaagccatcagagctgcctctacctaggaaaatgtaaatcaaagcaataccacatgcctggtgggattgcagagattggtgctaccataaaggacttgaaagatgcaggggtggtgattcccatcacagcccattcaattctctggtttgccctgtacagaagacaggtggatcctggagaatcaaagtggattatcaaaaacttaatcaagtggtgactctgtagctgctgcaccagaggtggtttcattgtttgagcaaattaacgcatttcctggtacctggtatgcagctattaatctggcaaaatgctttatctccctacctgtctgtaaggcccaccagaagcagtttgcrtttatttagtgaggccagcaatacacctgcactgccctacttcaggggtgtatcaattctacaacaccatgtcataatttacttcacaagaatcttgatcatctttcccttccacaatatgccacactggtctattacattgatgacgttacgctaattggacctagtgagcagaagtagcaaccatctaga

SEQ ID NO: 735225 - DNA, 656 bp, Homo sapiens
cagaagacaggtggatcctggagaatcaaagtggattatcaaaaacttaatcaagtggtgactctgtagctgctgcaccagaggtggtttcattgtttgagcaaattaacgcatttcctggtacctggtatgcagctattaatctggcaaaatgctttatctccctacctgtctgtaaggcccaccagaagcagtttgcatttatttagtgaggccagcaatacacctgcactgccctacttcaggggtgtatcaattctacaacaccatgtcataatttacttcacaagaatcttgatcatctttcccttccacaatatrccacactggtctattacattgatgacgttacgctaattggacctagtgagcagaagtagcaaccatctagacttactggttatacatttgcttgtcagagggtgggaaataaatctgcctaaaattgagaggacttctactttaatacaatttctaggggtccactggtatggggcctgtttaaatattccttctaaggtgagggataagtttttgtatctggcccctcctacaaccaagaaacaggcataacacttagtagacctatttagattttggagggaacacattgctcatttgggtgtgttactcttgcccatttaccaagtgacctg

SEQ ID NO: 735226 - DNA, 511 bp, Homo sapiens
agagttttcctgataaaagtgaaaagttagaaatctcttgaatgtccaggccaggcacggtggctcacacctgtaatcccagcactttgggaagctgaggcaggcagatcacttgaggtcaggagttcaagaccagcctggccaacatggtgaaacctcatctctactaaaaatacacacacacacaaaattagccgggtgtggtggtgggtgcctgtagtcccagctactcaggaggctgaggcaggaaaatggcatgaacccgggaggtggagcttgcagtgagccgagatggtgccactgcactccagcttgggtgacacggtgagactccrtctcaaaaaaaaaaaaaaaaaaaaattagccaggtgtggtggcgggtacctgtaatcccagctattcagaaggctgagacaggagaattgcttgaatctggaaggcggaggttgcagtgagccgggatcatgccattgcccaccagcctgggtgacagagtgagactctgtctcaa

SEQ ID NO: 735227 - DNA, 447 bp, Homo sapiens
agacgtgatgatcaaatgtaatgtggtgtcctagacaggatcctggaacaaccagaaaaagacagtaggtaaaaagtaaagaaatctgaatgaagtatggattttagtcaatagtaaggcatcaattcattaattgtgacaaatgtgcccaactaatgtaaaatgtttatgaggaaaaccagacatggagtatatgggaacttttartaatatcttcacaactttcctgtaaatcaaaatctgttctaaaatagaaaatgtggcacatatacgccatggaatactatgcagccataaaaaacgatgagttcatgtcctttgtagggacatggatgaagctggaaaccatcattctcagcaaactatcgcaaggacaaaaaaccaaacaccgcatgttctcactcataggtgagaactgaacaatgagaacacatggacacaggaagg

SEQ ID NO: 735228 - DNA, 627 bp, Homo sapiens
aacggtggtgaatttaggcagcatggctggctgatgggaaagttatgtaactatttcaggaagtagattttaaggcagtaaagagactaggaaaggagaagacagaaatttgtgtagcatatcttacatcatatcgtcatatcatactgttacaatgtgtaaggccaggcctcaggttttccagatataaatcagatgctatcatgaaaaaattaactggccctgactcaaggtctgtgtagttttaagcccatgcatacataatgtttcttatgtgtctggtagaaggcactgggaaagaaaaagagaatgataggaacataagatttatggatgaaaaaataataaagacattaccaaaatgggctaagtccttgctcaaatgttaccttctaaattaggcccaattccccatttaaaatcagctccccttagcttcccatttttctgatcttactttcttcccccccatagatcttaccaccwtccaacatcttaaaacatttattatttttattgcttattgcctcttttccctgcatggagctccatgagggcaagtacttttgtttgttttgctcatatatcccaagagctgaggaacaatgcttggcataaaataagtat

SEQ ID NO: 735229 - DNA, 425 bp, Homo sapiens
aggcattaatttactgtcctattatgtgactgccactaccatgggcaggactttgtgtagcagacaagcccaagttttaagacaaagagtatttgatctccccacaccccatcttttaaagcgttaaaagactactagtctggactagactaccagtctaaggcagtgaagagagtgttctgggaaagcagagacccacagacaccagcatggggtcataaatataaagcctrgaagggtggaatttccctgaggaagaagaaagaaaatgaaggcaatgattgcattagaagatgaagctactaatgtcaatggcagaactgctcagcatctctacccatgcagatcagccctggagagtcaggaaaagtaaagacaagacagtattctaatggtgtcaatacatgtatgggctaccatattgt

SEQ ID NO: 735230 - DNA, 661 bp, Homo sapiens
cttctaaatggattgtttgctattatagtagttacagtttttaattcagtggtatgggggatttcctgaaatactatagaaatacattctttcttcactgcattcctttgcacaactcaaataactgtgtgttagtaaattgagatgtagctagatgacatattctgtattttcttatcattcagatgcagcttccctgtcactccttctaagagaccttcctcaaccacccagttraaagtatccatctagtctatgcagccataaaaaaggatgagttcatgtcctttgtagggacatggatgaaactgaaaaccatcattctgagcaaactatcacaaggacagaaaaccaaaccccgcatgttctcactcataggtggaaattgaacaatgagaacacttggacacagggctgggaacattacacaccagggcctgtcgtggggtggggggaggggagagggatagcattaagagaaatacctaatgtaaatgacaagtaaatgggtacagcacaccaacatggcacatgtatacatatgtaacagacctgcacgttgtgcacatgtacgctagaacttaaagtataataagaaaaaaaagaatttcaaaaactactaaaaacaagaaagtatccatctagtcagttgtttcatatc

SEQ ID NO: 735231 - DNA, 641 bp, Homo sapiens
ctattcaaatctgcatagcacttactctcaccttttttattcatgtatgtttctcccttctcccttcctaacaaactcaatatatttacttatttgttctctccttcaccacacatgaaggaggaatttcagaattagtatacaaataatactaggacaaaccaaacctatctttatgaactgatatwttttttttcattgctacatagttccccattttgtgaacgcatctcgattcattcaatcagtatcctatggatggagattttgattgtttctcagttttcacaatggatgatcaatacccgcaaagaataaccttgtgcatatgtagttttgaatgtttggatgtgcatttttagggtgaatttctagaattgaggctgctgagtagttttggcagacactgtcaaatttccctccctgagcagttattacattttgcatggtcgtcttcactgtttggaaggctctaggtactcacaggctagtcaacagaaagtattgttaggttttcgaattagaactactatctcattgtagttttatttcgttttatttatatagggtttacatatttaaatttatttattaaggcacagtttagttatctatcgtgaagtgcacaggtcttaagtgtt

SEQ ID NO: 735232 - DNA, 641 bp, Homo sapiens
ctattcaaatctgcatagcacttactctcaccttttttattcatgtatgtttctcccttctcccttcctaacaaactcaatatatttacttatttgttctctccttcaccacacatgaaggaggaatttcagaattagtatacaaataatactaggacaaaccaaacctatctttatgaactgatattttttttttcattgctacatagttccccattttgtgaacgcatctcgattcattcartcagtatcctatggatggagattttgattgtttctcagttttcacaatggatgatcaatacccgcaaagaataaccttgtgcatatgtagttttgaatgtttggatgtgcatttttagggtgaatttctagaattgaggctgctgagtagttttggcagacactgtcaaatttccctccctgagcagttattacattttgcatggtcgtcttcactgtttggaaggctctaggtactcacaggctagtcaacagaaagtattgttaggttttcgaattagaactactatctcattgtagttttatttcgttttatttatatagggtttacatatttaaatttatttattaaggcacagtttagttatctatcgtgaagtgcacaggtcttaagtgtt

SEQ ID NO: 735233 - DNA, 493 bp, Homo sapiens
ggatggagattttgattgtttctcagttttcacaatggatgatcaatacccgcaaagaataaccttgtgcatatgtagttttgaatgtttggatgtgcatttttagggtgaatttctagaattgaggctgctgagtagttttggcagacactgtcaaatttccctccctgagcagttattacattttgcatggtcgtcttcactgtttggaaggctctaggtactcacaggctagtcaacagaaagtattgttaggttttcgaattagaactactatctcattgtagttttatttcgttttatttatatagggtttacatatttaaakttatttattaaggcacagtttagttatctatcgtgaagtgcacaggtcttaagtgttaattttgttgccttttgataaatgtgtggggttgcctaggttatccacaccccaatcaagaaatagaacattttcatcactccagaaaattcttttattctcatttct

SEQ ID NO: 735234 - DNA, 654 bp, Homo sapiens
actgatgggtcttgactcttcatccaatttgccagtctgtgtcttttaattggagcatttagcccatttacatttaaggttaatattgttatgtgtgaatttgatcctgtcattatgatgttagctgattattttgctcattagttgatgcagtttcttcctagcattgatgggctttacaatttggcatgtttttgcagtggctggtacyggttgttcctttccatgcttagtgcttccttcaggagctcttgtaaggtaggcctggtgttgacaaaatctctcaacatttgcttgtctataaaggattttgtttctcctgcacttatgaagcttagtttggctcgatatgaaattctgggttgaaaattcttttctttaagattgttgaatattggcccccactctcttctggcttgtagaatttctgccaagagatctgctgttagtctgatagccttccctttgtgggtaacccgaccattctctctggctgcccttaatattttttccttcagttcaactttggtgaatctgacaattatgtgtcttggagttgctcttctcgaggagtatcttggtggcgttctctgtatttcctgaattcgaatgttgagtatggccattttaatgatattgattctcctatccatc

SEQ ID NO: 735235 - DNA, 610 bp, Homo sapiens
attctttggtctttgattttagctggtttggttcatgaggatcccagctaaggcatactccaaactcttggtattatcctcctgacagtcataatagtcatctccctggtgcactgtattctctcaaaagttttaaatgtttgcatacagtcatctatagaatgtcaaatggtttctcttcaactggaacaacaaaaactcaaagaaatgcatgattatgagaacaccataacctatgaacgacacactgtgactggaaaccctaaatgatggtaactaagagtagtgctaatgccctaagctttgctcacactctcacctacgtaaaaacctgaccaaaaggatgagttaaamaaaattatgggaggtcattgttttggactgagctcatacactaggccttaacagaccagaccagatcaaatcaagatggagtcactcatgctaaatgcaacataatcaaattgaaactttaaagaagcagatagccccccaaaaaagaccagaaatgtttttctctcttgaaaacaggacattccagcataataaggaagtctcctctaggctaccttttacaaaaaagtaagttaaagtcctgtttacaaggact

SEQ ID NO: 735236 - DNA, 610 bp, Homo sapiens
attctttggtctttgattttagctggtttggttcatgaggatcccagctaaggcatactccaaactcttggtattatcctcctgacagtcataatagtcatctccctggtgcactgtattctctcaaaagttttaaatgtttgcatacagtcatctatagaatgtcaaatggtttctcttcaactggaacaacaaaaactcaaagaaatgcatgattatgagaacaccataacctatgaacgacacactgtgactggaaaccctaaatgatggtaactaagagtagtgctaatgccctaagctttgctcacactctcacctacgtaaaaacctgaccaaaaggatgagttaaacaaaaktatgggaggtcattgttttggactgagctcatacactaggccttaacagaccagaccagatcaaatcaagatggagtcactcatgctaaatgcaacataatcaaattgaaactttaaagaagcagatagccccccaaaaaagaccagaaatgtttttctctcttgaaaacaggacattccagcataataaggaagtctcctctaggctaccttttacaaaaaagtaagttaaagtcctgtttacaaggact

SEQ ID NO: 735237 - DNA, 591 bp, Homo sapiens
ctttcactggtgataactctgggaaggagaaaaacgaaggcaactagggtctgaaggggacccttgcaaaccacagcagccccacaaaacagtgccatcactattaaaagaaaaacaaacagaaaacaacaacaacgtcaataaaaaagaccccataaaaacccaaatcaaaggtcaccaaccccaaagaccaaaggtaggtaagcccataaagstaagaaagaatcaacacaaaaacgctaaaaactcaaaaagccagaacagctcttctccttcaaatgaccacaacacctgtccagtaagggcacaaactgggctgaggctgagatggctgaagtgacaaaagtaggcttcagaaggtgggtaataacaaactttgctgagataaaggagcatgtggtaacccaatggcaaagaagctaagactcatgataaaacaatacaggagctgatagccagaatagccagtttagagaggaatataaccaacctgatggagctgaaaaacacaacatgagaactatagaccaagcagagaaaagaatctcagagcttgaagactgtctttctgacgtaagacaggcatacaag

SEQ ID NO: 735238 - DNA, 591 bp, Homo sapiens
ctttcactggtgataactctgggaaggagaaaaacgaaggcaactagggtctgaaggggacccttgcaaaccacagcagccccacaaaacagtgccatcactattaaaagaaaaacaaacagaaaacaacaacaacgtcaataaaaaagaccccataaaaacccaaatcaaaggtcaccaaccccaaagaccaaaggtaggtaagcccataaagctaagaaagaatcaacacaaaaaygctaaaaactcaaaaagccagaacagctcttctccttcaaatgaccacaacacctgtccagtaagggcacaaactgggctgaggctgagatggctgaagtgacaaaagtaggcttcagaaggtgggtaataacaaactttgctgagataaaggagcatgtggtaacccaatggcaaagaagctaagactcatgataaaacaatacaggagctgatagccagaatagccagtttagagaggaatataaccaacctgatggagctgaaaaacacaacatgagaactatagaccaagcagagaaaagaatctcagagcttgaagactgtctttctgacgtaagacaggcatacaag

SEQ ID NO: 735239 - DNA, 630 bp, Homo sapiens
acaagctaaataaggcaccagggcccaatcctgaaaatagagagacatgtgacctgtcagacagagaattcaatatagctattttaagaaaactcaaagaaattcaagataacacagggaaggaattcaaaattctatcagataaattcaacaaagagattaaaataattttaaaaaatcaagcagaaattctagagttacaaaaatgcaactgacatgctgaagaatgcatkagagtctctcagtagcagaactgatcaggcagaaaagagaatgactgaccttgaagacagctatttgaaaatacatgctcagagaagacaaaagagaaaaaaaataaaaaacaatgaagtatgcctacaagatctagaaaatagactgaaaagggcaaatctaagaatcattggccttaaagaagaggtagagaaagagatatagatagaaagtttattgaaaaggataatatcagagaactacccaaacttagagaaagatatgagcattcaagtacaagaaggctatagaacaccaagcagatttaacccaaagaagacgatgtcaaggcatttaaataagcaaactcccacagctaaaggataaagaaaggatcctaaaagcaggaaaaaaaaa

SEQ ID NO: 735240 - DNA, 584 bp, Homo sapiens
taactgtacaggtggtggaatgattatgatgaatagaggagcctggatcctgagatccacaaacaaccatcattatcttcttgagtgacctgaggtgagtaacttaacctctgtgaacctcggtttatttgtctgtaaarcaagaatgatgcacctgccccacccttctgaactaacagaatgaccgaggctctgagcagccaggggtgctgtgagatgatttatgagccttgaccttgggctgctactggaaaatcaaggctccaccactgcagtggggctcttactaacaaggcttggtagcctattttggagtctgtcccaaaagactgaaataaattaacttcatgagggattttttcccccaaaatagctataatctataccatcagtcatgacagagcacaaaaattcaactgcctacagggctcagtggtcccataagttatggaaaaaggcaaggtataaagcaatagggaagggtgaagactgtggcaaactgttgaatccatgcccttgccccatcttaggggccaccaagctctactagcaggctgtcgcatggggctaagactcaagattga

SEQ ID NO: 735241 - DNA, 584 bp, Homo sapiens
taactgtacaggtggtggaatgattatgatgaatagaggagcctggatcctgagatccacaaacaaccatcattatcttcttgagtgacctgaggtgagtaacttaacctctgtgaacctcggtttatttgtctgtaaagcaagaatgatgcacctgccccacccttctgaactaacagaatgaccgaggctctgagcagccaggggtgctgtgagatgatttatgagccttgaccttgggctgctacyggaaaatcaaggctccaccactgcagtggggctcttactaacaaggcttggtagcctattttggagtctgtcccaaaagactgaaataaattaacttcatgagggattttttcccccaaaatagctataatctataccatcagtcatgacagagcacaaaaattcaactgcctacagggctcagtggtcccataagttatggaaaaaggcaaggtataaagcaatagggaagggtgaagactgtggcaaactgttgaatccatgcccttgccccatcttaggggccaccaagctctactagcaggctgtcgcatggggctaagactcaagattga

SEQ ID NO: 735242 - DNA, 584 bp, Homo sapiens
taactgtacaggtggtggaatgattatgatgaatagaggagcctggatcctgagatccacaaacaaccatcattatcttcttgagtgacctgaggtgagtaacttaacctctgtgaacctcggtttatttgtctgtaaagcaagaatgatgcacctgccccacccttctgaactaacagaatgaccgaggctctgagcagccaggggtgctgtgagatgatttatgagccttgaccttgggctgctactrgaaaatcaaggctccaccactgcagtggggctcttactaacaaggcttggtagcctattttggagtctgtcccaaaagactgaaataaattaacttcatgagggattttttcccccaaaatagctataatctataccatcagtcatgacagagcacaaaaattcaactgcctacagggctcagtggtcccataagttatggaaaaaggcaaggtataaagcaatagggaagggtgaagactgtggcaaactgttgaatccatgcccttgccccatcttaggggccaccaagctctactagcaggctgtcgcatggggctaagactcaagattga

SEQ ID NO: 735243 - DNA, 642 bp, Homo sapiens
ctttccaatagagaaaagcaagtattttgattaattaacacaattattaaagtattcatagtagatatttgtgatagcatggaaagagaaatgtactggaggttgaagcctcatttaggtcctagccctgccattaagtgaatacgctttaattatactattctaggcttcagtcctctcatttataaaatgaagaagataaattcaatgacactgaaaggccatcccactcacaacaaaaacctatgaatctataattcttcgttcctagagaacgcrgactcggggactcaatgaactctcaaaatgtataacaatcattctcaggtctcaaaaaagtaaaatgattaactcaatatttaattatatctcataaatcagaacttctatccaaccaacatgagtaatttcttatatttagtaattacatttttttctttgtacattagccaaattcatgttccactacaaagccatttcttataagacttcttccatttagaacctaactactcctgtaaggactaataaaaataatatttgtaagtctgaatgttattttgaatgacaattccatgaagcctgggccaagaaaatccaccaggcctacttattccaccactacactcacggtaaatttgt

SEQ ID NO: 735244 - DNA, 490 bp, Homo sapiens
ccggcgacccttagcatcacttggcttgaagacacatcactccaatttcgcctccattgtcacatggcattctccatatgtgtcttctctgtgctcaaatttctcttgtcttaaaaggacactaatcattggattaaggcccaccctgtcccgcatgatctcatcttaacttgattgcacctacaaagatcctatttccaataaggtcacattcaaagatactgagtaggatttgaacatacctctttgaagatacaattcaacctagaataggtgttttccctcaatggaacctactggaggaagagggcatggggataacgtgtagagttttgttatggagkccattcagggattttccgtctattttcctaggtggttttttttttttcttttttggtcaggaatggggagatttctaaaaggtgaaagcactggatacctaaggaatagagtgggttgaatagggtttgtagtggaagaagagggt

SEQ ID NO: 735245 - DNA, 632 bp, Homo sapiens
ccactttcaaactatataaactatccagcacgtctctcttcaaccacactggtccaaacaacctcttcttgcccagaagaatatgtgttcttcttcagactcttcctgaatggctgccaaagttattatgttgaattagtcattyggattatgcactcctctgctcaaaacgctccaatggcttcccattccactccgaataaaagctaaaatcattacaagatcttcaaagcagccttacaggactcgctgttgcagccacattggcctctttgctacttcttgaaaacctcacactgtcctctttctttttttttttttttttttttttgagacaaagattcacactgtcacccgggctggtgtgcagtggggcgatctcggctcactgcagctgccgggttcaagcgattctcctgcctcagcctcccgagtagctggggctacaggcgtgcgccaccacacccagctaatttttgtatttttagtagagacggggtttcactgtgttggccaggctggtctcgaactcctgacctcgtgatccgcctgcctcagtctcccatagtgctgggattataggcatgagccacggcaccaggccagcactgtcctctttcaggtctttgctt

SEQ ID NO: 735246 - DNA, 557 bp, Homo sapiens
aaagcttctgcacagcaaaagaaatagtcaacggagtgaaaagacaacctatggaatgggagaaaatgtctgcaaaccatacatctgataaaaagttaatatctaaaatgtttgaggaactcctacaactcaacagcaaaaaatcaaacaaacaacctgattaagacataagcaaaggacctcaatagatatttctccaaagaagacatacaaatgaccaagagatatatgaaaaggtactcaaaatcactaatgayagagaaagaaaaatcaaaaccacaataagatatcactcatatctgttaggattgccattatttaaaaaataaaacatcaaatgtcagcaaggatatggagataaatgaaccctcgtatattactggtgagaatggaaaatggtacagccattacagaaaatggtacagagaaccaccatatgactcagcaacccacttttgggtatttatccagaggaatcaaaatcaaaatattgaagagatatttgtacttccatgttcattgtggcattattcaaatagttaagaggtagaaacaac

SEQ ID NO: 735247 - DNA, 609 bp, Homo sapiens
accactcgccttgtctaagacacatggtcaaatagaagtgggcagggaatgtaagcactttgcattgttgctttagtggacctcttctgtctgctgaaaagcgtttggtccagctatctgaggagttccactaattgcctcattaggcaatctcaatgcagaaacaatatttaagtacatcagtgcaactcttgggtatatgtaggatttaatagcagatgaagccaaatgagctgaaatggaaaatttatttcttttttaataagccttcttaaattctcattaaaaaaagacagtaagcaattcatgcttttcagcaagctgtagtttttcttaagttgtaaatgcctctgagccatttagagaagctctgaaatattttctgcaaattattctaacattttcaagcatgggatatttaataagagctttacttcttctaaagttaratgtacaacctgtgaatcacatcaaaatgcacaatatgtaaatatacacgtaatacatgcattcataaaggagaatgacctttttaaaatatttaaggctttagtaattatgttaaaaatatccccaacaatggttactgaaatccacacttggttttat

SEQ ID NO: 735248 - DNA, 521 bp, Homo sapiens
cagtttgcaagaacattggcccattcttcatactttatgtaaaaattaactaaaaatagatcacagatctaaatgtaaaacaaaattctcaaatttctggactaaaacgtaagaaaatcttggtaatcttggtttaagcaaaaagttcttaaattaggtgacaaaagyttgatccagaagaaaaaaaatcgataaattggactttattgaggttaaaaattgtcactccaaaaatcatgtaaagaaaataaaaatacatgctagatccttttttacaaaccatgtatctcacaaaagcttgtgtacataatatattttttaaaaaaactcttggccaggctcagcgactcacgcctgcactttgggaggcagaggcaggtggatcacttgaggtcaggagttcaagaccagcctggccaacgtgatgaaacgcctcctctactaaaaatacaaaaattagctgggcatgatgacaggtgcctgtaatccaagctactcaggagactgaggcaggagaatcg

SEQ ID NO: 735249 - DNA, 671 bp, Homo sapiens
ttcatcaggagtagattccatctcaagaaactaccttctttgctcatctgtaagaagcaacttctcttctgttgaagttttattatgaaagtgcagtgattcagtcacatctactggctctacttttagttctagttctcttgctatttccaccagatctggagttccttcttccagtgatgtcttgaacccctcaaattcatccctcaggattggattcaacttcttccaaactcttattaatgttgatattttgatgcctctcacgtttaggctcttaatgacatctagaatggcaaatcctttccaggaggttttcaatgtactttgccaagatccatcagagaaattactaactatggcagctatagtcttatcaaatgtatttcttaaataataggacttgaaagttgaaattactccttgatccacgggctacagaatggatgttgtgttagcaggcatgaaaacaacaataakttccttgtacatttccacagagctcctgagtaactaggtgcattgtcagtgagcaatatattttgaaaggaatctttttttctgaacagtaggtctcaacagtagggcttaaaatattcagtaaaccatactataaacaaatgtgctgccattcaggctttgttgttcctttttctagagaagaggcatag

SEQ ID NO: 735250 - DNA, 606 bp, Homo sapiens
ccgtaccgagtaggaaacctacggagagctgtctaaaacagaaatagacatgagtatttatgaccaggagcaccaatcgcaatacacagtgctaaacacttaatctacgtttagattttactccagatccaagctgaagtcagcagaattaaattttcaaatgtatttcagcagccttaaatccttctgatactgttagcagtggcagggttccaaaatgcattctgttaataagacagtaaagtataaaatcgagttatctctttcaaggagaaaaacacagagtaaaggaaacgagtcttgtaaaattacattccagtattcaggccttttctacctgagttcctttcaatttattcttttactaccagaccattctcctggaaaatagcagggaaaaaaaaagaaattrccccccaacattttttttgaactatgaaagaaatggtactcctgcaaaaagccttaggattttttgcttcttatttttacaggtcagaggaggttaagattttgccaatcagcttgtaacatgcagtatcaagtctccttgggctagcaaaaagaattcagcagctgttaccttttctttctcacttaacataa

SEQ ID NO: 735251 - DNA, 594 bp, Homo sapiens
gttttttcagtgtcaccaacagagtcaacaaggaaacataattagagggctttgaaatgatctactgaaatacctaaattgatagaaattaatcatactcaatctaggacatgttcctttactccttaaaaaagaaaggaaagatctctaaattcaaagctagattgtaaataggcattcaagaagtattgtcttaaatttacgatgaatttcttgtgagcagaggacgaaacaggtgaattctcaccagactcaaaccagatctcaattcrtagtaatgctaaatcgtcttccgtgttctcagaggttcttttcagtgtctgtcagaacttggcatactttctccatagtacgtagaccttctaatactctgctaaatgaaaccacacttgttatctgaaagtgtgtgaaagaaacaatgtatgaaaatttacatttgatcatccggcattggaaatagtttgaactatttccaaaaatcccttaggggatgaggggtgaaatttaaaagctcctgaaaatgagtactgctgtgttgagcttttctttcctggggtatattaatttagttatatttagcagaagaggaatata

SEQ ID NO: 735252 - DNA, 574 bp, Homo sapiens
tgatttgattttccatcagagcattagactttccccgtatcagcaatgaggctgtttttcattcttatcattggtgcgttcactggagtagcacttttaatttccttccgtaacttttcctttgtgttaacaacttggctctttggcacaggaggcctagtttttggtctctctcaactttcgacatgctttcctcactaacttatcatctctagctttccatttaaagtgagagatgtgccacacttcctttcgacgcttagaggctawtgtaaagttattaattccgatattattgtgtctcagggagcagagaggcctggggagaggaaatgagacagaagaatgacagagctgtcagaacacacacatttcagttcaccgtcttacatgggtgtggtttattgtgccccaaaacagttacagtagtattaataacatcaaagatcactgatcccagatcccgtgacaggtataataataaagaaaaatgtgaaatattggaagaattactaaaatgtgacagagacaaaaagtgagcaatagctgttgcagaaatggtgttgatagttgt

SEQ ID NO: 735253 - DNA, 521 bp, Homo sapiens
gcgggaaggcagtccttgttcaagtggacattcgccatttagactgttaaaattgcttcttcctctcagatcctggttttctttaaggcacttgtgtccccttgtccgggcttgacccatcaggatccttaacccaggccctggagggagccctctcattgcagtcctggtgtctggacttgcggctaccacaccacatgatgtctcaagccaccctgcttcctctgtttttcccaagctttgttctcttgcctctcttgagttgtctggtaaccttccagtaaattgccaacgtgctggtactcactggaatttgttgcagttgcctgtcagcgaagaatcttgatgggtaaagatgggtatagmtccaggatgtgctactaagacaagcatcagaagtacttgcaccacacatctccaggcaaacactctgcctccagaggtccgtgatggttaatactgtcaactggattggattgaaggatgcaaactattgttcctgggtgtatatgtaagggtgt

SEQ ID NO: 735254 - DNA, 567 bp, Homo sapiens
tcattaaataggttttatattactttgatttcctcttggccttctagaatactgaaaattcaaatatttggtaacttcatgttatcttatgtgtcacatgggctttgtccattttttaaaaatatatatttgtttcactgggttattactaaacatctgtcttcaagttctaaattttttcatctactcgatctagtccatcgttgaagctttcaaatgtgttgtttattattttattcagtgaattgtttatttccaaaatttctatttgcttctttttaataatctagcccttggtaaatttcttcttcatattctgaattgcttttctgatttcattgtattgtgtatctgtaatccyttgtatcacattgagctactttaatattaattgaattatttttctgtaatttaataaatttcttttttattggaatctgttgctgaagaattactgtgttctttggaggtatcattattttcttactttttaatgtttcttgtgcccttacgttgatatctgtttatctgctaaaacagtcacttcttccaagtttttcaatatgc

SEQ ID NO: 735255 - DNA, 575 bp, Homo sapiens
gctccatgcttccacattacagccactcccttgcccataactttaactgcctctactcccctcccctcccttcccctgccccccaccccctgccctctcctgccctcttctgccttcctcttcctgcctcttccctcctctgcctctctatttctgttctcttctggcaaatatcctgtcccagctaaaatcaactctctccttaacttttcatctgcatccagatagctgagtgttactggagaaaaagcatacaaccatactgtgtcattccactttaaatttaggatcatgactcaacagagctattgctactgayggaatattccattaccttctctgtgaattcattttcacacttacagaaacaacaatctcatgctttctctggcttcttccaatatccaaaacttctgtttctagagactttaggtctcttctttttctcattctctgcacatcacttattcacatacttaaaagtatattcaatcaagaaagaattatttatgatttgacactgaatcagaaagaaaatatgtaattgcttctccttttcattcttctcctttccc

SEQ ID NO: 735256 - DNA, 538 bp, Homo sapiens
ctattctcagtgtttgcttacatcttcggcattgctctacaacgtgctcctcagttcacagaaataactgtctgtgcataagtaacaaaatggttttgaaaaaatagtggtgacagaacataaatgaagcaggtggtgaagaggtgtttctgaggagagaagacragacaaatataaatacttgaagagctgctttcatcagatccaatgagattcttctggagagtaggaagacagtgttttgttgtacaagttgtgtactgaatataccctggaggtgtcttcacatcatagtttatgtaaatgccaccatctagggttgtatagtttatctatggaatacacatggtggccctgctgtagagtggtttgggatagcagatataaatctattatttgcatgtttttcatttttgcacacttcttagcagaaaataaaatttatttgttaagtaaatgtatttttttcatatagaaagtaaaccaactccttttggagcacaaaaacaaatattttattaaaagcattttaatattt

SEQ ID NO: 735257 - DNA, 550 bp, Homo sapiens
attctgttccattaatctatgtgtatatatttccatcaatttcatactacctttcttattgtagctatatagtaagccttaagtagattgattctccctcttgtattctactgtctcaagactattttagctattctagtgctgtgacttttcatataaattttactataaacttgtcttcatctacaaaaaaacactgctagaattttaatacaaaatgcattaatcctattgatcactgttggggcaattgcatctttactgtattgatttgtccaattcacgaatgttgtaggtctccctatatatttagatcttccttgacattttttatcagcagtttttaatgttcagtacgtagatcctgtatatcttgttaagtttatattrgtatttcattttctttggagagattttaaatggttttatgtctataattgcagtttccacatgcctatttttagtatataaatatgtgattgatttttgggtgttagtcttctatcctgcaatcttgctcaatcagtcctgggaaatgttctacagagac

SEQ ID NO: 735258 - DNA, 607 bp, Homo sapiens
ctatgaagtcatatgaagtcttcatggagacttcacagtagtctctatgaagaattagatttatttggagacaaaacttttgagcttagatcagtaggaagaaaacggaaatgggcattttgaatgaatagcaaaaagcaatttcttacaatrtaatttcccccaaattcagttggctgttttcaagacggtaacttcttccttgctgaaagtttgaaagccgaggctgctggccaggcactgtgaccgtgtctataatcccagcactttgggaggccaaagcaagaggataacttgaagctggaagtttaagactagcctgggcaacatagtgagaccccatgtctacaaaaaaaattaaaataattagctaggcatggtggtatgtgcctgttatcctagctactttgggaggctgagaagggagactcacttcagctcaggagttcgaagctgcagtgagctatgattgcacaactgtactccagcctagatgacagagtaaggtcctgtttctaataaaaataaaaataagtaaataaacttatttttttaaaaggaagcaggggctgaaagaatgtgcttcaaggagaatttctaaggagtc

SEQ ID NO: 735259 - DNA, 539 bp, Homo sapiens
tgggccgggcacggtggctcatgcttgtaatcccagcactttgggaggccaaggcgggtggatcacgcagtcaggagtttcagaccagcctgaccaatgtggtgaaaccctgcctctactaaaaatacaaaaattagtcaggtgcggtggcacgctcctgtaatcccagctattaggaggctgargcaggagaatcacttgaacctgggagatggaggttgcagtgagccgaggtcacgcaactgcactccagcctgagtgacagagtgagactctgtctcaaaaaaaaaaaaaaaatctaagatgttattcgccttttttactcacattctctcacaagtgcacagaggggtttttcaaaggctacatgatgttgtgatatgatacgttgaatacagaagcagatataagaattcagctgtcttctattataccagacatgaaagagatatgcaaaaacaaaaaacgatgcctctgttctccctgtgttttgtatgtttgggggtatgtaaaataatattaatgttaacatataatgg

SEQ ID NO: 735260 - DNA, 575 bp, Homo sapiens
tctcttaaaacaaaaaaatttagggtcatagataagtatatgtgaaaatacagtatagatattcaaatctctattgtagtagttcacaaactttctggtctctagatccctttacaatcttaaaaaattattaagaaccccagaacttttgtttatgtgggttacatccattkatatttattatcagtcgaaatgaagtagaaattaaacagaaatttaaaaatgtttttaaaatgtttattcatttaaaataatagtaggctgggcttggtcgctcatgcctgtaatcccaggactttgagaggctgaggcaggcggatcacttgaggttaggagtttgagaccagcctgtccaacatggtgaaaccccatctctaccaaaatacaaaaattatccaggcatgatggctggtgcctgtaatcccagctactcaggaggctgaggcaggagaattgagcttgaacccgggaagtggagtttgcggtgagccgagatcacgccactgcaccccagcctgggcaacagagtgggacttcctctcaaaaaaaaaaataataaataataaatataaaaa

SEQ ID NO: 735261 - DNA, 575 bp, Homo sapiens
tctcttaaaacaaaaaaatttagggtcatagataagtatatgtgaaaatacagtatagatattcaaatctctattgtagtagttcacaaactttctggtctctagatccctttacaatcttaaaaaattattaagaaccccagaacttttgtttatgtgggttacatccattgatatttattatcagtcgaaatgaagtagaaattaaacagaaatttaaaaatgtttttaaaatgtttattcatttaaaataatagtaggctgggcttggtcgctcatgcctgtaatcccaggactttgagaggctgaggcaggcrgatcacttgaggttaggagtttgagaccagcctgtccaacatggtgaaaccccatctctaccaaaatacaaaaattatccaggcatgatggctggtgcctgtaatcccagctactcaggaggctgaggcaggagaattgagcttgaacccgggaagtggagtttgcggtgagccgagatcacgccactgcaccccagcctgggcaacagagtgggacttcctctcaaaaaaaaaaataataaataataaatataaaaa

SEQ ID NO: 735262 - DNA, 619 bp, Homo sapiens
agcaaattattattatatatggtacatggtgcacacaagacatctgggaacacagagaatgcagcaatacctggcgtggggaaaagtcaagaaaggctttacgaagaggtaacctttgagttgcaacttaaagaacaaatagaaatatgccaggcaaagatggggaagagaaagctacatttcaggaaaggaacacgggaagaaaggaaagcacaaaggaagaaaggggcattccacactaaggggcaagcctgaatactggccccatttttattttcaagcctgtcagwcctgccagtccttcctggctcccttgagcctcttccaaatttaggcaaccagtccaagcacatcatgtccctctgggtcacatcccattaaaacaaggctccaaatggggtcccactaataaaaccccataaccctgctaatcaaaactgcttattttacaagccccagcaacccacaatatatgggaatagtgtttgctgtttcctggaaaagaccacgcactgctgctgcagatagccaactatccatacgatggtgacgcaaaacttccagtgggagctggagaccctctgggtgggccggctgtattgcgaagtgctgtggtact

SEQ ID NO: 735263 - DNA, 551 bp, Homo sapiens
aggtgtgattttctttggtaaggagagaaaagagcaaccatgaaaggagaggtgacactttctctagcagatggattttaggaaagactatagtaggaaactgataatctgaacattaagtcctttaaaatgatccatgccttcatactgctttgaaagtcttcatgtactcacaaaagtatctgttctccagtttgttgctgtgttgcagaacttctsaaacactttagacctgttgcttttcccactgactggtcagtgtagctaataaaccatgaggttgcacgtatgtatcccctcactgtctacaacaccattgataggaaaaaactgaggctcgccatgtgaattgtccttggattatagcaatgtaggctgcatgttgctttcttctcctcattatcttcccatagggatgagtcagcagcttggtccagcaagcagcaaaacccatgaaccagcctttgccagggcagttgtaacatagctcagacagtcacgcttcacctcactggagaaatgtggcccataaagggaaaaaaagacaatca

SEQ ID NO: 735264 - DNA, 559 bp, Homo sapiens
tgcccttctccttctcacctccctgcatctctctgaccacattcaccttgcctcccctcttctagtaccagtaagtaagctttcctaggcaaaggcagaatctcaccacagcgaaatttgcctcaattgcaatcagcaacagagagggaaaaactgtccaaattaagctgcttgattacggaaattaatcttgtcatttagcgtccctgttctgcagaacagggcctttgattagcctccttgtttcagaatattacaagcagacgtttattaagcagaaggcttttttttttttttttttttttttttgtagtcaggcaagtcacaggaaaagtaaaggtagcaaggggcttcttaaaaaagggcaccaagtcaaggactgtcagtctgcttctgagtccgtctcacagagcaggactgtcrtagaatcaggaaccttaaccaacccacccagcttaggatggctcctctgaagggaagtttaagcagcagtagaaagataatccataatctgttatgcttttagtaatggaatgaaccttttgacctagagacaaag

SEQ ID NO: 735265 - DNA, 569 bp, Homo sapiens
ctttctactctagcttaagagaactagaatggcctctggcccagtgggaattctgggaattgttcttcttatggctccttgataattgtttttttccacagaaagtaaccttgtccagacatggaatttcacctataatatgcacagatttgagcaaaaactcaaaaggaacccagcgcatattaccggagctccttctaaccttaggaattccatcccacaaaactctcatgccttatcctccccaaatgctgatctctgtctcctcaactcagtcarattgctgggttactcctcattgaacctcagtcctggaattatctccaggtaaacagcctagaaaaaccttacttttcttttctcaggaataataatcctgtgctacccattgtccaatgtctaaaagtagccattttcttttcccccttccaattttctagttatttatggtgggagggtaatttcagattgccacactccctcatggctggaagtgaaagtatcacaatttttgtttctaatgttcaaatcagatcatatagttcctgcttataaaccttcagtggctt

SEQ ID NO: 735266 - DNA, 610 bp, Homo sapiens
tggaaaaatgcaagtgctgtagtttgaccgtccaaacctttgttgaaattcgatccccaatgttggaggtgggtcctaatgggaagtgtttgggtcatggaggtggatctctcatgaatggcttggtgccctcctcaaggcaatgagtgtgttctcaatctattagctgytgtgaaagtcaccctaagagcaggttgttaaaaagagtcttgcaccttcctgcttccgctctcccacctcgtggtctctggacacaccagctccccttcaccttccaccttcagaggaagcagcatgaagccctgactagaagcaaatgatggcgccatgcttcatgtacagcctgcagaagtgtaagccaaataatcctcttttctttataaattacttagcctcaggtactcctttatagcaacataaatgaactaagacagcaggcaagttaattttctgattctccatagaaccagtacaagtaaattctaagttgccccaaatgacaatgacagagctgggagaattctcagtgtttattaactgctggtgatcctctcttctaggatcccctagaagatgccagctcaggcccaacaggcatggagtcacagaa

SEQ ID NO: 735267 - DNA, 623 bp, Homo sapiens
actactagccttagttttttcagctataaactggtgataataattatgctcatgtaagaattgttggaaggattaagcgattcagggctatgcatcagagttgggtaaagtgaggagtataagtaagtgctcaatatatgttacttgctatttttttaagaaaacctaattaaatagaatgtcttgcagagtcccccataaccactgatatcaattgaaattaacttgctgttactatcacccagaagtaaaattgggagacactgtgagtggcagaagcaatcttttgctcctctagcgtctttactaaaatgtgcaagggccccagaacatgcatgaccatagaggtgaggtraattggaagtagatttttacgttacttagcttggcatgagttgaaagcatccttactcttcctacatagcccctgatacttgaggtatgagctgagaaatcctcctcctttgagacaactgctcactttctcagttctgatctcccatggaactgagggatgcaaatatccttcagtacaggcctggattaatcctctcctctcctggcctccatctgcctatccatcacagacgcagcccctctgtagtaaatctctaagccttcgg

SEQ ID NO: 735268 - DNA, 600 bp, Homo sapiens
atactccggcactttttcacttacacccccagtggccctccctcgtccagtccaacacagtcaatccttgcaacaccccaaacaggtttccacacgtgacttacctaccagtgagtgacccactcaccagattaaagccctccttccagtaactcttagttcctttcagggtttcttctctccaccttcccatcttgcttccagcttccctcactggtagagaattaaggacacactcatatatrtgtgtgtgtgtgtgtgtgtgtgtgtgtgtgtgtgtatttatttatttatttatttaatatatatatttaaattttgccaattctagtagatgggagatagtatctcactggttttaatttgtagttccagtatggctaatggtgttgaacaacttttcatgtgcttatttgctatctgtatgtcctcttttgtaaagcatctgttcagatattttgccgatgcttaatgattttgtttgttgtttcactttgagttttgagagtttttcatatactctggattcaagtcctatgttagagatgtgattcacagacactttctgcagttggtagcctgtctgttgcttcacttaac

SEQ ID NO: 735269 - DNA, 551 bp, Homo sapiens
agggccacgtccctggttaggcctcaccttcaggcctgggagggcctcatggctgggggctgggctgctagactcacaggccaggagcggggacttgtgattccttttctgggtgcccgtggtcacccatggaccaattggtatgcacttcctcccttctgagktccataaaaacgatgggctcagccagaggagggcagaggatggagagatgactgaatgaccagctgagaagaggagccaccctctctgctgagagctgggaagatgacaggatgaacagctgcagataggagctctcctctctagggcctcctctttgctgagggctgaacacttgacaggatgacctgcctacagagaggagctacccactgtgggtctcttctgagctattctatcacttaacaaagctcctctttgtcttgctcaccctccatttgtctgtgtacctttcttcctggatgcaggataagaactcaggcaaaagtgccagcagccacagaggtttccagccagaaagagcaacaccccaaagattccataacaat

SEQ ID NO: 735270 - DNA, 588 bp, Homo sapiens
aactttagccaacatgttcatacacagaatttctttcacaagatcaatttttcacaaacctttcataacttgcttaaaccttcagctttattctatcttaaaacttaaaacaatccttcaaccctttaatctaggcaaaaacaatccacattcccatgccttcttataatcttttaccaaaaacacatttcacttttttacacaccttgcatgtaaaactttttttcctgaagattacataagtcacatgaactaaaaggcattatagtttttgtttttctgagaaaatatttgatwtaagctcttattatttttaaaccaattaattaaagctcttttatataaacattacacacaacacatgtaaatacacagacagacagaagaagatccagtagttgtaagattgttcatttgccagtttgttaattggattactggcagggtggagcctttggaggaacagggccaggaaagcatgcagtttctacagcctaacaagcaggcacagctggaaggcaaaaacagatccccaaaaattaagggcctcatttttacaccaggtcctggatccccaaaagaaatgct

SEQ ID NO: 735271 - DNA, 633 bp, Homo sapiens
ttcagtgtttggtttatgactccttaaaatgttttacccatagctcctgggacaggagccagaaactctgcccctgtagaacccagcagagaagaagagctgagggctggtagctgactcacagccagctttctgatgtgcatggtcagggaggaggtgctagggtctcagccttcccttgccccacacttcagctgagaacctctgaagaggcgaggtgatgtcaggaactcagcagcacgcccttgctcctccattccagatgtaagtcaactcagtccctctgcaggcagcaagcatyggctttctgtcaatatccattcatccaaagtgtcccccaaaaccaccctcttacccctaatctcagtgccttgttgaggatggggctgatcccacccctagttctagatctaggctcaaaccaccatcaactcccacctctgcgagggctggttaagggatggactcgggacacatcagagacaagccatgctaaccccaggacctcgctggagcagccgggagagagaggaccttgctttgtcctcctggacagaagcgggctgtgtctaccacactcacctctgttctctatccagggcagaaactgagaatggctcccacacacaggaa

SEQ ID NO: 735272 - DNA, 633 bp, Homo sapiens
ttcagtgtttggtttatgactccttaaaatgttttacccatagctcctgggacaggagccagaaactctgcccctgtagaacccagcagagaagaagagctgagggctggtagctgactcacagccagctttctgatgtgcatggtcagggaggaggtgctagggtctcagccttcccttgccccacacttcagctgagaacctctgaagaggcgaggtgatgtcaggaactcagcagcacgcccttgctcctccattccagatgtaagtcaactcagtccctctgcaggcagcaagcattggctttctgtcaatatccattcatccaaagtgtcccccaaaaccaccctcttacccctaatytcagtgccttgttgaggatggggctgatcccacccctagttctagatctaggctcaaaccaccatcaactcccacctctgcgagggctggttaagggatggactcgggacacatcagagacaagccatgctaaccccaggacctcgctggagcagccgggagagagaggaccttgctttgtcctcctggacagaagcgggctgtgtctaccacactcacctctgttctctatccagggcagaaactgagaatggctcccacacacaggaa

SEQ ID NO: 735273 - DNA, 551 bp, Homo sapiens
tgaagtcccacaataagctgtttgcaagctgaagagcaaggaagccagtccaagtcccaaaacctcaaaagtagggaagccgacagtgcagccgtctgtggccaaagacccgagagcccctgtcaaaccactggtgtaagcctgagtttgaaagctgaagaacttggagtcccatgttcaaaggcaggaagcatccagcacaggagaaagatgaaggccagaagactcagccagtctagtccttccacgttcctctgcctgcttttattctagcctcgctggcagctgatggtgcccacctggattgagggtgtgtctgcctctcacagtccactgactcaaatgttaatctcctttggcracaccctcacagacacacccaggaacaatactttgcatctttcaatccaatcaatttgacactcaatattaaccatcacacctttccttcttgtgtccacctggaggccccagctctagcctcatcctccctgggaagctaccactggcatccccagtcccggggcttctggacctaatacctcagccca

SEQ ID NO: 735274 - DNA, 595 bp, Homo sapiens
gatggaagcctgaggcccatcgggaggagaatagagtctgcctcactgctttcacctgccccgactggaagccccggcccctagccctcccctttcccctggcgttgggtgggctgggtgacgggtggaggagggacagagggcctggtgggctgcgtgcccagaactggcactgagggcagggcagggcaggccgccaccctagaggcccctcacccaagtctccaggagtcctgttagggagaaggccagcatgctggagacctcatccttgctcctatcccctgctgacaccaccyttagttctcaccaggagacagatccccgtcacaagcagggcataagactactcttagccctccaggtggagaccccagaggccagtgcccacagagcccagtgcccttgggggcacagggaagacccatctcaggaggaggacagaggcagctttagggggcctgaggcttttaccacccagggttttgaaaaagaacatgcaaagatctttcttttgcacattttacaaaaacaccaccttggaggtgtcctcagcccggggaaatccacctctctcaagagcccctggggccac

SEQ ID NO: 735275 - DNA, 660 bp, Homo sapiens
tttcaggaacttgacctcgtttaattgtgggatctggctaaacagtctctgtaagatttttgtcttctcaactcatgctggagcttgaagttcacaaggcaggccatcagaagacagagggatcataaagtcagggagagcagtgacaagctggaactgctagaatgggctggaattcatgtcagttctccctgtctccagtcctaatgatgtggatgtcctgtaggagaagcatcatggagctagagaaacacttggcttacacatcagtgaagcagaagggggatccaggaaagttggagcagctgcctcatgaaaagttgctaagcagcaacattaaggctgmagctgctgagtgtctaaaacagactggctactgctttacttccacccttcactgctctagcaaaaatgtctcttttagcccaccctagccctaaacacacagggaagagaattctgggaaatgcagttcagcctggccaagttgcacattagaaagccaccaaagcaaataagccttctgcataacttctctaatatttcaaaagggtagtattctgcaaccagggctttttccaaccttctcataatacctggatgatgaaatttgaggcataaccagtgtatttccttgcatcattattgttactgtggggc

SEQ ID NO: 735276 - DNA, 491 bp, Homo sapiens
gacctggaagttctaatagaatatgtgttaaaaatacgggaaacatattattttaacatcaaaagaggaacaaagaaaaagattgtttttgcttttcccaactgccctctggtggcaaaggcacaacagacagcaaagacgtttaacaaagattcttgctgtgtaggtgctgctggtggttcttaagaggctcttaaaccaaagtctgtactgtacatgtgtgcttctgaaaaagaagaacagaatattgggtctcataattayattttacttcccagcggcatctgttcttatcatagtagcaccaggctctactagctcagtcaatacttgtatattaacaagagacaatcgatagaaaaattaaaaggaaaagtcaaggtaattaggctaaagctgctgcttatgggttttcaataattactttagcttcctcttgttttcccatctccagaaaaatagggcctgattgaaggccctgattgaagggc

SEQ ID NO: 735277 - DNA, 540 bp, Homo sapiens
aatacactgttgctaaaagtagtgataaactttatatacaaggtgtgcattttaaccatcacagccatattatactgacttactttctaactctccatcttagatgtagtcaacatattgatcataggttttaaagtatccaaggacttgcccctctttctggatagggagatcttcaacctgttgaccacataattagatgaaatatatattctcatgtaacaaacctgacgccagtagtgttaggcagctcctaagggagtcagaagctgcttccagcctcgtaaataatgagcacataactaacagaacctgatcttcccagcagaaataagtcagcctmcttcacagtatgcaatatggtcaatgaatcagtggttgctgagtgaactgcacttcccccagctggaggagaaacaagcttttttaggagcgatagagcatgcaataggatgtagatgggaaaggaatctgatgaattgattttcactggaaaagtctcagagattcttcacctgagattgcttaatagtcctaaag

SEQ ID NO: 735278 - DNA, 623 bp, Homo sapiens
cctgtgtccacacaatggatagttttcaaagcaactacccattatgcatgtgttcttaaatggtacgttgaagagactatacaaagaactttttttaaaaaatcaagtattacgcagccagctcatatataaccattgttgaakagaactattaccctcaataaataagaaatgatgacacttggaaaagagagaacaatagttaatgggtctgcttttccctctaaccacaaccatgaaaatataatcctcattaaagggctataaagttgtctgctttcaaggttcagcacactaatgtctccttgcttttagtgctgttttagtatgttgaccctctgttccctgcagctgggagtttattagtctttgtggcctttgggaatgaatattcataatgagatagcagtgatgtttcagatcctttttaaggccccaagagtattactctgagcaactaggaaaactgagaaaaaggcaaatcatgccagcatcccatactgaatcatggaacacggggctgtatgcaaaggacctggtgaggaaactgaagcctagggctacccagttatgaatagcacagccaggccagaatccaggtctttcaattcacagtccagatt

SEQ ID NO: 735279 - DNA, 524 bp, Homo sapiens
gcttctcagaaagcttcgttctaagtttttatctgaagatatttcctttttcaccataagccccaatgtgctaccaaatatcccttcgcagattccacataaacagtgtttccaaacagttcaatcaaaagaaaggtttaactctatgagatgaatgcactcatccaaagcagtttcacagaaagcttctttctaatttttatstgaagatatttccttttaaacaataggcctcaatgcactcccaaatatcccttcacagattctactaaaacagtatttccaaatggctcaatctaaaggtttaactctcttagatggatgcacacttcacaaagcagtttctcagaaagcttctttctggtttttgtctgaagatatttcctttttcaccattggcctcagtgggctatgatacatcactttgtagactctataaaaagtgtttcaagactgctcaatcaatagaaagttttatctctgtgagaagaatgcacatatcacaaaggggtttctgagaaagt

SEQ ID NO: 735280 - DNA, 632 bp, Homo sapiens
ctgagtggcctaacaaggaggcaccccccagtaggggcagactgacaacacacaggaccaggtactcctctgagacaaaacttccagaggaacgatcaggcagcagcatttgcacttcaccaatatctgctgttctgcagcaaccactgctgatacccatgcaaacagtttacggacatccagcaaactccaacggacctgcaggtgagggttttgactgttagaaggaaaattaacaaacagaaaggacatccaaaccaaaaacaaatctgtacatcactatcatcaaagaccaaaggtagataataccataaagatagggaaaaaacagaccagaaaaactagaaacgttaaaaatcagagtgcctctcctmccccaaaggaacgcagctcctcaccagcaatggaacaaagcaggatagagagtgactttgatgagctgagagaagaaggcttcagacaatcaaactactctgagctaaaggaggaagtaagaaccaatgacaaagaagttaaaatctttgaaaaaaaaattagacgaatagctaactagaataaccaatgaagagaagtacttaaaggacctgatggagctgaaaaccacggcatgagaactacgtgacgaatgcata

SEQ ID NO: 735281 - DNA, 587 bp, Homo sapiens
gtcataattattccctgaatttatacaacctagaccactttgcatttcacacatattatctcattaattctcattttaatagtttaaaattgagtttgtgtgcatgtgagttttcctggaagcttcataaccatggtgggtgattttcacaggaccacggaagcctttgcagaggttttataaagattagtcctaattcatgaagcaaacaaacatcacagagggaaaaacattaacctactgctccctgtccccagaaatccatgttgcccctcggggttcccgcaggctctgcttggacttgccttccccaagaccccaactcccatgccagggctgtgcatctgcttctcacatcctcaggaaccccagcaagacccacgccttgtcatttatttctgagcctctgtggcctagtccaatgctygttaaatctacacattaataggtaataagtgagtgaacacaaatgtgatgaatgctgtggtgagtgaacactaatgtaatgaatgctgtggtataagtgagtggacactaacattgtgaatgctgtggtgtaacaagaaatctacttgtgatctttttcc

SEQ ID NO: 735282 - DNA, 614 bp, Homo sapiens
ttataatttatcaatgtaaacatatggtgatagaatacataaacagacatttaaaattatgtacaaagcaggaagtcctttctttttttgtacgatcttcaccaatttcagggaatttcagaggacacattaaaatgacattgtatgaacttgcctttaaaattaaattcagaattatgcaaaaccgattgatgtgaagacataaaacctcttagaaaatttgttccacaaaaattatcatctttagttttactaaaaacttttcagaaatgtatcccaatactgtcactcacaatttttaacgactccaataagaactaaatcagcmaaaaaaaatcggtttctaaaattaaaattatcaaaaattatttgtgaccttacatttgccaagtgactgacattgctttcaaatatgtcaattggaaattaagttgctaaaagtaaaatttctgatgacctgataaatgaatttgcaaaaatataagcccgagaaatttatcatcaattaaggtattatactgataaattgttatttgttgtattgtatgaattatgacacaaaaatattttcttaattttaaatttatattgttgaatatcatgattaccttaat

SEQ ID NO: 735283 - DNA, 388 bp, Homo sapiens
catgtcagcctccttccagccctgggacagccctgcccctcccttaccttgtcccagtctccccatcacacccacaccccttgtttaccaaatgttcgatcttggttatgttactataaaaatcaagcagctggcaattccagcttgattaccaggtctccagttttgattagtaaattactgtggtaatcaaggttaattctcgctgcagcgctcagcartggattttatatttttcagggaaatggttttcctgcctgggatggagaacatttcattaaaggaacccaaagataggaaagaaaggaagtgagtcctggaagtatggagaatgggcacctgcaggtctcctctctctgtcctaccttccagtcggcccttggctggg

SEQ ID NO: 735284 - DNA, 688 bp, Homo sapiens
ggaggggagtgcttccttggatatctttctccaggtgaaaccatttggcaaggtctcagaactctaggaacagtctggaagcccctttttttgccaatgttgggaatgtcttgcccatcacagggatttgtctgctttggaggttatcaaacctgaaattgaaggcagtggtccagcaggatttaaagtcttttctaattggcagaacctggaaataatattgtgaatctggaaccaaagggcccctattgccagtgcctttggattctagaaatgtgagctcaatagtacctattgaatagtccctaaatctctgtccttacctcgcaggtcagcagttctagaagaatctttctggacaaaagacctggagttggcacttttggctgccactcaacattgaatggcctctagctgtgacccatcttgggacaagaaaataaactgtaagtttggaaaatgaagacttttaaaaagattagactgggagcagtggcccgtccttataatcccagcactttgggaggtcaaggcagraggatcaattgaggctaggggtttgagaccagcctgggcaacatagcaagacctcatctctacgaaaataggaagtattagccaggtgtggtggcgtgctcctgtggtcgcagctactagggaggctgaggtgggaggatcccttgagccc

SEQ ID NO: 735285 - DNA, 607 bp, Homo sapiens
gtgctgagtttcagacacgcaaggatggacagcacacagctttggccctccaggcgcttgcatccgactgtggagagccactcttagaaacccagggagcaatccaagtctgtgtgtgacgccactcctggacctggggaacacagagcccctgccagtgccctgggagctggtattcttgcagggktggagacagacctgtcttttgtggcctgttagtttccttgtggctgttgcaccaatgaccacaaacatggagacttaaaattacagacatttgtgctctcacagttctggagaccaggagactgaactcagcatcactgggcccacatcgaagtgtggcatggccctgcttcctcagggggctcccagggagaatccgttccttgcctcttctggcttctgctggctccggtgttcctgggcttgtggctgtatcactccagcttcagtgccagcaccttcaaatttctccgtgctgaattttcacatagacttgccctctgtctgtgtcaagcctccctctgccttcctcccttaaggtcacttgtcactgcgtttaggtcccaccaggataatctttgcatctcaagattctgttctt

SEQ ID NO: 735286 - DNA, 607 bp, Homo sapiens
gtgctgagtttcagacacgcaaggatggacagcacacagctttggccctccaggcgcttgcatccgactgtggagagccactcttagaaacccagggagcaatccaagtctgtgtgtgacgccactcctggacctggggaacacagagcccctgccagtgccctgggagctggtattcttgcaggggtggagacagacctgtcttttgtggcctgttagtttccttgtggctgttgcaccaatgaccacaaacatggagacttaaaattacagacatttgtgctctcacagttctggagaccaggagactgaactcagcatcactgggcccacatcgaagtgtggcatggccctgcttcctcagggggctcccagggagaatccgttccttgcctcytctggcttctgctggctccggtgttcctgggcttgtggctgtatcactccagcttcagtgccagcaccttcaaatttctccgtgctgaattttcacatagacttgccctctgtctgtgtcaagcctccctctgccttcctcccttaaggtcacttgtcactgcgtttaggtcccaccaggataatctttgcatctcaagattctgttctt

SEQ ID NO: 735287 - DNA, 610 bp, Homo sapiens
tatcctgaaatcatcaggatgctacacgtgcattcaatgtcctatttacgacctatgcttagccttcatgtctctgaaattatttgagcactcagaaagactataatctctactgccattttagctcccctcttcagcatttcgtttgaggtagagaaaacaaaacagattatttagctatagagcacatgagggtaattaatttagtcaatatttaactctgaagccattactttcttgcattgcctagcttcattttttcccatggtgaagctcatttatgcatcacttattttcactgattttgaaaaaattaatgtaggaagttatagcattcctgttctgtacacacctaaagataaaacataccyggatgttttcttctttaaaatcaccaataattacataatagtgaacatttgtaaactacttattttttaataactaaaataatgcattgactttattttaaataaatgcctcataaatgtgtcaaattaacttctgcaaaattataaaaacaaaaatatttttaaaaggaaaaagattaaaataaagtctatattcctcgatgaagcagatctagatatcagcaatgaagatccaaatt

SEQ ID NO: 735288 - DNA, 626 bp, Homo sapiens
tctaaaatccgtataaaatgactttttaaatgttttttattattattattattattattattagaattttggccggtctcgggctcacacctgtcatcccagcactttgggaggctgaggtgggtggatcacctgaggtcaggagattgagaccagcctggccaacatagcaaaaccccatctctactaaaaatacaaaaattagccaggcctggtggcggccgcctgtcatcccagctacstgggaggctgaagcaggagaattgcttgaacctgggaggtggaggttgcagtgagccgagacggcaccattacactccagcctgggcaacaagagtgaaactctgtctcaaaaaaaaaagaatgaactttatataaaactacaatattacaatttctgaagaagcaagacatatcagatcatagagttctcaaatgtaactgtataatattgttctctttttcagtatagcagaggcaaaactttaccctcttagaattttcagctgggcctgagaattaaattgacataaaacagattaacagaagaaaagcacatgaatttatttagtgtaagttttatgtgacacagaattttttataagaaaatgaagacccaaagaagt

SEQ ID NO: 735289 - DNA, 626 bp, Homo sapiens
tctaaaatccgtataaaatgactttttaaatgttttttattattattattattattattattagaattttggccggtctcgggctcacacctgtcatcccagcactttgggaggctgaggtgggtggatcacctgaggtcaggagattgagaccagcctggccaacatagcaaaaccccatctctactaaaaatacaaaaattagccaggcctggtggcggccgcctgtcatcccagctacctgggaggctgaagcaggagaattgcttgaacctgggaggtggaggttgcagtgagccgagacggcrccattacactccagcctgggcaacaagagtgaaactctgtctcaaaaaaaaaagaatgaactttatataaaactacaatattacaatttctgaagaagcaagacatatcagatcatagagttctcaaatgtaactgtataatattgttctctttttcagtatagcagaggcaaaactttaccctcttagaattttcagctgggcctgagaattaaattgacataaaacagattaacagaagaaaagcacatgaatttatttagtgtaagttttatgtgacacagaattttttataagaaaatgaagacccaaagaagt

SEQ ID NO: 735290 - DNA, 626 bp, Homo sapiens
tctaaaatccgtataaaatgactttttaaatgttttttattattattattattattattattagaattttggccggtctcgggctcacacctgtcatcccagcactttgggaggctgaggtgggtggatcacctgaggtcaggagattgagaccagcctggccaacatagcaaaaccccatctctactaaaaatacaaaaattagccaggcctggtggcggccgcctgtcatcccagctacctgggaggctgaagcaggagaattgcttgaacctgggaggtggaggttgcagtgagccgagacggcaccattacactccagcctgggcaacaagagtgaaactctgtctcaaaaaaaaaagaatgaactttatataaaactacartattacaatttctgaagaagcaagacatatcagatcatagagttctcaaatgtaactgtataatattgttctctttttcagtatagcagaggcaaaactttaccctcttagaattttcagctgggcctgagaattaaattgacataaaacagattaacagaagaaaagcacatgaatttatttagtgtaagttttatgtgacacagaattttttataagaaaatgaagacccaaagaagt

SEQ ID NO: 735291 - DNA, 483 bp, Homo sapiens
ttctgcttaatatgatcgttgtttttgtgtcttatcttcctaataggctgaacttcttgaggatgcttgtatttgttcttagagtccccattacattaaataattgctttatggctttggataaaatacatttacaatttcttttccaagaacraacaaggatcagaaagcaaaatagggcaaaataaacattacaatgttctgataggttattataccacacaacttaattctcaaattttatagaaatgcagaataggatttttccctcccctagttattacagaaattattcttttctacccaaatataaaacaaagctccagtaaaagaaggtgtgaacacttgtttctgctatgcatcgcaatacatgggatgtttatatggcaaatgcatgtgtgggatgtgtcctgcatttatatatgttggggggaaattcttagctcacagaggatagtgaatgaagaggaacagctataacta

SEQ ID NO: 735292 - DNA, 585 bp, Homo sapiens
cttgctaggctctctgggggtgggatccgctgagctagaccacttggctccctggcttcagccccctttccagggtagtgaaagattctgtctcgctggtgttccaggcaccactggggtatgaaaaaactcccgcagctagctaggtgtctgtctaaatagccasccagtttttgtgcttgaaacccagggccctggtggtgtaggcacccaagggaatctcctggtttgcgggctgtgaagaccatgggaaaagcatagtatctgagccggaacgcactgttcctcacagcacagtccctcaaggcttccttcggctaggggaggaagttcctcaaccccttgtgcttcccgagtaaggcaaaaccccaccctgcttcagctcgccctctgtgggctatacccactatctaaccagtcccagtgagatgggccgtgtacctcagctggaaatgcagaaatcacctgccttctgtgttgatctcactgggagctgcagactggagctgttcctattcagccatcttgccagccacctagcattttattttatttttttaaaattttaattgttttttgagacag

SEQ ID NO: 735293 - DNA, 585 bp, Homo sapiens
cttgctaggctctctgggggtgggatccgctgagctagaccacttggctccctggcttcagccccctttccagggtagtgaaagattctgtctcgctggtgttccaggcaccactggggtatgaaaaaactcccgcagctagctaggtgtctgtctaaatagccacccagtttttgtgcttgaaacccagggccctggtggtgtaggcacccaagggaatctcctggtttgcgggctgtgaagaccatgggaaaagcatagtatctgagccggaacgcactgttcctcacagcacagtccctcaaggcttccttcggctaggggaggaagttcctcaascccttgtgcttcccgagtaaggcaaaaccccaccctgcttcagctcgccctctgtgggctatacccactatctaaccagtcccagtgagatgggccgtgtacctcagctggaaatgcagaaatcacctgccttctgtgttgatctcactgggagctgcagactggagctgttcctattcagccatcttgccagccacctagcattttattttatttttttaaaattttaattgttttttgagacag

SEQ ID NO: 735294 - DNA, 635 bp, Homo sapiens
ctagccaacaccttgattttgccctagtgatactaattttggacttctggcttttagaactgtgagagaatacattttgattgttttaaatcatcaagcagccacaggaaactgacacaggaagtgacttgctcaaggccacacagctagaaagtagaagtgttgagttttaaacatagttaagtattcaataaatgttagctgtcattattattattactatgctgcaataaagaaggtgygtttattggataaaatgtcagcaagaccacgaactcagcctacttcacccatcccaacagacaccgctgggggaaagacggcctgtgtaacaaggatttgatgattcagttggggaagatgttattaacactgggtggagctggtttaggaaaatgacgaaactttgcagagtgaacacctcacccacactgagttgattccaaacattacaactccattggtcaagctggtcctacagattaattgcagagagggtttgcaactcatggagaagtacagtgacccaacaatccaaaaagatgaggtggctcctctgtgcctggtagtatttccctgacactacgggaagctaaggggagaaactgatggcccatagccaaagccaacttgct

SEQ ID NO: 735295 - DNA, 622 bp, Homo sapiens
gccaggaaggacttttgagcagaaggactgctcaaaagccctttctggctctctaccccttaaaactcaactcgaccttcaattggagtccgggttcctgagggcttctccaagacatacaaggtacataataaatgtttgatgaatcgtcaaatgactggagtcccatgtggctctccttgatccttcctctatgggttcacggtgctacagcagtgcctgagcacagggccctcaggaaaacgtctcctgaacaaaggatgggcaagaggctgtcctagggagttggggcagggtgggcctcaggaagtgtcctactgggacacacagctggggtctgggggtaggtggccattcctgggcctgtcagcaccacggccagctcccggcgcaagagccctggagaaaggggcggggtacagcctgagagcatagtgatgtcagtcrccatgggaactgacaactgcgatgtgcctccgtcagcactccaaccactggggacggcatgacagattaaacaccaactatgtgccaggccaggccctgtgctagatgctggggcagtgacagaccctgagtggatgggaggcatcagaggggtaattacaaggcagggagacaa

SEQ ID NO: 735296 - DNA, 634 bp, Homo sapiens
aggaatgaattacttcctttaagctgacctcatttatattccatacccaaagccagtcttactacaactgcaattgagcctaatccaattacgacaatttttatttcaaaatataacatgatcccccgaacttgagaaccaaatgtatttcaaggttcacaaaaaatgcaagatttctattygcatgaaaaaattaggcaagattatttgtgggctggattggagggctggattctgagagttagaaaaatggaaataccattccactctgtctctcagcaacaacctcagcctgaggggtgagatgtcctccttatctaggcagagaagttctggccttgaccatcgcctccaaatatcttcatttatatatttgtctttactctcaccttttacaagccccacctcttctgcatgcagcatcttaatgtcttcatgttagggaagttttatggttctttcaccaaccttttcttgttcttcttgtcacctttggtcacgtcttttcatcttctttcaaggctagtttgagactgagcaccctccacccttttccccattggaaaacagtctgagaagagacacacaagatgtccatgactccttacggttggttcgacctgagtctttcaca

SEQ ID NO: 735297 - DNA, 634 bp, Homo sapiens
aggaatgaattacttcctttaagctgacctcatttatattccatacccaaagccagtcttactacaactgcaattgagcctaatccaattacgacaatttttatttcaaaatataacatgatcccccgaacttgagaaccaaatgtatttcaaggttcacaaaaaatgcaagatttctattcgcatgaaaaaattagkcaagattatttgtgggctggattggagggctggattctgagagttagaaaaatggaaataccattccactctgtctctcagcaacaacctcagcctgaggggtgagatgtcctccttatctaggcagagaagttctggccttgaccatcgcctccaaatatcttcatttatatatttgtctttactctcaccttttacaagccccacctcttctgcatgcagcatcttaatgtcttcatgttagggaagttttatggttctttcaccaaccttttcttgttcttcttgtcacctttggtcacgtcttttcatcttctttcaaggctagtttgagactgagcaccctccacccttttccccattggaaaacagtctgagaagagacacacaagatgtccatgactccttacggttggttcgacctgagtctttcaca

SEQ ID NO: 735298 - DNA, 610 bp, Homo sapiens
caggccttccaatgacaccatcagctttcctgggtcccagcctccacagtcacatgagccagtaccttatgagaaaccacgtgcatgctattggttctgtttctctggaggaccctgactaacacactgcatcagaacacccaaygcagggcctgctcccaggaagccctcatggcggcggctgctgctgctgctgctgctgctgctgctgcctctggggtagctgtcatgatctccctgttacactgtagcatggcatcaccaggtagtggtgatctcagaagggggactgctgcttgtcaggaccatggataaagctgggggctctgaagtcaggtgcctgagttaaaaatccaggctccctgacccactcaatgtgtgcatttggagatgtctggacttttctatgtttcagtttctttttctataaaatgaagataaataataagaaaacctcacagagttgtagtgagcaggcccattcctgacatctgcagggctgaagaagcagaacacaaaaggggttctcaagtgcatgatctacctatccctactccagatacccctccactctgatacccaccccaccccagttgtccacctcttggat

SEQ ID NO: 735299 - DNA, 637 bp, Homo sapiens
ttcagaaaagaatgtttgcaaaatctatttatctcaattgcagacaggggaaaaaagtaaaaacaccatccatgaggacaccattttcagaaatggtttgcagtgtaaacatgaatttgagagacaagagagacatcagatgggatgcgttagtcaaatgctaatccaaaaacaaatatctcatcctctacatccaaaaattcatgctagagagaaatcatatgaatgtaaggaatgtagaaaggcctttagacaacagtcataccttattcaacatctgagaattcacactggtgagasaccctataaatgtatggaatgtggaaaggccttttgtcgagtgggagaccttagagtacatcacacaatccatgctggggagagaccctatgaatgtaaagaatgtgggaaggcctttagacttcattatcaccttactgaacatcagagaatacattctggtgtgaaaccctacgagtgtaaggaatgtgggaaagcctttagtcgtgttagagaccttagagtacatcagacaattcatgctggagagagaccttatgaatgtaaagaatgtgggaaggcctttagacttcattatcaactaactgaacatcaaagaattcatactggtgagagg

SEQ ID NO: 735300 - DNA, 637 bp, Homo sapiens
ttcagaaaagaatgtttgcaaaatctatttatctcaattgcagacaggggaaaaaagtaaaaacaccatccatgaggacaccattttcagaaatggtttgcagtgtaaacatgaatttgagagacaagagagacatcagatgggatgcgttagtcaaatgctaatccaaaaacaaatatctcatcctctacatccaaaaattcatgctagagagaaatcatatgaatgtaaggaatgtagaaaggcctttagacaacagtcataccttattcaacatctgagaattcacactggtgagagaccctataaatgtatggaatgtggaaaggycttttgtcgagtgggagaccttagagtacatcacacaatccatgctggggagagaccctatgaatgtaaagaatgtgggaaggcctttagacttcattatcaccttactgaacatcagagaatacattctggtgtgaaaccctacgagtgtaaggaatgtgggaaagcctttagtcgtgttagagaccttagagtacatcagacaattcatgctggagagagaccttatgaatgtaaagaatgtgggaaggcctttagacttcattatcaactaactgaacatcaaagaattcatactggtgagagg

SEQ ID NO: 735301 - DNA, 507 bp, Homo sapiens
gtcgtcaggatccctcctgccctcccggggacctcaggggaccatcctgccacacatacccggactttgccgatctcgtccttgtggatggagatgttggtgccgagggcagccacggtgacgactctcacgtaggayacagcagggttgccccggttctggttcttggtggtgacggtgaagggtgtcaggccctgggtgctgacccccgggcagccagttgttgccagcacatagttacaggtgccctggaagtcaaacttccggccatcgaaggagtggtagtgtgggtcgccccacagccagcacgtggcctcatagttgggcaggcacacgccctggccaccctgctccttgcatgtctcctgtggccggcatgtcacgccgtggcacgggtctggggacagaagagggaggaggaccttgaggggctgcccattgtaaaggatggccgctccctccacatctaccccagtctgtgccagggatctgagggttactgcaggc

SEQ ID NO: 735302 - DNA, 584 bp, Homo sapiens
ctgagcaaggggctttctgtcagatgaatcaggcggtgatgagaaaccaagatagtgagagcggtaacagcaggggcctgggcagcgaagacagccctgtgacctcctccctcatcaactaatggcagaacccaggaggagagagcaggagtgcagatgtaaacaagcgctttgcaaggtgctggattgcmaagccgaagtgcaccccgcctgtcgggctagctggccctacctcccgccctctactccacatgccttagtgcaacaacagcccaacagggactttccagcttaaagcgggatgaaagatctgcaataatttccaaggccaagtcttcactaagtcagggcaggcagctctcaggtcacagggaggccaattacagccccacacataccacaaggaaacagctcccaggatctgggccatatcctaaataggaaagaggctctgggccgcacctcaggttctgctttggaagagtcactgcctgcatgagctccacacatcattctggaagaaacgtttctcctaacaggacaacctgctctcggctgctgggcaagagctggcagggggcttt

SEQ ID NO: 735303 - DNA, 631 bp, Homo sapiens
ctggacgagcttcatggtattaaaaactgcctgctttccaaggtgatgcacaccgttcggcacttccaccagccctgttggagcgtccagttgctctgcgccctcgcgtgggctcactccctgagcccactgtggctcctccagacgccctcacttctacccgggctccctagactcttgcctcttttataaaaggtcagaggatgtcactcacgctttaacatcctctgaataaaagccaagttcctttcagtggcccgcagagtcccacgcgacctgccctgctctaagcaaatcctaccctgtccctgttcctcctcggcagccccatggcctctggctttcaccaggcctcacttcattttcctccacagccagcatcgcagcatgacatacyacggagtcgtttgtgtgtgtgttgcctacctcccctctcggaatgtagcctccacgaggacaggggcttgtttcctgcatgctcttcactcgggctgggcactctggggggctaacaaatggaagatcctgtgagcagggaaaccgtcagatggcattaggggccggtgccctgcagaagacgaaagggaaacttcatggactgaggccaggtcatctgcagggtggtgttcaa

SEQ ID NO: 735304 - DNA, 587 bp, Homo sapiens
tgtctttgaacccttccagcgtggcgtaccttgggcacactgaatctgctattgggtacaacttcaaaaccaaagccagggacagtgtgcatgcgtgtgaaatgctgagtgtacccaatgtgctaagcacacacggcacagccggccgaatgcatgggtacgagggaggatttctttcctcaacaatacactctgccttacagccgacctacagtcaacctcggcttcaaagtgtagtctgtcttcaggcttggaacacctggatgaatcccatcaaatacgtcagtgaacagtccctgccacctccwgggactggtgtcacaggtgaataggccatgctgtggagcggaacagcgcccatgtgatacacaaccaaacacatccaaaaggaagaggcaggcgcctgcacgggtaataattacaacacgtgtttctgctttctggacagcacaaaatacagctttcagctgtttttatgtaggccacatcctcatacgcccttcccaacacagagaacaatataacagaatactgggaacagaattaggaaatgaaattagaaaaagggagcatcaggtaaagcaagc

SEQ ID NO: 735305 - DNA, 639 bp, Homo sapiens
gtgtggtacataaattgacttttaagcggatggcatcagaaaacaaaacagaatagtaataataataatgattaacaaattaaaaattaagaacacagaaatggagcaaaataagttagaagttgaaaacaaacacacaagacttaaaacacgagattatttttcacgaagtcacacaggactgcctaggtaggaatctgggtgtgaagatcctagcggcggcgtctgagtggacctggttttgaatacggccggggttcactcttttaytgggaagaaacagcttcttcctcaccacccccaaaactcgcctcatctcactgtcccttgtgtaaagttaaagccgttaaaatatgtgattctagatgcttttctccttgagtgaccatgtgcttgtggaaattcagcccacttcttcctgctgaatgctccgggggagtagaagtggggtgcgggaggaaagggggtcctgctctcagagacagacgcagcaaaactgggagggaaaccacccatctctcccaaaaggccctccgctggcagtgttcctgtgtgccacccagctgccatttcttgattgtgcccagtaaagggaattgaactaccatcagtaagtgctgttcaccaaaagcacgtcag

SEQ ID NO: 735306 - DNA, 607 bp, Homo sapiens
agagtggctaaagattgacctactgtgggaccatggaattctctgcatacattaaaataatgtagtagtccttcatgcactgacatagaaagatgcccaacacttatcaaaaagtaaaataaaattgaaaaataatttgcatggtatggcaccatttatgtttatatttttcttacacacacacacatacacacamacacacacaaagacattggaagaatggaacccaaggtgttgatgttggttactgatatggtttggatctgtgtccccacccaatatcatcttgaactgtaatccccaatgttggaggtggggcctggtgggaggtgattggatcttgggggtggatttctcatgaatggttagcactgtctacttggtgctgttctcgtgatagtgagatctcgcgatatctcactcacgggatcactatatacttacaaagtgtatagtacctcctgcaccattgtctcttgttcctgctctgtcatgtgtgacacctccctcctcctttgcctttcgccatgactggaagctgcctgagtcctacccatgattcgggagcagggaaggaaagtgctgggtaaaggagggcttggtccct

SEQ ID NO: 735307 - DNA, 607 bp, Homo sapiens
agagtggctaaagattgacctactgtgggaccatggaattctctgcatacattaaaataatgtagtagtccttcatgcactgacatagaaagatgcccaacacttatcaaaaagtaaaataaaattgaaaaataatttgcatggtatggcaccatttatgtttatatttttcttacacacacacacatacacacacacacacacaaagacattggaagaatggaacccaaggtgttgatgttggttactgatatggtttggatctgtgtccccacccaatatcatcttgaactgtaatccccaatgttggaggtggggcctggtgggaggtgattggatcttgggggtggatttctcatgaatggttagcactgtctacttggtgctgttctcgtgatagtgagatctcgcgatatctcactcacgggatcactatatrcttacaaagtgtatagtacctcctgcaccattgtctcttgttcctgctctgtcatgtgtgacacctccctcctcctttgcctttcgccatgactggaagctgcctgagtcctacccatgattcgggagcagggaaggaaagtgctgggtaaaggagggcttggtccct

SEQ ID NO: 735308 - DNA, 505 bp, Homo sapiens
cgccaggcactggccagccggcaggccatcgagcagaggaaggatgtggagtttggcctgagtggtcagagttgagcctggcagccaagcagcctgactccaagggaaaaccatctgccttctgactcccccatctgctgagagctacttctactcaatataaaaccttgcactcattctccaagcccgcgtgtgatccgattattytggtacaccaaggcaagaaaccccgggatacagaaatccctctgtccttctgataaggaaggggctctacttgagctggttaacacaagccgcctacagaccacacactaaaagagcaccctgtaacacacacccactggggcttcaggagctgccaacattcacccctagacactgccttggggtcggagccccacagcctgcccatctgtatgctcccctagaggtttgagcagtggggcactgaagaagggagccacgcccccatcacgtgccctctgagggggacaagggaacc

SEQ ID NO: 735309 - DNA, 614 bp, Homo sapiens
aagaacgtttaggagaagggagggggtcttctcatatcagagttgctcttttttattggtgggttcaattcagaggttacaatcatcggctacagtttacagcatactggccaaaatgtcctacagcaagacaatcagcaaaacttcatgcatcagaaacaaatcagtgtccgtttcagtgttaataggttacatattaatcagtacatcaaaaatttgaggaactcacaataagatttgagggactcacaataagatttgttactcagaggggccaggcgcggtggctcacgcctgtaatcccagcactctgggaggccgaggcgggtggatcatgaggtcaggagatcgagaccatcctggctaacaaggtgaaaccccgtctctactraaaatacaaaaacttagccgggcgtggtggcgggcacctgtagtcccagctactcaggaggctgaggcaggagaatggcgtgaacctgggagatggagcttgcagtgagccgagatcgcgccactgcactccagcctgggcgacagagcaggactctgtctcgaaaaaaaaaaaaaagatttgttactcagagacaggatgtaagccatgaatcataagacct

SEQ ID NO: 735310 - DNA, 614 bp, Homo sapiens
aagaacgtttaggagaagggagggggtcttctcatatcagagttgctcttttttattggtgggttcaattcagaggttacaatcatcggctacagtttacagcatactggccaaaatgtcctacagcaagacaatcagcaaaacttcatgcatcagaaacaaatcagtgtccgtttcagtgttaataggttacatattaatcagtacatcaaaaatttgaggaactcacaataagatttgagggactcacaataagatttgttactcagaggggccaggcgcggtggctcacgcctgtaatcccagcactctgggaggccgaggcgggtggatcatgaggtcaggagatcgagaccatcctggctaacaaggtgaaaccccgtctctactgaaaatacaaaaacttagccgggcrtggtggcgggcacctgtagtcccagctactcaggaggctgaggcaggagaatggcgtgaacctgggagatggagcttgcagtgagccgagatcgcgccactgcactccagcctgggcgacagagcaggactctgtctcgaaaaaaaaaaaaaagatttgttactcagagacaggatgtaagccatgaatcataagacct

SEQ ID NO: 735311 - DNA, 616 bp, Homo sapiens
tagcagacctgtattgaagcttttggagttgattttcatgtccctcaacttttcttttgtatttttcagtcttttaatcttttttgctatggtccgtttgctctttatgtctcccattttgttctttggctatgttcakccttctggtcagtgtctctgttgagttttacaatctcattaactctcttttttcatttctaaggtttctaattggttccctgtcatagccatttcctttttattccatcattttatttcttgtgtcatgcttgcaatccccttcttgacctctttaagtcgatgacaatgcttgtcctgtagcttctcagaatgttctgtttgatctcttttccctcacacgtggtttcattcatagagtttgttgtgagccctccacggtggccacttcctcagcagctttgtgccccctcactgtgagttcacctggtggatcctgagctgggctggcctccagcggggtggtgcctcagcagcctccacctcatttctaggtcccatcccccttggcactcaggtccaaaaggtcttggtgctatcttgggtggacaggaagtgatttccagttcttggccttctctgggaggcatccctcttg

SEQ ID NO: 735312 - DNA, 645 bp, Homo sapiens
gtccattcatccatagtagttttcatagctcgttcattcatgttcatacggccatgttcattcatccatagttgttttcatagtgggatcattcattcatgttcatacagccatgttcattcatccatagttgttttcatagctggatcattcattcatgttcatacagatatgttcattcattccatggctgtatattccattgtccaaatataacaaaattaatgtatcatttgagtaagttggttatatacatctagcagtggactttctgtgtcatcatgtgtgtgcattttgtttaaattttgtgttccaaatggtttggaaagcagtgatacagctctgatgagtggagcaacaccaaggttcttcgttttgagttgaattggaaaaaacgacacccacgcatgtgkaatggttttaaggagcagagagtttaacaggcaagaaagaagggagaagaaagaaggaagaagttcccctgtgcagagacagagggagggggctccaaagccgagggaggagaccccatgtgccgcggatactagccagttttatgaggaggctggaggaggttgtgtctgatttgcacagggctcgggggattggtttgagcaggcatgtcattctcatagcccatgaaaa

SEQ ID NO: 735313 - DNA, 401 bp, Homo sapiens
atggcttgggctggaactacaccagcagctctactgagttgccagcttgccgactcacctggcagatttggggacctgccagcttccataataatgtgagcaaattcctatatatgcatatgatgcgtaggatgcatatgcacggtaygatgcgtgtttctctggagaaccctgataatacagtggcactaagtacctaagaacagaaagtgcacccttactattatcttggaagtctgtcccattttttatgtatttacgttaccttgaagaggtgtgttataattttttttctttttgctatacttgttttggaggttatgttttataatttttaatagactattgaaaatattaaatctgtccaggagaaacagtcgtctttgcctttgagaaaatta

SEQ ID NO: 735314 - DNA, 608 bp, Homo sapiens
cctcctgagtagctggttccccaggtgcatgccaccgcatccagctaatttttttgtatttccatatttttcaggctgctcttgaactcatgagctcaagtaatatgcccctcagcctcccaaagtgctgggattrcaggtgtgagtcatcatgctcagcctggaaacaatatctttaaaaaccatgcgaaggttccacttatagtacagctgagtgagctcttctagaccaaaacaaaactttcaaagaaaaactatatgctggggcccaaaagtgaacaaatgcaggcaggttctggaggggagttggcttttcaaaacagggaggggtatagagatgattttattgctttaaaaatattttttagcttgagggcagaccacagttggtaccacatgagagaacaaaaacttacagatatagaaggagaagtagacaatttacaataaagcttgacattttaatagctctctttaagaagttagtagaaaaaaatgatcaaaatatcagttaaggtaaagacaacactattgaccaccttgacttaatcactatttgtagaatagtaattaaatgtggcatacactttattatcaaggacccctgg

SEQ ID NO: 735315 - DNA, 598 bp, Homo sapiens
cctaatagctattaataatgaaattttaattatactctggattctaaacaatgaacacacagtgatctttttgacttgctgcttgtttataagttggggatggtctgaattcattgttgattcaaaagaaaacgaatagtgttttaaaccttttatttacagagactataatttgtcaccttcctaccaacatatyttaaatacaccaagaccttttacagaagcttaaacaagggtgtacagctcttgttttactcctctcccaccaatctgctttagcttatctggactttggtatgtaatttggaaattgggctatgttttcctcacttaaattgcaaaaaaaaaaaaatgattaactgaaataacactgcacattattcagatttaattatgtttgtaatacatcacccagtgatatggggcaactttttgctgttcactttccatcatgcatttctcataacatatggtcctcatgaaatagttttgattcagagtccccagtagcatatggcaaaaaaaaggcccctcaagtcacatgcaaagtagaggctagcctctgtgccccagaggaggctccattgactgcaagcca

SEQ ID NO: 735316 - DNA, 630 bp, Homo sapiens
ttacaccacaagtacctcattacttgtgtaggcacttgaagaacatgtgggcactggatcggatcagtgatcaatgacaaaggttgcatagggtgcaagtggtagcagtaaaagtgaaggtctccgtgcatgagttggcagtggtagggatacatgacaaggggagtttaactgacaaacagtctgtcaggttgaaaagaatggagatttgccagagagctggctgtagattataaaatatatctcttgatttcaggggaaggaagaggggataaaaccccaccccaagcagagccttccattcttgaaagcrcttacgcaaatttaatgaatgtgtgggatagtaaatttttattctacgagtgtttatctcatgacatagacgcattcaggtgtgtagggatttaagattatagcaggattcagtaatgctatttcataaagggtgtgtgtttgtacgtgtgtgcacacatcacaccaactttaccaaaccagacccattgctgttttagattgttccatgccagcttattatggatattcaataacaagaaagtcattccacgtgagtccttctattcttaccaatacgatttgtggtcaacaccaccaaaattgattgttttatag

SEQ ID NO: 735317 - DNA, 446 bp, Homo sapiens
ggtgagctgccccatgctcagagtttctgattcagtgtgtctggggtggaacctgagaatctgcacttctaacaagttcacttgggtaaggctgatgctgatgctgctggcccagggatcacgctttgagaaccaccactctcaagccagacaaaggtgtcatgcagacattgaaatagaaatcactggctagaaatctytaacctagaatggtgatgctaagctactgggtgtcaattgctaacaagcaataccagctaggaaaatagaagagcaaagacccataatcctgactccttcatggacttatcagggtcagaggattccatgctagatgagcactttgtctaagaccccttataattaagacgttcagaatttccgactgaaggacctcccaactccacttctgggaacatgctgccttataaatagcctctgaaaat

SEQ ID NO: 735318 - DNA, 607 bp, Homo sapiens
gcagaattcagcaagactaagaactagtgctgtgtatcacaagcgcactttgttctttagagaactttgctctgaaattgttctaactctatatttttgtcagttggtatttttgtcagcttttttatctcaggctrtaagtgacactttatcatgttttcagtctgtagaatgaaagaaagagaatgatagataatttgcactttgggttgctttgctgtttgtttgtttgtttgtttcatcactcttggctatatagacacaagagtgacaagtattcccccacaatgaagagtggagaggagcttcatgagtggcttcagagcacctatgactcagatgccttgagagggtccccacagagccttgcatgtaggtgagatggttcctcactcttcccggctaccacaccacagcaagctcagagaaaaccaagagggatggttgtaacaatggaaatttgctcatgttaacagttgggattttcatcccagttaatattgactgtagttacattcaaatttactcttgtggacactgtttgaccagtggaggaggaaactcatttattcccaagtcactcccaagccatcaaacaaacaccagc

SEQ ID NO: 735319 - DNA, 594 bp, Homo sapiens
tcagctacattcaaataaaaaacaaaaacgcatttacagaggcttaactaaatagagtaattttcctcccaaatgttaggtccagaggtgggcaactcagagccattcaggctctggctccaaatatctttgtgctccaccatcattaatatatgacttccttccacaagctagtcactcatgggtgccaggtagcagctctactccagctgcatgcctcctgccaggaaagaaaggagagaaagaacaaagaggagggtaagaaagctgcctgaatcaggaaaataaaatctttcccagaaatctctagcagacattgatttctgtctcctggccagaattgtgtagtaaggccacyctatctgcaaagaattttgggaaggtaagtacttaagctaggcatattgccactccaagcaaaaatagagactcttgtaagaaaaaaaaaatgggagaatggggattggttaacaagcagcatctgccatagaccaacaagaacactgacaatgaaaccatggtataatttgtacataatacaaatttcatgcagaaaagcacagaactctctatcttcaggttagggggaggtgt

SEQ ID NO: 735320 - DNA, 629 bp, Homo sapiens
gaattgtgtagtaaggccactctatctgcaaagaattttgggaaggtaagtacttaagctaggcatattgccactccaagcaaaaatagagactcttgtaagaaaaaaaaaatgggagaatggggattggttaacaagcagcatctgccatagaccaacaagaacactgacaatgaaaccatggtataatttgtacataatacaaatttcatgcagaaaagcacagaactctctatcttcaggttagggggaggtgtcatggagggtttcactgaggagggtaacatttggctgagtctcaaagaatgaattaaattgtcaaagtacaaaagmaaaatagttgttcatcaaaatatttttatttgccactggcagaaatgtagcttgaacccaaaagtaccaaggtaaggtttcaagcattgctggctccagtcacccaattgatgtcaccaagacccaatctctctctctctttctctccatcctttgattctataatagccagcaagcagctccagatttacattacaccctatcagcagctttagcagttccaataaagctctgagtatgcatctcactggaacaacttgggatatgtgtccatcactctgacctatctccttgga

SEQ ID NO: 735321 - DNA, 629 bp, Homo sapiens
gaattgtgtagtaaggccactctatctgcaaagaattttgggaaggtaagtacttaagctaggcatattgccactccaagcaaaaatagagactcttgtaagaaaaaaaaaatgggagaatggggattggttaacaagcagcatctgccatagaccaacaagaacactgacaatgaaaccatggtataatttgtacataatacaaatttcatgcagaaaagcacagaactctctatcttcaggttagggggaggtgtcatggagggtttcactgaggagggtaacatttggctgagtctcaaagaatgaattaaattgtcaaagtacaaaagaaaaatagttgttcatcaaaatatttttatttgccactggcagaaatgtagctygaacccaaaagtaccaaggtaaggtttcaagcattgctggctccagtcacccaattgatgtcaccaagacccaatctctctctctctttctctccatcctttgattctataatagccagcaagcagctccagatttacattacaccctatcagcagctttagcagttccaataaagctctgagtatgcatctcactggaacaacttgggatatgtgtccatcactctgacctatctccttgga

SEQ ID NO: 735322 - DNA, 589 bp, Homo sapiens
tgtggtctcagctacttgggaggctgaggcaggaggatctcttgagtcgacgagtttgaggctgcagcgaactgtgtttgtaccactgcaccccagcctgggtgacagagcaagaccctgtctcaaaagcaaaaagaaaaagcactaatgatatttaattaaactttcaaaaaataaattcagatttgttttttaaactttaattttgaaatttaacattcatttattataattctatttgccttttaattttaataattttgcatattttaagttgtttttgtagcccagctaattttgcatattttagaagagaaataacttttgggaaaacaaataaacaacttttaaattttaatatttcacatttactttaattacacttaatgaaaatagattcacattttacrtactttaaatataatttttaactctatgatcattactgtcaataggacacaaattaggtgaataacttgacttaacataataatgtttctgacaagatagcaagaaaaataaatttaatagaataaatactcaattatttatacattatgtatcattttaatcttcgaaaatgacaact

SEQ ID NO: 735323 - DNA, 620 bp, Homo sapiens
gatgtgttcaatgtgagataatttattatgctataaattttatgtgtacatattcgtatgtatgttttagatttatttaaaaaattttttaaatagatctcacaaaatgactgataaacatattttcagataaagtagataactatgtttttgtattccttaggtaaggataattttgcatacttgttgagtttctctccaccttctttggwcttagaaacccaggtcaggagacactttgtccatcttctaagtgcattctttgtaatagagtcatccattgcccctacaacctcttcaaagtctgatactttgagcaatattaataatacttgtgctgttaattttatccaagttgttcaagataatctctaactgctaactaattattcctttatgattccagagaaattaaaaattgatctcagttttcctttccctacttaagaggtggagaaactaagatgaaaaatgtaaactgattttcacaagtattcccagcagagacagaaagaaagagaaagagggagagagtgagaggaggaggaggaaaagaaaaagaaaaagaaaaagaaggaggtgaaggaataaaaaagaggagaaggagaaaagtaaggggg

SEQ ID NO: 735324 - DNA, 626 bp, Homo sapiens
ctgtatttcgtttctctgcatagcactgatcactcactgttaccttttattgcttgtttattttcttattgtcagtctctgccaaatagaatgtaagctccctgagagcaaggaccttgtctatatcatcaccaccctatcaaaccctggtacctagagggtatgtttcatagcagatgctcaataaatatttgttgaacaaaatgatcaactagtccagcataaccctctttttttttttttttttttttttttttttttgagacggcgtctcgctctgtcgcccagggtggagtgcagtggcgcaatctcggctcactgcaagctccacctcccgggttcacgccattctcctgcctcagcctcctgagtagctgagactaaggcgcccgccaccgcgtctggctaattttttgtatttttagtagagacggggtttcaccgtggtctcaatctcctgacctcgtgatcgccygcctcggcctctcaaagtgctgggattacaggcttgagccaccgcgcccggcccataaccctctttttatagataaggaagaggggttcaaacaggcaaaactctcttaatacatagttactttgtggcaatgtggggggtaaaatagatg

SEQ ID NO: 735325 - DNA, 706 bp, Homo sapiens
tcccttatctttttcctatcccctcttccttgcttcctctcctggatgatgtggtccttcatttgtcttctctgtatcaattttctctggtgtctaccttagagactgccttctgctgcttattcatgcctcagtatggtctttagctgagtctccaaagctctaatattaatatccaggattttccaggatatggacaattaagtctttatgcctttatttaagatgtcccaggaaagaaaatctggcccatttggggtcaggtgtctatctctggtaactaagctgatgcttgcttggagagggtcgcatgggacatggcacttgatgacctcaaaaagcaggctggaagtgaccrctaaattgacagaacacttacagcgcttttaaattcttacttcctgctcctctagtcctatctaatattctaaatgtttctcacatccattcccatttacccctctcttcccactgtcttggccctcatatatccttgcttagattactgtgatagtctctgacttgatttccttggttctgatctctccccctaagctaatatacactccacacaacagcctttgaaaaacataaagtgataacatcatttccctaattcagtatcctcaatgacctctcaatgcttacgaaataaggttcaaactctgtgggatgatgctatataaattcttttaaaactagatcc

SEQ ID NO: 735326 - DNA, 583 bp, Homo sapiens
aataactggaaggcaagctgtatcatttcatttaaaaatcattaacaaatgtttctgcctcacattcctgtggttccttattgcttactctgcatagaagctgttcattcatctcctcagccagggactgtgtcattagttgtggctattggtcatttcctgtctcattcagcaagtaatcatattattttgactgggaagagaatgagtcctgagctgtgaactcagtctcacaataacttgaggatgtatttctttgaatgtgggagaaaacgaaaacagagcaggaaaataacattcattgascccctatgatatcccaagctcttcaatggcattttcttctttttttagtcacataggtctattttcaaccaaaattttggggtaactatcatccattggccactgttttaggtgctgcggatatagaaatgaacaatcagaccaaaaaaaatcacattctgtgagcttatgttctggtgggggagaaaaaaatgtgctagtaaaatttagtaaaaaatatattagtaaaatatatatgcttacatatgctactgcggtatatgcgatatcctcgtat

SEQ ID NO: 735327 - DNA, 590 bp, Homo sapiens
aaggttgtggagaaaaagaaacacattcactgttggtgggagtgtaaattagacactgtggcaatttctcaaagacgtaaggacagaaataccattcaatcaagcaatctctttacagggtatatacccaaaggaatgtaaattattctattataaagatacatgcacttgtatgttcactgcagcacaattcacaatagcaaagacatggaatcaacctaaataaagactggagaaagaaaatgtggtacatatacaccacggaatactatacaaccataaaaaagaatgagatcatgtcctttgcagggacatggatggagctggaggccattattcttagcaaactaatgcaggaacagaaaaccaaatactgcatgttttcacttataagtgggagctaagtgatgagaacacrtggacatatagagagggacaacacacactggggcctttcagagggtgaagggtgagagaaaggagaggatcaggaaaaacaactaacaggtactaggcttaattcctgggtgatgaaataatctgtacaaaaaacacccatgacaaaaatttacctatgttacctgcacttg

SEQ ID NO: 735328 - DNA, 616 bp, Homo sapiens
tgaggggctgggtaaaaggatccctgagttctctttcagacctgtctattttggggtgtcgagagtttgccctgagtggcacaaaacaaatcaccctctcaacctgagccaagcaaagaaggttcacctgccccatttggtccacagggccaaatgcttgggaccccgaactcccaccccactcacctcgcataggagcaaagattctggtgtggagtggagcaagaagggcggagaaacgcctaaaacggggaggggaagaaaggaagagcaaatacacagagcaggacacacagagccacacagggacacaggcagggactctcacagggacacacccacacacttgtcagttcattgctgaagcacatagagtgttcagaaaagagsggggaatgagacacagtcaggtgaagagcgccggaaacgctgagaggccccggggcccagtagggggcgctgtgacgagcgcccggtgagggtgagggtgagggctgccagcgaggtgggcgcgggcgaggtgggcatgggctgcggggaggcggagagggctgaaaagccccggggcagcctgagcgcggggttccctcggctgcgggctgggagtctggtctgg

SEQ ID NO: 735329 - DNA, 543 bp, Homo sapiens
ttttggggatttggtgaggtatgagcccatgatatttgtatgcgtgtaagacagcaaggaagtaataaagtcaacaaatatttcatttcctggcctttccttgccctaaatggtatgtttaacaccagtgctaacttctcccaatccaacatgtctgtgtgtgcagaagcctcatgtcagatactttcgtcacaaacctagaggtattttccatagaaacctcttatgtaagaggaactgaagatatgaaggcaagagagcattggtgttaaggctygtggcaggctggatgtcacagtgggaggtctaggtttctctgtagcttaagaagtgcactggccatccaggtcccagcttactctgcgtccccgctcttttctaaataaggactttctgctgttggtcttttctgtcatgagctgggctccaaagtggcaaccttcattaaaaagtgaaaactgggcgcttctgtctaaaaactaattaattcctgtggagacataagacaaaacacaaacaggttcatgtaatgacagtcaactg

SEQ ID NO: 735330 - DNA, 650 bp, Homo sapiens
aacagtaataataaatcataaggattgagaagtagtgtagagaaaaaaggtagtgtacaataatagaaagtgatgggggatattctaacatttgggtggagagtaggtagtcattggaaaatacaagatccactatggtttgaacgtgtcccacgatattcatgtgttggaaagttaatcctcaatgcaactgtgttaagaagtgggaaccgtaagaggtgattagatcatgagggctctaatatcattaatatggtttggctctgtgtccccacccaaatctcatcacaaattgtaatccccacatactgggggagggccctggtgggaggtgactgaatcatgggggtggaattccccttgctgttcttgtgatagtgagtgagttttcatgagatctgatggtttaaaaatgtgtggcacttcccccttctctctctcctgttccaccatggatgggaagatgtgtcttgcttcccyttcaccttctgccatgattgtaagtttcctggggcctcccagtcatgcttcctgttaagcctgcaaaactgtgagtcaattaaacctcttttcttcataaattacccagtctcagttctttgtagcagtgtgaaaatggactaatacagaaaattgatactaggatttgg

SEQ ID NO: 735331 - DNA, 661 bp, Homo sapiens
gaaatcaatgaattagaaaagaggaaaacaatggagaaaaattaatgaaaccaaaagctggttctttaagaacaataaaattgataaatttctagatgtatagatctgaaaaagaagacacaaattaccaatatcagaaatagagacaggggacattactatcagattctgtagacattaatagggtaataagaaaatatgaacatcatatttacaaatgtttgataatttaaacaaaatggataaatctcttaagtgttagaaattactcaaagtgactcaagaattagaaaactcaaagacccctctatttattacacacacacacacacacacacacacasacagccccttctgaaaccctgatatacccctctgcactgtgttagttttgcaaacatttactttgaggaccttctccgggttaggcactgtatgtttacagaagtaaaagatttaatgcagttggggagggaagagacagatgagtgaataaataaaatactgcataataagtgttatgaaagagatctgcacagggtgttattaaggaaaaaatatgagataccctacatgagggaagacttccataaggaggtgaatattaaagggtaatgatgataatgatgatgacaatgacaatgatagcaacaacaacaaa

SEQ ID NO: 735332 - DNA, 609 bp, Homo sapiens
ataatactatgctgatacatttgaaaaaaaatagatacatctgatagtttctcagaatatataagttttccaaatttacagaaaagccaagtgcagttgctggtgactgtactcccaactactcaggaggccaaggtgagaggatcacttgagtccaggagttggaggctgcagtgagctatgatggtgccactgcactccagtctgggccacagagtaaggctgtctctaaaaacaataacgaatttmcaaaaaaaaaaaaaaaaaaaaaaaaaggaaagaaagagaaagtaacccacaaagagataaattaaaatgaaaaaaaaaaaaagcctatcaaagaattatcttctggatgtatactaggcccaggtgattttacgagaaaattatttcaaatatgggatattttattttacattaactgacgtacttttcattaaaataactcttactttctcttagttgcctggcagctcattgttcttaactcaaaggcattcaccgctttgaggatatggcagttccaagaacaagaagatgttgctaaactttgagtttcaaagcaggttttactttatgggagaaagcctgaatgccaaaaacact

SEQ ID NO: 735333 - DNA, 499 bp, Homo sapiens
gggtttaaatcatgccgagttcattccggggcctgagcggggccgaagctcatgggaggatgagtgggatgcttgccgcaggcttccgtgggagccaggtgggaagcctgaggcccaagggcagctctcttctccagcctgctcctcctccaagccaccctgagtcattctttaatggaatttgtggctgttttaattcttaccggcacaaactttgcatgtcctttataaatatttcattctcttccagcaggaaatttctcagtgcctaaatacttgtatggccatctccttccsgtgctgggcagcctgtcccagggaactgtgggctgggggagacagccatgggtacccctcacctgcatgacagccgctccagctcctggaatagccaggctccctgggagactggggttgcagtgacagaagagaaagaggcccagggagggaggtgaccatccacagtccctccgagggcacggtcagggctcaaacctgg

SEQ ID NO: 735334 - DNA, 499 bp, Homo sapiens
gggtttaaatcatgccgagttcattccggggcctgagcggggccgaagctcatgggaggatgagtgggatgcttgccgcaggcttccgtgggagccaggtgggaagcctgaggcccaagggcagctctcttctccagcctgctcctcctccaagccaccctgagtcattctttaatggaatttgtggctgttttaattcttaccggcacaaactttgcatgtcctttataaatatttcattctcttccagcaggaaatttctcagtgcctaaatacttgtatggccatctccttccggtgctgggcascctgtcccagggaactgtgggctgggggagacagccatgggtacccctcacctgcatgacagccgctccagctcctggaatagccaggctccctgggagactggggttgcagtgacagaagagaaagaggcccagggagggaggtgaccatccacagtccctccgagggcacggtcagggctcaaacctgg

SEQ ID NO: 735335 - DNA, 610 bp, Homo sapiens
cctgctctatgcctgggaggctgattctaggatggcatcatccaggccccccttggcttccctttggagttggtcagtgggcgacactggcaaaagatgggagcgtagacagaaagatatcaggatacctatcaaacctcaatcccttgctgccttgtcatggagtggtccatctctttctggggtctagcaagacctccacccccagacccagacccctgcagcttccartgtggaaagaggcttcccaaggttcctagaccccgggtgccccactctcccttcctggttcccttaactctgccttcatgtctattaatagtagcttcaggtactctctccagggaaatctttggacatccatctgcttcctgttagaggcttgatcaactgctaggcctggaggactgtcagttgggggactgcctagagtggtggggggtagcttacaggaattaaggcaggggtgagcagggccctgccagctgttgcaaaacaaaaacaaaaacaaaaacaaaaaaacatgcaaaaacctatcatacctcatgagcctttgaaaggctcagccaggcctggcaccattgcatgtgtatgggagaaaggctgatga

SEQ ID NO: 735336 - DNA, 610 bp, Homo sapiens
cctgctctatgcctgggaggctgattctaggatggcatcatccaggccccccttggcttccctttggagttggtcagtgggcgacactggcaaaagatgggagcgtagacagaaagatatcaggatacctatcaaacctcaatcccttgctgccttgtcatggagtggtccatctctttctggggtctagcaagacctccacccccagacccagacccctgcagcttccaatgtggaaagaggcttcccaaggttcctagaccccgggtgccccactctcccttcctggttcccttaactctgccttcatgtctattaatagtagcttcaggtactctctccagggaaatctttggacatccatctgcttcctgttagagscttgatcaactgctaggcctggaggactgtcagttgggggactgcctagagtggtggggggtagcttacaggaattaaggcaggggtgagcagggccctgccagctgttgcaaaacaaaaacaaaaacaaaaacaaaaaaacatgcaaaaacctatcatacctcatgagcctttgaaaggctcagccaggcctggcaccattgcatgtgtatgggagaaaggctgatga

SEQ ID NO: 735337 - DNA, 610 bp, Homo sapiens
cctgctctatgcctgggaggctgattctaggatggcatcatccaggccccccttggcttccctttggagttggtcagtgggcgacactggcaaaagatgggagcgtagacagaaagatatcaggatacctatcaaacctcaatcccttgctgccttgtcatggagtggtccatctctttctggggtctagcaagacctccacccccagacccagacccctgcagcttccaatgtggaaagaggcttcccaaggttcctagaccccgggtgccccactctcccttcctggttcccttaactctgccttcatgtctattaatagtagcttcaggtactctctccagggaaatctttggacatccatctgcttcctgttagaggcttgatcaactgctaggcctggaggactgtcagttgggggactgcctagagtgrtggggggtagcttacaggaattaaggcaggggtgagcagggccctgccagctgttgcaaaacaaaaacaaaaacaaaaacaaaaaaacatgcaaaaacctatcatacctcatgagcctttgaaaggctcagccaggcctggcaccattgcatgtgtatgggagaaaggctgatga

SEQ ID NO: 735338 - DNA, 557 bp, Homo sapiens
ctgctcacccacatggttggcagttgacgctgagtgctcagctgtcagctggggtaaacactagctgagttcacaagacctcttcctggagcttggacttctcacagcctggtttctggggtctcagagtgtcccaagagtgagccatccaagagccccatctctttaatccgaggacagaatcccccaggtcagcgtggcccatcctttttagtatttggtttgtgttaagctcttgaagtttttgctttcccctcaggtctgtatgcgggaatccctggaggatactcaggtaaaaacagaatcgttctattcagaaatgtttctcagaactggacggarccaagggaaagcttagaagctgaaaatacagagtagcctcttccttcttgcaatcagctgaatgcaactttggggtttccttctttcccagaactcactcagcttgtccactctgtaccaaactgatccttgtaagcagaaggtcatgctggccttggacccaggagtccatttagtttatcttctcacaggtgtctttgtctgatagaggcaca

SEQ ID NO: 735339 - DNA, 610 bp, Homo sapiens
aagcagggactaaacatgttagggataaaaaccccttttccctcctttgttcagtgttctcccacagtggccagaagtgtgagtggcacccttctgcagaagtaaatttgccttgctgagaaaacctttgagtgatctttttccttgtgaccctgagctcttgtttctaacaataggcttctagcttcccaaccatggaacctcccatggttgtatgggaccataatcctcatgtccccacacgtatagtgacaaaacatggagacactaggaattacagagacagatattctggctaagagattaaccagaacttaatgtgtcaaattgagccataatggaccactaatacttaaatttcatgaacaagtcctcaaattctgtagttacttgtttaattttacagcagtactgtaatkctggtgcccagttagtactttgaagttgagttgcaagtttcccgaggacagtgaaggttcctaatggcctcctgtgttcctgctgaggccccatcatcaactctcatcccaggaatagctgacctggttttattactaaaggggatacctagaggcaacagtgtcacatttacttctcagattaaaaacca

SEQ ID NO: 735340 - DNA, 572 bp, Homo sapiens
ctaacagcccagatcaccaacagtctagtggcatttctagaaccgctgagaacctgggctcccagggctcatggaccggtccccctcattttctgagaagaagtaagcatctcagtttatattagcttttgatatcagtgttattagaaatccctagcataactaaaatatttgacattagagtttagagggggaaataaagtaaaaattaacctaaagaaagtcagaaaggaggatgactgtaacttagtatgtaagataactagaaagcacataatatgttagagttaattaccagtaattgtaaatacaattaatgtccagttgaaagcaagttgttgtctgaggttttttcttgagacaggttctcaactctgttgcccaggctggagtgcagtggcamaatttcggctcgctgcagcctcaacctcctggcttcaaggaattctcccacctctgcctcctaagtagctgggactacaggtgtgcgctgccacacctggctaattttttgtgtttttagtagagacagggtttcactatgttggccaggctggtctcaaactcctgac

SEQ ID NO: 735341 - DNA, 572 bp, Homo sapiens
ctaacagcccagatcaccaacagtctagtggcatttctagaaccgctgagaacctgggctcccagggctcatggaccggtccccctcattttctgagaagaagtaagcatctcagtttatattagcttttgatatcagtgttattagaaatccctagcataactaaaatatttgacattagagtttagagggggaaataaagtaaaaattaacctaaagaaagtcagaaaggaggatgactgtaacttagtatgtaagataactagaaagcacataatatgttagagttaattaccagtaattgtaaatacaattaatgtccagttgaaagcaagttgttgtctgaggttttttcttgagacaggttctcaactctgttgcccaggctggagtgcagtggcacaatttcggctcgctgcagcctcaacctcctggsttcaaggaattctcccacctctgcctcctaagtagctgggactacaggtgtgcgctgccacacctggctaattttttgtgtttttagtagagacagggtttcactatgttggccaggctggtctcaaactcctgac

SEQ ID NO: 735342 - DNA, 622 bp, Homo sapiens
tggcactaagcaggccctccgagaatgtttgttgaatgaacataggcatggaaatgggacagctttcacaagagctatatttaactgttctagaatattctctaggtctttcagaaaagcaaatccttgaaaaacagcagcccacgaatctgaatggcaggtgtttgtgagaagaggtgggtggtcccattcggagggcttctttcggagccgggcttctccctgcacccctcgtgctccccactcagcccgaggtgcctgctgaacttgccgttcttcctccaaatcccagggtacctgcagggcctggtctggttcccgtggtgccaccggaagcttccatgggytgggccacaggaaggtaaccctttgtgccccacctgggtctgggccatctttcctggtgtctccctgagctccaggcatggctgtgactgtccaggccgcataagatgccggttggttaaatagcagtgtccacgcactgacgtcttctttccaagtagggtgctgaggccaggtgtccactataggttgcctggagccccacaccatgatgtgagattggccactgccagcctccccagggagctggccccagaggcctcagagactcttgttc

SEQ ID NO: 735343 - DNA, 622 bp, Homo sapiens
tggcactaagcaggccctccgagaatgtttgttgaatgaacataggcatggaaatgggacagctttcacaagagctatatttaactgttctagaatattctctaggtctttcagaaaagcaaatccttgaaaaacagcagcccacgaatctgaatggcaggtgtttgtgagaagaggtgggtggtcccattcggagggcttctttcggagccgggcttctccctgcacccctcgtgctccccactcagcccgaggtgcctgctgaacttgccgttcttcctccaaatcccagggtacctgcagggcctggtctggttcccgtggtgccaccggaagcttccatgggctgggccacaggaaggtaaccctttgtgccccacctgggtctgggccatctttcctggtgtctccctgagctccaggcatggctgkgactgtccaggccgcataagatgccggttggttaaatagcagtgtccacgcactgacgtcttctttccaagtagggtgctgaggccaggtgtccactataggttgcctggagccccacaccatgatgtgagattggccactgccagcctccccagggagctggccccagaggcctcagagactcttgttc

SEQ ID NO: 735344 - DNA, 580 bp, Homo sapiens
tgatgtgacctctctgagctttaattttcccatctggaaaatgggaatggttgcaagacatatcttctcaaaacaacctgtccaggaggggctgtctcctgggctaagtcctttaatgacagccagtatgcattattgttaatcaataaatgcttattgactcaatgaaaaacacatctatgtcagttttatccagatttattttttttatttttatttttttaaagacagggtgtccctctgtcgcccaggctggattgcagtggtgcaatcttggctcactgcaacctctgcctcctggattcaagtgattctcctgcctcagcctcttgagtagctgggattataggcgtgcaccaccactgcccggctaatatatatatatatatatatatwtttttttagcagagacgggtttcacgacattggtcaggctggtctcaaactcccaacctcaggtgatctgcccgcctcagcctcccaaagtgctgggactacaggcgtgagccaccacactgggcctatcctatttttaatgcatcgtatggaggagccaggggcctgtcgccagtcttcatcg

SEQ ID NO: 735345 - DNA, 615 bp, Homo sapiens
ctacagacaaacctgattccacattttctgtgcgctggctatttcctctgcttggaacatcatctcttcagatactgatatggtttggttctgtgtccccatccaaatctcatcttgaattgtacttccataattcccacatgttgtgggagggacctggtaggagataatttgaattatgggggtgatttctccaatactgttctcctggtagtgaataagtctcatgagatctcatggtttcatcaggggtttccacttttgcaccttccttattttctcttgctgctgccatgtaagaagtgcctttcacctctcaccatgattctgagaacctccccagccaagtggaagtgtaagtccaattaaacctctttttcttcccagtctkgggtatgtctttatcagcagtgtgaaaacagactaatacagtaaattggtaccagtagagtggagcattgctgaacagatacccgaaaatgtggaagcactttggaactgggtaataggcaaaggttggaacagtttggaaggcacagaagtagacaggaaaatatggggaaatttggaacttgctagagacttgttgaatggctttcacaagaatattgataa

SEQ ID NO: 735346 - DNA, 618 bp, Homo sapiens
tatagtattggtatctaaaatctgagtttgtttcttgatatgtatttaataaattatactggaaacatcatgaaccctttatgatacaattagataagattttcaatgaaagataattccatatataatatttttcattayttcttcacccatattcaaaatttcaaaactaattgtaaatataaaactattttatgtatgtgtcttactagctatttcattcattcattcaaattctaagttccttccttattaaacttatgttctataggaagaagatgaaatgaatataaagcatgcaaataaattagtaaggtaatttcaaatattaagacatgctatgaagaaaataatttaggataatggaatcagaaataccatactgtggacggcctaatttagactgggaagtcagtaacaacatttctaaggaggtgacattgagttgagacttaaatgatgagcaaaagccaatcttgcaaaaatttaggtaaaaagcacttcagacaaggggaatagtcaagataactcctaaatatgaaatgagcttaatgtgttatatggtaggaaagaagccttgagcagtggttctatagtactcataatatgtacctgaaa

SEQ ID NO: 735347 - DNA, 549 bp, Homo sapiens
tcccaagagacctcatagccaagttttagtgttctgaaaacttaggagaaagaaaaaaatcttgaaaggagtgaaagagaaatgacaccttactttagtggcaggtaataattaaaaggagagcagatttctcatcagagagaccatggaagctagcaggaaatgacacagcatttttcaatactgaaagaaaagaactagcaacccagaatcctatatccagcaatatatcctataggaatgaaggaaaaatcatgacatcatcagatgaaggaaaataagagaatttgtcacmagaacactaatcctaaaatgcttaaaataagttctctaaacagaaagaaaacaatgaaaattccaaccttggaatgttaggaagaaatgaaaagcatgctaagcaacagtatgggtaaatccaatagattttctttctcttcttaagttttaaaaattatccttgagagttgagcaaaaatctcaacactgtctgatgtgatcttaaatgcatatagaataaatatttcaataatgtataaacacaattttgta

SEQ ID NO: 735348 - DNA, 529 bp, Homo sapiens
gcctgacttctctggctaggacttccagtactaggttaaataagagtggtgaaagtgggcattcttgttttgttccagttctttgaagaaatgctttcatcttttccccattttatgtgatgttacctgtgagtttgtcatttatggcctttattatgttgaggtatrtcacttctgcacctagcctgttgagagtttttgtcataagacagtgttgcatttcataaaatgctttttatgtgtctattgagaatcatcagaaatttttttcttcattatattgatttcttaaatcaagttttgagaatctcgtttcctagtttgctgagagtttttaaatcatgaataggttgaattttatcaaatgctttttctgcatcaattgatatgattccataatttttattccttaatttgttgatgagtggactaagatggttttgttttattttatttcatgtattttatttttatttatatatttatttatttttgatacagagtcttattctgttgcccaggctgaagt

SEQ ID NO: 735349 - DNA, 568 bp, Homo sapiens
ggccatctcttttgtaagaatctaccccaaaacacattggtacaagtatgaaatgacatacacataagattatttattgtgacatcatatgcaatgacaaaaatagtaaataacccacttgtagattcttataatgaacagtgaagagaaatgaaggaatgatatatacataaacgcagagtgttctgtaggatattccattaagtgaatgttgtgttctttaggataagtataagtatgttccaaacattgcaggggtatacttacacttttatttatttatttatttatttatttatttatttatttatttattttaagacggagtctcactctgtcgcccaggctggagtgcagyggcacgatctcagctcactgcaacctccacctcccaggttcaagccattcttctgcctcagcctcctgagtagctgggattacaggcacgcaccaccacatctggctaatttttgtatttttagtagagaaggtgtttcaccaggttggccaggctggtctcaagcgcctgacctcgtgatccgtctgcctcggcctcccgaagtgtact

SEQ ID NO: 735350 - DNA, 496 bp, Homo sapiens
caaattagtaggtatcctgcatttgtatttgctaaatctaacagccttgtttggggagaagactctgaaatggagtttagtgtgcagaatgttgaaaagcagcgctcctgggatcaacacctgtgaaggcaggaaaaggaagcaggattgggcagagggagaattgcactgcgatgaaagcctgagcaacaactttacatgacccatgaggacttctggagctacatttgcttatcagagggtcctctactgggctgaaatgactgggctttgatagcttccctcttcactgctcaatcagtcattggatatggtcaagacaactctctgtggctgaaatgcccttgaaggggcwgacagctgaagaccatctgcttatagctttcccagcagcttagcaaaaaattcctttactgaagacgagtctgggcgactaatttccttgtcctttatagagaaaaaaagcaaagtgcaaaaaaaaagaaagcgtgtaatg

SEQ ID NO: 735351 - DNA, 601 bp, Homo sapiens
agcagttcattcaacttttattgctgagaagtattacatttcaaacatataccacaatgtatttattaacaaattgagcatattttgtttctgctttttaactattaataataatgctgctataaagatgtacatgtaggtctttgtatgaacatatgtttttattccaaaccactgagtaggattgcttggtcatcagctgagaatgtttataagaaacagccaaaccgaggaatttgtatcattttacatttccaccagcaatgtatgagagttccagtttctctatattctcaacaatttttttttaatattagcctttcttrtggatgtgaagtgttaactcattgtggatttttttcatgtacctattgactgttaatatctcttcttttgtgaggtatatgttagtcctttcctccatgtttattaggccatccatcttttattaatttttaggagttctttatatatctagatgcaattcatttgtcaaatatatatatatatatactatcaaatgtatgtattgtgttttcaatctgttgcctgtttactcattttcttaagctatctcttaattaataaactatattttcat

SEQ ID NO: 735352 - DNA, 600 bp, Homo sapiens
ttcagcaatatgcatttaagattcccctatgtcttttaatgacttgatagcttatttccttttattactgaataatataccattatagctatatattatactacagtttgtctgtccattcatctattgaaggatatcttagctactttcaattatgaataaagctgctataaacatctgtgtgcacatttctatgtggatataagttttcaactcctttgggcaaataccaaggagcatatttgctggattatataataagggtatgtttagtttggtaagaagttgctaagctgtcttccaaagtggctgtttcattttgcattcctacaagaaatgagtaagagttcctrttgcctcacatccttgctagcatttgatgttaacagtgttttggatttcagtcattctaataggtgtgcactggtattttgttttgatttgcaattccctgatagtattcaatggtgagtaatatttcatatgcttttttgctatctgtatctgcattgttggcggggtgactgtttagatcttttgcctgttttttaatcagattgtttactttcttgttgttgagttttaaaagttctttttata

SEQ ID NO: 735353 - DNA, 542 bp, Homo sapiens
gaagtcatatcagtttagaaaatcaaagggagacttctaagacaaaaactattgttaatgaggcaggtggctaagatggaaaccgtcaccatgcttaaaaagccaaccagcagcatgactcctcataccacttcctggtccctcaactgcttctaatgtttcttctcatctaaaaaccccccacaaaatgtagtgtacagtgagagacctttcaatcaaaacacagacttgtaggcggagackggaaatctgcattgtttgttgttgctcttgtttatcagctgacacaggtattctgctgatgctgctactgtgctgcttagttacctggaacactcatttttttcactgtattaatggtatggcatattttttacttatgtgtgaataaatataagaaaatgattgcttattggtagcataaaaattcagagtcatgaatgatggtcgtgcaaaacaaccacaaattatccgcatgggtgcctgagatagtgatacctttactttctgatggttcagtgtataccaacttcgctgcatgc

SEQ ID NO: 735354 - DNA, 542 bp, Homo sapiens
gaagtcatatcagtttagaaaatcaaagggagacttctaagacaaaaactattgttaatgaggcaggtggctaagatggaaaccgtcaccatgcttaaaaagccaaccagcagcatgactcctcataccacttcctggtccctcaactgcttctaatgtttcttctcatctaaaaaccccccacaaaatgtagtgtacagtgagagacctttcaatcaaaacacagacttgtaggcggagactggaaatctgcattgtttgttgttgctcttgtttatcagctgacacaggtattctgctgatgctgctactgtgctgcttagttacctggaacactcatttttttcactgtattaatggtayggcatattttttacttatgtgtgaataaatataagaaaatgattgcttattggtagcataaaaattcagagtcatgaatgatggtcgtgcaaaacaaccacaaattatccgcatgggtgcctgagatagtgatacctttactttctgatggttcagtgtataccaacttcgctgcatgc

SEQ ID NO: 735355 - DNA, 606 bp, Homo sapiens
ctgtctgccatgtaagacatgtctgcttcccctttcgccatgattgcaagtttcctgaggcctccccagccatgcagaactgtgagtcaattaaacctcttttctttataaattacccagtctcgggcagttctttatagcagtgtgagaactaactaatacacatttattacctataattacctactatgatctggtattgttttaggaactgagtataaagaacgaagctggaggccaggcgcagtggttcacacctgtaatcccagcactttgggaggccgaggtgggcggatcmcgaggtcgggagaccaagaccatcctggctacagtgaaaccccgtctctactaaaaatataaaaaaaattaactgggtgtggttgtgggtgcctgtagtcccagctactcaggaggctgaggcaggagaatggtgtgagcccaggaggcagagcctgcagtgagccgagatcacaccactgcactccggcctgggtgacacagggagactctgtctcaaaaaaaaaaaaaaaaaaaaaaaaaaaaaagaacaaagctggcatgtttcctgcccttaaggaatatacagtcacgtgctgtataacaatg

SEQ ID NO: 735356 - DNA, 589 bp, Homo sapiens
cactaggctgcctctccaatagttctagataaacagaagaccatttaatattgtttttttcccaagaatccaaatcagtctaaaagcagtttcgattggaaaagaggaagaatcaagtggccaagatgtagcctttcagtttcaatggtcaaagcaaaaaaaaaaaaaaaaaaagtcttaagacagactttgggcatcactggartataaacatttaaagaacagggttcttgtcactccatgtcacaaacatgcctaaaatttcaagaaaatctcagctttcactaagcggcccgtcatagcaataagaggctacactctttccacaaaatctattccagtgaaatatggcccactcacattttcatttagctttctcttggttccttcatttggctgtgttctatttcctattgagtggagtctttagttataagctttccttagtgttatttagaaggcagccacttttctctccaagcccctttcattgagtgtgagccaaatatctgctactcacactgccttaaattcagggactctaagtaatttttggtagaggacatattctaaaagagacagtgacctt

SEQ ID NO: 735357 - DNA, 589 bp, Homo sapiens
cactaggctgcctctccaatagttctagataaacagaagaccatttaatattgtttttttcccaagaatccaaatcagtctaaaagcagtttcgattggaaaagaggaagaatcaagtggccaagatgtagcctttcagtttcaatggtcaaagcaaaaaaaaaaaaaaaaaaagtcttaagacagactttgggcatcactggagtataaacatttaaagaacagggttcttgtcactccatgtcacaaacatgcctaaaatttcaagaaaatctcagctttcactaagcggcccgtcatagcaataagaggctacactctttccacaaaatctattccartgaaatatggcccactcacattttcatttagctttctcttggttccttcatttggctgtgttctatttcctattgagtggagtctttagttataagctttccttagtgttatttagaaggcagccacttttctctccaagcccctttcattgagtgtgagccaaatatctgctactcacactgccttaaattcagggactctaagtaatttttggtagaggacatattctaaaagagacagtgacctt

SEQ ID NO: 735358 - DNA, 634 bp, Homo sapiens
tcagaatgtggctgtatttggagattggacttttaaagaggtgattatgattaaatgaggtcataagggtggggccctaatccaatatgattagcgttcttataagaagaggaagattcatgtgcatagagaaaagaccatgtgaggacacggtgggaaggcagccaactgcaagccaaggagagagatgtcaagagaaaccaaacctgttgataccgtaactgtggacttgaagcctccagaatggagagaattaatttctgttgtctaagycacccaacttgtggtgatttgttacggcagccctagcacactaatccagcaagtgtttccagctcccctccacctcatctcccgtgtcctctcttaattatgctgttgtggcctctttggcctttctgctttctcaagtacagcaagctggcattcacctcagagcttttacattttactttcactcttcctggaatactcttcctcctagattctatactgcttattcacacacttgtcagatttctgttcaaatgttgccttcttagtgatgcctttcttgaccatctcatttcaaattgcagcctctgttatgtgtcctgatcttgctttgttttcctccatagcgtttgtcaccatc

SEQ ID NO: 735359 - DNA, 612 bp, Homo sapiens
attcttatgtagggcaaacttacctgttcttctttaggatttaagactttcgttttatgcttcaaaatgcccttcacctctatctatattcactgtattttcttttaatgtcagtttcaactttttacatttaaatgcaaaaataatctggaatttatctatttgatttaggaattgaggtgggggttcaactaatctcccccaacaatgcccagatggctaaccagttatcccaatagttaagtttgagatgtctgttagaaatccaaatggaactaggtaggtattacgagtctggattctaggaaagagttccagctggagatatgacgatgggagttgaaagtaaatagatagtatttaaaccaaggagcctggatgacatcatcaaaagagagagtataggtaaggagaggagagggcccccactggccttcttsctgttcctcaaacatgtggaaaccattcttgcttcaggtgctttgccaacaatgctctttctctagacattttcaagtctcgctcacttcattgaagcctctcaaatgtcacttcttcagaacaaaggaacaccctgaccacactattcaaatagcatcccttcccctaagc

SEQ ID NO: 735360 - DNA, 583 bp, Homo sapiens
cccagtaaaaatattatactaaaatctaggaacatgtggctgatggacagtcattaccaggaaaaaaaagttgttaggtctaaatgtaaaaattgaggcaaagaaagtgcccgagctagaattagaaccctgactacctgaatattagatcggttagtgccacttctaccctaccgctgctgaggggggaggtgaacagtctctcaggttgcagacagtggatggtttccctccctctatcttctcatttcatggtggagctgaatcatcctatgttctacatgctgacagtggaaggttatgaccatacccatatcctgttgtctctgagtctcctgtggtgcagagatccctgagacttgtagaacagaacctgagtggaaagtgggagggggattgggggtggttcccaygaatcaagcagcaacctggagacaaggaacacctgcaacctcagcagtggatcagaacggctgactgagcaatggacatactgtgcatctttcattagtgctgagaccaacttctagcttggagtcccatgaaagggaaacttagccctaacaccacaacaaggagcaca

SEQ ID NO: 735361 - DNA, 611 bp, Homo sapiens
gggagtcaaacaggcagcaagtcgacgtggagcaagatagtcttatgttggagagtggccctctcctctgtggggcctgggcctggcatttcatctctcggttgggctatgaatgcctaggttgcagaatttcttagtgagttttgcacattatatatgcaacacacctatgcaatatgagtacagtgcctcaaacctaggtactcagttatttagagttaccattgtaaaatattaaatgcctgggtatgaaagaatgaaaatctcttcctctctcaatgtgttctcrggattatggctttaaaaaatagctgttcaactaaaactaattaaaacttccaggttagaacctagaagcagacatacaacgactaaaatgagtgcaagaggataatggtgtccattagagattattcttactcagaggcagggctaggactagggagaggcaagagaagcatccagggtgaacacttaagaggcacccagcttcagggcctgcaggcactaagcctgagcttgcacaacactgagagtgcgactccatgccctaccctaggccctgtcctgttcaaaggacatcctacctggctcattggcaggatatcttg

SEQ ID NO: 735362 - DNA, 607 bp, Homo sapiens
tcttgctttggggttgaagccagagggagctctgggactttttgtttgacaactgcccctggataattcatacctgtgccctgaacattcttcctacctgttcagagggcagggctatattcttggggtggcctggactccactggaaagcccagcatgctggacagttctgctattttaagagcatgtgagaagtagagggagctgagacagctgcccagctaggaagaaggtctaggagccagaccttccccgtgggcagcygtcttcctttgaaagctggtcggtggtcaggaccctggtccctgtcctctgttcctcacagtcggtagactcaaagctctgcttattcttcttcacagatgctgtctcttcctctacccacccatctctgcctctactcaccactgccatacctcagctcccgtgtgaattgccttgtgcctgggccgtggcaagggtctataagcttgcctcccaagcttgctccccacctgcccccgcacatcctgtgccctgtgctagggaactcacccctgacaacagttttggcatatcattctcccactccaagcccctaatccaaattcaaatgtcacctcctctg

SEQ ID NO: 735363 - DNA, 554 bp, Homo sapiens
ggaccaaaattcatcccatgagctcagcattcctgctcttgaaaagggctgtgtggggctggacggatagttaggacttacctgagcaggaataagttttcaatggtacaggcagatgctttgggaatcaggaagtgacctgctcctccttgaaatgactctgggctggggcaatggtgacactgccacctcatgggatctggggttacctggtggaggaaagaygcaggatgaagagaaccaggtataaccctgccacttggagtttttcctacaacttgggctggtgaaatgctgaatctcagtttatgttcaaaataaatgaaacctcattctattaccaaaataaactgctcacatgtgatgttgataatgagacagccagacagaagctgccttcataccaaaacaagtgaatcaggtggtaggaataaatgaacaaagggcaaggcattgtcactgcccctttccttcagcagtagaaagactgactagaaaattcatacgtaaagaaaaagacctttttttctgttgttacaacctgaaacgccatg

SEQ ID NO: 735364 - DNA, 540 bp, Homo sapiens
ttcatcatagaagattaggacacaccctgatagcctcatcttcatttgatcacctctgtaacgaccctatctccgaaaagggtgcattctaaggtactgggagttagaacttcaacatgtcttatctgaggggagaggaggacacagtttaacccaataacactsacgtatttgagaagtgagtaccaaaatgatttttggggttgccagtttggtgacggggcttaaagctgtttgctgatgatggaatatttgcgaagtaagtccagtggctataaaaattgtgaatcataccctcattgcttaccattctcttggcttttgtattttcacactttcttggtttttattctgtactggtctctgttaggattctctgctggacctctaatgtgcaccttcccagtgttcgctatctcagtgtataatggcacctccatcgttccatggctcaagtcaaatcctacgaatccttcttgatcccttgctttcctcagctccctcctatgttcagtccagctttaaatcctgctggctctt

SEQ ID NO: 735365 - DNA, 540 bp, Homo sapiens
ttcatcatagaagattaggacacaccctgatagcctcatcttcatttgatcacctctgtaacgaccctatctccgaaaagggtgcattctaaggtactgggagttagaacttcaacatgtcttatctgaggggagaggaggacacagtttaacccaataacactgacgtatttgasaagtgagtaccaaaatgatttttggggttgccagtttggtgacggggcttaaagctgtttgctgatgatggaatatttgcgaagtaagtccagtggctataaaaattgtgaatcataccctcattgcttaccattctcttggcttttgtattttcacactttcttggtttttattctgtactggtctctgttaggattctctgctggacctctaatgtgcaccttcccagtgttcgctatctcagtgtataatggcacctccatcgttccatggctcaagtcaaatcctacgaatccttcttgatcccttgctttcctcagctccctcctatgttcagtccagctttaaatcctgctggctctt

SEQ ID NO: 735366 - DNA, 596 bp, Homo sapiens
ctttccttggtgctgcaagggatttttctttttttgtggaaagtgtcaatgcttgtctttcaaaagcaccacccccacgcctgccaccccccaagaaaaagtaaaaagaggacttgaaaaccaagtgccatcctgcccatttgyacacccatgcagagaggagtcaggaactgctaatgaacgtaccaactgtgtatgaaaaatcagccaagctcaggctttgggctttcatttctctgctgagatcctgactctagactgcctgtgagaaacatgagcatggcttcaaccacaatgtgaacagagagcaagactaataaaagtgaggttctcctggaatatgagttaaaaatgagcactgtcttggagcaagccaattgtatcccattattatttcctgacttggtctggtaacatcttaaaatacaagcaaaactaccttcttctttttaggacctatgaccttttaaatcttgctttccaagatttaagaactggcaagtatggttactttttagaataagtttcctattctttcctcacttcgtctcgcctccctcccttctttccctttttcctcccttctttttaataca

SEQ ID NO: 735367 - DNA, 618 bp, Homo sapiens
tcttttctttgtatgactggtagaatttggctgtggagccatctggtccggggcttttttttttttggttggtcggttttttaattattggttcaattttggaactcgatattggtctgctcagggttttgatttcttcctgattcaatcttaggagactatgtttctaggaatttayccattttctctagctgtttagcttgtgtgcacagaggtattcataattgtctttgtggatcttttgtatttctgtgggattggttgtaatgtcacctttgtcatttgtgattgtgcttatttggatcgtctgtcttttttttttttttgtaatctagctagtggtctatcaatcttgtttatcctttcaaagtacaaacttttggtttcattgattcttgtatggccaaatcctacaccttcctatacttgtggtttgcaggttataatcaagttatcagatggctgtgagaaagctgttaacttccaggggtcttagtttcctcatttcatagtagagatgatgcctgttgtccaaggtttaatcaaacaggtatgtggaggccctcacacagtgcctggcacttcataagtcttttcttagtccatagtccctcattt

SEQ ID NO: 735368 - DNA, 611 bp, Homo sapiens
ataatggcctcatttaggaaatgtatcaaggaatcaattgaatacaaacagtcctgctaatctcccttgtggagctattctggtgctaacacaatgatcctgaggtgttgaatgccattatacaaccaatggtaaacaaaacacaaggcatctttaatattaagcatacccccatcagagaggaaatgtaccctcctttcagtatgagtattcctggaatgcgccatggttttgcacagtgattgtccactctcgttcctagtgattatttrtaggaaacatgggtaaccctaagaatttagttttctgtgaaaatgcactctaatgtttaaatgtctgcagttctgaattagcaaatcttagactctagtggcttcttcaaagtagttaatcaggtagctgcagtaaagatggattctgtatttataaatgcctcccaatatccaaagttctagaacattttcttaaaggaattcaggtgtttttctgactccttttgtggcactagacattgtctttatgcttcatggcaaccctatggaataggcactatttttttttttttctcgaggcagagttgcggtctgtcgcccaggctggagtgcaatggc

SEQ ID NO: 735369 - DNA, 677 bp, Homo sapiens
gtctccatggaacactcccctcctgcctgttcccaagtcagggaccaaggactacaggccagtgcaggacttgtgcttggtcagtcaagctacagtgactttgcacccaatggtacctaacccatacacattgttggggttactgccagctgaggacagctggttcacctgcctggacctgaaggacactttctttagcatgagactagaccctgagcgccagaaactgtttgcctttcagtgggaggatctgtggtcaggtgtcaccactcagtacacttgaacccagcttccccaagggttcaagaactcccccaccatcttcagggaggcattggctcgagacttccaaaagttccccgctagagacctaggttgcgtgttgctccagtacattgatgacctcctgctgggacaccccacagcagtcgggcgcaccaagggaatggataccstgctccagcacctggaggactgtgggtataaggtgtccaagaagaaagctcagatctgccaacagcaggtatgttacttgggatttactatccgacagggagagtgcagcctgggatcaaaaagaaagcaggtcatttgcaacctaccggagcctgagaccagaaagcagttgagagaattcttaggagctgtggggttctgcaggttatggatcccaaact

SEQ ID NO: 735370 - DNA, 600 bp, Homo sapiens
gctgggcttaaatactcgtttccacacctaagtaacccaaagtctggggcaggattgccaagagttgctggggctgatgttttctgagttctgtccacctctgggtcctgtggctcctgcctctttccacacacttgggaaaagctcagaccttcacctactaacaggcctctcccccaagcatttcgtgagtgtagtcaacttttctgaaagtggaagtkccactgggaagggcccatgttgaagcctactgccttttgtcatctgactagttctcctcatttgccttcctttcccccttcccctaagaccagaacgaatctctctacttgtaggtaagccatttagtgtccacttttggtagcagaaacaagctgttggggtcaccctccatcccagtggtttatcaaagtatccctcccaaacacacaccaagctctccctaagcattgtggtgaataacaatgtctgcattacatttcccctcccagccctggacttagagatgggggaagcaaggaagatcctgctccctctgcccaggactgtaggcttcccgtgacagtccccctgagcagtggttctccaagtaggaccctg

SEQ ID NO: 735371 - DNA, 600 bp, Homo sapiens
gctgggcttaaatactcgtttccacacctaagtaacccaaagtctggggcaggattgccaagagttgctggggctgatgttttctgagttctgtccacctctgggtcctgtggctcctgcctctttccacacacttgggaaaagctcagaccttcacctactaacaggcctctcccccaagcatttcgtgagtgtagtcaacttttctgaaagtggaagttccactgggaagggcccatgttgaagcctactgccttttgtcatctgactagttctcctcattygccttcctttcccccttcccctaagaccagaacgaatctctctacttgtaggtaagccatttagtgtccacttttggtagcagaaacaagctgttggggtcaccctccatcccagtggtttatcaaagtatccctcccaaacacacaccaagctctccctaagcattgtggtgaataacaatgtctgcattacatttcccctcccagccctggacttagagatgggggaagcaaggaagatcctgctccctctgcccaggactgtaggcttcccgtgacagtccccctgagcagtggttctccaagtaggaccctg

SEQ ID NO: 735372 - DNA, 580 bp, Homo sapiens
ctgtggggttctgcaggttatggatcccaaactttgcagtactggccaagcctctgtatgaagtcacaaagggggataacaaagagtcttttgaatgggagtcccaacagcaacgagcttttcatgagttaaaagagaaactcatttcagccccagccctggggctgcctgacctgacaaagccatttacactatatgtgtcagagagagaaaaaatggcagttggaattttaacccagacggtggggccctggccaagactggtagcctacctctccaaacaactagatggagtttttaaagattggcccccgtgtttgagggccttggcagcaactgccctgctagcacaagaagtggataaactaactcttgggcaaaaccygaacataaaggcctcccatgctgtggtgactttaatgaataccaaagggcatcattggctcatgaatgctagactaactaggtaccaaaacttactctgtgaaaagccctgcataactattgaagtttgcaacaccttgaaccccgccaccttactcccggtaccagagagcccagttgaacagaactgtgtaga

SEQ ID NO: 735373 - DNA, 680 bp, Homo sapiens
ttgtgtgtatgcaagaaaggttaaagtgaagcctccactcaaaggtgggcatgacagtgtagaaaacctattagaaaaggataggtatatgtaaaataggtgaagggtggggcccaatcagaggaaagcatgccaaacaggaagatgatttctcaatcygttccgaggatttaacctgtagcttggctttcaggctttcaactgtcttcagcttggaggtggggtttcactggagatccacccctatctgcccaggaatttggctgcctgctgtcactatcaccttgagctcatcaaaggcattcttcattgttgtttatagcagttttgattgtgtgttaggctgtctttgcattactataaagaatacctcaggctgagtaatttataaagaaaagagagttaattagctcatagttctgtagcctttacaggaagtgtggtgctggcatctgcttggcttctggtgagggcctcaggaaagttttacacttggcagaaggtgaagttggagcaggaatgtcacgtggtaagagcaggagcaagaaagcaaggagggcggtgcacacacatttaaacaatgagatctctcatgaactcactcatcaccaaggggatggtgctacgccattcatgaggcacccacccccaggatccgtatacctcccaccaggcccacc

SEQ ID NO: 735374 - DNA, 680 bp, Homo sapiens
ttgtgtgtatgcaagaaaggttaaagtgaagcctccactcaaaggtgggcatgacagtgtagaaaacctattagaaaaggataggtatatgtaaaataggtgaagggtggggcccaatcagaggaaagcatgccaaacaggaagatgatttctcaatccgttccgaggatttaacctgtagcttggctttcaggctttmaactgtcttcagcttggaggtggggtttcactggagatccacccctatctgcccaggaatttggctgcctgctgtcactatcaccttgagctcatcaaaggcattcttcattgttgtttatagcagttttgattgtgtgttaggctgtctttgcattactataaagaatacctcaggctgagtaatttataaagaaaagagagttaattagctcatagttctgtagcctttacaggaagtgtggtgctggcatctgcttggcttctggtgagggcctcaggaaagttttacacttggcagaaggtgaagttggagcaggaatgtcacgtggtaagagcaggagcaagaaagcaaggagggcggtgcacacacatttaaacaatgagatctctcatgaactcactcatcaccaaggggatggtgctacgccattcatgaggcacccacccccaggatccgtatacctcccaccaggcccacc

SEQ ID NO: 735375 - DNA, 680 bp, Homo sapiens
ttgtgtgtatgcaagaaaggttaaagtgaagcctccactcaaaggtgggcatgacagtgtagaaaacctattagaaaaggataggtatatgtaaaataggtgaagggtggggcccaatcagaggaaagcatgccaaacaggaagatgatttctcaatccgttccgaggatttaacctgtagcttggctttcaggctttcaactgtcttcagcttggaggtggggtttcactggagatccacccctatctgcccaggaatttggctgcctgctgtcactatcaccttgagctcatcaaargcattcttcattgttgtttatagcagttttgattgtgtgttaggctgtctttgcattactataaagaatacctcaggctgagtaatttataaagaaaagagagttaattagctcatagttctgtagcctttacaggaagtgtggtgctggcatctgcttggcttctggtgagggcctcaggaaagttttacacttggcagaaggtgaagttggagcaggaatgtcacgtggtaagagcaggagcaagaaagcaaggagggcggtgcacacacatttaaacaatgagatctctcatgaactcactcatcaccaaggggatggtgctacgccattcatgaggcacccacccccaggatccgtatacctcccaccaggcccacc

SEQ ID NO: 735376 - DNA, 680 bp, Homo sapiens
ttgtgtgtatgcaagaaaggttaaagtgaagcctccactcaaaggtgggcatgacagtgtagaaaacctattagaaaaggataggtatatgtaaaataggtgaagggtggggcccaatcagaggaaagcatgccaaacaggaagatgatttctcaatccgttccgaggatttaacctgtagcttggctttcaggctttcaactgtcttcagcttggaggtggggtttcactggagatccacccctatctgcccaggaatttggctgcctgctgtcactatcaccttgagctcatcaaaggcattcttcattgttgtttatagcagttttgattgtgtgttaggctgtctttgcattactataaagaatacctcaggctgagtaatttataaagaaaagagagttaattagctcatagttctgtagcctttacaggaagtgtggtgctggcatctgcttggcttctggtgagggcctcaggaaagttttacacttggcagaaggtgaagttggagcaggaatgtcacgtggtragagcaggagcaagaaagcaaggagggcggtgcacacacatttaaacaatgagatctctcatgaactcactcatcaccaaggggatggtgctacgccattcatgaggcacccacccccaggatccgtatacctcccaccaggcccacc

SEQ ID NO: 735377 - DNA, 582 bp, Homo sapiens
tcccattggttacttggggtaagccctatgtaaatgggaggatgaagtaaagttacaaagtcatttacttggtctatgccctatggagaggatctttcctgtcgcagctgaagtgtgaattggccttatgttccctgcctccagaccctattttcctgcctcacttaaaacaaaacaaaacaaaccaaaaaacaaaaacaaaaamaaaaaactttaatgaggcatgtgttacatatcataaaactcacccatttcaagtataaaattcagtgattttagtaacttccctcagtgatgtagccataactattactcagttttggaacaattttatccctcctgataagatccttcatgctctttcacagttaatcctgttcttaccccagctccaggcaaccaacaatctactttctctctatataaatttgcattttctggacactttgaatcaatgaaatcatacaatatgtggtcttgtgtctggttttttttttttttttttagacagaatctcgctcagctgcccagtgcagtggtgtgacctcggctcactgcatccaccatctccgtggttcaagc

SEQ ID NO: 735378 - DNA, 593 bp, Homo sapiens
ttgggtcgaatagaacttcaggagttgatttccctgggtgggtggagccggatccttccttagctatctgtccctttgctcctagtactgctgctgcctggcctcttagccactgtggggggtctagcaccagctgtcaccaagtgtctatgtatgggaactggtctaggtatcctttaccagtcaccttttgccacaccttagaaacaagggacctgtccaggcttccttctgatggccaacccactattaaagttgggcaatctatctctcacagagttccaagttcccctggcggtctagtggttaggattcggcgctctcatccaccgcggcctgggttcgactcgtggtcagagtgaaccaagtaaacgttctggaygagccaaagacaaaacctctcagacaccggatttaaaaaggaagagaattctttttcgaccgggagcgtctgcagactcgcgtcttaagagccgagctccccgaaggaagacagactccctggcccttttcagggcttacaactctaaggggttccacgtgaaaggatcgtgatggattgagagcacatgtgcttagagttgggcgggggg

SEQ ID NO: 735379 - DNA, 593 bp, Homo sapiens
ttgggtcgaatagaacttcaggagttgatttccctgggtgggtggagccggatccttccttagctatctgtccctttgctcctagtactgctgctgcctggcctcttagccactgtggggggtctagcaccagctgtcaccaagtgtctatgtatgggaactggtctaggtatcctttaccagtcaccttttgccacaccttagaaacaagggacctgtccaggcttccttctgatggccaacccactattaaagttgggcaatctatctctcacagagttccaagttcccctggcggtctagtggttaggattcggcgctctcatccaccgcggcctgggttcgactcgtggtcagagtgaaccaagtaaacgttctggatgagccaaagacaaaacctctcagacaccggatttaaaaaggaagagaattctttttcgaccgggagygtctgcagactcgcgtcttaagagccgagctccccgaaggaagacagactccctggcccttttcagggcttacaactctaaggggttccacgtgaaaggatcgtgatggattgagagcacatgtgcttagagttgggcgggggg

SEQ ID NO: 735380 - DNA, 632 bp, Homo sapiens
ttgcattttgctgtattttgcttcatagatactgcatttttttttttttttttacaaattgaaggtttgtggcaaccttgcatcaagcaagcctattggcgcctttttatcaacagcatgtgctcaatgtctgtgtcacattttggtaattctctcaatttttcaaactttttcattattattatatctgttatagtgctctgtaatcagtaatctttgatgttactttttttttaattttaggtttgaagtacacgtgaaggttacataaacacatgtcacaggggtttgttgtacatattatcatatcaccaggtattaagctcagtacccaatagttacctattctgctcctctctctcctcccacccwcccccgtcaagtagaccccagtgtctgttgttccttgtgttcataaattcttatcatttagctcctacttataagtgagaacatgtagtgtttggtttcctgttcctgtgttagtttgctaaggatgatagcctgcaactccatccatgttcctgcaaaggacataatctcattattttttatggctgcgtaatattccatggtgtatatgtaccacattttctttatccagtctgtcactgataaatgggcatttagtt

SEQ ID NO: 735381 - DNA, 535 bp, Homo sapiens
ttgatactggtataggcttacacgtcattgaaactggaaaaggtagctagatattcttctactcatgttttggataatgagatattttatgcttcacacacttggagtatgtcatctactgtaatacggtatctgaatgaatactttaaataaaatacatttctgtaagttaattgtatactttaaaaatctctgaaaaatttgagtagcaagtctcagaaacttggttctaaatattaagaatatatccttccttgggagggagcatgtagtaaacatgttagtgtgattgtaagcatactgtctttctggaggtcgctgtgttcctgcatccactgttttcatttcagggatgttcacggaacgccagrcaccaaaaggccagaagcatgcccctgcaggaccagcacttggctctggccatcctgctggagctggctgtgcagagaggcacgctgaggtgagggcttgtgcagaatgggaacgctttggggaaacgcctctgtatccaaatacctgttgcattgtgtgcatt

SEQ ID NO: 735382 - DNA, 556 bp, Homo sapiens
gcttgaaacacgcacttttaaatcaatactagaaaagaacaacgaaaatagtggctttctttgttggccgttcctatgtactgggctctgtgcagggcatgtcatctgagctgtcactctgtttagtaccagctccccccttaacaggtgtggacgccgagctgggggaggagcaggcatgtggggccctgggygtaaatctccaggagtgctggtctttacaggtcaagtacaagttgaattttgcatctttttgggaaagtcttaggcatttcaatatcatgctttggtttaatttttctattatttgttagtctttaaactaatgataatagggctcttctgcctttagaagaattagaactatgatttaatttgcaaatgaaagtaggtgttctccagagtgggcaatgtttagattaaaataaaggttttggttttagatttcaaggccagcttgagatgctgttctgggttcccacagaggtggttctgcctttctccaggggtcctaggcctgtagggtggtttggtcatgttagtaatctgtgtggat

SEQ ID NO: 735383 - DNA, 556 bp, Homo sapiens
gcttgaaacacgcacttttaaatcaatactagaaaagaacaacgaaaatagtggctttctttgttggccgttcctatgtactgggctctgtgcagggcatgtcatctgagctgtcactctgtttagtaccagctccccccttaacaggtgtggacgccgagctgggggaggagcaggcatgtggggccctgggcgtaaayctccaggagtgctggtctttacaggtcaagtacaagttgaattttgcatctttttgggaaagtcttaggcatttcaatatcatgctttggtttaatttttctattatttgttagtctttaaactaatgataatagggctcttctgcctttagaagaattagaactatgatttaatttgcaaatgaaagtaggtgttctccagagtgggcaatgtttagattaaaataaaggttttggttttagatttcaaggccagcttgagatgctgttctgggttcccacagaggtggttctgcctttctccaggggtcctaggcctgtagggtggtttggtcatgttagtaatctgtgtggat

SEQ ID NO: 735384 - DNA, 495 bp, Homo sapiens
gtatgtgccgctccctcaagtgaccataagcagttgtaattaacatttgcactggctgatcccatgccttgcaccatgcacaggtctcctttccagtccatcggccctcccgtctccaaggatctatccttcattaaagattgtgtgtttgttaaatattttctccttttcattcctttataagtgctctaggaatacatagcctaccctgaggatgtaattctttgtagaaacccttcagatatgctgttccctgcctggatactcagcgtctgggtcttattcctcatcttagctcagttgttgcttccacaagtcccttactgaccctcagaatagcggtggtctgtcctccrgtctccctggtactcccatagtcatccgttgcacagttttggacttgaaatcctgtgattagttgtgtcagcggtgccctttgctgccttccttgttagagtgtgcaactcagtcttcacacggtatctgtggaaccag

SEQ ID NO: 735385 - DNA, 579 bp, Homo sapiens
ccgccaccatgcccggctaatttttttgtatttttagtggagatagggtttcaccatgttgaccaggatggtctcgatctcttgacctcgtgatccgcccacctcagcttcccaaagtgctgggattgcaggcgtgagccaccttgcctggcctctttttttcttaatttgcggaaagtttatcagattttttgttcttgccagaaaccgaacttttggttttgtagattatttttccattccctatttaatttatggctgctctaatctctgtcgtttccttccttctgctttgtatttttttgtttttgtttttktttttttgtctttgttttgagacagggtcttactttgtccctcaggccgaagtacagtggcgcagtcatggctcactgcagcctcaacctccttggctcaagttatccacctgcctcaacctcccaaagtgctgggattacaggtgtgaggcaccacacctggcctaactttggtttttattgtgttcttatttttttagttcttccagatgtagagttattgatttgagatcatcttctgtgaatgcagacttctatagta

SEQ ID NO: 735386 - DNA, 589 bp, Homo sapiens
tcctttatttctttatgttttccttttgacatttgagtataatgaagagagttgttttaaagtctttgtctggtaagtttgatgtctgggtttccttagggatattttctgtcaatttattttggtcctttgaatgagccacactttcccattctttgtatgccttgtaacgtttttgaaaactggacattctaataattataattactatgtggttactctgtaaatcagaacccccccctacaaacacagtaatgttttgtggttttaaattttctttacttattatattgtgaaggatttttttttttttagtgaaattttccaaagtgatttacaaaactgtttggtttataaggtgtggtcaccgaagtctttttgtttccttaacaaatgttaagctaatgttttcacagtgattttctkgtatgtcaggaaccaatcaaacaggcaaatacaagaaaaacaaaaagaaaaacaagtaatcattgtccagcaaaatatgtctctaggccatgcagactggctttgtgctgggttctttaaagccggcacaaagtgtgtgttcactcttgcactgagtgaagtt

SEQ ID NO: 735387 - DNA, 359 bp, Homo sapiens
gtcttagaacagttgtctttgagaaattcttccctctactgcctctgtgaatgggcatagcatggttgcatacatactgtcactccatagaacatttgttaaattaaagccaaagtttaaagcaagagctttaacttactggttttactaatggtttcctccccaatagccacaacaatattgatacmctcacaccttttaacataaagcttggtgttgtctgtttttcagatgctgtcatctatatgatctcagtattttaaaaatcagcttccagcccatatggtggttcatgcttgtaataccagcagttgaagagcctgaaatgagaggattccttgagcccaggagttcacaag

SEQ ID NO: 735388 - DNA, 633 bp, Homo sapiens
tcttagacactgttgatgagaatgtggacgagtacgacctctatagaaaacagtatggattgagtatgatattgactatgcatttctcataaacagctcttattattttgagatacattccatcaatacctagttaatgagcggttttagtatgaatcggtgttgaattttattgaaggccttttctgcatctattgagataataatgtttttttttccattggttctgtttatgtgatggattatgtttattgatttgcatatgttgaaccagccttgcatcccaggtatgacgccaacttgatcatggtggatttggaaaccggcacaagacaaggatgccctgtctcaccactcccattcaacatagtattggaagttctggccagggaaatcaggcaagagaaataaataaagggtattcaaataggaaaagaggaagtcaaactgtstctgtttgtagatgacatgattatatatttagaaaaccccatcatctcagccccaaatctccttaagctgataagcaacttcagcaaagtctaaggatacaaaatcaatgtggaaaaatcacaaacattcctatacaccaataatagaaagacagagagccaaatcatgagtgaactctca

SEQ ID NO: 735389 - DNA, 581 bp, Homo sapiens
atggaaacatgaattaagagaatgatcactgtttagttctatcagaaaactattaaaagtggtccaagggggtatttaaaaagagatattaaagtattttccaagggagccctattcagggtagaagcgcagacactatccctgacctcaccacacaaactaccctcatgtgttgggagggaccaaggggcgctctggtcctgctgacctgcattaatcacggcccggaggtccacactaagaccctgaggcctgggaagcagcctgggtggggtcagagaagcggtggatgaggctcccacagcagctyccagggtcccatccccgtagctgtttccttagtggatgcagcagggtcaggcccttccgctgtgacgttttctcctctttattacactggtgggaaagtctccgtgagaggcccgacctagatatggaccacgcagcgagcccgggggtccaagcggcactcctggggtgcagaggatttgtgacagcctagagaacagaggaaatggttttgaaaaggcaaatggcaggtgactagggacacgatgttttcacttctggcagtcaagtga

SEQ ID NO: 735390 - DNA, 601 bp, Homo sapiens
gccaactctttacaaggccttccagaaaatacgggacagttattgggaacacttcccaatttgttctgtgaggccagtattaccctgatactaaaggcagacaaaagcatcagaagtaaatatgtgtatggatgaatttccctgatgaatacacacagagaaattctcaaaaaagtgaaatgaatcaagaatatatcaaaatgaatgtacaccatgaccaaatggaattattttacagatgcaatattgatctatccgataatcaatcagtgccttacacaaagtaataggataaaggaaattaacagaaagagcctttcaacagacacagggagcatttgaccaatccaatattcattcacaatctccctggaaaggaagggtacaagcaaacttcytaaatctgctaaagagcatcaatgaaaaacttacacctaacgccataatagtaaaatactggttgttgtgtcttgacattttagaacaaggcaaaaatgttaacatccaaagaaattacatgagagaaaaaaacaaaatcatcaatgtgggaaaataagatgttagaattgtctatcattgcagaggacataagtgaatataa

SEQ ID NO: 735391 - DNA, 454 bp, Homo sapiens
atgtgtgcctttctattccctctgcttcccccaagtggctgctcctgctgagaggctggggttcttcatcctggcctgaaagcctcaaagaataatggagtctcaaggggataccccacctgcacagggaggcacatggggagggyccaccaggaaggaggcccagcaggtagcccagctaagtgagtgagtcaggacaggcattgggagcagtttaccaggagaagaaacccagccccttgcagagctgggagcctcagaagcagctgagaagccttggtccacaagcctctgagcccataagccaccccctgcagagcttcagggcccggcgggcactggtgaggatggcggcctggaggcttcgtctcttttttatcctgacttccagggctgtcaccattccccctctcacacctcagctagtttttctaatttctgggtgctggggtgg

SEQ ID NO: 735392 - DNA, 626 bp, Homo sapiens
aagaattatggctattgttgtgattattcctttttcttttaccttagtaaaaataaattttttagcttctcatataattttttaaaaaaccctaagagatttagtcaaattccttgttattgtatggtataaaaattgacagggaaatggctaaaatatattaaaattacacaaactctaggagtcaagtttctattgggcagtattaggaaagacagaactggaaacactccaccataatagacatcgaagggggccagcccctccacacytgtgggtatttctcgtcaggtgggaggagagactgagaaaagaaataagacactgaaacaaagtatagagaaagaacagtggacccaggggaccggtgctcagcatacagaggactcgcaccagcgctggcctctgagttccctcagtatttattgatcattatttttactatgttagtgatgggagtgtagcagggcaacaggtggggaaaggtcagcagggaaatatgtgagcaaaggaatctgtatcatgaataagttcaaggaaaggtactgtgcccagatgtgcacataggctagatttatgttcctctttacacaaacatctcagtttagcaaagagtaacagagcag

SEQ ID NO: 735393 - DNA, 626 bp, Homo sapiens
aagaattatggctattgttgtgattattcctttttcttttaccttagtaaaaataaattttttagcttctcatataattttttaaaaaaccctaagagatttagtcaaattccttgttattgtatggtataaaaattgacagggaaatggctaaaatatattaaaattacacaaactctaggagtcaagtttctattgggcagtattaggaaagacagaactggaaacactccaccataatagacatcgaagggggccagcccctccacacctgtgggtatttctcgtcaggtgggaggagagactgagaaaagaaataagacactgaaacaaagtatagagaaagaacagtggacccaggggaccggtgctcagcatacagaggactcgcaccagcgctggcctctgagttccctcagtatttattgrtcattatttttactatgttagtgatgggagtgtagcagggcaacaggtggggaaaggtcagcagggaaatatgtgagcaaaggaatctgtatcatgaataagttcaaggaaaggtactgtgcccagatgtgcacataggctagatttatgttcctctttacacaaacatctcagtttagcaaagagtaacagagcag

SEQ ID NO: 735394 - DNA, 585 bp, Homo sapiens
caagttataacttctcctttagtttttccctagtgtctgagtccaaatggacttctctatatccagaatatctactacttgtcttatttttcctcacacttggcacgtgcagttccttccagctactttcataatgttgtattttaacggttcagttgtgtttatatttcactattctgtcaggcaaacaagggtattcgcatggctgaaatctatggtattttttaagtgtaataaaatgtaatgaataaacatacaaatgaatgagttaattaatatattatattcttggttaagtaataagcattatgaggacaaaaattgagtcttacaccttcttataatcctaaagacctcstacaggacttggaatatagcatgcacttaagacatctttgtgactaatgaatttaaatatttttattaattctaagttgacatatgattgtaatttggggaaggtagtgaaatttcaaatggctttcaccacctgtgaaatgacccttttacataccacatgatttaccagatctttgtttaggtgaacctaggtgaaagcggattgtttcctctacttaggaaata

SEQ ID NO: 735395 - DNA, 522 bp, Homo sapiens
actaattccttgttttctatttttggatgagtgtgcataattacctccatcttaattttcaacataaatgtttagcagaatctttcatgtttcattgccatgtaagcagatgtggtttttattctttttccttttcattgaacagttacttcatttgaaatttttcacttgatttaacttttttttttggtggtagatacatctgttgccacctgtgtctggttggcattttaatgtgttgcctcraagctgtaaccacaatagtggcacattttcctgctgttcctttattctttgtttcttgtgtatctgttttcaagaaattgcattggtatactatcatagctttttttgtctctcagattttctattgtaattatttatatttatgcatttggaaatatttcatgattgttacataaaacagcagagctcttttagaaagttttcatggtttcccaaatgtacaatcatatagattatttagtagttattacataatgatctttggagcaataaatg

SEQ ID NO: 735396 - DNA, 522 bp, Homo sapiens
actaattccttgttttctatttttggatgagtgtgcataattacctccatcttaattttcaacataaatgtttagcagaatctttcatgtttcattgccatgtaagcagatgtggtttttattctttttccttttcattgaacagttacttcatttgaaatttttcacttgatttaacttttttttttggtggtagatacatctgttgccacctgtgtctggttggcattttaatgtgttgcctcgaagctgtaaccacaatagtggcacattttcctgctgttcctttattctttgtttcwtgtgtatctgttttcaagaaattgcattggtatactatcatagctttttttgtctctcagattttctattgtaattatttatatttatgcatttggaaatatttcatgattgttacataaaacagcagagctcttttagaaagttttcatggtttcccaaatgtacaatcatatagattatttagtagttattacataatgatctttggagcaataaatg

SEQ ID NO: 735397 - DNA, 610 bp, Homo sapiens
ggcacaatctcagctcactgtaatgtctgcctcctgggttcaagcgattcttctgcctcagcctccggagtagccgggagtagaggcatgtgccaccatgcctggctaatttttgtatttttagtagagatggggtttcaccatgttggcccagctggtctcaatcccctgacctctggtgatctgccagcgttggcctcccaaattgctaggattgccggtgtgagccaccacacctggcctttatttctttattttctattgtttgtttgcagtgataggatccccaattcagaaatcaartaaaggaagtatgcctccaagaggtattggagtagataaactagatattacaaagcctacagattcagtctattaatttttaaaaataaattattaatttatttataaacagtgtgtgtgtgtgtgtatgtgtgtgtgtgtgtgtgtgtgtgtgatggagtctcgctctgtcgcccaggcttgagggcagtggtgcagtggcccgatcttggttcactgcaacctccccctaccgggttcaagtgattcccctgcctcagcttcctaagtagctgggattacaggcacccgccaccaggcccggtta

SEQ ID NO: 735398 - DNA, 626 bp, Homo sapiens
cccgtgcatgcacccctacctttccttctgacccatacctcctgggtcccgaccatgactttcttgaaagtgtagcccaaaattctccttacttctgaatctacttcctccgatccctgcctcctaggtactaatggttcagacttcatttcctctcccaagtattagagcaagttgtatctccaaagggatctaaggaagttctatgctgtgtccttaggtacctaggctrtgaacccagggaatcttgtccctggtgtcccagtttagatatacagctctcaacatgggcagttatgtgggacccattccccaccacccttgccagggccccaagtttgtaaatggctaggaggattgctctctcatcatgtaagatgctctcctcccctgatttttacccagcttatccctctgcaatacaatctccaagccttggctccttggccagggccttgaaactcatgacccagtactttaacaactggaactgggtctatgacaacataatagatcaggatgaaagcgaattaagtaactcaaggagagaagagacagagagagagagaaaagagagggagagagagaaaaagagagatagaagtagtaaagaaaaaacagtgcac

SEQ ID NO: 735399 - DNA, 626 bp, Homo sapiens
cccgtgcatgcacccctacctttccttctgacccatacctcctgggtcccgaccatgactttcttgaaagtgtagcccaaaattctccttacttctgaatctacttcctccgatccctgcctcctaggtactaatggttcagacttcatttcctctcccaagtattagagcaagttgtatctccaaagggatctaaggaagttctatgctgtgtccttaggtacctaggctatgaacccagggaatcttgtccctggtgtcccagtttagatatacagctctcaacatgggcagttatgtgggacccattccccaccacccttgccagggccccaagtttgtaaatggctaggaggattgctctcycatcatgtaagatgctctcctcccctgatttttacccagcttatccctctgcaatacaatctccaagccttggctccttggccagggccttgaaactcatgacccagtactttaacaactggaactgggtctatgacaacataatagatcaggatgaaagcgaattaagtaactcaaggagagaagagacagagagagagagaaaagagagggagagagagaaaaagagagatagaagtagtaaagaaaaaacagtgcac

SEQ ID NO: 735400 - DNA, 484 bp, Homo sapiens
tgttagaccgaaatctgtgatcactggtagaaacttttagtatcagttgacctcttgtctctgatcatctcctttgtcaaaatgacaacacttttttgcaattgagattggttcctctttcagacttggcttcaagatttgatctcttggggtcgtgctgtctttagcagtggaaactcaaaaaattacaaattygtaaccctgaattgtagtccatttcccattaccaagtgtttagagtgccctagtggcaactgtaagtcaccttttatagtgaggtgttactagctcacttttaaataaaattggaacagcttggcttttgtcaatgtagcaaaagatgattttttaaaaggtgggggtggggcacagtggtacacacctgtaatctcagtactttgaggctgagatgagaagatcacttgagaccaggagttcaaggtcagcctgggcagtatagtgagacctcatctctacaaaaaaa

SEQ ID NO: 735401 - DNA, 568 bp, Homo sapiens
aattaacaatgatgtcctgaggaggctcactgtctctaagaacacaagaagctcaagcaaatctgagatgatgcacactttcgggcaggttctctcttctgaattaggcttcattcgtaaacatttaaaagtaaaacccatactgaagaacagtaacatttccgataattcggggcttctgcaccaggattgggaaatctagcagaaggcggcttcttaacactatcttgctgtcagctacacactgacactcatccacacaactagccagcagcacttatggagtgctcactttaggcaagaaaccaggttaaggtacagcaatagacaagaaggtgaaaaagatgattctgattacaattggcatagtagctaccayggtttataagtataattttaacacaaaatgccttgggttacgaaggcttgacatcccaagatgatagatatatacatacatccttatgagtctacggattatcagattcagtgagacagctccacaaaccatggcctataagtttggaaacactgattaatttgtgtaatacaataggtacacaaatag

SEQ ID NO: 735402 - DNA, 642 bp, Homo sapiens
ctaaaaactgaaggaaaatatttataaaacaattatctgctaagaactcctacccggaatatttaaaaataaaagaaactcttacaatgcagtaacaaagcaacatgattttttaaatgggtaaaagatttgaataaacattttatttaaaaagatatacgaaaggcagataagcaaaaaaaagatacccaacatcattaatccacaggaaaatgtaaattaaaatcacaaggacatascagcagacatccattacaagagtcaaaatttgagactgataataccaaatgttgacaaagatgtggagcaactagaacacagtactgttgctgaaagaaagcaaaatagtacagccattttgggaaagcagtttagcagtttttcataatgtcaaacatatacttacatacaacatagcattccattcatttaccgaagaagaatcaaaacctactgtcacacaaagacttgcactggaatttttaaagcgctttaattcatgagagctccaaactagaaacagtccagattgccatcaaatggtaaatggataagcaaattataatatatccatacaatgttatagattcatagaaagaagaaatgaactgctgatacaaacaacatggatgaatctcaaga

SEQ ID NO: 735403 - DNA, 642 bp, Homo sapiens
ctaaaaactgaaggaaaatatttataaaacaattatctgctaagaactcctacccggaatatttaaaaataaaagaaactcttacaatgcagtaacaaagcaacatgattttttaaatgggtaaaagatttgaataaacattttatttaaaaagatatacgaaaggcagataagcaaaaaaaagatacccaacatcattaatccacaggaaaatgtaaattaaaatcacaaggacataccagcagacatccattacaagagtcaaaatttgagactgataataccaaatgttgrcaaagatgtggagcaactagaacacagtactgttgctgaaagaaagcaaaatagtacagccattttgggaaagcagtttagcagtttttcataatgtcaaacatatacttacatacaacatagcattccattcatttaccgaagaagaatcaaaacctactgtcacacaaagacttgcactggaatttttaaagcgctttaattcatgagagctccaaactagaaacagtccagattgccatcaaatggtaaatggataagcaaattataatatatccatacaatgttatagattcatagaaagaagaaatgaactgctgatacaaacaacatggatgaatctcaaga

SEQ ID NO: 735404 - DNA, 614 bp, Homo sapiens
tgttttcaaagaataattccatctattttaacattttcgagtgtaattccgtgggtaaccgctcttcctttgattgtgagcgatggtaattgaaaggtgtggcttggcgtctgttttggcagttagttagactcagatcttttgttgaagagctcaaagtgctggctttcctggccagcctccctccgtgtttctgttttggtgatgtgatgacagacttacagtgtgtttccttgtgtgtatggtaacagatgtttatgtgaataacagacttttttatgaagscatacactttatagccaaatactaattaaaaataattgcatgtaagcatttttgtttattccccgttgtgcatctttaatcatttggaatcacctgcagttgaaaattgaggcaaagatttgatactgcaattataagaggccatctgactatatattaggtagaaatagcaacatatttgagaaaaaaatattaaacaagctgagtgccaggtcattctgaagtctcttgtatatcgggtcaaaatactaatacattactttgttaaactaataggattttaaggcatcattcagccaccaaaacaactgcttcatgaataatatccg

SEQ ID NO: 735405 - DNA, 621 bp, Homo sapiens
accccagcccgagcctttgccctgacaccatagaccaatggcctctggtcagtcgctgacgcctggggcccctggccatcttgtcacctgcagcctctggctctctctctcagcactgcttctccatggacagatctgatgggcaaaggtgcgtatgtggctcagtgtctgagcttccctccttcctactgccagccttcctgtgctccctccatgcggctccccgatccctgcaggacccrgtgggaaggttgagtggtaccagaaaagactggaaagaagtgctaagtcaccaagaggaaagggcccgtgagggggcgtgggtgggaatggcacctcacttccaggccagagattcccactcagaatttaatggaaatgaagtctccaagagctcagtgcgtgtgtccatccctttgcatgcacacctgtaccccagcaggagagaaaggccagaatccaccatctgcccttaagcatggggacagttgaagatggaaaggcttcagatctgcccccttctcactgcctgctgtcctgcactgggcagggttgctgtgctttaatttttcccagggctaaccccggtggcagcccgagcatctctgaaggccacgacgc

SEQ ID NO: 735406 - DNA, 621 bp, Homo sapiens
accccagcccgagcctttgccctgacaccatagaccaatggcctctggtcagtcgctgacgcctggggcccctggccatcttgtcacctgcagcctctggctctctctctcagcactgcttctccatggacagatctgatgggcaaaggtgcgtatgtggctcagtgtctgagcttccctccttcctactgccagccttcctgtgctccctccatgcggctccccgatccctgcaggacccggtgggaaggttgagtggtaccagaaaagactggaaagaagtgctaagtcaccaagaggaaagggcccgtgagggggcgtgggtgggaatggcacctcacttccaggccagagattcccactcagaatttaatggaaatgaagtctccaagagctcagtgcgtgtgtccatccctttgcatgcacacctgtaccccagcaggagagaaaggccagaatccaccatctgcccktaagcatggggacagttgaagatggaaaggcttcagatctgcccccttctcactgcctgctgtcctgcactgggcagggttgctgtgctttaatttttcccagggctaaccccggtggcagcccgagcatctctgaaggccacgacgc

SEQ ID NO: 735407 - DNA, 634 bp, Homo sapiens
tggctggaggatgctgagagtgcaggagctgttgtcaccctgtgctatggatgctgaaatatcccacaaggcaggcacctcatgcctcatatgtgggtctagctgcagctggccaggctgagagacgtcctctgagactcagagttgctggtgagtacagagatggttgcattcatgggcactggggcaccagggtgctgtgacggcccggcttcagccctcgggaatctcagggcaaccagcagacattcagaacaccaacactagtgtctaataattaggtggtggggaagggggacaggaaagagacacagttactattaatagttaatgcctgttttcataacagagagccgttctctaccaggatcctggaagaaattgagccacatagaaaatgatttgattttcttccttctccccaggatggtactatgtaccattttasattcttaagagtgatcattttgttatctaattgatgccttagggcctaattctcttgcaaaatctgggttgaggttgctagttaatataagaggagactaaggctatcatatgaagatattagtaacaagagaaacactagaagaaaaatgtaagcctgcctaaacaccaaaataaataacagaat

SEQ ID NO: 735408 - DNA, 634 bp, Homo sapiens
tggctggaggatgctgagagtgcaggagctgttgtcaccctgtgctatggatgctgaaatatcccacaaggcaggcacctcatgcctcatatgtgggtctagctgcagctggccaggctgagagacgtcctctgagactcagagttgctggtgagtacagagatggttgcattcatgggcactggggcaccagggtgctgtgacggcccggcttcagccctcgggaatctcagggcaaccagcagacattcagaacaccaacactagtgtctaataattaggtggtggggaagggggacaggaaagagacacagttactattaatagttaatgcctgttttcataacagagagccgttctctaccaggatcctggaagaaattgagccacatagaaaatgatttgattttcttccttctccccaggatggtactatgtaccattttagattcttaagagwgatcattttgttatctaattgatgccttagggcctaattctcttgcaaaatctgggttgaggttgctagttaatataagaggagactaaggctatcatatgaagatattagtaacaagagaaacactagaagaaaaatgtaagcctgcctaaacaccaaaataaataacagaat

SEQ ID NO: 735409 - DNA, 634 bp, Homo sapiens
tggctggaggatgctgagagtgcaggagctgttgtcaccctgtgctatggatgctgaaatatcccacaaggcaggcacctcatgcctcatatgtgggtctagctgcagctggccaggctgagagacgtcctctgagactcagagttgctggtgagtacagagatggttgcattcatgggcactggggcaccagggtgctgtgacggcccggcttcagccctcgggaatctcagggcaaccagcagacattcagaacaccaacactagtgtctaataattaggtggtggggaagggggacaggaaagagacacagttactattaatagttaatgcctgttttcataacagagagccgttctctaccaggatcctggaagaaattgagccacatagaaaatgatttgattttcttccttctccccaggatggtactatgtaccattttagattcttaagagtgatcattttgttatctaatygatgccttagggcctaattctcttgcaaaatctgggttgaggttgctagttaatataagaggagactaaggctatcatatgaagatattagtaacaagagaaacactagaagaaaaatgtaagcctgcctaaacaccaaaataaataacagaat

SEQ ID NO: 735410 - DNA, 548 bp, Homo sapiens
gcagactcaggtagggtggggtttgttttttcttaatctttagtaaaggaccaggcagaaagatcaacagttcatcctatgcttatatttgggagggaatcaaaggaggaaagaagcttagtctcctactgaggaaaatatctgaacttaattacttggagcccaattaatattggagaagatgctctggttctcagaggacggttacgtcatccctcacgcagatgcactgtgtcctcccgcggggatttctaagatcagaagaacatttaacttacatgttayaggaattttgcagtttgggacagcttataaatgaaaatataacagcttaaacaggtcactcactcttttactcatcaggaaagtttcaggcagtggcctggactgaaggacgctatcccctctccccgggagaaacagcctagagtggtcaacaaggtaccaactgcaggccagatccagcccactgccttctttatgtgacctgtgagctaagaatggtgtttaccattttaaatagttgaaaaaaaaaatccaaagaacaa

SEQ ID NO: 735411 - DNA, 571 bp, Homo sapiens
taatgacaatttagagttagatgtttattgctttttaaaaacttcataagggaaaaacttaagacaattcactgacgtacttcgtgtgtgtcgttttccttctgcttggagggtatcagctaagggtgctaattacagagcccggggccaggagctggctctgcacacactggtctcatcccgggtgctactgttgcatgaagggcagaggtgttggtaaccctgatgctggcatatatgctgtcaagttggcctatgattttaagagtattgatgaatattaatattccaggtgaatagtctgaactmtaacctaagtttaatgagctcaccacatatattgttgggctgacttgttaaaacactcaaatgtagtttttggaactctagagattcactaatatccaggcagtaagattaaaaaacaataaaggatagctgttgagaaacatgattttagatgaagccagaggagaaaattagatcctagagtaatcagcatcatcaatgggagtttaactgggtttagccattatggaatcactaggcagcctcgaatattaaaatatta

SEQ ID NO: 735412 - DNA, 636 bp, Homo sapiens
aatcttttggttctctggggtttcagtttgttctttacgatgtttatttcatgctactcatccaaaggaacactttcctcatcaaagaaggcagatataggaattcagacgttctgtgtcatgtactcacccataaacatcatacccagagagtgggctttgccattctttaatcttctcctaccaactctaaaacattatttttgtcgtccttaacattatttgcaatttttatttgaggatttaagctttcaggtcrtactcttgtgattatcctagtgagcttggtctttttttcctttttacatcttctgtgcatcttattgcctaaattcatttgcaagaatcctttgcaacaatatcaatctttttcttcttctttctctcctttccccagatttccccatcagccacctcctgttcctcagtttcctactgtcattctttctctatatattaacacaattatgtaatatacgagtggacatgatgatattgctcacccttttaattttccaaatttcaaaacatagacccaaataaattaactcaatttttgctccctagatattggtgatatttcgaaaccctaaagatacagcagtatcttttttgcatttccacaacgatgtcccc

SEQ ID NO: 735413 - DNA, 636 bp, Homo sapiens
aatcttttggttctctggggtttcagtttgttctttacgatgtttatttcatgctactcatccaaaggaacactttcctcatcaaagaaggcagatataggaattcagacgttctgtgtcatgtactcacccataaacatcatacccagagagtgggctttgccattctttaatcttctcctaccaactctaaaacattatttttgtcgtccttaacattatttgcaatttttatttgaggatttaagctttcaggtcatactcttgtgattatcctagtgagcttggtctttttttcctttttacatcttctgtgcatcttattgcctaaattcatttgcaagaatcctttgcaacaatatcaatctttttcttcttctttctctcctttccccagatttccccatcagccacctcctgttcctcagtttcctactgtcattctttctctatatattaacacaattatgtaatatacgagtggacaygatgatattgctcacccttttaattttccaaatttcaaaacatagacccaaataaattaactcaatttttgctccctagatattggtgatatttcgaaaccctaaagatacagcagtatcttttttgcatttccacaacgatgtcccc

SEQ ID NO: 735414 - DNA, 372 bp, Homo sapiens
acaagcattcaggcagcaaaaataggttacctacagaagttcagaaattaggacggcctcggggaatcattaaataccagaatctgatgaaggaacatttgctgttttgaaggaaaatagttgcaagcccaaaatayatgcccagttgagttatttttcatgtgaaggctacagaaagatatttttgaatatgcaaggttcaagaaataggcacgaatgtgctattctggtaaaaattgttttagatgacctagagccaactaagcaattaaccactgttaacaaatggataatttttatataaaaggactaatagtgaataatgaaatctactaaatatatcataaaacctattctgttataaatttagtt

SEQ ID NO: 735415 - DNA, 632 bp, Homo sapiens
taaaagaatagcttattttgctagactactggtaagaacaaaatattattgtgtccggaattggtgggttcttgatctcactgacttcaagaatgaagctgcggaccctcgcggtgagtgttacagctcttaaggtggcgcgtctggagtttgttccttctgatgttcggagtttcttccttctggtgggtttgtggtctcgctggctcargagtgaagctgcagaccttggtagtgagtgttacagctcttaaggcggcgcatctggagttgttcgttcttcccggtgggctctgggctcgtggtctcgctggcttcaggagtgaagctgcagacctttgtggtgagtgttacagctcataaaggcagtgtggacccaaagagtgagcagtagcaagatttattgcaaagagtgaaagaacaaagcttccacagtgtggaagaggacccgagtgggttgccactgttggctcgggcagcctgcttttattctcttatctggccccacccacatcctgctgattggtagagcccagtggtctgttttgacagggtgctgattggtgcatttacaatccctgagctagatacaaaggttctccacctccccatcagattagttagatacagag

SEQ ID NO: 735416 - DNA, 665 bp, Homo sapiens
gagtgaaagagggaatgttactgccaaccttacagaaataaaaaacggctataggccaggcgcagtggctcgcgcctgtaatcccagcactttgggaggccgaggcgggcggatcacgaggtcaggagatcgagaccatcctggctaacaaggtgaaacctcgtctctactaaaaatacaaaaaattagccgggcatggtggcgggtgtttgtagtcccagctacttgagaggctgaggcaggagaatggtgtgaacccgggaggtggagcttgcagtgagccgagatcacgccactgcactccagcctgggagagggagcgagactctgtctcaaaaaaaaaaaaaaaaaaaggctataagggaatactatgagcaagagtatgccrgtaaattaaacaaccaatatgaaatggaaaaattcctctaaacacaaaatctaccgaaactgacccaagaagaaacacatctgaatatacctataacaagaaaaaagattaaattagtaatgaaaaatcgtccataaagaaaatgccaggccagatgtcttcattgttgaattttatcaaatgtttaaagaagaattttatcaaatgtttaaaacaccaatccttaacaaacttttccaaaaaataggagtgaaacttcccaattcatgacgggatc

SEQ ID NO: 735417 - DNA, 583 bp, Homo sapiens
agagcagctagatacagagtgtcgattggtgcactcacaaaccctgagctagacatggggtgctgattggtgtgtttacaatccctgagctagacataaagactctccacgtccccaccagactcaggagcccagctgacttcaaccagtggatcccccaccggggccacaggtggagctgcctgccagtcctgtgccatgcactcgcactcctcagcccttgggcagtcgatgggactgggcaccgtggagcagggggaggcgctcgtcggggaggctygggccgcacaggagcccatggagtgggtgggaggctcaggcatggcgggctgcaggtccgagccctgccccgcgggaaggcagctaaggcccagtgagaaatcaagcgcagtgccagtgggccggcactgctgggggacccagtacaccctccgcagccactggcccgggtgctaagtccctcattgcccggggccagcagggccggctggctgctccgagtgtggggcccgccaagcccacgcccacccggaactccagctggcccgcgagcgccgcacgccgccctggttccccctcgcgc

SEQ ID NO: 735418 - DNA, 626 bp, Homo sapiens
aactacttacttggcatcgcacttggatatctgttggacaattcaaatttacacacatcctaaacccgtctttccccttcaaaagacaagcaacagcaaacaaaacaaaacaaagcaaaaataaaccttgttgcacttgaacsccttttcatctcatttgatggcaatgtcatcaaagcccccgttgctcaatccaaacatctctttctcaatccatcaggaagtgcgagtgactctaaaaactctctccaggactcacttcccactgccaaggtgcagctctgagacggtgtcacttctcacctggatcactggcttctgtccccccatttctatcattggccctcaagattgtttttcttacagcatccagggtgatccttttaaaatgttaagtcagaccataacagttctctgctaaaaatattctgagatgccttcccatttcacccagagtaaaagctggagtctttacaatggtccttaaggaccaccccaggcgccccacccacccctcacgtctcctgccctgtcctccttctgcccttgcacttgtcaccactctgacttcatctcctgtgctctccactggcctcctgaccattcctgctgctttagagcattgt

SEQ ID NO: 735419 - DNA, 635 bp, Homo sapiens
actgaatttagatatctctggagacattcatcatgccattctccaacactggagatcagccttgaaaagacttctgatttgccagtgtcataattggttctcaagtagcatcttcacatggaagagcatctgaagaaaggagctgatgtcctcagcagatggaatgttccccaatgtgattaaaattgtcagccttttccatgtgacagataacaagtcatttttaatgtcaagaaagtggcaagctttgtaatgtggcattcactattagcactgtgattaaactgcatccacggcattgattttgacagaatgcattatgatttttatccctaaaccatccatttctaaaggaaatgggtatacacctgctacatcttcatttgtcaagctctttccaggaaatttaaaaggatttcactyattcaatagtgggggaatcatgatgaattttcaaaatgtgtagatacagatcttcaatttgatggaccaactttaattttgtatgtcctggagacagcatttattatattttctcaaccaccagtattacatctggacttaatgttggcctctccagcagaaccacaaggttaaattgaagagagatgagatgaaggagtctggttttgtta

SEQ ID NO: 735420 - DNA, 511 bp, Homo sapiens
gttcagaaaagactgtgaaatgcaagttttaataaattttgtcccagctacacatataggactttgaactttttaaaacacacttgtgttgtattctcagatgatcttcaaaccaccacctctttgagattgatggagctgatatcagtgtctccatttctagacaagaaatctggcattgtaagtgcccttcatgcataaacaagggaacttaaatccatggaataagagtatggggagaaatgaactccacattcttaaatttttattaccgctgtagcctaggcrtctcctgtagattcagccagtgatcttaaatatcatttttatgctttaattttttacgcctacaatttttgttgaaataacaccattttgtgcctctgcctgacagtttgccccaacccatcatctgccagatgcacaaatttagaaagaaatgctagaaagctagcccccttctcttcaaagataattaagtatgaattattcagaaatcccatattactga

SEQ ID NO: 735421 - DNA, 540 bp, Homo sapiens
actgtttttcttagtcttctgagccagccatcattaattgtgatgtcaaaaatcacggatgtaacaaaagtacattttactaataattaaaatatttaagttatcaaattatttactttaatatacatgtatacatatatatgcttttgtatgtatatacatgtgtgcataaaaagcttccagcattaggaatttttaaaaacccattccaaggtgatctgaaaacagcaaaagaccaaaagtagcaaaaagaatttaatatacatgatacatatatatgtatgtatatacatgtgtgaacayatatgtatacatatgtgtgtatatatacgtgtgtgtgtgtgtgtgtgtgtgtgtgtagagagagaggcaaattcaacattatcttgatatctacactattcttacaaactttgtcacagttagctgtgtggtctggaatcgacatttttcttttctaggtctcagtttcctgagaaatgactggcattatacccaggaagcacagggagttgagaataactctgggtttacccatga

SEQ ID NO: 735422 - DNA, 586 bp, Homo sapiens
tgagacctttactaatgtctatcttgtcacctagaaagaaactctagtagagagaattttttttattattttattatcacataggcgtcattcctttgtgttttaagattctaggctgacctttatttttgccttctgayggaaacatttttctcagattggggacataatattcagagtccagtagagaaacaggacattctgagtctttcagaaagagtgaagttaatattggaaattggctagctaggcaatgaagagctgagaagccaaacagaagatactgaagcacctctgagattaacaactgcggaaagctacttccacccttaggaatggaaagataaaggaaggagatggggttacaaaaatctggaaaccatggctatctctctggagatacgctcaatagaaatgagcacatggccctgggtcaatggggaagagtcagctacttttagagggctgttcctcttctcccatcatttggtctttcaccaatgccttctacctatccagagccagttggcaagggagcctgggaaatgtagttttcggcagtaaataggtcaaggtaaagattgga

SEQ ID NO: 735423 - DNA, 586 bp, Homo sapiens
tgagacctttactaatgtctatcttgtcacctagaaagaaactctagtagagagaattttttttattattttattatcacataggcgtcattcctttgtgttttaagattctaggctgacctttatttttgccttctgacggaaacatttttctcagattggggacataatattcagagtccagtagagaaacaggacattctgagtctttcagaaagagtgaagttaatattggaaattggctagctaggcratgaagagctgagaagccaaacagaagatactgaagcacctctgagattaacaactgcggaaagctacttccacccttaggaatggaaagataaaggaaggagatggggttacaaaaatctggaaaccatggctatctctctggagatacgctcaatagaaatgagcacatggccctgggtcaatggggaagagtcagctacttttagagggctgttcctcttctcccatcatttggtctttcaccaatgccttctacctatccagagccagttggcaagggagcctgggaaatgtagttttcggcagtaaataggtcaaggtaaagattgga

SEQ ID NO: 735424 - DNA, 586 bp, Homo sapiens
tgagacctttactaatgtctatcttgtcacctagaaagaaactctagtagagagaattttttttattattttattatcacataggcgtcattcctttgtgttttaagattctaggctgacctttatttttgccttctgacggaaacatttttctcagattggggacataatattcagagtccagtagagaaacaggacattctgagtctttcagaaagagtgaagttaatattggaaattggctagctaggcaatgaagagctgagaagccaaacagaagatactgaagcacctctgagattaacaactgcggaaagctacttccacccttaggaatggaaagataaaggaaggagatggggttacaaaaatctggaaaccatggctatctctctggagatacgctcaatagaaatgagcacatggccctgggwcaatggggaagagtcagctacttttagagggctgttcctcttctcccatcatttggtctttcaccaatgccttctacctatccagagccagttggcaagggagcctgggaaatgtagttttcggcagtaaataggtcaaggtaaagattgga

SEQ ID NO: 735425 - DNA, 662 bp, Homo sapiens
tatgaatttgaaatgtaaattcatttgataagtataggcagtagaaaaccacaatgtttatacttaatatgtctatatttgattttcagatgtaatttatgcacttatttcaatcctgcccaagtgttagtactacttgctgtgcaacaagctgtgttctacactgcatcaatctgtaattgccccctgttgattctctcattccaataattggacaaacaatgaatcttacccaattagtccatttgttgtaattaatacatccaattcatcataagagaaaaaaaaggcaaaaatataatgtcmcattattttttctttgcaagctcagtgaaaggtactgagcctatttttaagtcctcaaatataaactcaaaacacacacacacatacacacgctcagtgaaatgatgcccatttaaagttcaactcaagaccccaagcttaaactcatcttagaaaaacaagcatgtattaaaagggagttaaaactgtaatccttaaatatgcgaaagttacattgtattataagcttttgggaacttagactattacttcctgtttaaagttggacatcctttttcagaaaggctgaatttactgatgtatttaatgtaagtaagaaataaggatccaagttgttagctacgtattaatcagcc

SEQ ID NO: 735426 - DNA, 633 bp, Homo sapiens; identical to SEQ ID NO: 735388

SEQ ID NO: 735427 - DNA, 575 bp, Homo sapiens
ctgcgccaaaagcagggctaagacgggcaattatactatagaagtctgcattcacagaagatgatctcaaatcaataactctacatctggaagaactaaaaaaataagaacacaataaaaaccaaagttaggccaggtgtggtgcctcacacctgtaatcccagcactttgggaggttgaggcagktggataacttgagccaaggaggttgaggctgcagtgagccatgactgcgccactgtacttcggcctgagggacaaagtaagaccctgtctcaaaacaaagacaaaaaaaaaaaaacaaaaacaaaaaaatacaaagcagaaggaaggaaacgacagagattagagcagccataaattaaatagggaatggaaaaataatctacaaaaccaaaagttcggtttctggcaagaacaaaaaatctgataaactttccgcaaattaagaaaaaaagaggccaggcaaggtggctcacgcctgcaatcccagcactttgggaagctgaggtgggcggatcacgaggtcaagagatcgagaccatcctggtcaacatggtgaaaccctatctcca

SEQ ID NO: 735428 - DNA, 581 bp, Homo sapiens
atactatagaagtctgcattcacagaagatgatctcaaatcaataactctacatctggaagaactaaaaaaataagaacacaataaaaaccaaagttaggccaggtgtggtgcctcacacctgtaatcccagcactttgggaggttgaggcaggtggataacttgagccaaggaggttgaggctgcagtgagccatgactgcgccactgtacttcggcctgagggacaaagtaagaccctgtctcaaaacaaagacaaaaaaamaaaaacaaaaacaaaaaaatacaaagcagaaggaaggaaacgacagagattagagcagccataaattaaatagggaatggaaaaataatctacaaaaccaaaagttcggtttctggcaagaacaaaaaatctgataaactttccgcaaattaagaaaaaaagaggccaggcaaggtggctcacgcctgcaatcccagcactttgggaagctgaggtgggcggatcacgaggtcaagagatcgagaccatcctggtcaacatggtgaaaccctatctccactaaaaatacaaaaaaattagccgggcatggtggcggg

SEQ ID NO: 735429 - DNA, 575 bp, Homo sapiens
ctgcgccaaaagcagggctaagacgggcaattatactatagaagtctgcattcacagaagatgatctcaaatcaataactctacatctggaagaactaaaaaaataagaacacaataaaaaccaaagttaggccaggtgtggtgcctcacacctgtaatcccagcactttgggaggttgaggcaggtggataacttgagccaaggaggttgaggctgcagtgagccatgactgcgccactgtacttcggcctgagggacaaagtaagaccctgtctcaaaacaaagacaaaaaaaaaaaaacaaaaacaaaaaaatacaaagcagaaggaaggaaacgacagagattagagcagccataaattaaatagggaatggaaaaataatctacaaaaccaaaagttyggtttctggcaagaacaaaaaatctgataaactttccgcaaattaagaaaaaaagaggccaggcaaggtggctcacgcctgcaatcccagcactttgggaagctgaggtgggcggatcacgaggtcaagagatcgagaccatcctggtcaacatggtgaaaccctatctcca

SEQ ID NO: 735430 - DNA, 592 bp, Homo sapiens
aaaatcccaatggtcttttttgcagatatggaaaagccagccttgaagttcatatgaaaattcaacggaaccaaagcagccaaaataatcttgagaaagaagacacacttctcaattttaaaacagtacaaaactacaatgttcaaaacagtgtggtacctgcataattatcaacatatagaatgtaataatgtaattgagagtccagaaataaacctaaatatctacagccaactgatctttgccaagggtaccgagaacttcagggaaagaatagtcctcaacaagtggtattgaaacaatcagataatcaaaaggaaaaggctggactcttaccayacactgtgtaaaagaaattacctaaaaatggaccaaagatctaactataagagctaaaactataaaacttacggaagaaaacatgagatgaggataatcttcatcagtcttgtatttggaaatggctttttgggtatgatatcaaaagcatagacgacaaaagagaaacagataaactaaacttcatcaaaataaaaaacttctctatgaaaggaaatacaatccagagaacaggagaaaatacccacaaatg

SEQ ID NO: 735431 - DNA, 560 bp, Homo sapiens
agttgaatccacacagattactaacatgaccaaaccaccctacaggcctaggacccctggagaaaggcagaaccacctctgtgggaacccagaacagcatctcaagctggccttgaaatctaaaaccaaaacctttattttaatctaaacattgcccactctggagaacacctactttcatttgcaaattaaatcatagttctaattcttctaaaggcagaagagccctattatcattagtttaaagactaacaaataatagaaaaattaaaccaaagcatgatattgaaatgcctaagactttcccaaaaagatgcaaaattcaacttgtacttgacctgtaaagaccagcactcctggagrtttacgcccagggccccacatgcctgctcctcccccagctcggcgtccacacctgttaaggggggagctggtactaaacagagtgacagctcagatgacatgccctgcacagagcccagtacataggaacggccaacaaagaaagccactattttcgttgttcttttctagtattgatttaaaagtgcgtgtttcaa

SEQ ID NO: 735432 - DNA, 560 bp, Homo sapiens
agttgaatccacacagattactaacatgaccaaaccaccctacaggcctaggacccctggagaaaggcagaaccacctctgtgggaacccagaacagcatctcaagctggccttgaaatctaaaaccaaaacctttattttaatctaaacattgcccactctggagaacacctactttcatttgcaaattaaatcatagttctaattcttctaaaggcagaagagccctattatcattagtttaaagactaacaaataatagaaaaattaaaccaaagcatgatattgaaatgcctaagactttcccaaaaagatgcaaaattcaacttgtacttgacctgtaaagaccagcactcctggagatttacrcccagggccccacatgcctgctcctcccccagctcggcgtccacacctgttaaggggggagctggtactaaacagagtgacagctcagatgacatgccctgcacagagcccagtacataggaacggccaacaaagaaagccactattttcgttgttcttttctagtattgatttaaaagtgcgtgtttcaa

SEQ ID NO: 735433 - DNA, 527 bp, Homo sapiens
caatgcaacaggtatttggatacagaggcgtttccccaaagcgttcccattctgcacaagccctcacctcagcgtgcctctctgcacagccagctccagcaggatggccagagccaagtgctggtcctgcaggggcatgcttctggccttttggtgyctggcgttccgtgaacatccctgaaatgaaaacagtggatgcaggaacacagcgacctccagaaagacagtatgcttacaatcacactaacatgtttactacatgctccctcccaaggaaggatatattcttaatatttagaaccaagtttctgagacttgctactcaaatttttcagagatttttaaagtatacaattaacttacagaaatgtattttatttaaagtattcattcagataccgtattacagtagatgacatactccaagtgtgtgaagcataaaatatctcattatccaaaacatgagtagaagaatatctagctaccttttccagtttcaatgacgtgtaagcctataccagtatcaa

SEQ ID NO: 735434 - DNA, 631 bp, Homo sapiens
ctgctctgttactctttgctaaactgagatgtttgtgtaaagaggaacataaatctagcctatgtgcacatctgggcacagtacctttccttgaacttattcatgatacagattcctttgctcacatatttccctgctgacctttccccacctgttgccctgctacactcccatcactaacatagtaaaaataatgaycaataaatactgagggaactcagaggccagcgctggtgcgagtcctctgtatgctgagcaccggtcccctgggtccactgttctttctctatactttgtttcagtgtcttatttcttttctcagtctctcctcccacctgacgagaaatacccacaggtgtggaggggctggcccccttcgatgtctattatggtggagtgtttccagttctgtctttcctaatactgcccaatagaaacttgactcctagagtttgtgtaattttaatatattttagccatttccctgtcaatttttataccatacaataacaaggaatttgactaaatctcttagggttttttaaaaaattatatgagaagctaaaaaatttatttttactaaggtaaaagaaaaaggaataatcacaacaatagccataattcttctgtc

SEQ ID NO: 735435 - DNA, 631 bp, Homo sapiens
ctgctctgttactctttgctaaactgagatgtttgtgtaaagaggaacataaatctagcctatgtgcacatctgggcacagtacctttccttgaacttattcatgatacagattcctttgctcacatatttccctgctgacctttccccacctgttgccctgctacactcccatcactaacatagtaaaaataatgatcaataaatactgagggaactcagaggccagcgctggtgcgagtcctctgtatgctgagcaccggtcccctgggtccactgttctttctctatactttgtttcagtgtcttatttcttttctcagtctctcctcccacctgacgagaaatacccacargtgtggaggggctggcccccttcgatgtctattatggtggagtgtttccagttctgtctttcctaatactgcccaatagaaacttgactcctagagtttgtgtaattttaatatattttagccatttccctgtcaatttttataccatacaataacaaggaatttgactaaatctcttagggttttttaaaaaattatatgagaagctaaaaaatttatttttactaaggtaaaagaaaaaggaataatcacaacaatagccataattcttctgtc

SEQ ID NO: 735436 - DNA, 452 bp, Homo sapiens
acatgtggctcacattttacttctattgcacattggtgcaatagaggattgcctaatttcaaagctcagtttgcctcaaaagccaagaggccagaaagattgtaaaatctaaaaattaaaaataattgtaattggttgggcatggtggctcatgcctgttatgctagcactttgggaggccgaggcaggcggatcacttgacctcggttcgaaaccagcctggtcaacatggtgaaaccatgtctctactaaaaatacaaaaattagctgggcaacatggtggatgcctgtatcccagctacctgggaggstgaggcagaagaatcacttgaacctggcaggcggaggttgcagtgagccaatatctcatcactgtactcgagcctgggtgacagagtgagactctgtctcaaaaaaatgtaaataaaaataaaaataattgttattatttt

SEQ ID NO: 735437 - DNA, 589 bp, Homo sapiens; identical to SEQ ID NO: 735386

SEQ ID NO: 735438 - DNA, 594 bp, Homo sapiens
gtgatctgcccacctcagcctcccaaagtgcagagagtacaggcatgagccactgcgcccagctagctctgcttacagtttttaaatgacttcttagtctacttaggagaaaatataaactctttaccagagcctactggacttcccaaaacatgatgtatgtttatctcttccctttagctcacttggttttagccgactgaccttctgttctctgagtaaaacaaacttattcctgcaacggggcctttacgcctactttgccttctgccccagaaacagttctcacaggttttcccatgactcttttcttctccttattcarcatcaccccaaacatctccccctgagtggccttcgccaggacattcttcttaaatatctttccttacctcatcctgtttggttttgtttataacaggtgtcagctacaatactggttttgtttgtttatttactttttcttacaatggaaagcccatgagagcagggttgtgtctgctttattcacaactttaacctcagtgccagtacagaaccaggaccgtactagaaactcaatgaacatttgttgagtattttgaatgaattaat

SEQ ID NO: 735439 - DNA, 580 bp, Homo sapiens
cctaagtagaggaaacaatccgctttcacctaggttcacctaaacaaagatctggtaaatcatgtggtatgtaaaagggtcatttcacaggtggtgaaagccatttgaaatttcactaccttccccaaattacaatcatatgtcaacttagaattaataaaaatatttaaattcattagtcacaaagatgtcttaagtgcatgctatattccaagtcctgtasgaggtctttaggattataagaaggtgtaagactcaatttttgtcctcataatgcttattacttaaccaagaatataatatattaattaactcattcatttgtatgtttattcattacattttattacacttaaaaaataccatagatttcagccatgcgaatacccttgtttgcctgacagaatagtgaaatataaacacaactgaaccgttaaaatacaacattatgaaagtagctggaaggaactgcacgtgccaagtgtgaggaaaaataagacaagtagtagatattctggatatagagaagtccatttggactcagacactagggaaaaactaaaggagaagttataacttg

SEQ ID NO: 735440 - DNA, 616 bp, Homo sapiens
ataaagtataattattttaaatttatgattaagccataaattatgtgtactttttactttagctggtcattcagaggttggtgaggaagggaatggggtcagagaaagaaataacaaaagctttttcctttgaataaaatgtctaaatcagggcaaaactgagggacacctggaggatttacaaagataccacagtttccatgttcagtcccaagggagcccccgcttaagagtctaaactcctggagacctctgttcttcctgctcacagggctacagactccagtgggagtggccatgttgagtcaaaaaacagaagcatggcaatttacagtttagaccacatcaaatatttctgtgctctgggtcttgctgcctctaagccataggtatttcaaggaaggtgaacttaatctataaaaaactactggccaggctctaaaagtaaagctggcctccaccaaagtaagactgattactacagggctctgataaccaatggaccagatrttaattctcctcaccctcaagaatccattggtaaaacttccctttcttgtagttcctatatgtagcaaatatacgtatggaatggtattttgtgaaggtgacaaaa

SEQ ID NO: 735441 - DNA, 606 bp, Homo sapiens
ccaaagccatttcctaggttaattaaaaaaacattttttataaaccttctagaatgagaatgataaatacctttatatcaggggacatgactgattggctggttgcggctttttagagccctagtggagaagaaatctgaaactttctcctagctcagcaggaaagagtgttatgatcaattactgatgtctgtcatgggcactacaagggttagtgagtggcagcaccagcaytagatagttgctatcgatgtctgatgacattctacaggcacttcttattcatacataatatactgttacacttgaaaataccagaatttgctaaactggagttcatggaccagaaaagaactcacgaaggtgtgtagcttgacctcaaccatatttccttaacaaatctaaatgagttgccaactgataaaaggactttgcctaaaaatccaaattcccagctacccttgaattacaagatctggtatcactgagccagtcacagtggctatagggaagaagtagctgcccattttagacaaggacgtgacctttgctagtcgcagtccccacagccacttcactttactcatttgaggtacctgcctaacc

SEQ ID NO: 735442 - DNA, 641 bp, Homo sapiens
tcttcaagctgtatgtttatgatatatgtcatatttcaatactgaaaattcaacagacaggccaggcgcagtggctcatgcctgtaatctcagcactttgggaagctgaggcgggcagatcacctgaagtcaggaattcgagaccagcctggccaatatggtgaaaccttgtctctactaaaaatacaaaaatttgctgggcatggtggcccgcgcctgtaatcccagctactcaggaggctgtggcagaagaatcacttgaacctgggaggcrgaggttgcagtgaactgagattgtgccattgcacaccagcctgggtgacaagagcaaaactccatctcaaaaaaaaaaaaaaaatcaatagacaggttggaagttaataaaatctcccagatattagactaaaaaacaaacataaagattgaaaataagggaataaacaagaaaactagaggaagagtccagaaggttaactaaatcatatggattccaaagagatgagaaaactggagaggaagaaataactaacaaagcaattcaagaaaatgtccaacaactgaagggcatgattgaaagccctacacaatgacagtaaaatgagtgaaaaatatcactgtgaaattgtaaaacattcaaaaaa

SEQ ID NO: 735443 - DNA, 517 bp, Homo sapiens
acagagatatttgttcacagcaactttatccaccatagccaaaagatggctattatgaatagccgatggatgaatcaatcaacaaaatgtggtatattcatacaatggaatattagtcatctttaaaaaggaattaaattctgatacatgccataacatggatgaatcttgaggacactatgttaagtaaaatrgttgtattagtttgttttcatgctgctcataaagacatatccgaaaccggaaacaaaaagaggattaattggacttacagtaccacatagctgagaggcctctgaatcatggcaggaggcaaaaggcacttcttacatggcagtggcaagagaaaatgaggaggaagcaaaagcggaaacccctgatgaacccaccagatctcgtgagacttattcactatcatgagaatagcacgggaaagaccggcctcatgattcaaccagttcctctttggtccctcccacaacatgtgcgaattctgggagatacaattcaagttgat

SEQ ID NO: 735444 - DNA, 517 bp, Homo sapiens
acagagatatttgttcacagcaactttatccaccatagccaaaagatggctattatgaatagccgatggatgaatcaatcaacaaaatgtggtatattcatacaatggaatattagtcatctttaaaaaggaattaaattctgatacatgccataacatggatgaatcttgaggacactatgttaagtaaaatagttgtattagtttgttttcatgctgctcataaagacatatccgaaaccggaaacaaaaagaggattaattggacttacagtaccacatagctgagaggcctctgaatcatggcrggaggcaaaaggcacttcttacatggcagtggcaagagaaaatgaggaggaagcaaaagcggaaacccctgatgaacccaccagatctcgtgagacttattcactatcatgagaatagcacgggaaagaccggcctcatgattcaaccagttcctctttggtccctcccacaacatgtgcgaattctgggagatacaattcaagttgat

SEQ ID NO: 735445 - DNA, 509 bp, Homo sapiens
attacaagaaaactacagaccaatatccctcatgcatataaatgtaaaaagtattaacaaaatgttagcagactgaatccaacaacacataaaaaggacaatatataataaccaagtgttacccccagaacgccaggttggtttaacattcaaaaatctacataaatccatcatattatcaggctaagaaagaaaaactagagggtcacctgaatagatgtaagagcattagacaatacccaacaatgaccctgataaacacactcggtaaactacggaatttcttcrtcttaataaaggaatcaatgaaaccctacctagtggtaaaagagtgaatgattttaccctaaaatgaggaaaaaagccaaggatgtttcccatcaccccctctatgccagattgtactgaaggttctagcccgtgcaacaaggcaagaaaaagaagtgaaaagtatccggattgagaataaatttttaaaaggtaaaaatgtcattatttaaatacgacat

SEQ ID NO: 735446 - DNA, 449 bp, Homo sapiens
atgcctgttttctgctggtcataatgctaggcgatggtgaataaggtggacaagatacctgcactcatgagacttaatgttccagtgtgagagaaagaatataaataagtatagaaaataattgctgattttgatagtttctatgaaggaaamctgcagggtaaagtgaagaggagcagcagctggcaggaaccaccttagacgcttacagttgggacaggtatctcctaggggatgacttctgcggtgagatctggataaattatttcaagaggaaactctaagagtaaaggcctttaagctggggctttcttagcagtatatccaggggaaagccagcaggtaactacacaagatgccgtgcgaaaaaggatgagcgtgagaatggagatggggtgagagaggtggcggagctggggggtgggcaggagggaagaagatgctaatat

SEQ ID NO: 735447 - DNA, 557 bp, Homo sapiens
cattgcttgttttttgtcaacattatcaaacatccgatggttgtaggtgtgtggctttacttctgggttatctgacctattacattggtctatgtgtctgtttttgtaccaatatcatatttttttggttactgcagccttgtagtatactttgaagtcaggtaatgtgatggcttcagctttgttccttttgcataggattgctttggctatttgggctctttttagttccatatgaattttagaawaattttgtataaattctatgacaaaattacgctggtagtttgataggaatagcaccaaattggtgaattgctttgggcagtatggctattctaacaatattcatttttcctatccatgagcatggaatgtttttccatttatttgtgtcatctctgatttatttcagcaatgttttgtaattcttctggtagagctctttcatcatactggttagctatagttgtaggtattttattattttgggggggctattgtgaataggattgcattcctgatttggctctcagcttggacattattggtgtaca

SEQ ID NO: 735448 - DNA, 378 bp, Homo sapiens
atctctataaagagagtaaattcataaaatgcaaaggacaggcacaacagagtatttagtaagtagtgcgtcatctttattagagaggtacatctaaactaattggaggcaaagttagtttgaatgaatgayagttcacatggcccaggcaactttggtttttagaataagtgttagtaaatgatgtttttttgctttcaagggcagagagtaactggaagtgggtttgtgattagcatatctaatgtccatttagggtgaaaccaccattctgaaatcatgccgcatgatttgtcctgcccctggtcatgttcctcctcctctgccattctcatgatatcagtgtttgcctgggtgccatgtgaccgcatctcatgg

SEQ ID NO: 735449 - DNA, 547 bp, Homo sapiens
tcaaaaaggaagcatagcaagccattgtactttgaaaccatggcatcaagaatattgtgggttatcatcacatttaaactctctttcctctgccaaacaattccaaggggacaagaagtcctagtagtgatgtgtttaacaaaatgcttctaataactttctcaagaattgggctttgcaagatcatgatacatttttgcctggagtcttttcctcttttaatttttaaattcagatatgttttgagtgtgcttccatttcatttacacttagcctaccaagctgcagtattctaagagttatttgatgttggagaagttctatacatttttcataagccaygttaagtgtttctctttgaaccataaagttgtatttttgccatctctaagtgaaaatcagacaaaaaataacaagagtagagttcttaaatgcgaaatcactaacagaaaaaaaacctatctcaaagtcttctatcattaagtaagaggatatccatctacaaaaagccaaaggatgaattttgtttcattttttaatatccttc

SEQ ID NO: 735450 - DNA, 584 bp, Homo sapiens
ataggaaaaattataatcctgtgacctagtaatttttcttctggatataacctaaaaggccaacaagcatgtgaaaaaatgctcaacattactgatatcagagaaagcaaattaaaatcacagtgagatatcatcttacagcagtccarattgctattattaattattattgttgagacagggtctcgctcttcacccaggctggagtgcagtggtgtgatcatagctcactgcagccttgatatcttgggctcaagtgatcctctcacttcagcctcctgagtagctaggactacaggtgtaagccactacgccctgctaatttttttgatttttagtagggacgaggtcttgctatgttgcctaggcttgtctcaaacttctgggctcaagtgatcctcccacctcggcctcccaaagtgctgggagtacaggcttgagccactgcacttggccccgaatgtctattaacaaaaaatcaccaaataacagatgctggggaggatgcatagaaaaggggatgctttatacacccatcgggggaatgtaaattagtacaaattctatggaggatagtatggaga

SEQ ID NO: 735451 - DNA, 584 bp, Homo sapiens
ataggaaaaattataatcctgtgacctagtaatttttcttctggatataacctaaaaggccaacaagcatgtgaaaaaatgctcaacattactgatatcagagaaagcaaattaaaatcacagtgagatatcatcttacagcagtccagattgctattattaattattattgttgagacagggtctcgctcttcacccaggctggagtgcagtggtgtgatcatagctcactgcagccttgatatcttgggctcaagtgatcctctcacttcagcctcctgagtagctaggactacaggtgtragccactacgccctgctaatttttttgatttttagtagggacgaggtcttgctatgttgcctaggcttgtctcaaacttctgggctcaagtgatcctcccacctcggcctcccaaagtgctgggagtacaggcttgagccactgcacttggccccgaatgtctattaacaaaaaatcaccaaataacagatgctggggaggatgcatagaaaaggggatgctttatacacccatcgggggaatgtaaattagtacaaattctatggaggatagtatggaga

SEQ ID NO: 735452 - DNA, 584 bp, Homo sapiens
ataggaaaaattataatcctgtgacctagtaatttttcttctggatataacctaaaaggccaacaagcatgtgaaaaaatgctcaacattactgatatcagagaaagcaaattaaaatcacagtgagatatcatcttacagcagtccagattgctattattaattattattgttgagacagggtctcgctcttcacccaggctggagtgcagtggtgtgatcatagctcactgcagccttgatatcttgggctcaagtgatcctctcacttcagcctcctgagtagctaggactacaggtgtaagccactacgccctgctaatttttttgatttttagtagggacgaggtcttgctatgttgcctaggcttgtctcaaacttctgggctcaagtgatcctcccacctcggcctcccaaagtgctgggaktacaggcttgagccactgcacttggccccgaatgtctattaacaaaaaatcaccaaataacagatgctggggaggatgcatagaaaaggggatgctttatacacccatcgggggaatgtaaattagtacaaattctatggaggatagtatggaga

SEQ ID NO: 735453 - DNA, 626 bp, Homo sapiens
gaataactgtgcaataggatccatgctgcaatggccttgtgcaagaacagccacctgtgcacaaaggtaggagcattgcatcagccaggcaggagcagacaagattatttccaagctgattatagaagcgcagaagaggagcaccacccacaggcaaaacagcctttactatacatgcctctgctgctatttttaataaattatttttccttttaaaaaatcatatgggtttattctagaaaaaatacaaaatatagatgaaagaaaagagaagtaagactcttccataawaccccacccgagatgactactgttaacattacgatatgtacatcccgcttaccatttttctgtacatgtacaagtgtatgtgtgtgtatatacacacacattctgtacaccacatacattctatataccacattgtgacattttcaaaaaataatacgtcatgaatatttttctaggtcatattccgtagtagtacattatgggctacctatattctgttatatggataggcataatttatttagccaatcctgtcttttagggcattttggttttatttcagtttctcacattacactcttcccatctatttgtataaacttgttgacgaagct

SEQ ID NO: 735454 - DNA, 625 bp, Homo sapiens
acatatgcatttgaggggaatgtaattcagcccataacagagcctaatcatttatttttttaaatagaagctattttttgtcttctgtaaaatcttgtaatcacatgacagcatggcacatgaatgttcagagtccacaagaagcacgagaaatttgcagacgacagggaagagctttgcacttgagatcagggggccctgggctctagacatacatcattcacttacaggcacgggcaggcttagtttctctgaacctcaatgtctttacttgtaaaaaaagatgtgaatactatatgcaataatatatataaaagtatctggcatatacaaatgacatcttatcaaatcaaaggtgccatcaattataaaatgtatcattatgttatttgtaccaaaagtggcaaaatcatgccaggggagattttcaaattacagattcaggagacttacccacagattcattgggtttgaatctcctgggatgaagctcaaagattgtcatttttwaaaaatattttccccattattctgttgatagactcagaagccaggactttcggcatgctgtcagtcaatgtgctgaagaacccagattttcattctaagctgccatctttggagc

SEQ ID NO: 735455 - DNA, 620 bp, Homo sapiens
aggaagctcccaaacccagtcctcttggttttttatggacacttcattacataggcatgattgattcaactgttggcaatggtgatcaacttgacatttagctcctctgctctccccagaagttgaggtttgggctgaaatttccaaccctgtaatcccgccttggtctttctggtgaccagccctcactytgaacctatcagacaaaaaacacacacaaaagacagcagtttagagagctcaaggatttggggcattgtatgccaggaaaagggaaggaaaaccaaatatatttttcataatatcagagtaactttctttcaaagagaacaatatagaatgcaaggagaacttatttaaagttctcacactataaagcaacttctttgtagtgaggaaaactgacaaacattgcctcaagtcaggagatgaaggttaacattaacagtgataagtcatattgatagtatgtacccttgatacaaagtgagaagaatggccctttgcctctgtgatcttcctccccaaaatatatcaccccagtctaatgaagagaaaatatcagacaaatcccaattgaaacagattctacaaaataactaaccagtgttccacaaaat

SEQ ID NO: 735456 - DNA, 620 bp, Homo sapiens
aggaagctcccaaacccagtcctcttggttttttatggacacttcattacataggcatgattgattcaactgttggcaatggtgatcaacttgacatttagctcctctgctctccccagaagttgaggtttgggctgaaatttccaaccctgtaatcccgccttggtctttctggtgaccagccctcactctgaacctatcagacaaaaaacacacacaaaagacagcagtttrgagagctcaaggatttggggcattgtatgccaggaaaagggaaggaaaaccaaatatatttttcataatatcagagtaactttctttcaaagagaacaatatagaatgcaaggagaacttatttaaagttctcacactataaagcaacttctttgtagtgaggaaaactgacaaacattgcctcaagtcaggagatgaaggttaacattaacagtgataagtcatattgatagtatgtacccttgatacaaagtgagaagaatggccctttgcctctgtgatcttcctccccaaaatatatcaccccagtctaatgaagagaaaatatcagacaaatcccaattgaaacagattctacaaaataactaaccagtgttccacaaaat

SEQ ID NO: 735457 - DNA, 620 bp, Homo sapiens
aggaagctcccaaacccagtcctcttggttttttatggacacttcattacataggcatgattgattcaactgttggcaatggtgatcaacttgacatttagctcctctgctctccccagaagttgaggtttgggctgaaatttccaaccctgtaatcccgccttggtctttctggtgaccagccctcactctgaacctatcagacaaaaaacacacacaaaagacagcagtttagagagstcaaggatttggggcattgtatgccaggaaaagggaaggaaaaccaaatatatttttcataatatcagagtaactttctttcaaagagaacaatatagaatgcaaggagaacttatttaaagttctcacactataaagcaacttctttgtagtgaggaaaactgacaaacattgcctcaagtcaggagatgaaggttaacattaacagtgataagtcatattgatagtatgtacccttgatacaaagtgagaagaatggccctttgcctctgtgatcttcctccccaaaatatatcaccccagtctaatgaagagaaaatatcagacaaatcccaattgaaacagattctacaaaataactaaccagtgttccacaaaat

SEQ ID NO: 735458 - DNA, 622 bp, Homo sapiens
tatttccatgacagagatttaaacagttcttcttgctgtgtaaaatgtctggagtaatagtttttattatacattcaaacacactgagagatcattgctcatcgagatttttatgagacagataagcaagtttttattaatttgtattatccaggtaagaaaatgagtcaaagaggagctgactgttgcccaagtttaaagtagaaaagaatactaaaatccttgttcctgatttggtttattattcttttcattaaagatgaagtagcaaatgtaacctttttgaataattggctgaatgrgtaggcattgtacagatttgggatgaaagctactcttaaagtgcaaaaaaaagggggaatcttcactcgttaaggcctagttgcattatatttggtaggaaaagcagaatcatctgtacattttcttttctaaaatacttatatttaataaccttggaagagtgaaacatatttaaccaaatccactgctgtaaaagaaggttgcactcacccatgctaatctcctcatgcttctttcctcctcatcctttcatcccttcctgatctctcctagttgactacttgccaaacaacacatacaggttttgcttccataatta

SEQ ID NO: 735459 - DNA, 541 bp, Homo sapiens
attggtggttttagcccaagagctctctgctttctatgtgattagctgagtcttatccctgtcctggattacagctctacttatttctctaccccgtcctactttctttccattccttccataggtttccctctcaaaagcactccttaataagtactgcccattaacctctatgttggagtatggctgccagtgaaagtactgttggaagtggtctgagcaaactggtcataagatggagttttagagctgcattaatccccaaccagcttgcagtaagagcgccatcaatggtgggaattacagttgaatcgttacaactttcactacaccgggcgcrgtggctcatgcctgtaatcccagtactttgggaggccaacgtgggtggatcacctgaggtcaggagttccagaccaacctggccaacatggtgaaaccctgtctctactaacaatacaaaaattagccgggtgtggtggtgggtgactgtagtcccaggtactcaggaagctgaggaaggagaatcacttgaacccaggag

SEQ ID NO: 735460 - DNA, 670 bp, Homo sapiens
tggcacataatgcttttaatctaccacattaaaaagtaatttttcaaggctgagttaatgtgagtgcagtacacccttttgttaagcttttgtatattttccaggtataagtcatgagtgagaacttgctggtgaagaacctacttttatatatgaccatagtatatgtttgaaactagaaaaaaattgaaaacgaatgtgtttcagctgcttgagagtatttttgttgtctttgttgttgttttatgaaacacaaccatattcttgcctcttggaagacatcataatgatttttccaatttcaggcattttgatccttaaggaactttcagtgggtgttcctaatgtcataactgggcaattgttacttcttcagtcagttaagattagaagccagattatcagatagtctattgcctatatagtagctataagaaaatatatggaacaaaatataagcatgaaaatagtagataaaaataaaacactttaccatttttataaccctgcatttagaatctaytttatagccttagaaaagaaaatctgtagagtagtttacagaatttgtcctgctggcatttacccaggtatttaagggaagcacatttatttatgaaaaacacgaaataatttctatgtaaggatgatagaaagtaaaaatatttga

SEQ ID NO: 735461 - DNA, 557 bp, Homo sapiens
tcctaagtagctgaaactgcaagtgtgcaccaccacactctggtaagttttatattttttgtacagacagggtctcactatgttacccaggctgtctctaactcctgggctcaagtgatcctcctgcctcaccctcccaaaatggtaggactacaggtatgagccaccccacctggcaagctttatcactttaatctcacggcaagagctgtgagctggggatgagtagggagagaggttgatcttgtcaagatgaccatcccataattgctactttttgctgctgtctttattctgtgtgaagatagacatgccagtwctttctacacaaaatattttcatgcagccataactcacaaagtttttcatctgtgcaaaatcccaaagttattttactttcagtcatagccaggcaaacattaataaatatagcaaaatataactttagtaattgagcaatttcaactcagtattcatctgtttaaaaattattgcttgcagtgagtcaacaaccaaatctaataagtaaatgaaattgggagacattaacaaacaca

SEQ ID NO: 735462 - DNA, 482 bp, Homo sapiens
cattctcccattttatcactgggatcccatttggggttgttcaatggcactgcttctcttccaactgaataaaactcatctccttccctgatactacatgagatacaaagctcatccccaaatctctcttccacttgcagagcatcctgcttctcagtgttagggtgtgtktcaaaagtaacataatgtctttccaggagagttcaaatacttgggctaaggtctggaaagcctatacatatctgtcagtgtcattggaacttttgccaagatcccccttaatttgccttaagtcctggagagagaaggtgacttggaccttactggggccatattcactaggcatcttttgtaggggcaggagtgagactggggattgtctagagtgagggtttctaggaggggacaagtggaagagagaaactgaatagggaggacagggtggacccagaggagcagggctggaaagagctggctcccct

SEQ ID NO: 735463 - DNA, 575 bp, Homo sapiens
gcttctgtctgatgactccctgcaaaaaggctaccctccaagctaccctctagggtgagtcattagacagaacaaggatataacacatcccctgctctcctaaggaaattctctcagtgtgaattttcttgtgctgaatgaacaaagatttttttttgtttgtttgttttttttggtttgtttttagacagtctcagtctgtcacccaggctggagtgcagtggcacgatcttggcttactgcaacctcygcctctggggttcaagtgattcttgtgcctcagcctcccgagtagctgggattacaggcacctgccaccacgcccagctaatttttttttttttgtattttttgtagagatggggttttgccatgttggtcaggctggtcttgaacccctgacctcaagtgatcctcccgccttggcctcccagagtgctgggattacagacatgagccactgcgcctggcctcaatgagtaaatgttttgctaaaaaatttcccacactgcctcagcataaagccttacttcagtgtcaacttttggtgctgaacaaggcactccttggctgaa

SEQ ID NO: 735464 - DNA, 406 bp, Homo sapiens
atttttaaaaaaaattttttgtagagatgggcggggggtggggggcagtcttagttgctccctcatttctacaaagaataaaaaaattagccacacgtggtctcagcctatgttgctcagactggtcttgaactcctgagctcaagcaatcctcccacctcagcctcccaaagtgctgggataacaggcatgagccactgggcctggccctgagctcacttcttttaagattctcacttcactggaaaacattccatccacaaarggctaactttccttattacctaaagactcaggtcgaacacacccagactcaatcctatataggagggtgtgagaggagaaaatggttggttttggccattcattatccattctgtcttctgaacagtaccccacatttatt

SEQ ID NO: 735465 - DNA, 574 bp, Homo sapiens
aattttttgtagagatgggcggggggtggggggcagtcttagttgctccctcatttctacaaagaataaaaaaattagccacacgtggtctcagcctatgttgctcagactggtcttgaactcctgagctcaagcaatcctcccacctcagcctcccaaagtgctgggataacaggcatgagccactgggcctggccctgagctcacttcttttaagattctcacttcactggaaaacattccatccacaaagggctaactttccttattacctaaagactcaggtcgaacacacccagactcaatcctatataggagggtgtgagaggagaaaatggttggttttggccattcattatccattctgtcttcygaacagtaccccacatttatttgggcaaatacctcttcgccaatatgagcctatgcaatatgctaaggggttggctccagttttatcttctagtcatagttgattggttcatttaaagccaagtgatctgattaggccccatgagagcaagatccagggctttggagactgttaaggaagctgaacaaccccagctggtta

SEQ ID NO: 735466 - DNA, 500 bp, Homo sapiens
agctcaagggatccgcctgcctcagcctcctaaagtgctgggattataggcgggagccactgtgcctgaccttgtcagtcttattatctctattttaacattaatgctggtcattgtgcctaaactccaaaaggcatgtggtataatgaggcatgtctcacctctcttcccatcatggccaggaattcagtttttttggtttttttctagagtctccttggtcaagagggagttcattcagtcactaggagggctcaggattttattttaatttctaagacccttcacttctttctattccagytgctcaccttagttcaggccatatcacctcatccctatactactgcagggacatcttagctccttgtcctgactccagacttttcccttctacctatcctgccttcagctaacagagctctctcattaaagcatccactgttcaaaagcctcttcgtctgcattcccaacctcaggaaatggctcctctacatgcc

SEQ ID NO: 735467 - DNA, 609 bp, Homo sapiens
acagcattcacatgagcataatgttcaaatttccattatctcaactggtcctccaaccagcccatggtggacacacggaatcatcccatttgacatatgtgaaaactgaagctgagagattttgtcaggaactgaggcatctgagtgctacagggttctgctgagagtaaactgaaatcttgttctctgaccaatcctgccaagagaccaaggagaaggaaatcacagaagacagtccaggacgagtcattcattcattcattctgcatttatgtgttgaccacctactatgagcagaccctgttcaaggcagagatttagaggcagaaagacaacaatccctggcttcaagctggggagacagacgagaaaacagatggtgactcaatacttctgtaagtgccagggaagcccagaggccttggtgcaaggatgctgggatgggaggrgctgcactgctaggaaaggaagcttgaggtgcagcgctacacccctgaacatgagcaatatcttccccattctggtgctcttatcaggacagggcagccagacaccaagacacctgtgggtgtcctgccgacccagacagccccgtcaacagaccttgtg

SEQ ID NO: 735468 - DNA, 654 bp, Homo sapiens
ttctgtgtgcaggccatttttctcactctagcacatgtgattcctccagtcccagaggtcaaggtcagaagagcaacttaatacatctctgtaatcaggggagatgagctccttggacattggaaacattgtgctaatccactccaaaatattctagctcaaggccaagtgcagggggcttatgtcagtggaagccccactccttcaatgtcagtacaagcaccaaaaggaaaagaaaataccccaagatattctaagtggctcagccttgggagagaccttaccctggaatttccctgaaatgtcatcaggawgcagggtttgaagcatgttcctttccaaccggccctcccagtcccctctacatggctgtacccttagacccatcagctcactgcctcctcactgtcctggggactcctgcacctggggactcacatttcttatggtttttcctttcccccagcagtgattcagcaaatgcctgttgcactctaggctacagagatgaaggcatggtctctacccttccagagctcacaggctggccaggagacagacaaatggataaccagaatatagtaggagaaagacctttctgggctgggggtagcatagtagagaagctcagagaagctttcacaagggtggaga

SEQ ID NO: 735469 - DNA, 509 bp, Homo sapiens
agggtctctggaaccatctaaagtcttgctcactcaccagatgcctccttggccctccctacttcttattttcttacacattgttacatttcttctctgctatataaacctctagttttagtcagtcagggagatggatttgaggctgagctcccatctcctctgccgcagcacctgattaaagccttctaccttggcaatacttggtgtstcagtgattggctttctgtgtgacaaactcacatgcctggtgcctgggttgggaaaactccaagaccaagactgctgacaggggcacctacaggtgtcctctccatatatccagcttcctcacaacatggtggcctcagtcagatttcttacatggaggctgtgggctccaagaacaaatattccagcaaacaaggcagaagttgcatcacctttcctgtcttggccattgaagccaccttctgttggttacaagcaagtcaaaaacctgcccaaattaaagaggaaggagatataga

SEQ ID NO: 735470 - DNA, 666 bp, Homo sapiens
tgccataataaatctgctcctataattgaggcatacctccctcaaaaacctatttctaaacagaattggaagattgcattggagaacaggcagaagtgctgcacaacaattcctatggaatcattattgattggtcccctaagggaatgtttagcttgaatttcacctctcagtctgcatgccacggccacactatgttcagctggtctaaacaaaatggtcagatggtagaaatggtaagaaatacagcaagagttcctattatctggaaacatggtggtacagtgccacctcaacttcaaatgatatggcctgctgtaggagctaaacacaaagatttgtggacactattaatggctcttaaataagatcaaaatttgggaaagaataaaaaagtatctagaaggacactcgacaaacttgtctttggatgttgcaaaattaaaagaacaaatatttaaagcatcccaggcacacctgatcttaaygccaggaacaagagtgcatgaaggagccgcagacagattagcagctattagcccattaaaatggatcaagacacttgggggctctgtgatttcaatgatgattgtgctttttagtctgtgttgtttgtccttttgtagtctgcagatgtggatcctgactcctgcgagaagtagctca

SEQ ID NO: 735471 - DNA, 647 bp, Homo sapiens
atgtagaaagctgaaactggatccccttctttacaccttacacaaaaattaattcaagatggattaaagacttaaatgttagacctaaagccataaaaaccctagaagaaaacctaggcagtaccattcaggacataggcatgkgcaaggacttcaggactaaaacaccaaaagcaatggccacaaaagccaaaattgacacatgggatctaattaaactaaagagcttctgcacagcaaaagaaactaccatcagagtgaacaggaatgaatggaatgggagaaaatttttccaatctacccatctgacaaagggctaatatccagaatctacaaagaacaaaaacaaatttacaagaaaaaatcaaacaaccccatcaaaaagtgggcaaaggatatgaacagacacttctcaaaagaagacatttatgcagccaatagacacatgaaaaaatgctcatcatcactggccatcagagaaatgcaaatcaaaaccacaatgagataccatctcacaccagttagaatggcaatcattaaaaagtcaggaaacaggtgctggagaggatgtggagaaataggaacttttacactgttggtgggactgtaaactagttcaaccattgtggaagacagtgtggggattc

SEQ ID NO: 735472 - DNA, 688 bp, Homo sapiens
actgaatcagagcctgcattgtaaaggatcccaggtgatatgtgggcacactccagtttgagaagcatgggctgctctggaaccctgtggcactgttaaccctcctgcagccatggccctccacccacgatctttttcagtaacagccgctacactggaaatgcattccaagagagacctgtgactccctggcargaaaaaaaggatggctgggtgcggtggctcatgcctgtaatcccggcactttgggaggctgaggtgggtggatcacctgaggtcaggagttcaagaccagcctggccaacatggtgaaaccctgtctactaaaaatacaaaaattagccaggcatggtggtgggtgcctgtaacccaagctactagggaagctgaggcaagagaatcacttgaatccgggagacagaggttgcagtgagccgagataacactactgcattctagcctgggggacagggtgagactctgtctccaaaaaaaaaaaacaaacaaacacacacacacacacacacacacacaagacaaaagggggccttaaaaggaaaaacagaaagatagatgggtaagccactgccaccacctttgcacccctgtgctcacggcacacacacacacagagccaggtgtgtgtgaacatgaggttggaaaacactcaaaaggcagcaggcagcct

SEQ ID NO: 735473 - DNA, 626 bp, Homo sapiens
ctacttgggagactgacatgggaggatcccttgagctcaggagctggaggctgcagtgagctatgattgcaccactgcgctccagcctgggcaacagagcgagaccctgtctttaatatatatatactgaagaaccaccagacgctagttgagaggggcacagaggtggagaaccatgagcctgactgggcccgggggctttggcttgcatggtctccaccagccttctgagctgtcaccgaagcaggtaactgcagcccctccatgtgytgcatgtgccttgtcatgtgccagtgctgcatgtgccttgtcaccctgcatctgcacagcaaccctttggggtgggcaccatggctcatcccatttgataggcgtggaaactggggctcagagaggttgagcagcttatcaagggagaggcagagccaggcgtcattgtgaagaatgtgacccccaaggccgagtgtcttcctggacaccaggctgtcttccagaagcatcacctttgattctcactgtcatgccaaagaggctgctgagtgatctcatcagattcgagcagctctgctcagagatgtccagctgtccacggcctgccctgggtcaggagcaataagcatacttga

SEQ ID NO: 735474 - DNA, 670 bp, Homo sapiens
ttttaggatccctcctcagacaagcaggcctaataaaagctattcctgaagctaagatatggggagcctcagaaattgtatcattcctattcatacaagtgaggacaaaaggcatgactcttccaactctggagatcccttctctccctcagagtgtggccctccacttcatttttggggcataacatctacataggacacaaataaagtctcaacactaacaggaaaacaggactgtaacaggttttcaagaatgtgttggtaaggtccactaaatctgatttttttcgttcctctttgtggtctaggaggacaggcaagggtgcaggtttttgaggatgtgtcagtaagaaccactaaattcaaccttcctcagtcctccttgtggtctaggaggtcaggcaagggtgcaggttttcaaggatgtgtcagtaagggtcactaaatctgaccttcctcagtcctccttgtggtctaggaggaaaactagtgtttctgctgctgtgttggtgagcacaactattccgaycagcagtgtctggggaccattgcagattcttgggcaaaaggtatttctgctgctgtgttggcgagcatgactattctgatcagcagggtcctgggactgttgtgggttcttgggcagggggagaaacaaacaaaccaaaac

SEQ ID NO: 735475 - DNA, 607 bp, Homo sapiens
aaataccttatgtccaagatttcttttcattgaaggagaatacacaactattcaaagcttgcagtttacatcccacaggaggacctctcagcttacccccatatcctagcttccctatagctccccttcctattagtgataagcctcctctaatctcccctgctcagaagcaaataagcaaagaaacctccaaaggaccacaaaaacccctgggctatttgatatgyccccttcaagctgtagggggaggggaatttggcccaacccgggtacatatccccttctccctctctgatttaaagcagatcaaggtagacctggggaagttttcagatgatcctgataggtacatagatgtcctacagggtctagggcaaaccttcaatctcacttggagagatgtcatgctattgttagatcaaaccctggtctttaatgaaagaatgcagctttagctgcagcccaagggtttggagctacctggtatcttagtcaagtaaatgatagaatgacagccaaagaaagggacaaattccctactggtcagcaagccaaccccagtatggatccccactgggatctttactcagattatggggactggagt

SEQ ID NO: 735476 - DNA, 636 bp, Homo sapiens
gctctttcttaatatatttataagctgtttgtcctaggttcatgtcatccacatactggataccaacagtagtacagtacatgttcataaaagttactgataaaattgttgaacaagagaaagccacagatagagtcctgaagcttgcgggtagaactgcccttcaggttgatagcaattcattaatgagcacttgttagttatgattgttcaaacaattacctagccacctagttgcactgttatccatcttatatttatcttgtatatgggtgtaatgaaaacctggtcaaataccttattgaaatcctaccaacacactgtttttactgcctctttttgatctgtgacctatctgtacatacactctttttttaaaaaaaaacaagaaattagrttaatctggtaaaactcaggttgattccacaaatggttaccattttcttttctaaatggttagaaactgttttaaaataaataatctgaatttagaaaaggattgacgtcaagtatactggactgtcgttggcagttgtttctgttttttaaaaaatcaggactacagttatttgttcttttccagtctttggcagtcctccggttctccacacttcctccactggcagcagctcagtg

SEQ ID NO: 735477 - DNA, 626 bp, Homo sapiens
ttgctgggttgaacaatcagtttatgtttatctttttaagaaacaactaaactgttttccaaagcaatgtgctgttttacactctcagaagcaacgtatgaggcttctggtttctctacatcatcaccaacattcagtagtgatggctttttattatagtcattctagtaagtctaactgcataacaaatgaccccaaaacttagtggcttaaaatcaaacatttattccacaatttctgtgggtccagaatccaagtgtcctaggtcctctggctttcagatttcaaacaaagctacaatcaaggtgttgtctgtggctgtagtcatctcaggttgattaggggtcasggggagaatctgctttcaaactcactcaagcggttgttggtaggattcagttccgtatgggctgttgtactgagggcctcagttcctcactgactgtgggctgaaagcctccctcagttctttgccacgtgggcttcaccatagggtggctcacaacagggcagctggcttccatcagagtgaccaatttgagagggcaagaaagtatgagcaagactgaagccagagtctttttgtaacctaatctagaaatgacagcccattacttagagtctgt

SEQ ID NO: 735478 - DNA, 626 bp, Homo sapiens
ttgctgggttgaacaatcagtttatgtttatctttttaagaaacaactaaactgttttccaaagcaatgtgctgttttacactctcagaagcaacgtatgaggcttctggtttctctacatcatcaccaacattcagtagtgatggctttttattatagtcattctagtaagtctaactgcataacaaatgaccccaaaacttagtggcttaaaatcaaacatttattccacaatttctgtgggtccagaatccaagtgtcctaggtcctctggctttcagatttcaaacaaagctacaatcaaggtgttgtctgtggctgtagtcatctcaggttgattaggggtcagggggagaatctgctttcaaactcactcaagcggttgttggtaggattcagttccgtatgggctgttgtactgagggcctcagttcctcactgactgtgggctgaaagcctccctcagttctttgccacgwgggcttcaccatagggtggctcacaacagggcagctggcttccatcagagtgaccaatttgagagggcaagaaagtatgagcaagactgaagccagagtctttttgtaacctaatctagaaatgacagcccattacttagagtctgt

SEQ ID NO: 735479 - DNA, 600 bp, Homo sapiens
ttacagaaaatggaaagacttaataatgaacttggagagaggaaagtttagttccatagagtctccccagtctgagaggaagtaattacatacattgtgctgtttttaaattatgtgggatggtgactgctgcttaagtaacatcccaggagtagggaagactcaattcgtcttaagacacttcatggcccaccagttctttgaggcatgggtttctacaggcttactggccagagttgcagagaaagggaattcattggcaagttagacagctgaataaaaatgactgtrtacaatatccagtgagattggaaatcactgctgaaaagaaacaacctggggagtctaagcttttagcagtggagggatttagaagaaatctgttgtggagtggacctagtgggaaaaaatgatttagtgaatatggttctcactgggtggccttcaggatggaatgagtgggaagatttaactggggaaaaggtcattaggatgtcattgtaatacagtatttggaaaccaagcaaggatcacatctaagcaaacattacagtcagtgttgtcaaaagtaggagagagcataacaagcatgagaatgaa

SEQ ID NO: 735480 - DNA, 521 bp, Homo sapiens
tgattattgtttcacgtaagttttgaaacttggaagtatgagtcggccaattttctttttcaagattgttctggctattcagggtctcttgaaattccatataaattttagaaaatcaacttgtcaatttccacaaagaagccaactggaattctgaaaaggactgtgttgaatctgtagatatatttggagagtattgccatcttaacaatattattttgatttatgaacactggatgtttatttatttagatakttttctcttttaacaatgttttgtagttttcagagtgtaagctttgtactactactgttcaatttttcctaagtattttattctttttgatgctattttaagtgggatttccttaacttcatttttggtttgttcattgctagtgtgtagaaattcaccagatttttgtatgttgatcttatatcttgcaaccatcctgaatttgttaatcagttctaagctttttagttgattccttagatattctatacattaagatcatgtc

SEQ ID NO: 735481 - DNA, 495 bp, Homo sapiens
gagggcatttacccaatgcctgtatccccattgtatcttagaagtaactaacttgcttttgattttacaggctcataggcagaagggactttctttgtctcagatgagactttggacttggaatttggggttaatgctggaatgttgtgaargcacaattgcattttgaaatgtgagaaggacatgagatttgggaggggccaggggcaaaatgatatggttttgctgtatccccactcaaatctcatctagagttgtaatccccacgtgtcaggggaggggcctggtgggaggtgattgggtcatgagggcagtctcccctatgctgttctcatgatagtgagtgagttctcatgagatcttatcgtttaaaagtgtggcacttccctcctcactctctttcctgccaccatgtaagacatgtcctgcttccccttcaacttccaccatgtttgtaagtttcctgaggccttcccagccatggggaactgtgag

SEQ ID NO: 735482 - DNA, 495 bp, Homo sapiens
gagggcatttacccaatgcctgtatccccattgtatcttagaagtaactaacttgcttttgattttacaggctcataggcagaagggactttctttgtctcagatgagactttggacttggaatttggggttaatgctggaatgttgtgaaggcacaattgcattttgaaatgtgagaaggacatgagatttgggaggggccaggggcaaaatgatatggttttgctgtatccccactcaaatctcatctagagttgtaatccccacgtgtcaggggaggggcctggtgggaggtgattggrtcatgagggcagtctcccctatgctgttctcatgatagtgagtgagttctcatgagatcttatcgtttaaaagtgtggcacttccctcctcactctctttcctgccaccatgtaagacatgtcctgcttccccttcaacttccaccatgtttgtaagtttcctgaggccttcccagccatggggaactgtgag

SEQ ID NO: 735483 - DNA, 573 bp, Homo sapiens
gcatacaattgatggcttaggttgacagagcctgtttttatgtgtcattttacatctttgagtccttagtttcttcatctgtaaaaatgaagcagttgtgctaaacagttgtgaacatccttagcacctctgactttcttttctttctttttttttttttttttttttttttttttttttgagatagcctcactctgtcacccaggcagtagtgcaatggcgygatctcggctcactgcaaactcgcctcccaggttcaagggattctcctgcctcagcctcccaagtagctgggattacaggcatgtgccaccatgcccggccagtatttgtatttttagtggagacagagtttcaccatgttggccaggctggtctcaaactcctgacctcaagtgatctgcccacctcagcctcccaaagttctgggattgcaggcatgagccactcgcctggcagtgattttctattatctgcagctctattgtctgtcctttgttaattcagtagtaacttatcactagggatttgtgtgaagtaatcacagttatcaatgttttaatcagttaacat

SEQ ID NO: 735484 - DNA, 573 bp, Homo sapiens
gcatacaattgatggcttaggttgacagagcctgtttttatgtgtcattttacatctttgagtccttagtttcttcatctgtaaaaatgaagcagttgtgctaaacagttgtgaacatccttagcacctctgactttcttttctttctttttttttttttttttttttttttttttttttgagatagcctcactctgtcacccaggcagtagtgcaatggcgcgatctcrgctcactgcaaactcgcctcccaggttcaagggattctcctgcctcagcctcccaagtagctgggattacaggcatgtgccaccatgcccggccagtatttgtatttttagtggagacagagtttcaccatgttggccaggctggtctcaaactcctgacctcaagtgatctgcccacctcagcctcccaaagttctgggattgcaggcatgagccactcgcctggcagtgattttctattatctgcagctctattgtctgtcctttgttaattcagtagtaacttatcactagggatttgtgtgaagtaatcacagttatcaatgttttaatcagttaacat

SEQ ID NO: 735485 - DNA, 573 bp, Homo sapiens
gcatacaattgatggcttaggttgacagagcctgtttttatgtgtcattttacatctttgagtccttagtttcttcatctgtaaaaatgaagcagttgtgctaaacagttgtgaacatccttagcacctctgactttcttttctttctttttttttttttttttttttttttttttttttgagatagcctcactctgtcacccaggcagtagtgcaatggcgcgatctcggctcactgcaaactcgcctcccaggttcaagggattctcctgcctcagcctcccaagtagctgggattacaggcatgtgccaccatgcccggccagtatttgtatttttagtggagacagagtttcaccatgttggccaggctggtctcaaactcctgacctcaagtgatctrcccacctcagcctcccaaagttctgggattgcaggcatgagccactcgcctggcagtgattttctattatctgcagctctattgtctgtcctttgttaattcagtagtaacttatcactagggatttgtgtgaagtaatcacagttatcaatgttttaatcagttaacat

SEQ ID NO: 735486 - DNA, 602 bp, Homo sapiens
tatgagttaatcaaccaattagattatctatcaccatatcaattactaagaaatcacatttaagtattttacttaagtatctgttaccctactcagcaacctttgaagttttacttaagtatttgttatcccactccacaaccttagattgtttacagctcttgcctccatgttggctttgctatcagccacgatgaatcaccaataaaaagcatcctactggcacatgatatagaaatccctttgtgggccaggcacggtggctcacgcctgtaatcccagcactttgggaggccgaggygggtggatcacgagctcaggaggtcgagaccatcctggctaacacggtgaaaccccatctctactaaaaatacaaaaaatcagtcaggcgtggtggcgggtgcctgtagtcccagctactggggaggctgaggcaggggaatggcgtgaacccaggaggcagagcttgcagtgagctgagatcgtgccactgtactccagcctgggcaacagagcaagattccatctcaaaaaatataaatagaaataaaaaaaatccctttgtgtaaaaacacaaataaaaagctatgtgtgtatagaaa

SEQ ID NO: 735487 - DNA, 616 bp, Homo sapiens
catgaaatttatgaagtggcattaagtacattcatattgttgtgcaaccattaccactatccatgtaaagcattttttcatcatttcaaactgaaactctatagtaataactcttcatcactcctttctccctgccctggtaactactttttaactttctgtctctgaatttgactattttaggtacctcataaaaatggaattayatttgtcctttgtgtctggcctgtttcgcttagcatagtgtgtcagaattcccattccttcttaaggttgaataatattcccttgtgtgtgtatatatgtgtatatgtgtatatatatatatatatatacacacacatgtatacacatacaccatattttgtttatccatttgtttgatggatactcaggttactttcacctgttgtctattgtgaagaatgctcctgtgaacatcagtgtacaaatagttctttgagtctccgctttggttccttttagatacattcccaaaagtggacttgctgggtcatattattatttaatttattgagaaactgccgtactgttttccacagtggttgcctcattgtacattccagtttctccatgtcacccccacttgttattt

SEQ ID NO: 735488 - DNA, 590 bp, Homo sapiens
ctcttcatcactcctttctccctgccctggtaactactttttaactttctgtctctgaatttgactattttaggtacctcataaaaatggaattacatttgtcctttgtgtctggcctgtttcgcttagcatagtgtgtcagaattcccattccttcttaaggttgaataatattcccttgtgtgtgtatatatgtgtatatgtgtatatatatatatatatayacacacacatgtatacacatacaccatattttgtttatccatttgtttgatggatactcaggttactttcacctgttgtctattgtgaagaatgctcctgtgaacatcagtgtacaaatagttctttgagtctccgctttggttccttttagatacattcccaaaagtggacttgctgggtcatattattatttaatttattgagaaactgccgtactgttttccacagtggttgcctcattgtacattccagtttctccatgtcacccccacttgttatttcctgtgggtttttttgtgggggacggataatagccatcctaacagatatgaagtggtatcttactgtggttttttccccccttt

SEQ ID NO: 735489 - DNA, 620 bp, Homo sapiens
tggttttatgatggataaaacaaatattctcaacagtgaacaggtttgcttactttttttatataccacagttagctttacattttctttttttttccctcttggttctgcattacatgaaatagcttcacattttctcatttagtttatgaatgaaatattttgtttaaaagtgaagtaattattggatgtgaaatataaataattcaattttcaggaaaattagtatataatatgtttaaatttgttcaataatttgacctkttacaggagtcacatttccatttctctttatatcaaagactcagcattttagtgtgtagtgttgtaaagttgcttatatcaaccatgcatgaaaaatattagtaatatttcacacagccataacaagagaacgaaattatgtcctttgcagcaacatggatgtggctagaggccattatcctaagtaaattaattaagaaactaaaaaccaaatactgcatgttctcccttgcaagtgggagctaaacattgggtacacacggacacaaagatgggaacagtaaacgctggggattgcaaaagaggggaaagagggaggtgggcaagagttgaaaaactacctattaggtactgtg

SEQ ID NO: 735490 - DNA, 571 bp, Homo sapiens
cccagctaatgttttgtattttttgtcaagatggagtttcaccatgttgcccaggctgctctaaaactcctgggcttaagtgatctgcctgctttggcctcccaaactgctaggattacaagcgtgagcagtcatgcccagcctactagatcatattaataaggcttcagcatgtggtatataaccattgatttggtgaatatattccttaccatgctggctgattttaaaagatagaacagtctgcattactgtgagacagacaacaatattcattaatrgtcatttacagtgtttgtcacaggctatgttaagtcttctgccataatacatcaagatacctggatatcaaatatatcgagaccacctggacaatataccaatacattatgtcgatgacatcatgctgattgacaggacaaccaagaactgggtagtcatacacacatgctccaaaggattggagataaaccctatggaagattcagagacctactgtttcattgtttttaggggttcagtggttggggcataccagggcatcactccaaagtaaaagacaaattgctat

SEQ ID NO: 735491 - DNA, 666 bp, Homo sapiens
acagttaaaaaggattttaaccttggaaagcagaagagctttctttctctgagaaaggagcacattggatagaggaaagaagtatatacagaaagagaagtggagaattttttaaactgcatgaatcctcttttctctcctttacacttaatgaaagctawgaaaaacttctaattttttcatttatgaaaaacttcacatgcgcaaaagaattttatgtacgacacattaggtaaaaagaaaaataaaccaaaaagcagattaggaatttgaacattaccaataccttggcagcccctccccaatcataccccttttccctcctcttctgaggatatccaggattacagatttggtcgtccttttccttggttaaagtattttactacatgtatatgaagccctaaataatgtattaaatttctatttttaatttttatttatttttttgagacagggtcttgcttcaatgcccaggctggaagggagtggcatgatcacagctctatgcagccttgacttctcaggttcaatcaatcctcccacctcagccttctgagtagctgagactacagatgcatgccaactcacctggataattttttttttgcagagacagggttattaaaaaaaatttatatgaatgtcatcaaattattatttggt

SEQ ID NO: 735492 - DNA, 655 bp, Homo sapiens
ttactaaatttgctgatcatatggaacaaatttaagtgtactgtttattttagtattgatcaaaaactttatttttaattctagaacagtcaaaatgagttctaaaaaaataagatatcggtgagcttactaaggcaagactcttattcaaatagaagtaacttttctaaaaccaaccttaaccatttataaaaaataaccatattaaaataatgtaacagtatgtagactcaaatttacaacaaaatcaaaaaagaaattgcttccttctcataccccaagatgcctttggtctatattttttaaatgaagtggtcccaaaatggtatgttgtaaataattttccctatttttttttttttttacagggtggcagaaaagggaaaagaaactctgaatccgaccagtgtaggtgattacattagcctttgaagtcaacacaaagtttaaaacttccaggattttgcaaagttgtatatatttaatgctgtgcaactgctaaactatgcagtttttsttgaaggaactaaaagcaactagctccctaatggtctataattttatttcttttggcttaaagtgaaaaagaagaaatagagaattccagcagaattcagtggttgtctactatccatacttcttatcactttagttt

SEQ ID NO: 735493 - DNA, 636 bp, Homo sapiens
ttatgttcaaagcagtcactatgcttcctgctttacacaggcagcagggcaggtttttcttgtcctccctgaactctcctttcctaaggcttacaaataatgtagagagaaagtcattgggagaatgaggaatcayaaaggtgggaaagaaagaaaagctcttttagcacaataacgtacaggggctctgcaggcaggaggcaaactggcacagaggaaagcctcattatcttttagatactttaaactccatgcagagacacagccaggtttaacaccaccaggagtggctggggagggaggtgggtgggaggacggggcttggaggaggtgggacctatacttttatatgggagggagggtggatacataacagcacgctcacctttaactaccttctctgtgtgcctttcaggcatgcttttagtctgcttcctctaacatctttctacatagtcttgattgacacggcaccacttctaaggccaaactatggaaagggtttcttcctatcccttccctaccttctcactcattttctcaagttccctcttgatcctaaaagaaacaaggcagaatcactggccacctatgcttacagttggggttgggacaaaaagaatatggtttgaggga

SEQ ID NO: 735494 - DNA, 578 bp, Homo sapiens
tccattttacagggcacggatctcaagcaaagtgttcagaacagtctctggcagagcccacaccaaaggcctgttgcagaccttcttaacaaatagcttgacactcaacacagaacacagactctggcctgcctcaccttcccaggccctttgaggttttgtttatgcacttgaaatgaaagcaggagatggacaaagcaatcctgtggaggaaagaatgagtttaggagaggaaaacctgccgaagtcctaatttgctaaaaaaaaattaattaaaaaatggaggactcatagtccttacaatgttaagtcagggtctatgayagaatcatgacactttatggaaagatatgaaaatcaactaggtaggtttaagaacagaccttactggtaagtaactctctctgaaaaatttagaaaagcttggtcagtgacctgttgaatatcaatggccaaatgccaagcagagtgaagggatatctcagagaactctcagaatagaacaagcagatttttctctatcctatggattcatcgtattcaaaacacaggaatgttttcctaacactatgtgactt

SEQ ID NO: 735495 - DNA, 578 bp, Homo sapiens
tccattttacagggcacggatctcaagcaaagtgttcagaacagtctctggcagagcccacaccaaaggcctgttgcagaccttcttaacaaatagcttgacactcaacacagaacacagactctggcctgcctcaccttcccaggccctttgaggttttgtttatgcacttgaaatgaaagcaggagatggacaaagcaatcctgtggaggaaagaatgagtttaggagaggaaaacctgccgaagtcctaatttgctaaaaaaaaattaattaaaaaatggaggactcatagtccttacaatgttaagtcagggtctatgacagaatcatgacactttatggaaagatatgaaaatcaactaggtaggtttaagaacagaccttaytggtaagtaactctctctgaaaaatttagaaaagcttggtcagtgacctgttgaatatcaatggccaaatgccaagcagagtgaagggatatctcagagaactctcagaatagaacaagcagatttttctctatcctatggattcatcgtattcaaaacacaggaatgttttcctaacactatgtgactt

SEQ ID NO: 735496 - DNA, 484 bp, Homo sapiens
gattaaaataaacacaatcagaaatgacaagaaggatattatcacttaccctacagaaatataaacaaccatcagagaatattatgaacacctctatgtacataaactagaaaatctaggagaaatggataaatgyctggacacatacacccttccaagaatgaaccaggaagaaattgaatccctgaacagaccaataatgagctctgaaattgaggcagtaataaatagcctaccaaccaaaaaaagcccaggatcagatggattcacagctgaattctgtcaggtgtccaaagaagagctggtatcattcctactgaaactattccaaaacactgaggaggagtgactcctccctaacttattctatgaggccagcatcatcctgataccaaaacctggtagagatacaacaacaacaacaaaaagtcaggccaacatccttgatgaacattgatgcaaaaattcttaaaaaattactggc

SEQ ID NO: 735497 - DNA, 484 bp, Homo sapiens
gattaaaataaacacaatcagaaatgacaagaaggatattatcacttaccctacagaaatataaacaaccatcagagaatattatgaacacctctatgtacataaactagaaaatctaggagaaatggataaatgtctggacacatacacccttccaagaatgaaccaggaagaaattgaatccctgaacagaccaataaygagctctgaaattgaggcagtaataaatagcctaccaaccaaaaaaagcccaggatcagatggattcacagctgaattctgtcaggtgtccaaagaagagctggtatcattcctactgaaactattccaaaacactgaggaggagtgactcctccctaacttattctatgaggccagcatcatcctgataccaaaacctggtagagatacaacaacaacaacaaaaagtcaggccaacatccttgatgaacattgatgcaaaaattcttaaaaaattactggc

SEQ ID NO: 735498 - DNA, 622 bp, Homo sapiens
ggaatctgaccattctgattagccactcctgatggtgtaggaaaggaaagaatttgagcttcagaaggaaagctacagtttttttttgtttttcttccacatactcactcaccctcacgcccaactaaactatgaaagttcctggggaaaagtgatagagaacataaaatgagagctctggttaccattctatttctaaacattcattgcactctttattattttaatacaaatcctgttttctctttgctttactyacgaacctgtgttttactccacttgaatattgtgatttaatacctattaaaagagaattactgtggtcacccctgaacttttttgcacttatctcttttataatttcttactttgttgcagagacaagaaagatttgctgatagatcactgttggaaatggaaaaaagggtaagtgtcccacttattaaataattatttttttctttcttgttttaggtaaacaatggtaggttttttgtttttattttgttattatggatgacagttttaattagtttaaatatttattgagttaatgtattttgcagcaacttctttatagaattctatggggtttctctaggtatgaaatgaccttgttaaa

SEQ ID NO: 735499 - DNA, 631 bp, Homo sapiens
caagaccgtattatttgagagaaagtctcgaacgctgctggctaaggggaaaagtgcgataacttgtgatgattcagggaatgactagacaggatgggaaaatacccacgtgtctcttttcctagtcgctgctcccttttcagatgtactagggcagcgggcaggagaatagaaagacctgagacaaacccagcaccctccttctaagaaaactgcggtgccctggtgaaaagggttggctaagaggaaggacttactagtatcttagggttgcgggagaaaaaactcagttcgacagtttattgtattggcgattccagtcttggagttttccccttaaccctgtctctgcctctcctctttacagagaatgaatttagcagcaaagctccctaccaaagtactaacgctgcactgatgctaatttgagatgagctggggcagtgattgtctctrttttttcattattaacatgccagaggcttatcctctgatgcaagtcatctgaaatttctggatcagagcggggtgggctgtcactgacgcacctaagactgacctttctatatccaagtaatgtcagggcacatcattgtgggaggctacaaatgccaggtctccattttgtaaa

SEQ ID NO: 735500 - DNA, 503 bp, Homo sapiens
tggaaaggcaaccaagataaactttgcttcataattttatctttcctgccttggacctgaattcagtcttggttctgtgatcttgcccttgagtcccaggtggccacttctgaccactttggatttggtgctcatgcctggtctcctccccagtatcaggacctctggttggcttcccaagctctatattggtcacccctttgaccctaagtatctcctgttgccctttatgagaactctcctgttgccctgttccctgggaacctaaccatcctctttcagaatgagcagcattgttggggctggggagacatcagacactgattttggctgccctcggrctgcctgggcaccttggcagttgcttcatgtagcttgattccttcttttctggattacattatggctcagttcttgctctctttttgtgactttaccaactcctccccctaataatttcaagggactcaagttatagatagaagagacttctgaaatttcag

SEQ ID NO: 735501 - DNA, 602 bp, Homo sapiens
ttcctgggttctggtcaaattcattttttgcctactctgctgcatctacacagtcagatgtgatttgggttaaagttcattgaatcatgtctatttcttgtctgttcagttttgtggcttcctgggtctctttgactaacttctgttcttttaaaatccaatatggtatcaatacatggtgaaaatattctctgmaaacagtctggcacttcctcaaaaagttaaacatagaggtatcatatgacccagcaattctcctcctaagcatatacccaagagaaccgaaaacatgttcacacaaaatatgcactcatatattcagcagcattatccataatagtcaagaagtggaaacaatctaaatgtccatcaactgatgaatggataaaggaaatgtgctatgtccataccacgagatattatgtggcaataaaaaggaacgaagtactgatccacgctacaatacagatgaaccttgaaaacattatgctaagcgaaagaaggcagtcactaaagaccacatatcatatcattccatttccataaaatgtccagaataggcaaatccatagagacaaaaagtagattagtggtttaggggt

SEQ ID NO: 735502 - DNA, 602 bp, Homo sapiens
ttcctgggttctggtcaaattcattttttgcctactctgctgcatctacacagtcagatgtgatttgggttaaagttcattgaatcatgtctatttcttgtctgttcagttttgtggcttcctgggtctctttgactaacttctgttcttttaaaatccaatatggtatcaatacatggtgaaaatattctctgaaaacagtctggcacttcctcaaaaagttaaacatagaggtaycatatgacccagcaattctcctcctaagcatatacccaagagaaccgaaaacatgttcacacaaaatatgcactcatatattcagcagcattatccataatagtcaagaagtggaaacaatctaaatgtccatcaactgatgaatggataaaggaaatgtgctatgtccataccacgagatattatgtggcaataaaaaggaacgaagtactgatccacgctacaatacagatgaaccttgaaaacattatgctaagcgaaagaaggcagtcactaaagaccacatatcatatcattccatttccataaaatgtccagaataggcaaatccatagagacaaaaagtagattagtggtttaggggt

SEQ ID NO: 735503 - DNA, 590 bp, Homo sapiens
ttctgattgcattgaatctataggtcaatttgcagagatttggcatcattacaatatcaatattccaatccatgaatctagtatatattccccccaattatttaagtctttaaaaatctcctgtcaatatttttgtatttttctgggtacttycatggcttttgttaaaatttttattaggcatttaaagatttttgatgcaaacaggaactttaaaaaattttactcagtaattgatgatatacagaaataaagtgatttttatatattgaccttttagataatgaccttagcagattcatgtattaatttttataatttatttggagtctttttgtactgctacaattcttttctatatttagtcatataacagatttattagttcctttccaatattcttttaattttattattttattgcactgaccaggacctccaataaatattgaacaaaagtggtgataacaagcatctctatctttttccaggtctccagaggaaagcttttaatatttactattaaagatcatatttgctgtagggtttagttgtttgtttgttttgtagataaactttatcatttgaaa

SEQ ID NO: 735504 - DNA, 580 bp, Homo sapiens
atcagggtaattaccatatccatcagtttaaacatttatttctttgtagtaataacactcaaaaatcttctcttctagctatcttgaaatatataatacattgttatttgctatagttaccctactgtgtaatagaacaccagaaacttgtaaccttgtacctgttaaccagtctctcccattccccatcttctatactctccccagcctctggtaagcactcttctactctgtacttctatgaaatcaagtattttagattccacatatgagtgagarcatgtagtgtttgtctttctgtgcctggcttatttcacttaaaataatgtcctacagattcattcatgatgccacaaatgacaggattttattatgtcttatggctgaatactatttatgtgtgtgtgtgtgtgtgtgtgtgtgtatgtgtgtgtgtgtgtgtcattttctttataaagtcatctgttgttgggcacttaggttgattccatatcttggctattgcaaatagtgctgcaataaacatgggagtgcagatatctctttgacataaccaatttcatttcttttggatacatac

SEQ ID NO: 735505 - DNA, 580 bp, Homo sapiens
atcagggtaattaccatatccatcagtttaaacatttatttctttgtagtaataacactcaaaaatcttctcttctagctatcttgaaatatataatacattgttatttgctatagttaccctactgtgtaatagaacaccagaaacttgtaaccttgtacctgttaaccagtctctcccattccccatcttctatactctccccagcctctggtaagcactcttctactctgtacttctatgaaatcaagtattttagattccacatatgagtgagagcatgtagtgtttgtctttctgtgcctggcttatttcacttaaaataatgtcctacagattcattcatgatgccacaaatgacaggattttattatgtyttatggctgaatactatttatgtgtgtgtgtgtgtgtgtgtgtgtgtatgtgtgtgtgtgtgtgtcattttctttataaagtcatctgttgttgggcacttaggttgattccatatcttggctattgcaaatagtgctgcaataaacatgggagtgcagatatctctttgacataaccaatttcatttcttttggatacatac

SEQ ID NO: 735506 - DNA, 409 bp, Homo sapiens
attttttacaatttcaaatatcaagttaatgggcaatttcttggaaagtctgcacagaatccatttcttatgattttatctcttggtatgaaaatcagaccacatctcagtttctcaggaaacttagcatttctcaggtgtcaaactatgccatagccaagtttgccgatatttgaataataaaggtcactaagtcaaatcttgtttaggtattattgtcatcaagatatgaagtattkcactttagtgaatgtttcagaagatagaatttataactgtaaagttttgaagcttattttttctaactttaaacatataggtaggaacatttctcaaatatgtgatacgtttctgtcctttctgaagcaaagcaatctgggtgactaggggccatcattacataaacaat

SEQ ID NO: 735507 - DNA, 536 bp, Homo sapiens
cagtgcacagacatgtgatacaaattttgtttgctttccttaatctcctggttaccaggattgctttggacaattgaagtgatttgatgagtgatattttaggtaagttatgttttgctgtaatcatcaatagatgcttttaatgaattcacttaataatatgccctaaaaatacttagaatacattttggccccattgtttagaaatgtaagatgagcaactgagtcacagaattctgtgattgtgatttgactgtattagctggtcagtagcagcacagatggtcccttaactctcccgtgttcagagggctaattcattgattcactcattaaagtggtatttaagaaggaataattttgttcttgtatgcttaatgatttcagtattaagaaagaacagagcttcatagaaatataacrctaaaggaactttaaaccaattagtggcatttttaataacttagcgtgaaaattcatctttacttgacagtcccacttgattgaacatgttttcttcatccattagctttgag

SEQ ID NO: 735508 - DNA, 657 bp, Homo sapiens
ttcatcagttctcaatattcaaagggacccgtctacagatctcagacttcttcctctttgaagttgcctcctctctgatgttcttctctgtgaagtttaaccacctttactcaatttctcaacaaagatagattgtcacattcatcctgagtcccctgccctgtacagtgcccaataagctggacaatcatagggctcacctagcttgtttcccatctctcagggatcaatgagcttcattatctattgtccaatgtcttaagaatcattgttttatacatattaccatttttttttgtttttgcttttgttttargaatttcaggtaagagggtaaatctccttgttatcgcatcttggaagaaagcaaaactctgaattaatttttaatttttttttttgtttttcacattaattttaccttttaaatatacattattaaagtaatttctactgataccaactactttacaggaactggctactgaggatacaacagtaaataaagcagacaaatactttgacttcttatttttgtttttgttttttaagaaacggctgcttcttttgaaaaaatggctggttcttgaaacatcttgttataagaaaaaggaaaaactctactatgattatttcaaaaatattcatcaaccaact

SEQ ID NO: 735509 - DNA, 586 bp, Homo sapiens
  misc_feature 247: n = A,T,C or G
ttaaaacttgatggtatgcactggctgactgtggctgtttaacctcagcaccagctgtgaagaacagaaaatggaagtggtccctctactcagtgagtggaactcagagtcgctctttgaactctaggcaatactccccttgatgagctttgttttatttttactaactcttgtaatgttgycaatagcctagctctttaaattgtcacttagaaagctaagactggcaggttaaagacacccctcntttgagactgaaaagtgtggaagtaaatcacagctgctaagcaactgtgtaggtcacttgtgtagatgaccacagtgaacagctgttctctgatgagactgactggaatcaagctgccaaataagccagtaccactttcactgctacagctgctacctgaccatcatcatcatcataacgggcatggaaatatatccatcaccatagattaccacaaagtaaaggacttgatgtttctgatgcagaggctgctgttgcgtgtatgacgagactccttccaaaattgacctgtttgccttggggtgaagggagtcacattgcatgggatatcgtccctgc

SEQ ID NO: 735510 - DNA, 514 bp, Homo sapiens
cctgaagctctcccttccccggcccctccgacaggcctcagtgtatgttgttccactctctgtgtccatgtgttttcattatttagctcctacttataattaagaacatagggtgtttagttttctgttcctgggttagtttgctaaggataatggcttccagctctatacatgtccctgcaaaggacatgatctcgttcccttttatggctgcataatattccatggtgtgtatgyaccacactttctttatccagtctatcattgatgggcatttgggtcgattgcatgtctttgctattatgaatagtgcttcagtgaacttatgtctgcatgtatctttataatggaatgatttatatatatacccagtaatgggattgctgggtcaaatggtacagcatgatgcaaatcacagaggatttgaagtggagtcatacgcaaaaatctaagacactttggaaatcactctcctgaggaagaacatgaattccataattctttaaaaggcata

SEQ ID NO: 735511 - DNA, 611 bp, Homo sapiens
aagtctgcaatttagtaaccattttaggaaagctgaggaatacaatcaagtggttgaatgttttcaaatatgttttgtttgtaatattagaattagagatgtctagatttggtttattctcttttcatgtactctaattacatagaaaatcatggcacatatttgaaattaaagacaagtccaatccctgagctcactaatttgtgattattcctattgttttgatttctgccatttaatataatgtatkatgtgtgaagtgtaagaaaacatttttatttggccctggacataccagaagtcacgtttctaaatatgacaggccctgtggacaaaaaaagagacaatattgtatcttgtcacagtaagtggtaactgtttagtgagcacttacatgaaatagggtttcttttaagacccttacgatgaggcacggtggctcacacttttaatcccagcacacagggaggctgaggtgggaggatcgcttgagcccagaagttcatggcagcagtgagctatgattacactgctgcactccaaccagggcgatagaccctgtctcaaaaaaaaaaaaaaaaaaagacccttgttaagtgtattaattcatt

SEQ ID NO: 735512 - DNA, 642 bp, Homo sapiens
gaaacttatgaaaatttgaaatggttctttgacaaaatataattttgtgtgatattgaaaaataggtttgaaaaatcaatagcaggaattctgtttgtttccataactatttttaatgtgtcttctgagctcctatttaggtattaacggcattttaaagcaatcaatatgctaactacaaatcctttgctatgtctcattatagggcatggagttagactgatttagttaccagtacatttgaaaataataaaaattatttcagactcattaaattcaaactagcttcctctccttgtttagtccaaatagagggaaattttactatacctaacactagttataaagccacatctcaaataaatgaatactcattaaaaatatgaaatgacatttcttcctatgatctaatggcaaggaaaattaaaaggtttaattaatttgtgarggtttattcataacgaggcaacattcattttattttttttaaaaaattcaattctatgactgcccataaattaaagaaagtagtatccgtggttttctctggggttctgtgcaagtaaatctccagtttaggtttatctgaaatgctgccaccaagtctgtacattgtttcttgcatttctcagttactctaca

SEQ ID NO: 735513 - DNA, 642 bp, Homo sapiens
gaaacttatgaaaatttgaaatggttctttgacaaaatataattttgtgtgatattgaaaaataggtttgaaaaatcaatagcaggaattctgtttgtttccataactatttttaatgtgtcttctgagctcctatttaggtattaacggcattttaaagcaatcaatatgctaactacaaatcctttgctatgtctcattatagggcatggagttagactgatttagttaccagtacatttgaaaataataaaaattatttcagactcattaaattcaaactagcttcctctccttgtttagtccaaatagagggaaattttactatacctaacactagttataaagccacatctcaaataaatgaatactcattaaaaatatgaaatgacatttcttcctatgatctaatggcaaggaaaattaaaaggtttaattaatttgtgaaggtttattcataacgaggcaacattcattttatttttttwaaaaaattcaattctatgactgcccataaattaaagaaagtagtatccgtggttttctctggggttctgtgcaagtaaatctccagtttaggtttatctgaaatgctgccaccaagtctgtacattgtttcttgcatttctcagttactctaca

SEQ ID NO: 735514 - DNA, 586 bp, Homo sapiens
gggagcttcacggctttcacatgttcttcccggggcctgctccagagccactctgttcatctctggtggaacgggctcgagaatctgcatgtttttataagcggtctagatggttcttaacgtgccatgaagtttgagaaccacttttgtggcactaaggaaggtggcacgttagatgggactttgcgtcacgttaataatgtatagtcctccctcttccaaatgggattttaggagtctttttctcaaatcatgtgtaagacatggtttaaaaataaaatctgctaaagtaatcagaatgcatatttgaattggaarcacaggtcttctaggagtgctgatgagatggatacttgggcttaaagtttagttctacaagtgcagaaaggaacggggcatggtttacatagttatcactggtaagagaaggcagaaattgcctaagagatttcaggtttcctgcttgtgggtcgtgacggagggcagcagcatttaccatgcttctggtcactcgtagtacagatccaaaggtgtaatccaaaggcatttagccattaggtaaggcatttcttcagggattctaagc

SEQ ID NO: 735515 - DNA, 623 bp, Homo sapiens
aagataattttcagaaagtacaatgatgcattcaagtaaagggaaagaaaaacaaggggacctctgagtctaggagagaaacagaccagagaggctactttgtaacaccatgaggttcaagtgtgctcctccaactggagtctgtaagaggccttacatagtaacaatgagctctttttttctttttattgtgaaataaaccacacatatgaaagattgcatgaaaagaagatacagagctaaaatattaataatacaaatacctgcatacctactaactaggtgaattattagtactttagaattcccctacccaatgccctttcctatcctatattccctgttccaaattctgagtaaattattccytgctattctttatatattttaactaattactgctgtttaaaaacctttattgtagaaaatgttaaacatatacaaaatcacaaaattagatcacagtagaatgaagactcatgcaccctacctatgttttcaacaagattttacttggcctggtttcctccatgccctaccttcttgccccactcaccaacagattatttcaaacaaagcccagacatcattgtatctaccattacattcatttagaacaaatc

SEQ ID NO: 735516 - DNA, 628 bp, Homo sapiens
atccctccactttgtctccccagtagaatcccacaagggagggatttttatttatcttgttcactggtgcatttgtctagcataaagcagttgcccaccaaatattcaaatgcatcaatgaatggatgaatgagtctacttttctcgaatggaagtgaagggtttccaggtagaggtgaggtctgaaggcaaaatgaatgatcttttgagagaacaaccaccttgcagataagttcaagtagctaccggacacctcccattttcacctgcccttcccactgttatccatgcctgaggaatgtgatgccagggacrgcaggctctgcattggtgtctcaccaaaatgttcaggctcacggagttggctcaggtccctgggcaggtcctggtctccctagttcaaatgcctggaagacagagacctttctaagccaggcatagaaataacaaactccacatatttccagctatttgtgggggcaaaaaaattaaaacaattgaactcatggagatagagagtagaaggatggttaccagaggcttagaaggatatgagggtggtggggagtggggatgcttaatatgtacaaaaaacagaatgaataagatctagtatttactagcacaa

SEQ ID NO: 735517 - DNA, 628 bp, Homo sapiens
atccctccactttgtctccccagtagaatcccacaagggagggatttttatttatcttgttcactggtgcatttgtctagcataaagcagttgcccaccaaatattcaaatgcatcaatgaatggatgaatgagtctacttttctcgaatggaagtgaagggtttccaggtagaggtgaggtctgaaggcaaaatgaatgatcttttgagagaacaaccaccttgcagataagttcaagtagctaccggacacctcccattttcacctgcccttcccactgttatccatgcctgaggaatgtgatgccagggacggcaggctctgcattggtgtctcaccaaaatgttcaggctcacggagttggctcaggtccctgggcaggtsctggtctccctagttcaaatgcctggaagacagagacctttctaagccaggcatagaaataacaaactccacatatttccagctatttgtgggggcaaaaaaattaaaacaattgaactcatggagatagagagtagaaggatggttaccagaggcttagaaggatatgagggtggtggggagtggggatgcttaatatgtacaaaaaacagaatgaataagatctagtatttactagcacaa

SEQ ID NO: 735518 - DNA, 635 bp, Homo sapiens
ccccagtgcctcagctgaggggctttgaattccattcctcctgctggagctccagagaaattccccatcgccaagcccggttctctttcacggccttgtctgtctgagtcccactggggcacactgtagctggagagcttagtagatgctgactcaatgacaatcatggaaagggctcttcccaagaggcccaggagggcaacccttctaggggtcttgtcatgggctatttggccaggggtgtttgtcaacatgtgaatgtaaccctcttaggcaggcatgtgctcacaggccacaggcccagcaccaaggccagggactggggaagcggggagccttccaaacaactctccctttcagccactcagccacacacttcccattcccacccttcccaccccacccgtcgagagctcttccggcagggggccacagtgactaaagaggggtgccctgtcccccaytgccccccggttcccccctccctcacccggagagctgttctgacagggggccatggtgactaaagaggggttccctgccccccattcccacactccccctctgagagctgttctggcacagagtcactgtcactagaggggtacccttccaggtgcgctgggatggcacaa

SEQ ID NO: 735519 - DNA, 654 bp, Homo sapiens
cattgagaaggtccagggtggacctggaaatctgcatgtatgaagtatctctggtgattctgatgtggatgcctcatggaccactttgagaacagtggctcaaggtctgaggatggctggcatcaaaatcctagaagaggccagccatggtgctcacacctgtaatcccagcactttgggaggctgaggtcggaggattgcttgaggccaggagtttgagaccagcctgggcaacatagacccagtctttacaaaaaattcaaaaattagccaggtttggtggtgtgtgcctgtagtcccagatactggggaggctgaggtggtagaatcgcttgagcctgggaggttgaggctgcagtgagcygtgaacacgccactgcattcagcctggggaacagagtgagaccctgtctcaaaaagaaaaaaaaaaattcctaacagctgaacttctgatgtgggagcagccagcactaagggtcataggacagcagagtggccaggggcctcaggcctccaggctggggtacaggactgggcttcagtcccaattggtgaacggagcagcaaggaggagcagggcagaaggtgacacaaagcagctggtcacatggtggagttagacaagaaggtttcaacccacagctcatgagggtt

SEQ ID NO: 735520 - DNA, 654 bp, Homo sapiens
cattgagaaggtccagggtggacctggaaatctgcatgtatgaagtatctctggtgattctgatgtggatgcctcatggaccactttgagaacagtggctcaaggtctgaggatggctggcatcaaaatcctagaagaggccagccatggtgctcacacctgtaatcccagcactttgggaggctgaggtcggaggattgcttgaggccaggagtttgagaccagcctgggcaacatagacccagtctttacaaaaaattcaaaaattagccaggtttggtggtgtgtgcctgtagtcccagatactggggaggctgaggtggtagaatcgcttgagcctgggaggttgaggctgcagtgagctgtgaacaygccactgcattcagcctggggaacagagtgagaccctgtctcaaaaagaaaaaaaaaaattcctaacagctgaacttctgatgtgggagcagccagcactaagggtcataggacagcagagtggccaggggcctcaggcctccaggctggggtacaggactgggcttcagtcccaattggtgaacggagcagcaaggaggagcagggcagaaggtgacacaaagcagctggtcacatggtggagttagacaagaaggtttcaacccacagctcatgagggtt

SEQ ID NO: 735521 - DNA, 545 bp, Homo sapiens
aatccattatctataaaaacacattattcttcaattggccttttagagaaaaaaaagagagagggaagggaggggttaatttggtgagggggcttggtcgtaattagcccactgctgcaaaactgagatacagaaatccatcggcaccagctttgggggcatggagaggcagcggagagatgggggacgggttgtcagtcttggatgaacagtggagcggtcgggttggcgtctgggyattgtgtgtgcttgtgtctctgtgtgtgtgtgaaattttttcatcccaccaccaatctccccctccatcctcccccaattctgccatgatcttgccttctatttccacacactgctccccccaccctaggcgcacccccccttcctccagccctttccatcttcatgaaaaaaattctgattttgatggctctgcggctcttttttccctttttccttgctttttttttttttttgcaacacaacagtcgtgcgatggcctttcctacatgccacacggatgcagccttctgataggagggcaaagt

SEQ ID NO: 735522 - DNA, 616 bp, Homo sapiens
agtggatcctccagccctggtcaggccttcagatgtcagcagccctcgctgacatctggactacaacctcaagagaccctaagccaggccacccagtgaagctgctcccagattcctgactctcagaagctgtgtgagataaaaaatacaatgtttattgctttaagctgtcaaattttaaggtaatttattatgcaataataaagaactaatacagtattgtaaaaaattaatatcttttaaattttaatttctaattctttgtttctgtcatgtagaaattattaaaatattgacctcgatcctgtgttctttctaaaattggctgttttgcagattttaaaggatttctacataagcaatcgtgtcatctgtgacaaagayggttttacttcttttgatatctagatgccttttgtttattttgctgccttattaaagttgtcaagaccttcagtataatgttgaataaaagtggtgagagcaaatagtcttaccttgttcttgatcttaaggggaaagcatccagtctttccccataagtataatgttagctgtaagtttgccagagatatccattatcagattgaggatttttttttcccctgttcttagc

SEQ ID NO: 735523 - DNA, 616 bp, Homo sapiens
agtggatcctccagccctggtcaggccttcagatgtcagcagccctcgctgacatctggactacaacctcaagagaccctaagccaggccacccagtgaagctgctcccagattcctgactctcagaagctgtgtgagataaaaaatacaatgtttattgctttaagctgtcaaattttaaggtaatttattatgcaataataaagaactaatacagtattgtaaaaaattaatatcttttaaattttaatttctaattctttgtttctgtcatgtagaaattattaaaatattgacctcgatcctgtgttctttctaaaattggctgttttgcagattttaaaggatttctacataagcaatcgtgtcatctgtgacaaagatggttttacttcttttgatatctagatgccttttgtttattttgctgccttattaaagttgtcargaccttcagtataatgttgaataaaagtggtgagagcaaatagtcttaccttgttcttgatcttaaggggaaagcatccagtctttccccataagtataatgttagctgtaagtttgccagagatatccattatcagattgaggatttttttttcccctgttcttagc

SEQ ID NO: 735524 - DNA, 681 bp, Homo sapiens
ttgatatttactataaaaggctttattccagaagcttccaaactaattgcatccattcttggtctggggaaatagagaaggctgacccgatattcctcttgatacctcggtgttcacacctgtgcattgggttgtcccctgtcttggcaggaaatcatctgctctaggcatctggagatgctcatcccatctctgagcaaaacaaggcacaaggacctatttcattgctttctaggctgctcacaaggctggcaaaccccacacagtgcatggataccaaagggggctacctgggtattgtccaaatttccttggcagctcccctttcaggatattttgcaatggcatcaacagcaggtgtacctgcgaaggcttgttctccaccrttcctttttacttacaatcagttacatttgtggtcatctgtttttttttcttttctggacagagttggttattggtgtttctgttgtaagtgggtcagaacctaaataggtcatcttggtttcctagatgttgtaatcgtgaaatgaactgagcaagggagggtgagggagaaaagcctaactggcatcaggagggagagggaagatgtggttggagctcagggtcccgcttttaggggtgtgaaaccttggtgataggcgttaaggatccctaagtgaattgatggagaagtgg

SEQ ID NO: 735525 - DNA, 568 bp, Homo sapiens
taattccaccagttaatatctgtatgagttggacaaaccatataaccatctgttgccttccttgtttcctctttaaagtgtttaatccgcaaaacaaacctgataaagtgagattaaattgaatagtacctggcccaagtaagtgttcttcagtaaatgttagtgattattacacaatggcaaggtggctatccatttgaaaaaaaattaggccgggcgtggtggctcacacctgtaatcccaacactttgggaggccaaggtgggcggatcacctgaggtcaggagcccaagaccagcctgaccaacatggagaaaccccrtctctactaaaaatacaaaaaaacaattaggcaggcatggtggcaaatgcctgtattcccagctactctggaggctgaggcaggagaacgcttgaacctgggagatggaggttgtgatgagccgagatcatgccattgcactcattccagcctgggcaacaagagtgaaactctgtctcaaaaaaaaaaaaaaaaaaagagagagagaaaaaaattagtttcctacttcacatgattcataaaaat

SEQ ID NO: 735526 - DNA, 613 bp, Homo sapiens
ttactcttttttaatgtacaaatgagagtcctggccaggtgcagtggctcacacctgtaatcccagcactttgggaggccaaggttggaggatcactgggcccaggagtttgagatcagccttggcaagatggtgagattccatctctacaaaaaatcaaaatattattcaggcgtcgtagcacacacctgtggtctcagctacttgggaagctgaggctggagaactgctcgagcgcgggagttgaagtctgccatgagccatgatctcggcacacactccagcctgggtgacggagcgagaccctgtctcaaaaaataaattaataaataacaaaaaataaaaattagaatccttattgctcrtaagaaaagaactctagctgggcacagtggctcccacctgtaatcccagcacttcgggaggccaagaggggtagatcacctgagatcaggaatttgagaccagcttggccaacatggtgaaacaccatctctattaaaaatacaaaagaaattagctgggcattgtggcgggcacctgtagtcccagctactcaggaggctgaggcaggagaatcacttgaacccaggcggcagaggttgcagtgagc

SEQ ID NO: 735527 - DNA, 554 bp, Homo sapiens
cacacacacacacacacacacatatttaaacacaaatatatcaaattaaggaagaaatatttgtaactattgtagtccatatttctgcaatggtcatgtggtcatagctggtatatatgttcttccactactcattccatattccctttgctctaagtaagtacttcagccarttcggattccttgcctcatggggtgacccaggctttcattcttgaaagatatgggctattagcagttctttctgaattacttctgctgtttgcagttctacaaaaccctttgcaattttccgtggacttgaatctcaggacatgggaaatactaagagatgtcctagaggatctcttgcatttcagacacacttcacttcacctgtattgtgcaatagtcactcaaattcctcttgaaagttagggtcagttatccccagtgaatacagtaaccctctccattgcctcttgatttggaacttcagagtaaagttggggtctcaacttcaggttagtggaatcatttgttgtgtcccctagtggatgtgttcgtctctttga

SEQ ID NO: 735528 - DNA, 606 bp, Homo sapiens
caggaaagggcacagacaccaggctgagggggcaggcgaggtgcagcagatcccagtgggccccggctagtcctagtctgaatgactcattccttgtttccgtccactgtggtctgagtgccttggcccaggggcccccaagaggttgtaacacaggctggcctctcgcccatcagggctcagcagacaaaaattaaagatctcactcctcaggaactcayacagacagcacaggcatgctctgtactctgcctcaccagaccagacctcaggccagaggaggctgatggccaagagaggaaggaaagtcgtctccagctgctcctcctcctcttcaccccccatgacctgccatgaaggcctggccctgcccactgtcttcttactccccctctggtcctccgcctaacagtggtggtgccagcggcatctcctcagctctgttccgttcctccccatttctgactgaagacaacagcaaaggtgaaacagcctgtgcctcccaggaggaacagacttatagggaactaaccatacattttctggcagcccatttctgattaagtcactcacctgctcaacaaccttcaatggatccccactact

SEQ ID NO: 735529 - DNA, 659 bp, Homo sapiens
ctgaaggcagggttatcatgtggctgagatgagtttgacccccgcctgtgggcctggacgtgggcgtgagatgtgttcctgtctcccagagtcatggcctccagaaggagccatgtggaggcccagcacctggagcagttctgaatgcctggcttcttggaggccaaggttctaggcaaggtgggtatccaggctgggttggggcagtgcctctcagaattggggctggagtttcctgctttctgcctcagcagggatcactttgatctgaaaacctcctctctcctggcctttgaaagatgctgactagagcacactctcctgccctttgctgggtgcttagaagaaaggccttgaggtaaccctgttccagcctccccacaggcccctgcagccacgtggactgaccagaggctccacacacgggcaggtgtggcctgacctcgctcgcgtargatcatgggctagtgggtcccccaatggggggctgcttcgagtgtcaggaggcagcgaggggtgcacagtgccctggcctctgccatccccgttggttatttggctggtctgtgtttggtgagcgagtagagggatccagagtgcagggtggtcttggcctggggcttttgactgccctctggagatgcactgagggccaccca

SEQ ID NO: 735530 - DNA, 620 bp, Homo sapiens
catttgtgactcacatacactgtgaatcaggcctgcaacccttctgtcagttgttgcatgatactgtatgtgccatagtgacataatgcaactgaggtctgggctccttgatgtcatataatatcataagtgacatggtgtgaacaaggctgcctccccctcttgggttatcattggctatcatataggacatagtgatacaaagtgacaagtgtgtgtccccctcaagtgttatatatcacatgtgacatrgagtaaggtgagcctgagtccttctcttggttgtcctagattattttattttatttttttgagatacagtctcactctgtccccaaggctggagtgcagtggtgcaatctcagctcactgcaacctctgcctcctgggttcaagcaattctcctgcctcaggtgcctgagcagtggggaccacaggcgtgcaccacctcacccagctaattttgtatttttagttacacagtaacaaatgtgactgaggtctacctgcgctctcagctgatgctggcacctttattgcctaggtgtttaatgcttctcaggtgtgcatcctatctcccgtcacacactctcatatgctatgtaggatgaggacacagc

SEQ ID NO: 735531 - DNA, 563 bp, Homo sapiens
gcccaggcccccgagggttctagggggtcccatccctgggaaggtggaatctgggaggtgagggggacctaggaccccattgtgtgcacagcttgggctaaggcatgagataagaccagggtgacagtacaggagtatccaagaactgacttcacctaacttctgcatttgacttcccatccccaatgtgggtagggccctgccctctggygattggaaagaggcgcagggtgcaaagaagtcccctcctctgacctcctgcagggctccgtcttggcctggatccgcaggggggcctgggcaggagggaggctgtggtcttgggatggggtggcagttccaggcccacagcggggcaagagacatcctacaccttcctcccatccttgccccgaaagtcatgggcgctggggttcaaggtgccctcactatttgacctttcttgctggtggctttggtgtgtcattctggtccccagcctctgtttcctggactgtaagtggggataataataggtcacccctcccctgcaggattaacctcagcgattgttgctggcatca

SEQ ID NO: 735532 - DNA, 553 bp, Homo sapiens
aatttgagttgatgagaagttgtttcttatggatgagcaaagaaagtggtttccttaggtgaaaactacttctggtgaagatgttacaaacacacttcagatgaaaataaaggatttaaaaaattacataaacttggttggtaaagcagtgtggcaggttttgaaaggatttacttcaattctgaaaaaaacaaaaaacgtggtactgtaggtaaaatgctatcaagcactatttcatgctatgaggaattttttatgaaargaagagttaatggatgtggcccactcatttttatcttattttaagaaattgccacagtcatccccaaccttcagcaaccaccacttggataagtcagcagccatctatatggaggcaagactctctaccagcaaaaatattataactcattgaatgctcaaaaaattattagcatatgttaacaatacaatatttttaattaaggtatgtgtattggttttcattagacataatgttattgtacgcttacagtatagggcaaacatgactttatatgaaatgacaaaccaa

SEQ ID NO: 735533 - DNA, 658 bp, Homo sapiens
aatttaattatcttaattgtgtctacaccgactaaaattttttaatgttaatatagtctaattgatcagcttttcctttcataggtcatgctcttaatattgtatccaaaaattcattatcaaatatacattcacgtaaatctcttcttttagaattgtaaataatttaggttccatatttaaaattatgatcaatttagagaaaatttctttgtgaaagataaaaagtctgggtttactttttgttttgtttgcagatggacttccaaatatatagcaccatttgttaaaaaaaaaaaaacaaactaagctttctacactggattgattattcaacaaaaaataaattgactctatttgtatggctccacttctaggctatctrttctaataatctatatgcctgttattttaccaataccatgctattttgattactatagccttatcatacatattgaaatcaagtaatttatatcattctatcatcctactttgttattcttcttcagtattgtattggctattttctcttcacagtaactttggaatcaatttgtcaaataattgataacaatattatgtcttacaatcagtgaacatatactatgtgcctacttatttagatttttgtttttttatcagaagtcttagtttt

SEQ ID NO: 735534 - DNA, 628 bp, Homo sapiens
aaacttgtccaataaattgttactcttcacaatgtagtctgcacataagtttagatctacgaaattttgttactggtccatgactagaaaaggaaagaaattcaagtaaagcgttttaccaatgtttgtggaataaagtaattttatgtctgttgattataataataaaaataagactttatatatctttaatatttttactttcatcatcattgtgtcttgcaaaaaaaaaaatcagctacaaagtattggaactaaaaaataacagtggaaaggtcattcactctagctagtttgaraagcactgtaccacctcttgtggtagatgcctcagcagaatccatagacacttctcaggctcctcttgagggaaaactttcccaaaataaaatttcagcattatcatctgtttgttcatttctccttttacctttgttgtttgtgttgactttataatactagaatctgaagaccatgtaattttttcacccattttttttttttgaggtggagttttgtttttgttgcccaggctggagtgcagtggtgtgatctcagctcactgcagcctccacctcccaggctcaaatgattctcctgcctcagcctcccaagtagctaggattac

SEQ ID NO: 735535 - DNA, 634 bp, Homo sapiens
cattgaaattaaggcagcacttgcattaagagtctgcaaactggtatttataatttcattaactgctgaacttgtaaattgttcctctgaaagttatattacacaaaggagagcgcatttgcctcagaagcaagtattaagcttcaggtaagagccagaactaycttctttttatttgtttctttattacctgagaaatttatggctagacctctcccagtttaagtattgaatctgatccctagtgtttcctgggtgatggactgtgtatccaggcctcagggatcttttttattcataatttcatctcctggagcctcatctgcctcgaaataggtatgtcaagatgacagttcctatgaattttccttacctaggatttaattagaggccattgtcccttattctcctctgacattagttatccagtccctttctcaattccaggttcttccaaaacagaagcaagtacacaaagcaaagcaaaaactcacaagattcctcacagtcttgttccagtgcattgcacatacaaaaaaaaaatgctcagtccataatgcattttaatcattaagccaacatcaacttttattaaatggtatctactctccaattccttagcatttcaaaaatc

SEQ ID NO: 735536 - DNA, 637 bp, Homo sapiens
gtatctttccttcatttaagaagcttagtttcactgcataaaattcttggctgagagttattttgatttagggcactaaagataggattccaatccattctggctggtaaggtttctgctgaagaatctgctgttaatttgataggttctcttttataggttagtggatgcttttgtctcactgctcctargagtccttctttcatcttgactttagataacctgattactatgtgcctaagtgaagatctttttgcaatgaattttccagttgttcattgagcttcttgttatttggatgtctagatctctagtaagaccagggaagttttcctcaattatttcctcaaataggttttccaaacttttaagtttctcttcttcttcaggaacaccatattcctagatttggctgcttaacataaccccaaatttcctgaaggctttgttcaatattttggttctctttctttgtctttgtctaattgggttaattcaaaagccttgtcttcaagatccaaaattctttctacttgttctagtctattattgaaaatttccaccgcatttttttatttctctgagtatgcctttcatttccagaagtcgtgattgttttttctctatgacagctgtc

SEQ ID NO: 735537 - DNA, 643 bp, Homo sapiens
ttgctgctgctgtcgggagaggtttacctgatttggagaagtatcacttgaagtggtgatcttagtggcaagcaaacgggagggctactgaccctgccagctagggtcgttctgttggctcaaataatagaccaaaggactagctgaggaatttaagaggcagttctaggagtgagataggtgtagagaaattgataagccatgcccattatcctgggttgaccagaaactgtgcatatgcacagaagagactagagcagatgcaagcaacccacttattttgggtcaacagaggctgtgtgtacaaagatgtgacggagctctatgaggaacaaaagctcatggaaaattgaaaatgacctataaatattttctccaaattatttagagtataatattttcatgatgtatctggctattccaatattgggttgagaatattttgyctccccaacaggttgcatgtggaatgattggctataaaacaaccaatccttaataagaagttacctgtttttccttgacttgaaataaaagtgatatgtgtggctaattaattatatataacaaaaatgtgttcattatatattaaaataagtgtaatccatacaaaaacattagtttcattcacttacttagcttt

SEQ ID NO: 735538 - DNA, 499 bp, Homo sapiens
cccctttatttgtgatttgcttctttcctcttactgcttttaggaccctttctttatttctaacctttacagtttaactaatgtatgccttgagccagtcttattagggttgaatcttcttagagttctatgacctttttgtatctggttattcatatcttcctctaggcttggaaattactgttattattcctttgcattaactttctactcagatcactctctctatgtcttctttatggmcgataactcttagaattgcctttttgaggctattttctagatcttgtaggtatgttttactttttttctatttttctttatttttttttcttctgattgcattttcatatagcttgtcttcaaactcactatttttttcttcttcttgattggttctgttgttgagagactcatgcatattttcaatttgccagttaaatttttcagctccagaatttcagcttgattttaaaaaactgtttcaatcttaatgtta

SEQ ID NO: 735539 - DNA, 448 bp, Homo sapiens
tgacatgtttagggtcttgcagttggttttcttaggtagccattttcctgatgtgaggccagcttggcccgtgcgtttccctctgcctaggtaggctgacagctctgacagctgagtgcttgagcctgccccaagaatgtgcacgtactagtctcagggcaccaggcctgagggtgagttctggctagcctcacaaagaatgtcagcgttgcctagcaacaagtccatgcagcttggcagagaaggagatctgcttggaggtgcattggcagtggactctcccctgtcttttstgtgggatccacaggatagtcccatgatcctatgagggggcacatgtgaaccagactgaagaaacatcaaccacaatcagagggcttatgggagtcagcctgaagaaacataaaccacagtcccagaaataaactgcaaaatccctaaggatcca

SEQ ID NO: 735540 - DNA, 535 bp, Homo sapiens
aaatggaagcaacccaaatgttcaccaactggtgaatggataaaatgtggtatatttatataatggaatatttgacaatataaatgaagtatggatacatgttagaacatgaatgaccttttcaaacattatgctaagtaaaagaaactagtcacaaaagaccacatattttccaaagagayagaagtaaataagtgattccataaaactggggccactgggagaaaatggagaatgattgctaatagttatgggttattttggaggggggtcataaaaatattttaaaactgattgtcatgatgcttgtacaactctgaatgtatacatttaattgtatactttaaacgggcgcattaagtatataattgaattaaagtatgtaattgaattgtacactttaaatgggcaaattgtatagtaggtaaattatatctcaataaaactattcctttaaaaaagaactgcaatgcaaccagttattttcctaactgaaccaatattatatttaccctattagaatttcctttaaaat

SEQ ID NO: 735541 - DNA, 597 bp, Homo sapiens
atggatatttctagattttgaacccagttgtgacattgcttggtatttaggcaatttccaatgttgcatgcttaggatcaattttagatgttcaaaaatacagcccatgtttccatctagatttcacacccatcagtactgcagggtagagcttaggggactgttgctcagtatcrttcattttccttactagtcgttaaggtttcaaatacacagttaagaatgaaaaatgaataaacaaattggccttgtcagagcttgtatcacccagttagagaggcaagaaaggaaaacaaagagaaaaagttaatatggccttgttccactggcggagcagcgctaaagcacatagttcagaaaaattccctttacctccatttacccaacatggagacaaatgtagttctagtagtgcggggaaacatacacttgtgcaaggaatctgacagaaaaggacttccacacaaacatcccactgctcgctctgctctcctcgaatgcaggactgtgtagagactgctgacaatatcacatgctaaattcattttgtgcttggtgggcatgatttgttctcctgacagagacagaaattcacta

SEQ ID NO: 735542 - DNA, 643 bp, Homo sapiens
cggtagcagggaaggtgacagtcatgtatcatcctgcggcaaatcccagccttgtcagcctttttgtccttgggcacccacaatttcctttccctgctggtctgagagcagggtttggaggcctccatagcgtagtgttttctgttcagtgctccttctttactctcagactgcgttaggtataagggcagtttttataagtcatgtcagtctattaacctttagaacattgctattttccaggcttaatgtcaataaatcttgtaagaactcaagatagacaatccccagtatgcaactccaagagcagcatttgaaggcttctggcctggcttagaaagggcagctacctccaktttcctcagtacacctttcaacaggcatcccatagaaaaagcttaacagtgttgcctttgctcttcagttcatagaagtacaggggagtcaaccaatggggtgcggttaacaaatattcactaaatgctttctttacgtaagttttccatagaagaaaaaggtgagttataatgtgatccttcctataaaatttaaaaggagaaaaaaataaaaaaaaaattgaaggaagcaaaaccatacttgttttgcatatttagatttcatgaagtctatggtttttatacca

SEQ ID NO: 735543 - DNA, 578 bp, Homo sapiens
gcacattgtgcacatataccctaaaatgtaaagtataataataataaaataaaaaataaaaaaaataaaaaagatttaatgactgccctgctgggtttcaaacttgcatgggaccattagaacctttcttttggccaatttatcccttttggaacaggaatgttaatgcaatgcctayaattcaatgcctataatgtatcttgaaagtaactaacttggttttgattttacaggctcacaggtggaagggatttgccctgtctgagatgacactttggacttttgagttaatgctggagggaactattgggaagggaagattgtattttgcaatgtgagaaggacaggagatttaagaggggccagggctgaatgatatggtttgaatatatgtccctacccacattttatgttgaattgttatctccagtgttgaaggtggggtctagtaggaggtgtttgtaacatgggggcataaccctcatgaaaggttaccttatttccttggtggtaagtgagctctctgagttctcaagagatctggtcatttaaaagtatgtgggatcctcctgctctga

SEQ ID NO: 735544 - DNA, 661 bp, Homo sapiens
atttttctacatgtttcctttaagagtataacttgagggaagagattgtgtccttagtcatgtctggcacatggtaggccctcaataaatgtttattaaatgacaaatcaacgcctaagccatttttaaaaagaaaataaaaatgaattcgaagggtasaaatttccattgttttaccacgtaccatttctacctactctgccataaataacttaagaatatccttaaaaattcaaagtgcttcaatttacctacactgtgaccaccagagttccatctggttctgctctggaaggcaaagagcaacaagccgtggagaagcagaaccaacaacacattccaccagcaatttcagaagcaatgtgaacacattccattggtgattcccactgtggagaggttttacatgagattccttgctgggagattggtgagattaaaaaaactataaaattcttgttgctataagaattttcaaatgttaacgttttaaaattatgggtgatacacacaaatgttttctatattgtctgtattcttctgtattttaaattgtttgcaaattgttaatacaaatgcacaaaaaagtaattcttaggaatgtgggcctatttgagaggtagaaaataaagaacttgatacaaatttgctaataaaaagt

SEQ ID NO: 735545 - DNA, 661 bp, Homo sapiens
atttttctacatgtttcctttaagagtataacttgagggaagagattgtgtccttagtcatgtctggcacatggtaggccctcaataaatgtttattaaatgacaaatcaacgcctaagccatttttaaaaagaaaataaaaatgaattcgaagggtagaaatttccattgttttaccacgtaccatttctacctactctgccataaataacttaagaatatccttaaaaattcaaagtgcttcaatttacctacactgtgaccaccasagttccatctggttctgctctggaaggcaaagagcaacaagccgtggagaagcagaaccaacaacacattccaccagcaatttcagaagcaatgtgaacacattccattggtgattcccactgtggagaggttttacatgagattccttgctgggagattggtgagattaaaaaaactataaaattcttgttgctataagaattttcaaatgttaacgttttaaaattatgggtgatacacacaaatgttttctatattgtctgtattcttctgtattttaaattgtttgcaaattgttaatacaaatgcacaaaaaagtaattcttaggaatgtgggcctatttgagaggtagaaaataaagaacttgatacaaatttgctaataaaaagt

SEQ ID NO: 735546 - DNA, 527 bp, Homo sapiens
cctgactgtgggctcagcccctggcaggagagggtgtctgagctggtgagtgcagagttgtgtggtatccagctggttgctccaagtgccggcacaggagctggctccgtgcaccgcttgcggctggaccaggcatgtcacaagtgactcccacagtgggctctggagtccagactaggggaaggtggtggtaaccaaatgggtcaggcaacccagaagccccagaggtgggtgttacagcatgctaacagctctttyagatctgccctctgcagcctgacgaacaggggcatgttaacagccctatcagtcctgttaccccactcccgcccatggccctggggctggcctggccccccgccctgcttcttgttgcatagggtggctaccaggcgctgctggtggggcagagagctaccgtgttactctcttcttcctacccatgtttggtggcatcctgagctcttgtcctgtgtccaagaatgagattacactaacaatcggagggtgaggaggacagagaagag

SEQ ID NO: 735547 - DNA, 593 bp, Homo sapiens
acaccttctggcgggaatgtactgtatgcaggatctctcctatgaaataagagatgtatccaattacaaacaggatgatacagcaacatgcaaaacagtcttgaatttatctgctcaaaatgcacactagtacagtttcaatgtaaactctcaaagcttgctattaaggagaaatataaattatgctacaattcactcrggaatatataatgaaattgatttaaaaataataaatatgaaaataatatagcatctgtaacacttgttttaaggcaggtagggtctggaggcaggcaacctcaggtcaattcacacggacttcctagaactaaaccaaaaggaaaaccccaactttccacatctaagtagcaaaaggacccgaggctactccctttgcaaaccccgcttttctgcatggcggatggaaaattgaaagtatctctgattggttgctttctacaaccaatcaaactgactgcaggccaccacttcatttacatgcagtgaacaccaactggccaatgggaaacctctaggggctatttggacccaagaagattccctatcgggccgttgagtggctgctcaggcca

SEQ ID NO: 735548 - DNA, 580 bp, Homo sapiens
ttatgaatcaagaagctttattattttttgtataataaaatatgagtttgttttgttcataagtgttctcttatcagatcaaactctcataatggctggaaacaccttctgtcctgatttcagagcatataactaggttctatattcctatcaaccctctatctaacttaacatacaacrtacctttaccttgctagccctatgtttggctaagacagctgagctgaggggagctctttgacattgcataatatggagctctttggtctctcacaaagaaaaaatgtgctcaccaacttttgctcaaaggtatttttggctttatagttaaatttctggttaatgatcagttttgctaattgaatacctcacatttcttttggttagatggcatttatctgtatctgtgtgtatatgtgttcaaatgtgagtgcatatcctcatgggagcatgtttccaaatagtttgctttctaattgtttgttactaacagccctttgaattttcttaatgagcactttgttgtacaatgaggaaaaacaattaactgcacaaaatttttgtgcgatcacaaaagaca

SEQ ID NO: 735549 - DNA, 537 bp, Homo sapiens
ggaacacttcagtgcttaagaaaaaagctgacccaggaagtttggaaacttaattgtaaataggaaaaactcattattcctcaactcctaaattgaagcctgatacagtaagtgtgattattaataaccctatcttcctgttcacaaaagcatattccctgagtgttttatttttagaattgatccaagtttggttgattcacataatcagtgcattttctaccacttataatagtgaatgtccaacatgttttatttgatctcttacaagttcttaacctacccagttaaaaattgagttgctaggaagtaacattagcaagatggcaaaataggaagttccagcccttgtttctccacagaaacactgatataacaatawgcaaaccaaaatacctttaggagaattccagaatccaggtaagaagttgtccctggcaggaacaaaaccagaatatccacactgaataggtaagaaaagcaatttcattttacccacgtcagcgtagcttagcactgggagagaacagcccagct

SEQ ID NO: 735550 - DNA, 613 bp, Homo sapiens
agacttttactatccacctctccaagaagattagtcaagttgtcattttctactcatcttattctagagctttctcacaatctcaaccttctgcccccactgccagatgtatggagaagagctgacaccatacctaatgaaattattacaaacaatcaaggtggaaagagtcatccctaattcattctataaggacagcatcatccttatatcaaaaccttgcagagacatgcaacaaaaaaaggtaacttcaggccaatacacttgatgaaaataatgcaaaaatcstcaacaaaataactaacaaactaaatccagcagcacatcaaaaagctaatccaccatgatagagtacgctttatccctgagatataaggttggttcaacatatgcaaatcaataaatgtgattcatcacataaaaataattaaataccaataccacatgaccatgtcaatacacacagaaaaggattttaataaattcaacatgcttcatgttaaaaactttcaacaaactaggtattgaaggaacatacctcaaaatagtaagagccatctatgacaaatccacagccaactgaaaggtcaaaatctggaagcattcccttgga

SEQ ID NO: 735551 - DNA, 613 bp, Homo sapiens
tcttgccacatataaatacagaaaagcaataataggagggagaggggtgggagggtaggaaagaaataaagagaggaagaaaaggaagggagggaagaaaaggaagggagggaaggaaaggaaagggaaggggaaggaaaggaaaaggatgggaagggagggagggaaagaaagaaagcagacattgaggaaattatttggcaactatatcaactttctattggtatatttctatttctgttgctgtatctatttctagtaacaaagcaccctaagagtctgaggcttaaattcataataatttattatagctsttgaatcatgatgatagggttggctgggcttggctgatctcagcgggtttctctcaagattctgagggttggctaattctaggattatgtaaactgacctcatctgaggcaagtagggtggcttggacctgttcttcctgactgtcctccattttctgggactagtggattagcctgggcatatcctaggggcaacgacagagtacaataagacaacagaaacaaagaaattctcttgacaccgagactcagaattggcacacataacttctgctgcttattaataatattagccaaag

SEQ ID NO: 735552 - DNA, 630 bp, Homo sapiens
tctttaagttcacttatctgcaatgtctaatttgcaattactgtcttttagtgtatttttaaactcaaactttagtttccctacaaaagttgaatatgcacattaaagaaaatcatctatgtctctatttatatacttgatatttttatagctttttaaacaygaggaatacagttattaaaaaatgtcttattgttcttgattacaaatttcttcatctgtatatcatttagatcaattccaattgattgactttttcctcctgtttatattaacatttcttaattttgtgttcttagtaaatttttgttagatgccagtcattatgaaattgatcattttgtgtgctgcatatttttgtattcctatacatattcttaagctttgtacagcaatgtagttaagtcgctttggaacagtttgatacactgaggtcttgcttaaaggctttgttaaacaagacaatggcaactttaataaaaatctagcctacttacagagtcaaaatattgctgagtactctatccaatgcctatgaattatgaagttttccattttggttggtgggaatagctattcctggccctgtgtgagttctaaagattctcctcataaccttttaggtatttc

SEQ ID NO: 735553 - DNA, 485 bp, Homo sapiens
attatctacataaatatggggaacaagttacccattggttgtccccttttgaggagggaaacaatcctgaagtctgggcattggaaagacaatttggaagggcaaaaaatgcccacccagtccaaatcaggctaaaagaccccaccagttttccttattgaargcaatatcccttaaggcctgaagctcataaagaattacaggatgttgttaaacatttaaaagctcaagatttagtaaggaaatgcagctgtccatgcaacacctgagttctaggagtataaaagcggaacagtcagtgcagaccattgcaagatcttagactcatcaatgaggcagtaattcctctatgtccagttgtaccaaacccctatactctgctctctcaaacaccagagaagcagaatggtttgttgttctggacctaaaggatgcattcttctgtattcccctgcactctgactcccagtttctctttgcctttg

SEQ ID NO: 735554 - DNA, 617 bp, Homo sapiens
cggaatgaatatctgcaccatcattcctcccgctaacaaacatgtccatctatgtgaagcataattcccaacacaccaccatctccaaaccaacaccaaaccactgccaaacaaagctgaagaggaaaaccagaaaggtctccgagaagtgctgcttgcagggagaagaatggccctgcacagaggctcctgagggcagcaggtgcctgctttggagccttggcaatttccaccaggcagaatttacaaccgtctgggacctgcagtctcagagggctcacggagaagggggaagctcttggctaccygggaggtcaccagtgactctgagcaaagtgcagatcaatgcctgcttagggttaaccccaggctgggagagggcatctggcaaggaacagacctggaagagcctgcccctctttgagctgctacagcagcttctgggaatttgtaagagccatactgatgagggtcccacaccctcccttgccagggcgccctcagggaggccacactgcaggaggcagagtatgaggtggggaagatggatcggccttatcctcaccaccccccatacgagtctcctctggtatggatggtgtctcctctctggtggg

SEQ ID NO: 735555 - DNA, 605 bp, Homo sapiens
actgagtaattgtggtttccacatttgaaaacaactccttttataattattcactgctttttgtcagtgaaatagacatcttgcctcctgaagtagcttcatcacagagtgtcatgaagacagacagtcaggctgaaaaggacagttctttgtggactctacccttcccttcaaggagtatgtcatatgtcacaaaagaaattgccttacactggttcatgtttgcagttactgttgtacattgcatagatgtacacacgaatttaaatgtgatgtctttgtatatatctgtataatgttgagattacttacgaaatatgtctgagtgacacttttcactctygtacagccaaaataatgtatatgtggaaagtgacagacaaattctctaatctctttggtatctataacttattagaatcctctggatgagggttagaagagactttttccaaacttctacatgtagaagtatcataaatgtgctacacatttatgtttgtggatttaattaaagtattttaatatggttttcagtgctaaaattggagtcagatacttcttggttttaagctgtctacctaattgctgtctcccagcagatc

SEQ ID NO: 735556 - DNA, 495 bp, Homo sapiens
ccaaatatcaatgtagaaattagccttctgcagctgcagaggcaattcagtttgcagcttgcttgcatgtggcctagagccacccagcctgatatgtactaattttttatgtttaacttgccagagtagaaactcagtttctgggcsaggcatagtggctcatgcctgtaatcccagaactttgggaggccaaggcaagcagatcacaaggtcgggagttcaagaccagcctggctgacatagtgaaaccctatctttgctaaaaatacaaaaattagcccggcatggtggcaggcacctgtagtcccagctacttgggaggctgaggcaggagaatcacttgaacctgggaggcagaggttgtggtgaactgagatcatgcccctgcactccagcctgggcaacagagtgagactccatctcaaaaaaaaaaaaaagaaactcagtttctggttacatctgatctttattttttatatatcatctaagctataa

SEQ ID NO: 735557 - DNA, 558 bp, Homo sapiens
gatccgttggaggcttttcacacaataaaatgtacctctctttgtttttaacatgtttttcccttcctctcttctttttttgtgaaatgtgtatttactttatttgtagtaagtcacttccatgcacatattaattttttaaagtaataagyatgtgtattgtctacgtgtgaaataaaacacacatttatttttatgctttggaagttatccagaatcatggaattctcaatcacagtcaatcacccaacctactcacctttccagtgtaatcttagtcaaatttttttttgttatccaatgagatgcagtatttcaactcagaaagataaatagagtgaatttatagagactattaactaagaacatacagttttatttatactcagaagcaagtagattatgtacatatatatgaagataaaaattaaaaggataattgtgtaaatttgcatgtagagggctttgaaaacctgtttacttgttaatgccgttttgatgtattgtgtctttgttctcccgacccatcatccagagctctctgcaggagctaagtgc

SEQ ID NO: 735558 - DNA, 564 bp, Homo sapiens
agtatggatccgttggaggcttttcacacaataaaatgtacctctctttgtttttaacatgtttttcccttcctctcttctttttttgtgaaatgtgtatttactttatttgtagtaagtcacttccatgcacatattaattttttaaagtaataagtatgtgtattgtctacgtgtgaaataaaacacacatttatttttatgcyttggaagttatccagaatcatggaattctcaatcacagtcaatcacccaacctactcacctttccagtgtaatcttagtcaaatttttttttgttatccaatgagatgcagtatttcaactcagaaagataaatagagtgaatttatagagactattaactaagaacatacagttttatttatactcagaagcaagtagattatgtacatatatatgaagataaaaattaaaaggataattgtgtaaatttgcatgtagagggctttgaaaacctgtttacttgttaatgccgttttgatgtattgtgtctttgttctcccgacccatcatccagagctctctgcaggagctaagtgc

SEQ ID NO: 735559 - DNA, 551 bp, Homo sapiens
aatactgaaataccccctgccactgacctttggcccccagatgcctcccactgccactgctctccccactgggaacccctgaagttcccacaggctcataactaaagggctaatgtctcgcacagcagcgagcacccaggaccgagcagccacatggccgggtctgctggtgaaagcatccattctgactgatcaggacctgaggggcctcatggttacatattttgataatatccctaattataaataaggctcagttatatagtttgaaaacartgcttctcctcattgcaaaatctcttagaagactccgtagatccaggaacggaaatggaaaatgacagcgtgtcaatctctgaaggttttgggcatttccattagcactccatcttcatgtaaaccagaagatatgcagtttcctgcctagagagaagagaagacacatcagcacagcggcatgaaaccttcatcagaaaacaatgcttcattaatccgtgacaggacaagcgtcagcaaacttccaggcggctggattaggccttcatctatcc

SEQ ID NO: 735560 - DNA, 589 bp, Homo sapiens
acaagagagaaagatgagaagtagaaggaggatttcaaacgcaagcttcacctaatccgttatttttcaaatgaccaggcctatctctgtagctgaaaatcacctcaaataggatctctgatatacagtctccaaaagctcagctaagaaacttacaaagtctctctgccttaacttcatccaccttttttctctccagcttctcctcggtagttaatgattataaaaatayttattggctcatgcctgtaatcccagcactttgagaggccgaggcgggcagatcacgaggtcaggagatcgagaccatcctggctaacacggtgaaatcccgtctctactaaaaatacaaaaaattagccaggcgtggtggcgggcgcctgtaatcccagctactcaagaggctgaggcaggagaatggcgtgaacccacaaggcggagcttgcaatgaggtgagatcccactactgcactccagcctgggcgacagagcaagactccatctcaaaacaaacaaacaaacaaacaaaaaaacagtgtgatggccaggcgcagtgctcatgcctataatccaagcactttgggaggct

SEQ ID NO: 735561 - DNA, 589 bp, Homo sapiens
acaagagagaaagatgagaagtagaaggaggatttcaaacgcaagcttcacctaatccgttatttttcaaatgaccaggcctatctctgtagctgaaaatcacctcaaataggatctctgatatacagtctccaaaagctcagctaagaaacttacaaagtctctctgccttaacttcatccaccttttttctctccagcttctcctcggtagttaatgattataaaaatacttattggctcatgcctgtaatcccagcactttgagaggccgaggcgggcagatcacgaggtcaggagatcgagaccatcctggctaacacggtgaaatcccgtctctactaaaaatacaaaaaattagccaggcgtggtggcgggcgcctgtaatcccagctactcargaggctgaggcaggagaatggcgtgaacccacaaggcggagcttgcaatgaggtgagatcccactactgcactccagcctgggcgacagagcaagactccatctcaaaacaaacaaacaaacaaacaaaaaaacagtgtgatggccaggcgcagtgctcatgcctataatccaagcactttgggaggct

SEQ ID NO: 735562 - DNA, 584 bp, Homo sapiens
aaattcctctttggggaagaaaactttccagtgatctttggtctttgttgtatatgatcattgttgttattgttattgtcactattattgggaaggcttaatgagagaaggatgagcatttgggaatggcatctagaactcattaacatgatataagtaaaatgggtatttaactaccgtwttatttatgagaaataagagatattttaagctgccatcaaaaccagcaggttttttcctctctcaaattacctttataggacatttgatcatttgaatatattttattaggttaatttattttccatagatcatgttttaatacacacccagaaatcacaatgtgcttctgatgtatcatctgaggagggaaaatgagtggggtgtaaaggatcagcgaggtcccagtgcctatggagcacgtgtgtgtacacacatgtggtacttgtgcacatccacacaaatccgcaagatggaccctagaaagaaaataattacatcacaaggatacagctggctctctatcataggcaattatgttagagctaggggttggtgggtttaaaaaatatcaggattttggt

SEQ ID NO: 735563 - DNA, 634 bp, Homo sapiens
ggggctggccgggactcagatacagttcccaggtcccaagctaagagttccgtcagttccaacataggcagtgaagctcatgcatcagtggggctgtgggcactcctatgctctggcttagtttattccagagtggcctgctccctgttctgcggctctcttggctgaagatattctaagagtcagaggaggaactgctgcagggtaagacagactggaagggcattggagggaaagggcttggacacagggcatttcaggggcacaatgtcaggctttaaatgaccctgaaaaaattttccctgagaggacttgttaaaggtgggaatgaggttctctggtgttcaaagtaatgggtttctaaacatcataatgcctcttaatccaaaatcaataaaagtttttctttttttttccttttgtttagctcagatagcaraattcttggtttcataactacaagaactggttggtctggtagctactgctacctgggacatgaaggagctctggaccgtctgattagcccatgccctaatcagaaaggagtttaaaaagtgctctctgctcaggttggctcaagagggtccggggaccatagattagtccctgggttgagaaggctgggcatggt

SEQ ID NO: 735564 - DNA, 534 bp, Homo sapiens
gggtctgaattctgggtctggtgctgattcatgatgcaacattgaatgtgtcagttaacttatttatgtttcagttctcctatctacaaagtgactgtaaggtaaactttattacattgactagatgcgctgtcacagaatgtttcttggagcataatcttactattcccagtgattgcagaggtccggagctgttcctttgctttatgaatgttaaagaatgaattagggtamttttcagcttgatcactctagcatctcatggtgcaatattgttgcccatgtttatgatatatgaggatatagtgacccttgtccacaacacaaatcctagacatggaactgttcctatgggaataagatgcattttatggtcttccaggtctgttgagtccaaccaaacacctacagcatgccaggtgatctgctaggctctgggttaccgggatgagatggcacagaccctgccctggaggagcttatgttctcatggaggcagcttaatctctaaacaattaactttagttcaagatg

SEQ ID NO: 735565 - DNA, 574 bp, Homo sapiens
taattagcagtacattgcggctacaaagagccacagctgtgccaacttagcagctaattatgaaaatccctagtgaattcgtagcgtcccatatggtttgctcggtgttcattttgctccttgacatgcatctttcataatacaacatcctttaatattaagtagataggccaattcatctgatttttacaattattttaaaattcaaatgactcagacgtgtcagtgcaaaactagaaggtacactcatttgatgaaccattccatcatacctctctaattctaatgttggcttacatcacatcagctcacatatatcttgagagggagccattgktgatgtgcatacaattacctggaactttgcaagcaaaccactcaaagacaaagcagaaaagagacttctgctatgaattgagcctcaagatactatgtatcttgaaagtcatatatgcaaactaatggttcctctgatgtaggttcctgcctctcaacattgctaattcaaactcacttcaggcagactggtttctatctttttattcatgataaaaaaaatcacaatctcaataaa

SEQ ID NO: 735566 - DNA, 571 bp, Homo sapiens
tgccgccgtgtaagatgtgcctttcgccttctgccatgattgggaggcctccctagccacatggaactgtgagtccattaaacctctttttctttataaattactcagtctctggtatgtctttatcagcagcgtgagaatagactaatacagtaagttggtaccaggagtgtgagaacagactaatacacctgtgtatggtgattatagaaaggaaaccaaattttcatcagtagattaccatttcaaagctccctacaaagtcatcaccttcttgcctgyatctggggctggctgtgcccttgactccttcaccttccttggttctctgctgctcctcttaattattccgtttcctggattttagggtaacatggaaacttgtgaaagcggtaattgaagaggaagacactctgctggcttctgagccaataactttgttttatcaagtactttaatgaattccaaaggatatggcagatgttaatacattcattcttcctaaaatagcccaaaaaagtaggcttaactctagtatttttccatctctaaaatgcaaagtgagaacggt

SEQ ID NO: 735567 - DNA, 577 bp, Homo sapiens
atatggtgacacggacgcggatgcattttatctttggtgagatagggcacagaaactttaaaccttacatgtttgacagcatcacagagtacaaagctcaccgtggctcttttcaagtacagccccattccatggcactgactcaggaagcttgtcatagactgtgccagtatttagatttgactatatgtgtacaagttatcaatgtgctctgcagtgatggtacagaggctaagatgtgtaggcatttgttatgctctttacaagatatctttgttagcatgataattttgcatttgtactctgaacaatcttctgatttttttcagagttaatattctttcaggtgaggaaatgaaggtttagatagacaggcttgctggagttttcccagctagtacgtggtacagctgggatgagaacagagmttttcctctatttagtctaggacatttcctaccattgcaccaatttttaaaacaaaccactgaatcatctactttccagaaggaaatttcattgcaatggatttatgctttgctttatcatttatccatttgacagttctctgaaccat

SEQ ID NO: 735568 - DNA, 621 bp, Homo sapiens
gatatttggtctttgaccctagttcctgacacagagctcctaaaatcccttaaaatttcctaggtaaaaatatccttttttgttcgaaagaggtgactcttggtaggctcttggatagcctcaggatgttggctggttgccaggggaagcaacaatgcaactggggggtcagaactttaagccttcccccaacacattccacccttgacctccatggaggatagaggggctgaaggttgacttgattaccartggccaatgatggaatcaaccatgcctacaaaatggagcctccttaaaaacccaaaaagataagagtcagaattaaaactaggttgctgaactaaaactaggtatctggagggtaatgcgctggacaggacatgggagctctgtgcctcttcccacatttcctgccctaggcatctcttccatctgagtgttcatctgtatgctttgtactatcctttataataaataggtaaacattagtaaactgttttcctgagttatgtgagctgctctatcatgaggagggggatcatgggaacccctgatttaaatcagtcagacagaagtaaagatgacaatctactacttgcagctggaatctgaagtagg

SEQ ID NO: 735569 - DNA, 550 bp, Homo sapiens
ttgcattcccatcaagaatgaatgagagttcctgttgctccacatccccaccagcattggttgttgtctgagttttggattttcactcttctgatagatgtatagtgatcttctgcttgtttttgccattacaaaaaataacattgacatgaatacgtatgtgcatgttttcatgagcccaagtgcaagagttggcctaggcmcggtatatttcttggattgaatttgctgggtcccaattatgaccttcttaaacattagtaggtataatcaccttgctttttaaagaggcagtatcaatttacgcttctaacagaaatgcatgagaatttttattggttcatatctttgtcaccattttccattgtcaaactcaaaagcttttgccaatttcatgcacaagaatttgaatgcagctttaatttgtgcattccttataactaataatcttcaacatcttttaaaatatttggaagccatctgagttctcttttccgtgaaatatttcttcaaacatattgaacattttcctacttggatattctttctt

SEQ ID NO: 735570 - DNA, 550 bp, Homo sapiens
ttgcattcccatcaagaatgaatgagagttcctgttgctccacatccccaccagcattggttgttgtctgagttttggattttcactcttctgatagatgtatagtgatcttctgcttgtttttgccattacaaaaaataacattgacatgaatacgtatgtgcatgttttcatgagcccaagtgcaagagttggcctaggcamggtatatttcttggattgaatttgctgggtcccaattatgaccttcttaaacattagtaggtataatcaccttgctttttaaagaggcagtatcaatttacgcttctaacagaaatgcatgagaatttttattggttcatatctttgtcaccattttccattgtcaaactcaaaagcttttgccaatttcatgcacaagaatttgaatgcagctttaatttgtgcattccttataactaataatcttcaacatcttttaaaatatttggaagccatctgagttctcttttccgtgaaatatttcttcaaacatattgaacattttcctacttggatattctttctt

SEQ ID NO: 735571 - DNA, 573 bp, Homo sapiens
ttactttaaacaggaacaaaataaatgtagagctataccatgtttatggatagaaaggctcgatattataaagttatgaactgctcccaaattgatacataaattcaatgccattccaattaaaatactgactgtgtatcttacagactttgacaagctgattcttaagtttgtgtcaaaatgcaaagtgcccggaatagttaggaacatcttaaaaatgaaagcaaggtagagtacttctcatcaagacttattgtaaagccatagttattaaaataatgtgatactggcccagacttgcaaagatcaaatgagatccataagtgtaggacaatttgatatatgtcagagctgacatataaaataatcaggttaaaaatgaacaacaataaatcactatcaatatggaaaaaatgaagytaactccccaaataaattctaagtggagtcaataagcaattatgaaaagtaaaacctagaaaattttcaaagacatagaagaaaaattttaaattagagattgtcattttaatatctagctagctattagaattttgtggagaagtgaataag

SEQ ID NO: 735572 - DNA, 607 bp, Homo sapiens
cccctgctgtcacaccaccacaccatcaacacaggagacttctgtgaccggggtcaggggaggggttccccatacaccaagcatgaaccctagctgagtgtcctcttccaattcagtttcacactatctacctggagatagtgtcagatcccacaggttgggggctcagtccccacaagmccccagtaaccctggacaccagtctctaatccaggctcccagaacttctaaccaactggctttgagttggggttcccatgaccccctgtttggatttaatttgctggatcagctcacggaactcaggaaaacacttatttacatttacgggcttattataaagactcctgcgaagggtacagatgaagagctgtgtagggtgaggtatgtgggaaggggtgcagagcttccatgccctccctgggcaccaccacccaggaacttccacatgttcagctatccagaagctcctcaaaccaggactcttgggtttttatggaagcttcttgatgttggcattcctttccccaggctatagcgtgggaccctatctggggagggtcttaaaaaccacagtcagaaaggttaggcaagattagagtcctgc

SEQ ID NO: 735573 - DNA, 531 bp, Homo sapiens
ttgagtctatgttcctgtgtttaatttttcctcttcttataaggacactcatcatatacaatttaatccagtatcacctcagcttaactcgaatacatctgtacacaccctatttccaaataagaccactttcacagattatgcatgaacatgacttctaggaagacactattaaacccagtaaaaatttgtattttaatatatatatatttgtttgtttgttttgttttgttttttgagacagagtctcactctgtggcccaggctagagttcagtggtgtgatctcagctaactgcaacctctgtctcctgggttcaagtgattcttctgccycagcctcccaaatagctgggactacaggcatgtgccaccataccctgctaattttttctatttttagtagagacatggtttcaccatgtttctcaggctggtctcgaactcctgagctcaggcaatccgccagccttggcctcccaaagtgctaggattacaggcgtgagccaccacacccagcctaaacccagta

SEQ ID NO: 735574 - DNA, 631 bp, Homo sapiens
tgggaaaaggccagttttgtcttatatcaggagatggctttgtagatgggatcttaaagctatgactctatatataatgcagacaaaaagatctacagtaagagccattttttacagaattggaagaaaaacaaaggttaatctttggagtagtttacaaactagtttcttctaaagtctgcaggacagctgagaatatcagtagcaatctgacagattttcctggattgtagcttgtgtgcaaagtttgtccatttataaaatgttgcagtgatttttcttcaaagccaagttagctagtatcagcttgtagagtcttaggaaaaagggaattttaacrtttagtgattccaagtcagaaatgtaggaggaaaattgaaaatgcttgcctggagattcaaagacagattttgataggactaacaatttaagatttagtttagattacaggcaaataaaaaaatctgagaaagaaagaaaaaacaaacaatgaactggaatctaattatagtttttttttctttcctgaaacatgatttttctctcttcagtcccccatttctaccaaagataaataaaagcaaagccattttatttgcatattaagttttcgtcttattgtacttggcct

SEQ ID NO: 735575 - DNA, 589 bp, Homo sapiens
aactaagaagcaagagcagcagctgctacaaggaatggatccccaacaatatcaagacagttatctacaacattccaaccaatgggcccaaggtggacattagcaaaaaaccaccatccaagagctcttcaagggactctcctagtctaagcagtttaatgctatgtcctgtctgaatgctttctacattagaacacagggaaaagaatgagtgaaatgcagttcctggagaatgagagcaacaagaacacctttgtaaaaaaaaaaaaaatcaatggcatcagaattccacaaggaagaagagaaggaatttcagcaaagagtccaagaaggaggtctgaggacctaatcctctgtccccataygttagtcttctcagtttacacagccttcaacatgaccccattttccccccctaaaattaccattttttaaagtctctatctttgtttatttgtttttctggagaagggaaagggggacttgtctctttcttctggggaactggatttctgggtcttttttctatccaagagcatactaccacgtcctcacaactcaaatgcctactgacttgagcccagatcat

SEQ ID NO: 735576 - DNA, 615 bp, Homo sapiens
agacagccccccataaccaagaattatcaggcccaaagtgtcaactgtgctgaggttggaaaccccgttctaaaggaagagacctctgacccttccccaattgtgcaatgatagtaataatgcacatttgacaagcacttactgtgtgtcagatgctgttcttagggttttacttgcagtacttcactgatttctcattatcaatgacaaaggaagtcttatcatcatccccattttccagatgtggaaaatgagtcccggagagattaagtgttttgctgcaagtctccaagctagaaagcaactgggtcaggatttgaatctcagcagcctatggccaagttcatatacacttaaccytttttttaggttgcctctctcctggacaacaaagcttgctaaagttcattgttctcagttggaagtatagtttttttttttttttttttttttttttttttttttttttgcttgcgtgaacagagcaacctagaagagggagtaaaggagaagggacaatctcaacaatttgtctttgtcatgagaataatcaaagtcctcttgtctctattgctgcactggagtgggtggatcctggtgaacatgaaggaagag

SEQ ID NO: 735577 - DNA, 615 bp, Homo sapiens
agacagccccccataaccaagaattatcaggcccaaagtgtcaactgtgctgaggttggaaaccccgttctaaaggaagagacctctgacccttccccaattgtgcaatgatagtaataatgcacatttgacaagcacttactgtgtgtcagatgctgttcttagggttttacttgcagtacttcactgatttctcattatcaatgacaaaggaagtcttatcatcatccccattttccagatgtggaaaatgagtcccggagagattaagtgttttgctgcaagtctccaagctagaaagcaactgggtcaggatttgaatctcagcagcctatggccaagttcatatacacttaaccctttttttaggttgcctctctcctggacaacaaagcttgctaaagttcattgttctcagttggaagtatagtttttttttttttttttttttttttttttttttttttttgcttgcgtgaacakagcaacctagaagagggagtaaaggagaagggacaatctcaacaatttgtctttgtcatgagaataatcaaagtcctcttgtctctattgctgcactggagtgggtggatcctggtgaacatgaaggaagag

SEQ ID NO: 735578 - DNA, 542 bp, Homo sapiens
gccgattcgatcaagcagaagaaagggtatcagtaattgaagatcaaatgaatgaaatgaagtgagaagagaagtttagagaaaaaagtaaaatgaaacgatcaaagcctccaagaaatatgggactatgtgaaaagaccaaatctatgtttgattggtgtacctgaaagtgatggggagaatggaaccaagctggaaaacactcttcatgatatccaggagaatttccccagcctagcaaggcmggccagcattcaaattcaggaaatacagagaacaccacaaagatactcctcaagaagagcaactccaagatatataatggtcagatttaccaaagttgaaatgaaggaaaaaatgttaagggcagccagagagaaaggttgggttacccacaaagggaagcccatcagactgactgacagaagatctcttggcagaaactctacaagccagaagagagtggaggccaatattcaacattgttaaagaaaagaatcttcaacccagaatttaatatccagccaaactaagcttcataa

SEQ ID NO: 735579 - DNA, 598 bp, Homo sapiens
ctaatttggcaaaactaaatgtttgcaattctttgatgttcctccaattttttctgaagttttacctcccagcaaaagtccctcattctcaggataggtgagcagtgacttgttgcttctttttgtttaaggggattgaataaaatctcacgtaaataccaaagactgcagatctgagtattcaagtacaaacatcaaaccaaggtgtatcaaaatgggggattgcaaagtgtcaactggtaagggagtggtctttctcccctacctgtcaggagggagctgggccctcttggtggtactgtgggaataagagagtgtctctgagtaatatttatgtgtctcataaatccactgaaacttggaattccatggatgccaatcctaggttgcctgggagagagctctgcctctcagaatatgtcaatttattcagcccagtctgcraatgggtgagggatgggagtgggatggccaagctgaccacctcctggttcccaggaagccccggctccagtaggtgaggagagattcagaggacaggagggttctttccttccagggaaaccccagccaagggatttttcaggggggaagcctg

SEQ ID NO: 735580 - DNA, 594 bp, Homo sapiens
atggaataaaacaggccgggcacggtggctcacgcctataatctcagcactttgggaggctgaggtcaggagttcaagaccagcctggccaacatgggggaaaccctgtctctactaaaaatacaaaacttagccgggtgtggtggcgcrctcctgtaatcccagctactcgggaggctgaggcacaagaatcacttgaacccaggaggcggaggttgcagtgagctgagattgcgccactgcactccagcttgggtgacagagcgagactccatctcaaaaaaagtaaaaagaaaaagaaaatggagcaaaacagagccaagggccttctagctaggcatggccacgtgactaagttctggccaatgggacaggagcacaggaagcaatgcagcttcctcatcatactctttatttccaacttttaaattgaggggtacatgtacaggatgtgcaggtttgttacataggtaaatatgtgccatggtggtttgctgcacaaatcatcccatcacctaggtattaagcccagcagccattagctattcttcctgatactttccctcctccccgactttgcttttttggtttgct

SEQ ID NO: 735581 - DNA, 612 bp, Homo sapiens
agggttggggaaaatggaataaaacaggccgggcacggtggctcacgcctataatctcagcactttgggaggctgaggtcaggagttcaagaccagcctggccaacatgggggaaaccctgtctctactaaaaatacaaaacttagccgggtgtggtggcgcactcctgtaatcccagctactcgggaggctgaggcacaagaatcacttgaacccaggaggcggaggttgcagtgagctgagattgcgccactgcactccagcttgggtgacagagcgagactccatctcaaaaaaagtaaaaagaaaaagaaaatggagcaaaacagagccaagggcyttctagctaggcatggccacgtgactaagttctggccaatgggacaggagcacaggaagcaatgcagcttcctcatcatactctttatttccaacttttaaattgaggggtacatgtacaggatgtgcaggtttgttacataggtaaatatgtgccatggtggtttgctgcacaaatcatcccatcacctaggtattaagcccagcagccattagctattcttcctgatactttccctcctccccgactttgcttttttggtttgcttgttt

SEQ ID NO: 735582 - DNA, 599 bp, Homo sapiens
tgcataatgttgccactcagaatgcaataccctaatgtgaaggcctcagaaatagccacagaaaaaaagtttctctctgaacttctccctcctctctttcatccatcattctcccccaaggctagccatagaaactagaattcctcttccccaaagcaggtcatagaaaacagaacccttttccccaaagccagccacaaaacataaaatatactcatcactttctcccatttatctgtgtaagaactggctataaagaaattctctgacctagttggtttgattgaaggccctaaggtcccctcctttcagcaaasgtcctgccccatacgcagaataagcaaatgctgcacagagaggccaagaagaatctggataggccttactaagtgatatgattaggatctgtgtctttgtccaaatctcatgttgaattataattcccaattttggaggtggggcctctgggaggtgattggatcatggaggtgtttcttcggagtgctttattcccatcttcttggtggtgttctcatgatagtgagtgagttctcatgaggtctgtttgtttagaagtatttagcccctctctcactctc

SEQ ID NO: 735583 - DNA, 601 bp, Homo sapiens
ctctctggtgaagatttctgggtgtttttctgctaaagttttggctaactgtctcaaaccaccctcataataagcagtgttatcattctttgaccctccagaaagtcagcaagaaaaattccttgagcattccagaaaactgttgtcacaacctttgctcttaaccagtccacttttgctttgactggaccacttccacgtctcggtagccattgctttgattgtactttgtcttcagaatcacactagtaaagccrtgtttcatctcctgttacaattcttcaaggaaatgctactgggtctatatcttatttgtttaaaatttccactgaaagctctgctcttgtctgcagtggatctgggcgcaatggttttggcactcatagagtggaaagtttgctcaaattttttagtcagaattacgtaagctgagccacttgagacatctgtggtgttggctattgtttgtgctgttaattgtcagtccttttcaactagagcatgaacaagatccttttttcccttgcaaattgatgtggatggtctgccactgcaggcttcatcttcaacgttatcttgtccttcttcaagtggtttatct

SEQ ID NO: 735584 - DNA, 562 bp, Homo sapiens
gccaatcttgttccttctattctccctcattccgtctggatctctacctattattttaaagtaaatcccaattatcatataacttccatctgtaaatatttccaaatagagataagaactctatttttaaaacagaacaataataacattatcatatctttaaaaattaatagtaattcattaatagtaattcattggctgtcctctaatatccagccagtgttcaaatttccctattgtctataaatagcctttccccccgccccagmtgatatgttggaatcaagatccaaaccaagtctttgtaccttaatttgttggtaagtcttttaagtctcttttaatttctaaatttctcctccctcctttcttcttgcaacttatttgttgtaaaaaatcaagccatttattttgtagaatttcctagattctgctttggctgattgcattcctgtggcatcatttaatatgttcttcttttctgtacttcttttaaactaatagttgcgtctagatatttgattagattcaggttaattatttgacaagactacttcaaagg

SEQ ID NO: 735585 - DNA, 562 bp, Homo sapiens
gccaatcttgttccttctattctccctcattccgtctggatctctacctattattttaaagtaaatcccaattatcatataacttccatctgtaaatatttccaaatagagataagaactctatttttaaaacagaacaataataacattatcatatctttaaaaattaatagtaattcattaatagtaattcattggctgtcctctaatatccagccagtgttcaaatttccctattgtctataaatagcctttccccccgccccagctgatatgttkgaatcaagatccaaaccaagtctttgtaccttaatttgttggtaagtcttttaagtctcttttaatttctaaatttctcctccctcctttcttcttgcaacttatttgttgtaaaaaatcaagccatttattttgtagaatttcctagattctgctttggctgattgcattcctgtggcatcatttaatatgttcttcttttctgtacttcttttaaactaatagttgcgtctagatatttgattagattcaggttaattatttgacaagactacttcaaagg

SEQ ID NO: 735586 - DNA, 626 bp, Homo sapiens
  misc_feature 1, 2, 3, 4, 5, 6, 7, 8, 9, 10, 11, 12, 13, 14, 15, 16, 17,18, 19, 20, 21, 22: n = A,T,C or G
nnnnnnnnnnnnnnnnnnnnnnagtgaccagggaagcaatgggatccattaggaatgtaacagggaggtttgaggatttgggatttgaagaccaaggtctagactaggtgctcgaagaggggctgggggtcaggctgaagatggggactgatacctgctaagctgtagcaggaccctggagcacgctgtgcaggcagccagcttgggttgcatctctccttctctcgggtggggcagaggcatgctggttagcaagaggaaggggcacgggacaagagratcctggatcagctctcttagcaggggtaccctccttattattctgttctctctctgttgacttttacaagctctttccatcctaaagacttctcctggctcagaggaaagtgatctgacaaaataactcaaagtgagacaccagggattggtgattaaacactcaacctttctgggggaagcatctgccttttaagaggcctcagggtcaaagccgtgcctacggtggctctccaggagtttggagaggtgctggggctcctatatataagatatttttggtcttattcttctgtaaggagtcccctcctcccatactgagttaattcattgcttgccctatagca

SEQ ID NO: 735587 - DNA, 447 bp, Homo sapiens
tggcttcaggtatggctggatcctagtgctcaaatgaagtctttccatttcccagctctgcttgcctctgtgttatcttcattctcaggaatgtcctggtagccccaggcagacttcctaccagtgtgtaactgaacaaaaagagagggtctgctctgagactaggtggcaggygggatggactgagatctggtgcgggtggagcagatagtggtgtgagataaagagagggaggggtgacggggccctctggccctggccttgcagaccccactgaggactttagctctgcatgtactggaagccactgggaggttttaagcaggacaatgatgtgatccaatttatgttttaggaagatcattctggttgccatgtgcagaaggggttgtagtggggaggggtcctcaagggcttggcgaggaggctaatgcagtaggccttgcg

SEQ ID NO: 735588 - DNA, 654 bp, Homo sapiens
ttggacttcatcaaagttaaaaactttaatgcatcaaaagatactatcaacagagtacaaagacaacccatggaatgagaagaaatatcttcaaattacatatatgataaagattaatatccagaatatgtcgagaactcctacaactcaacaacaaaaagacaacccagttcaaagatgggcaaaggacttgacttgacatttctgaaaagaagatacacaaatggccaataagcatgcgaaaaatgctcagcaccactagttattagagaaatgtaaatcacagggaaatgccagttcacaccaattaggatggctatcaccaaaaaacagaaaataggtattggccagaacgtggggaaattagaacactcttgcattctagtagractgtaaaatggtgcggctgctgtggaaaagcatatagtggtccctcaaaaaaatcaaacagaattattccacgatccagcaattccactactgggtagatacccaaaaaattgaaagcaaggactcagatatttgttcacccatgctcataacagcattctttggaataactaaaatgagggaacaatcgaagtgtccatgaatggatcaactgataaatcaaatgtagtctgttcatacaatgcaatattactcagccataaa

SEQ ID NO: 735589 - DNA, 620 bp, Homo sapiens
gctcatagacctacttgtaaaagctacagctatgaaacttccagagcgaacgcagaagagcatcttccccatctagaagtagggaatgatttttcagagaaaacacacacacaagaaagcaccaatcttaagagggaaagctgaaacactgggcttgagatctgttgaagctgaagtgtggggacaactagcaggagaggccaggcaggacactggtgtctgctgcatggtgaggcctggcctggaggaagccacacattaggctccttatttcagctaacatttcaagccaaaatctgcatttggagcctacctcaggtcaccttcttatgacctaccagactagactaagtgactttgartggcttctagaatgctctagctgcagatgcccaagcagatgagcctctgagtacttccctaggtgcctgttctgctaagacccagcacccccagggtgtggcatagaccctccatctgcttcctcactggcgaggcttagggctcatctgcattagctgctctctgcccagctctgtcataccttcacccccttcctcagagctaatgaaggaggcagaaaaaatttaatttcctctaaactagaggctgatcaatta

SEQ ID NO: 735590 - DNA, 559 bp, Homo sapiens
tgagaaaaggaagtctttgtgtatatgtttatagacatatctactcctctctattaaaaaataagggcaaagctgtatttactctcgacttactatttaaagatattcaggaagcaaaacatgttaacattaaagcaaatggatagaaacataaagcatttgttgcaggtaagtttttaactcatttatttaaatattatagcttctttttgtttttktttttttcctaacttgtttcaatccatgatgtagcatcttagcagtatactttatctggataaagtgatgactatcgaaacacatcaggaataccgagctgaaggatgaaaagctgtgttgagatcatccttttattgtatggcaggaattctccaaggtttaatttcatggatcattgacatcaagctgagatttaggattcaaataaatttcacaagcagtgtgaatgttttcatatagatcttagcagtgatacataaaagaattaaaagtctgtattctctttatgctaatagtcattatttgttgcttcatttttcctgtgttttttattttagac

SEQ ID NO: 735591 - DNA, 641 bp, Homo sapiens
ttcttttggaccaaacttttttgtgtttagagctgatcattgtttgtgattgcacgtttccttcaactgtgtcctccctggcatacagagaggagaggagaaggaggaaatggaagggagggaaatctcctaacagcagcctcaacgtgtgcttttgtgcgttattctgagaataaatttctatttcaaacaaaaacaaaagaccaaagacagaaacaacagatactagggygtacttgagggtgaggatcataaaactacccatcgggtactatgctgattacctgggcaatgaaataatctgtacatcaaacccctgtgacacacaatttaactatataacagatctgcacaagtacccttgaacctaaaagttaaaaaaaaaaaaaaaaaaagaatactgaagtgttagtttttgaatgtttattttatgtaaggttacgaaaaacttactaaagtcagagactagcattatgtggagtcaaaacctaatgatgcttgataaacatgcattgaaaacaatttttctgagttactgaaatgtacatcttattctgaaattgtagagttataaatgagaaacgcttttttcaatcctgaatgtatataattatgagtatctttaatataattgtactcaa

SEQ ID NO: 735592 - DNA, 641 bp, Homo sapiens
ttcttttggaccaaacttttttgtgtttagagctgatcattgtttgtgattgcacgtttccttcaactgtgtcctccctggcatacagagaggagaggagaaggaggaaatggaagggagggaaatctcctaacagcagcctcaacgtgtgcttttgtgcgttattctgagaataaatttctatttcaaacaaaaacaaaagaccaaagacagaaacaacagatactagggcrtacttgagggtgaggatcataaaactacccatcgggtactatgctgattacctgggcaatgaaataatctgtacatcaaacccctgtgacacacaatttaactatataacagatctgcacaagtacccttgaacctaaaagttaaaaaaaaaaaaaaaaaaagaatactgaagtgttagtttttgaatgtttattttatgtaaggttacgaaaaacttactaaagtcagagactagcattatgtggagtcaaaacctaatgatgcttgataaacatgcattgaaaacaatttttctgagttactgaaatgtacatcttattctgaaattgtagagttataaatgagaaacgcttttttcaatcctgaatgtatataattatgagtatctttaatataattgtactcaa

SEQ ID NO: 735593 - DNA, 644 bp, Homo sapiens
tagagaaaaagattgcctggtgcatttctagttcccttagtcttcatacaaacacgcatgcaggtaggcacacttgaaatatacagaaaactcattaaagatagactagggtgggccaggcatggtgtctcacgcctgtaatcccagcactttgggtggccgaggcggtggatcacgaggtcaggagttcaagatcagtatggccaaggtggtgaaaccctgtctctgctaaaaattaaaaaaaaatagctgggtgtggtggtgggcgcctgtaatcttagctacttgggaggctgaggcaggaaaatggcgtgaacccaggaggcagaggttgcagtgagccgagatcgtgccactgcactccagcctgggcaacagagggagactccatcaaaaaaaaaaaaaaaaaaaaaaaagactagagtggcataagatgagatttgaaggtagtagggaagtcatgaacttaatgactttgggtctgtggtttgctatattcartgctttttatgtctttttaaattttacccaccctaccacactgcttctgtgagttaatttataattttcctctgggtaaaatcaggctgccaattacatcattttcagaaaaatattatttcattgtgttgttttgtatagag

SEQ ID NO: 735594 - DNA, 564 bp, Homo sapiens
gaattattagtttaaatatgtgtatttaaatgtgtagataaaaatttatacatgcatataaaagatattgcagaaaaaatgattaaaggggaaacttagtaactccttgttaaggatccatatcagtcacatctatctgctctagaaaactgagttttaagcagtagaaatctcctacatatgaacagttttagtgaaacaagtttttaatttttatcatgttgttattaacaatgtcccatgtctgtggattcggggtaatgtatacaagtagatggtccaaaacactttaagaataatggatttaatttaaagtctacagactaccatactgrtgatacaaaacagtcattctcttagaatattcttttcaggctactgcctacatgattgaaaggcaggaatttcatagaaatttcagtgtttttcaagctgtgtagcatggatctctaaaagtttagagctagtctatggtatgtgtatggtgggagggttgatgttgtgcaggggtggcaggggcttttctcttgtatatgttaggctcccaaacataggtttttcttt

SEQ ID NO: 735595 - DNA, 520 bp, Homo sapiens
atgcacccagggcattttacattatctttgaagaaatgggtcatgaaaatacaaagacataaataataataccctaataaaataaaggtataaaatatgagatgccacagagaaaaacctagtaagttatataacaagtgttccaaataataaggactatttttttttttaaagaatacaggattaacaaagaagccagcatgggttctaactgttttgtgattaacttgttatgtgcttttgggcaaatcacttaacccttttgattsccagtttatctaaaaaatcaaacgtaagaagtaacgatccttcctattccaaaactcgtcagggtcaatataggagcaaacaatgctcattctttttacatcccaagcatcatatatctgctgcagaaaggaaaaagagggataggattggatgtacagacagacacaggggcagtgggttaggaaagagaaaaagaaaaggaaaaaaaagaaagtttcctttagttggtatttatgtgttctgtggagaa

SEQ ID NO: 735596 - DNA, 520 bp, Homo sapiens
aaagtcaatttcaatacgcaattagcataagatcacttgtactcttagaaaaacgaatgttatttcataggcatattatatgtttttaaacaagcagattttgaaatgtccttataactgaccatctcaaaatgttttacatttaacacagtgctttgaattgtatcaaattttttaaacctatcacaagacaataaatacagttgtagaagtttttcaatgtaactttcaattataaatgacacytcaagaattttacctctttatcttttcgatccaagaggatatgttgtacaggaggaattaaattttcaactgccttccccacatcactgcggaatgaatcactagctggaaggcaactgaatatgggaaaaatacaatattcaattaaaatactgacattaaatactttataattccatatgacaaggtttgttggtattggacaaaaaggggatttttaaattatagttaatttaatgcaggcattaaattaaataatgttataaaaatattg

SEQ ID NO: 735597 - DNA, 641 bp, Homo sapiens
gggggcaatttttgcctcttaagggaaatttgacaacgtctaaagacatctgattgtcacaactggaaagaggaggctactaccagcatgatgtgatgtaggtagaagacagaaatgatgctcagcatcctactatatagaytccagtcctccaacaagaaagaattacccatcccaaaatgtcaatctgtcacaaatgagttatcatggtctacagtcaaaaggaacgggaataaaggaaaggataaagctgagataagtccaggatgggttagaacactgataatacagagaaggcaaggaaggagaatgagttatatctacacaacttcactcaccaaaaccaaaggaagaatgcaaaactgagcaaaacttccttttgcaaaggaagaatgcaagttactaatgaatgctccacatctaaaggttcatgaacacagccttgaggctgcaatgcaggggtcttaagacaatcagttatgagggaatggcaaagacaagggcaaaacagcgaaagaaaaggctctctgcactttctgttccacatcatccaattcaacacatagttattgcacagcagctgctgctagatgtcatggaaaagcacagagataaataagtcaaaaatccctgctctcaaa

SEQ ID NO: 735598 - DNA, 502 bp, Homo sapiens
ttttatgtttgtttttaatttagccattgtttcttatcaagtcttatcacatttctgggtgggataagatttcaagcttcaaaaaatgtggaagaaactacaaataaaaaaataaatttgattacataaaaactgaaaatacgtgtaggttaaaaaattcaacagtaaataataaattagaaattccagcaacaacagaagccacataagcttaatattttagttaagagctcaaacactaataacccttggagaggaaaaaaaaaagcaaaggacaaaaagaaaaatgtcttttaaaaaaaaaaactaaaatccttttaraaaaatttgaatatttctaggtatcaaagaaaagcaaattcaaacattaaaatactatttttacctgtcaacttggacaaagattctaaaaattacaatgccaaatagttaacattttgggggttgatactttttgctaggcatgttccaactgcttggcagtaattcattacagtctcat

SEQ ID NO: 735599 - DNA, 631 bp, Homo sapiens
ttaatcctaattaacattcaatatgtgaaatctctgactggaataaccatgagaggttctaagttgacaaagccagggtgccccagcacaaccttgagaggctttccaaggtaggttaggagcaggggatgtgaggacacagtgttccatgcagaaggaacagcatgggcaaaagcccagagacaaggagaatatatttatggaacagaaaattgatccatgtggttaaagtgtgtcttaggttgggaggataggtgagccaggargctggagacaagaacagatcgcgaaagcctcctgggccacaccagggagtttctttgtataccaatgattggtggagagattgaagagtttaaatcaaacaggcaggatgaaaatttccatgaaataaagctctcttgcactatgatgtggtgagtggattacaaggaaggaagactggctgctgggcacagtatcaaaagattattgaaagagttgtccatgtaagtaaacaacggcctgaataagagtcgtgtcccatacaaatattataatgaattgaattatttagtaaagtaagctattaatctctttcttgaactaatttgtcttcactgaagcaaaagccttgaatttgggcagagta

SEQ ID NO: 735600 - DNA, 609 bp, Homo sapiens
gctgcttcccgttttgtcattttgggttcaaacccacctctataatagccaccactgaaggcctgaaagaagaaatgcatttgtaaagaaaggttaataaaataaagttgctttaaaaaagacgtctggaaatattcacagaactaagaaaaactaagacatttcagaggacttttagtgcaattcccgaggtattttagctaaagctgaataaagtttataaataagtagcaacaagtagtattttaatgatcattaaacagattcatttttttccagtcaatatgaactatcttagaaatataagacaaaataacagtgtctgaaagccaggtcttccgggagtaaaggaargatcattccaaattagccatattctagataaaaatctgcaagaagtggctcaagaacagaagtcttttgagacaagaggttcaagtgtatttgaaacaagactttaagatatatatacagaaaataccactattaggtcctctgaccttgccatgtcagaaatcatattggtaaagcctacaatcactctattctgttacacttaatcacaacatattcaacaggtgatcacagccaaatctattcttaactgtg

SEQ ID NO: 735601 - DNA, 573 bp, Homo sapiens
atttgacttatggaaaatccctaatttagagaaaaaattataatcactatgatttatctagcacttattatgtgctagcatttttctaagtattttccattattctccatttcatcctaagtggaaaatacttatgagatcagcactatcattaccctaattaacatcaaacacacacacacacacacacacacacccggcacactcagtaaattaaagaactggaacctgataaagtytgtctgattcaataccccttttcttacacacttgtgatgttaattatagagattatttcatggaaggctcagcatgtctcattaatggcctagggatatctggagtccacactctcttagcctcttgatttgacaatctttgcataagatttattgtattaattggaggctgtcttatttttttaagtgaggttttgtaattatagctacatgatttattttcagcagaaaattttaaaatcaacaaaattaatatctcctttttataagacaatttctatgtactctattggcagattacagacacgaatctcaaagtataggaagaaaacta

SEQ ID NO: 735602 - DNA, 573 bp, Homo sapiens
atttgacttatggaaaatccctaatttagagaaaaaattataatcactatgatttatctagcacttattatgtgctagcatttttctaagtattttccattattctccatttcatcctaagtggaaaatacttatgagatcagcactatcattaccctaattaacatcaaacacacacacacacacacacacacacccggcacactcagtaaattaaagaactggaacctgataaagtctgtctgattcaataccccttttcttacacacttgtgatgttaattataragattatttcatggaaggctcagcatgtctcattaatggcctagggatatctggagtccacactctcttagcctcttgatttgacaatctttgcataagatttattgtattaattggaggctgtcttatttttttaagtgaggttttgtaattatagctacatgatttattttcagcagaaaattttaaaatcaacaaaattaatatctcctttttataagacaatttctatgtactctattggcagattacagacacgaatctcaaagtataggaagaaaacta

SEQ ID NO: 735603 - DNA, 512 bp, Homo sapiens
acatctaacatcacaactaaacaactagagaactaagagcaaacaaaccccaaagctagcagatgataggaaataaccaagatcaggatggaactgaaggagatagagacatgaaaaacccttcaaaaaataagtaaatccaggatctggttttttgaaaaaattaataaaatagactgtgtattagggttttctctagggagagagctaataggatatatgtatatatgaaagtgagtttattaaggagaactgactcacacaatcagaaggtaaagtcccacartaggtcgtctgcaagttgaggagcaaggaagccagtggtggatcagtcaaagtcccagaacctcaaaagtagggaagccaacagtgcagccttcagtctgtggccaaagacctgagagccccctagcaaaccactggtataagtccaagctgaagaacttggagtctaatattcaagggcaggaagcatccagcatgggagaaagatgaaggcctgaagactcagc

SEQ ID NO: 735604 - DNA, 486 bp, Homo sapiens
taaagttttataagtgataagtcttttattaacgtcccctccttagtctttttgcattgttacatggtgaaccaagagatctgatgatatggcaagcatgaacttgattataatacatacaatagtttgaaaaacaatattctttttttttttttttttttgagacagagtcttgctctgttgcccaggctggagtgagatggtgtaatctcggctcactgcaacctccgcctcctgggttcaagagattctcctgcctcaacttcctgagtagctgggattgcaggcacccgccaccatgcctggctaatttttgtwtttttagtagagatggggtttcgccatgttggccaggctggtctcgaactcctgacctcaggtgatccacctgccccaaagtgctgggattacaggcatgaaccaccacaccggccaataatacagcattcttttagaaaaaacaactgaggtaaaattgtctatttt

SEQ ID NO: 735605 - DNA, 596 bp, Homo sapiens
tttccgcatcatgtattcttggaacccttgtcaaagatcagttgactgtgtatgcatgggtttatttctgagctccctaatctgtttgattggtatacatatctttctttatgctggtaccataatgttttaattaccatagctttgtgatatgttttacaatcaggaattgtgatgcctccagctttgttctcctttcttaagattgctttggctactcaggatcttttgtggttttatatgaaatttagggttgtttttctatttctgtaaaaaggtaccattgggattttgatagggactgtattaaatctgtagatcactttgggtatgaacattttaacracattaagccttccaattcatgtacatgagatgtctttccacttatttgtgtttaatttctctcatcagtatcttctagctcagtgtacaggtttttaacctccttagttaagtttattgctaaatattttactatttttgatgctattgcaaatgggatttttaaaaattttcttttcagtttgttgtcagtgtatagaaacaccactgatttttgtatattggttttgtatcttgaagctttgctaaat

SEQ ID NO: 735606 - DNA, 557 bp, Homo sapiens
ttcacattcatctaaagtacttcctcagaaaactcctaaaagaaaaataacaatttcccactaatattacaaaaaaaagatactttttgtaagtaaattttcaattttagaagagttttaggtttacagaaaagctgctcagagagtacagtgggttcccttctaccctggagccagtttccttgtgttaagctcatatgggtgacacatttacaactgatgaaccaatgttgatgcattattattaactgaaatccaaacttwatttggatttcaagacttactctattaaaagaactttgcccactggaaacagagcactgtaactctggggaggtgggggaataaatatttaccttaacgggtatggattttgacctcaactgctcattttatctgaccatagcatttttctaccaattcaaaacatcacagggacagtagaccaaaggacagagcaccagtctggagaaacgtgttcatggagaagtatgtctcagccttaatcctgttctgccttagaaaaacgactcaacttttctttgatcctaagttct

SEQ ID NO: 735607 - DNA, 648 bp, Homo sapiens
cataaacaacaattaggaggaaggtggagaaagaaaaatagaaaatttgaggaagcacagtagaaaatagcattaattatttttagccctctttatggacgtaaatgtgagttttcttcaataacacggaatgtgttatgtgtttcttagtttgctaacaaaattatgtttagggaactaaagttgtaaatgttgtatgaagaaaaccaaataacactctgcaagaaaaaaaaactatattccctatattatccgaacatttttaaaactccaaaagttttcaagagcttccaaaaaactgtgtttttttctaactttcttccaattttcctcccacgcttcccattgctgtttaccttttggttgtgcacacttcattatattagaccttggttcatctgcccctcagggccatcgtgtgagttggaagggtctttggagcagaacatccctctcccaggtggaacagggagggtartccattctcagacccgttagtactgcccccttgtggctatttccttaataataatgtcatcactaaacttcatcctgagttgtctaagaaagagtcactgaacaccagttgtaagttgggactgggatgctgattttagaggagagggatagggagaggtttgttaaagg

SEQ ID NO: 735608 - DNA, 608 bp, Homo sapiens
tagtctcatcttaactaattacatttgcgacagtcctatttccagatcaggccacattctgagatgctgggggttaggatttcaacacaggaatttggaggaatacaactcaatcaggcttatggaaaattctggtcttaagtcaagggtagtgttctccagtctgtatatggaggcgcacacctatggtcccagccacttgggaggctgaggccagagaactgtgtgagcccaggagttccataccagcctgggcaacatagcaagacctcctctcaaaaacagacagagtggtgtcttccagagtgattagtttgcttaaaaaaaaaaaaacaaaacaaaacacaaaccgtaagcactggcrctcatgactgatcatcctgtatccacgcacgagctgcacgaaggccgcgcggtcactctggctccctgttggcgagtacctgggatttcttgctcagcattttggggccttaattcttttaggggactttttgtctaatgtctccccttcttctaattatgtgcgatatttacatagaatctgataaactgcttcaaatttgttttcagaacagtgagctggataattaaagaagctttttcct

SEQ ID NO: 735609 - DNA, 608 bp, Homo sapiens
tagtctcatcttaactaattacatttgcgacagtcctatttccagatcaggccacattctgagatgctgggggttaggatttcaacacaggaatttggaggaatacaactcaatcaggcttatggaaaattctggtcttaagtcaagggtagtgttctccagtctgtatatggaggcgcacacctatggtcccagccacttgggaggctgaggccagagaactgtgtgagcccaggagttccataccagcctgggcaacatagcaagacctcctctcaaaaacagacagagtggtgtcttccagagtgattagtttgcttaaaaaaaaaaaaacaaaacaaaacacaaaccgtaagcactggcgctcrtgactgatcatcctgtatccacgcacgagctgcacgaaggccgcgcggtcactctggctccctgttggcgagtacctgggatttcttgctcagcattttggggccttaattcttttaggggactttttgtctaatgtctccccttcttctaattatgtgcgatatttacatagaatctgataaactgcttcaaatttgttttcagaacagtgagctggataattaaagaagctttttcct

SEQ ID NO: 735610 - DNA, 467 bp, Homo sapiens
ggcacggtagccactgggaccatggtgtagccgcaggtggtctggagagagtgaggcaggggtggcagtgactgaagaccattaagtgtctttcatagaaagaatggcagaggagaccccagttccttcctgagtcccctctccttgggaaaaagtgttcctactctctgggtsagtgtctggtccgaatccttggcttggagatgattttacgggctctttctggagaacagaagtaaaaccttacagtgttccgatgagaccacagtaggcagtacttgggagggtcttatagaccctaccccatggaagtgggtctcaacattacacaaccccctcttgggcccgtggacagttgctgtcctctctgttttctctctttgtgcctgtgccaccctcagagaagaagaaaggagctgaggaggagaagccaaagaggaggaggcaggagaagcaggcagcctgcc

SEQ ID NO: 735611 - DNA, 464 bp, Homo sapiens
catgtgaaactcgaggagagcttgtccgttgccacaagctgtttttcgaatgtctctacacagtccaggcaggaaatagaagcactcacatcaggagctcagtgtcaggcaggcaaggctcctgcaggggagccccgccctgctcaggtggcctcatctcccctcccagctggtggtgctgccctatcagatgctgctgcatgcggccactcggcaggccgcgggcatccggctgcaggaccaggtggtgatcatcgacgaggcgcacaacctgatcgacaccatcacgggcatgcacagcgtggaggtcagcggctcccaggtgygtgggcctcccctccccgggccagggcctgctgtgacgtaaagggacttggatggttcctccagacacctgggccaagagttcctccggaggtggggcttgatagagggtgcacgagtcaaggcggtgacctcatcgg

SEQ ID NO: 735612 - DNA, 517 bp, Homo sapiens
aagaatagtagtgtgcgatggttggtatgataatggtattgcaattttgctttttttttaaaagagttcttggctgggcacagtggctcatgcctgtaatcccagcattttgggatgctaaggcgggaggctcatttgaggccaggagttcatgaccagcttagccaacatggcaaaaccccatttctactaaaaaaaaaaaaaaaaaaaaaaaatacaaaaaattagcctgatgtggtggcacacacctgtaatcccagctactcatgcagctgaagyaggagaatcacttgaacccaggaggcggacgttgcagtgaactgagattccgccactgcattccagcatggatgacagagcaagactctgtctcaaaaataaataaataaataaataaataaatcataagttcttatcactgggtatggtgtctcatgcctataatcccagcacatttgggaagcacaatttgggaagaattgaagtctttattaagtatttctacccatggatccat

SEQ ID NO: 735613 - DNA, 519 bp, Homo sapiens
cggggactggtgggggtggaagggctctgaacccctctcccattgacacaggtcttcagtaaccacctgggctgaaataactgaccctttgcacacccgcaccctaccctgctctcttcttctctccccttccctctgcaaccaaggctgaatcccayggtcagtctctcccccagagaacatgaaggaaaatagctggggacaacatgaacttgtcaggaacagggacctgggcggagtgtgagtgtgggctcaggtatgtgcatgcaccccatgtgtgtgcacgtgggggtgagcgtgcaagccatctgtggtacgtgtgtctgcatgcttctgggtccatgtggttggggttgtatgcacgtatatgtgtttaggggtgcttgtgcatgtgtgtgtgagtgtgcacgtatctgcattcattcctttgtgtgtgcatgtgtgtttgtgtgtgtgtatagtcagtcctccatgtccgtgggttctgcatccgtgaattcaaccaactgtagatgaaaa

SEQ ID NO: 735614 - DNA, 608 bp, Homo sapiens
ggatgattgcatctgtactgaacaaccttgtcatcattccctgggtaatgcgatatatcgactgtttacgtagcatttacactgtatgaggtagtataagtagtctagagatgagttaaggtattatataggggagaatgtgcataggttatatgcaaatattgcaccattttatatcaggaattgagcatccatggattttggtgtccagggcagtgactgtgtgtgtgtgtgccctcatccagctgtctccctgaggatgagcaatgcctttagctcccatttctccctgtaccctctcccctagctgccacccaggaagtcagggtgacactcttgggttactctagtcaagggtccgaaggaggggagccaggaaggcctcctcagcggcaagrgcccctgcagtccccagctcacgaacacgcctgcttccgctcagcaggagctgagtgtgggctgtccttctaggagtcttgctgtcctgcacagcccttcccactccagggctaagcaccatctagagaaggggaggagcagaggctttggcctcagaaggcccagttccagtcctggctttgctcctaggtaaccttgagctacctaac

SEQ ID NO: 735615 - DNA, 512 bp, Homo sapiens
aactggaccaagcagaataaataatttcaaagtttaagattgatcttttaaactaacacagacagaaatttaaaaatgagcaaaatcttcaagtaatataaaattatgtaaagtagccaaatgtatgaattattgacattcctgagagacaaggagaaaaagtaaacaacatggaaacatatttgaaggaatagttctagaaaatatccgtatttttgccagagagataaacatccagatacaagaaatccagagaacacttgctagatactttacaaaatgagcataacaaaggcatatggtyaccagactgtctgaggtcaatggtaaaaaaaaaaatcttaaagacagctagaaaaaaatggtcagatgacttttaaagggaaactctattaggctaacactggacttctcagcagaaaccttataagctgagagagattgggggcctatttttggcattcttaaagtaattccaaccatgaattttatattccatcaaactaagcttt

SEQ ID NO: 735616 - DNA, 532 bp, Homo sapiens
agacggagtcttgctctgtcacccagggtggagtgcagtgggacgatcccagctaactgcaatctccacctcctgagttcaagcgattctcctgcctcagcctcctgagtagctggactataggtgcctgccaccatgcccggctaatttttgtatttttagtagagwtggggtgagttctaagaatgccaccacaagactcacctaagcacatagctcacaaactctataaagcaaccacacagtagaaagtacaaagcaaccaactaacaacttcatgataggattcaaacctcatatatcaatattaactatgaatgtaaatggtctgaatgccccacttaaaagagatagaatggcaaattgaattttaaaaagacccatccatctgctgtcaagagaccgatttcaggttctgttccaagatggccaaataggaacagctcggtctgcagctcccagcgtgatcaatgcagaagacaggtgatttctgcatttcccactgagggacctggttcatctcactgggact

SEQ ID NO: 735617 - DNA, 567 bp, Homo sapiens
aacaaagctgaagtcatcacattacctggcttcaaactatactacaaggctgcaataaccataatagcctggtactggtgcaaaaacagaaacacagaccaatagacagaatagaggacccagaagtaagctacatgcctataactatctgatctttgacaaactgacaaaartaagcagtggataagggactccttgtttaataaatggtgcagagacaggtggctaggcatatgcagaagaataaaactggacacctacctctcaccatatataccaattaactcaagaaggattaaatatttaaacctaagacctcacctgttagaaccctaaaagaaaacctaggaaataccattgtggacatcaaccttctaaaagaatttatggctaagtacccaaaagcaattgcaacaaaaccaaaaattgacaagtaagacctaattaaactaaacagcttctgcacaccaaaataaactgtcaacagagtaaagccaacttacagaatgggaaaaaatattcacaaaccatgtatctgacaaaggtctaatatccagaatctgtaag

SEQ ID NO: 735618 - DNA, 648 bp, Homo sapiens
ttccccattccaccctccccagggacattggagtggacgtgacattggaactcctgtagaggctgccggctttggcaaggttgattgggacccacatgtcagcctgggccacttcctcatcaccgtaactctgcgccaaataacaagaccacgggaatctgctagcrcaggcctggggaatgctctccattactctcttttattctctcgggagatttatgtggcctatctcccttccctttgtccacctgcaaggccctataagtcatgtctcggggctgacaggtcacagggcctgtgctgctgctctgtcagagtgagtgatgctgaggggtgattaaaagagaggaagggtgagaggtcagcagcagacggcatgatgggagtttgggatgtaattatcactcctgtgacatactgcggggctgttctcccccttcttataatagatatacacacttaggtgcagcttagagagaggaggagggtagtgatgccgagaggtgcagaagacctgctggaatgggctttgtgtactgggcctcacaggtgaagttagagcaccaagggacccagcagcatctgtggcctcactggagagcagcaccctccattcaatgagatgttccccaaagccctctgcacaaa

SEQ ID NO: 735619 - DNA, 607 bp, Homo sapiens
cagtaatggattcttcttatctgtgatccctagacccattcctccctctgctctttgcctcctgctagggtccaggggtaggatctctttctggagtagatgcacctgtaccaaatagaattcctgcctaggggtgtaccaaggataggttggggggtaatgccccaccctgactgcaggcatttagaacttagagtaacaaaatattttttcagggaggagaattttatcactgtcatggtttagaattactagcaaatggtaataataaaaagaagactgactttcagttggtattataatttttttaagktccttaaggcaatggatccccttattgccagttcctggggcagactgcactcactgtcccacccttggggcaccactgttcctagttcttcctcatgaccgtatgagctttgaaaagagagaattgggaagaggtaaaatctgaaaatggcaggagtccaaggcaagaactacagtaagggttgtgggggcccctgttctatgcagggcttttgcaggcattgttgcttttaatcctcaaggagaccctgcctgcattttaaccaaggaagacaggaaggctctcctgggtggg

SEQ ID NO: 735620 - DNA, 607 bp, Homo sapiens
cagtaatggattcttcttatctgtgatccctagacccattcctccctctgctctttgcctcctgctagggtccaggggtaggatctctttctggagtagatgcacctgtaccaaatagaattcctgcctaggggtgtaccaaggataggttggggggtaatgccccaccctgactgcaggcatttagaacttagagtaacaaaatattttttcagggaggagaattttatcactgtcatggtttagaattactagcaaatggtaataataaaaagaagactgactttcagttggtattataatttttttaaggtccttaaggcaatggatccccttattgccagttcctggggcagactgcactcactgtcccacccttggggcaccactgttcctagttcttcctcatgaccrtatgagctttgaaaagagagaattgggaagaggtaaaatctgaaaatggcaggagtccaaggcaagaactacagtaagggttgtgggggcccctgttctatgcagggcttttgcaggcattgttgcttttaatcctcaaggagaccctgcctgcattttaaccaaggaagacaggaaggctctcctgggtggg

SEQ ID NO: 735621 - DNA, 615 bp, Homo sapiens
ggagcaaagtcgcatcctacatggtggcaggcaagagagcgtgtgcaggggagctcccctttataaaaccatcagatcttgtgagacttactcactatcatgagaacagcatgggaaagacatgcctccatgaatcaattacctcccaccacgtccctcccacaacatgtgatctacaatgcaagatgagatttgggtggggacatagccaaaccatataaaatactaactcttttaattcttccaataatcctatgaggtggctactattatcatccccatttaatagagggggacccaggactcataaaggttaatgactcatgcagtgtcacacagttagaaagtggcaagaccaagattcaaacccaagtacacctgcctcccagacatgtgctaaacaatctacacagggctgtgctcagtaaatgtcrgctgttataattttacccagtttccctgaataaacaccaggggttgctctatctctccacttttcttccacgggaattatactagggacccctttgcataagtaatcacaggagaattaaaaacagaaaagttggctgggcacggtggctcatgcctgtcatcccagcactttgggaggtt

SEQ ID NO: 735622 - DNA, 615 bp, Homo sapiens
ggagcaaagtcgcatcctacatggtggcaggcaagagagcgtgtgcaggggagctcccctttataaaaccatcagatcttgtgagacttactcactatcatgagaacagcatgggaaagacatgcctccatgaatcaattacctcccaccacgtccctcccacaacatgtgatctacaatgcaagatgagatttgggtggggacatagccaaaccatataaaatactaactcttttaattcttccaataatcctatgaggtggctactattatcatccccatttaatagagggggacccaggactcataaaggttaatgactcatgcagtgtcacacagttagaaagtggcaagaccaagattcaaacccaagtacacctgcctcccagacatgtgctaaacaatctacacagggctgtgctcagtaaatgtcggctgttataattttacccagtttscctgaataaacaccaggggttgctctatctctccacttttcttccacgggaattatactagggacccctttgcataagtaatcacaggagaattaaaaacagaaaagttggctgggcacggtggctcatgcctgtcatcccagcactttgggaggtt

SEQ ID NO: 735623 - DNA, 628 bp, Homo sapiens
gaatgtccctcaattcgggtttgtctgatttttttttcttataattagactgggttatgagatttggaaggaaagtaccataaagtgccattctcatcatatatcattccacatactatcaacatgatttagcacatagtcttgatcacctggctgaattactgtttgccaggtttctcccctgtaaaatcactcattttcccctttacagatgttgtacttttgggaaggaagtcactatgcacagcccacatttaaggaggyggaagttatgctgcaggatggctgtctacataagttatttgagattcttctgtgggggatttatctcttcttcctcattcgttaatttattcaatcacttatatcggcatgggctcatgaatatttcttttgtactttgagttataatccaatatcacttgttttattgctcaaggcaatttgaaatgttctgagtaactcagtgcaaaacaacctcttccaaaggttgtaccagctcacagggtagacgtcattaagatccatttcccctcaacttcacagacccattaaaaaggtcagaaagcaagagataagctgacatccctgcctagcgcccaatttctggaagcccctaaggaagatg

SEQ ID NO: 735624 - DNA, 594 bp, Homo sapiens
gagtctggataacttaagtggatgggaattcttatgaaattcttactcttttcaaattgaggagaactcattcacccatttgggctattatcctggcccctcacttcagagttctttcaatatgtagatgctaaagggttgtagctgtgaaggaataatgggcggagtggtggcacacacggcattgaggaaagttctttaaaatcttctagttatttaggagttctaaattccccttgacttgtctcgattcatttgtagttacaaacagaagtgctttgtattttttccccctgaatccattctgtggggaaagggggtgattcttactctttgactgaatgttgtgttcagcctctcttcaagaggagagtggaactaaaatctcccttaattgttaggcacacctttaaaaaggrctggcattagagtgtaaggagataatagtatatgatttggatattatactgtcttgatgagttgattctgtcaataattttctactttattttttccctgcatttttaaaagaaatactttcaagaatcttcttggttaccctttcataaatctacttggatgtgccactgttta

SEQ ID NO: 735625 - DNA, 619 bp, Homo sapiens
gaagttacttaaccctgtaaagtggcaataataacgcctattgcaaagaattgttctgagtcttgaacacataggaagagtactcagcataaagctagtacatagcttgttgctgcaattaagttatgaataacaacagtgcataaggagtaaagtaataaggcaggtctctctgagttttatggttctaaaacaaagtgttaggtaacacrtgttctgtaaatggcatctatagtaggatggtgctggctgtcaccttcagccacatttgttagcctctgtagctgtcagcaccttccagatgctttaaacaggctttgattatagttagtctttgtgattcttgaagtttgattcattgcttaaatatagttattctaggccagcctgacagagaatatgataataagactgagacattttgctagcctttacctttggtctcattttatggatgaaataagtggagtcatagatgcctgtaagtcagaaggagcaagtgcttaatgtcttttattttagttcagagtccagttctaaagactggattacaaatcatttcattccttaatctcttgcaccaagtcttagatgaaagataaaaaaaatatatatacca

SEQ ID NO: 735626 - DNA, 587 bp, Homo sapiens
tctctggactagattaaatgcattgtggagcagtgttcaatagaatattagaaggtcatttaaaagaagtaaaatacatctatatgttgataaggaaagatacaagcaaggtgcagaacagtgtctgtgtagtgtgatcccatytgtgagcatttttaaaaggacatatgtgctgtgttatttgcgaattcttttcagcaaataaatatgaaaaaatcgttaacagtgattacttctagggagatgactgggtctcacggaagggacatttttcattttaaacctttctatagcatttgaatttattactacctataatgttacttttgttttagaaaaataattaggtttccctgttgctttccatcatgaaatccagttggtttccttctttgtgtgtattttaatttgtaagcagtacctttctttgtgtttattagcctccaccagactggtgccccatgaagacagggaccatgtctattttatttgctgttgttactggcatggtacctttcacatagtgggtgttccatcagtatccttgaacaaatgaatgaaagaatgaatgaacaagcagacagatg

SEQ ID NO: 735627 - DNA, 502 bp, Homo sapiens
ttggaatcaccaggttttcggggctcctgaaggatagccccgacctggcctcacctggcccctggccccagtgcccctggtgatatccaggtgctgggctgtgatcaccgcctcccaccagcccacctccaccagcccttcccagaaccctgcyccaggtgttggaactgtgcacagaggagggagcaggccccgagggaggcctggaggggctgccaatggtgaaggctgctgtgtcgagctgtttccttccgggacccactccctctgggctgcgtccccggctggtccaagccctgatccctgggatctggggacatcttcccgtttgctgttccctgagaaccaggcctccctctggagaggatcacaagcttgggtttcactctgggcttgctcttgggaaccccccaggggcatggctctgaccgagatgttttcctccagcctgttgcccagtccccattcctcggaccctcagcttcacctccagtgtcatcgg

SEQ ID NO: 735628 - DNA, 635 bp, Homo sapiens
ttcctcccaggcaaggatcattttttttaaataacttttttaactttagacattctgtactctttggattactctgcaataagcaaatatgacttctgtaacataaaaagaaagatcaaaatgttatatataactgcatgaaaagaactagaaagaaaatactaggtgacaggatggcaagtgatttttatttttttcttaatattttactccttcccccagtcctctgcaatgagtatgtaccagttttataactagaaaaaaattttagccaaaaakaaaaataatgcatgtttgctatataaaattcactactgtagtatatatatatatacatacatacatatttggtctttgtccccagttcctggcactgagctcctaaaccccttggaacttcctaagcaatgggagtaccttttgttatttataagaagccccttttggccatcccagagtttatgctaacgaggtgactgaaggtgagcacggaggcagtttcaaggaaggagctggccacgcttagaattgtggagttttcagccccgcccttagacctccaaggacaagagggggaccgcagattgatccaatcagcattggtcagtgatttgatcagtcatacccacgtaatg

SEQ ID NO: 735629 - DNA, 644 bp, Homo sapiens
tttgaattttaattttttgatggaggtaacggtgactataattctgttacaagaatgtagaaagtcacgcctgtaatcccagcactttgggaggctgaggtgggtgaggtgggcagatcacaaggtcaggagattgagaccatcctggctaacacagtgaaaccccaaatataaaaacattagctgggcgtggtggcgggtgcctgtagtcccagctactcgggaggctgaggcaggagaatggygtgaacccgggaggcggagcttgcagtgagccaagattgcgccactgcactccagcctgggcaacagagtgagactccgtcaaaaaaaaaaaaaaaagaatgtggaaagtaaaatgtgaaagttcccctccttgtctatgccccttattgactttgatatagattctttatagtttggtatatattcttccagacccttttctgtgtatatacttacacaaatatattttttctgacataaatggaatcatgcagaacatattgttcaacaacttgattttaaagggatgatttacttcactattttttcaggcttaattttatggctatatcagaactgatttggttattttatagctggctgaagctgtaatttgtgaaatcattggggagtagtga

SEQ ID NO: 735630 - DNA, 546 bp, Homo sapiens
atttgttgcccaacgtcattagttctctgtatatacttttaaatatcttaaacatgtaatattcataagtaatttcacaagtagtttaagatttgagtctttaacctaaatagatacaggattttgtgatatgctgtaatatacagatttttatttmtatatggataaaaatttatatgttttttctgacatcatttattgaatagtataatttttctactgacttttagtatcatatcttttattacaagtccaatgtattcagcatatctatggatctatttcttggtgcttccattttttcccattgtttaacggtgtatcactgagccaaagcaaaccattttaattattataattaaaacacatttaaatattgataggctattattgttcaaaataactttggttctttctttccattgattattttaatatgacttttccaatcaagttctaaaaaaatactggtggtatatttattgaaataactttaatgaaattaaatgaaagatcatgtatttgttttctgaattaattcttaga

SEQ ID NO: 735631 - DNA, 645 bp, Homo sapiens
atatttattgaaataactttaatgaaattaaatgaaagatcatgtatttgttttctgaattaattcttagatacattaatgttttatgttaccatgaatgtgatattataatataatatttttaattggttgctactgtttataagaatttcattttctstttactttgccttcatatctgaaaaccttgctgatttgattagtgcatccacaaattttcttggattttctatgggtaattacaaatctccacacaatgaggttgcagtgagccaagatcacaccactgtactccagcctgggcgacagagtgagacaccatctcacaaaaacacataaacaaacaaacagaaactccacacaatgacaacgtatgtgctttctttttttcttcctctttctataatatttctttgtcctatcttaactgaactggccagaaaccccaggacaatgataaatacgagcagtgtcaacagacatctcattccctttcctagcttttataaaaataacgattatgcttcaacattacatatggtggtgtcgatggttttgttatagataagcttatcaggttaagaaatttgtctgcgtttcctagtttggtataaagattttaatataaatgaatgttgtatttta

SEQ ID NO: 735632 - DNA, 645 bp, Homo sapiens
atatttattgaaataactttaatgaaattaaatgaaagatcatgtatttgttttctgaattaattcttagatacattaatgttttatgttaccatgaatgtgatattataatataatatttttaattggttgctactgtttataagaatttcattttctgtttactttgccttcatatctgaaaaccttgctgatttgattagtgcatccacaaattttcttggattttctatgggtaattacaaatctccacacaatgaggttgcagtgagccaagatcacaccactgtactccagcctgggcgacagagtgagacaccatctcacaaaaacacataaacaaacaaacagaaactccacacaatgacaacgtatgtgytttctttttttcttcctctttctataatatttctttgtcctatcttaactgaactggccagaaaccccaggacaatgataaatacgagcagtgtcaacagacatctcattccctttcctagcttttataaaaataacgattatgcttcaacattacatatggtggtgtcgatggttttgttatagataagcttatcaggttaagaaatttgtctgcgtttcctagtttggtataaagattttaatataaatgaatgttgtatttta

SEQ ID NO: 735633 - DNA, 648 bp, Homo sapiens; identical to SEQ ID NO: 735064

SEQ ID NO: 735634 - DNA, 635 bp, Homo sapiens
cgtggaatgcctacagtgtgggtattctggataaagggatgattcacatgctgggatgtgagggcaaagcaggaaggtgccagatttaatcctgctactcagaatgctgcacaatttaaaacttatgaattatttatttctaggattttttacctaataattttggaccgtggttgacagttggtaaatgaaatcatggaaaatgaaactgtggataaggaggcctatgttagttccatcctgtcttagatttctgtagatgtgtgacaaccaccacaaacaagatacagactgttctatcaccacaaacgtctccctgttgctacctccttatagttgtacccactgcctttcccataccacccctaacccctcataaccagcaacgtttcccatcyatataattttgtcatttaaaaaatgttatatgaatgggaccatacaaaatgaccttttagattggcttttttcgcttaacataatgcctctgacatccatcccagtttttaaatgtatcgatagtcagtgccttttcattaccaagtattattgcatggtatggatgtacaagagtatcacagtttatttagctattcccctattgagggacattttggttgtttccagtgtttggc

SEQ ID NO: 735635 - DNA, 647 bp, Homo sapiens
gccaggagcacgacttgatcttccggggcaatgccctccagtgaggctacatgagccttgatctgggcgaccatttcctggccagtcacctcaagggtgtgtagctcctgggcgcggacaaagagctgcatattggtgactgaaccgcggtcccagctgccactactgcgaagatggagtcgagaaagaggaagaagcgagggcgcgtccgtacagaccgcgggctgcatgtcacgtcactgctcagtcatatttatacctacttttaattacatgtggactaagaggtggtttatggagaaatttccaggtaaaaggcagtaactttggggttgtcakgtcattgccatagaaaaaggcagtaactcccgggtattgccgtggcaatggtaaactgacatggcacactggtggttatgtcttatggaaagctgcttcaaccccattccagttttagctagtcctcaacttggtccagtgtctaagccctgccctacatgttgagtctcaactcccacctcaagggcaccacagcagagagcagagagctgcagccaaaaccccaggtttcatgggactggctcattcatgctgggcagatggtcccccgacaggtctcccctaaagtgctccaagtccttctcaat

SEQ ID NO: 735636 - DNA, 596 bp, Homo sapiens
ttgtgcaatctaaaaagccgatggtctgaggggtgcagggccagatcccagaaggggcacaacttctgtgaaattgcttctcagttcccctgtttttaaaagaggaggtggcatctaacataaaagaatgcatgayttggccaggtgcagtggctcacacctgtaatctcagcactttgggaggccaaggcgggtggatcacctgaggtcagaagttcaagaccagcctggacaatgaggtgacacctcgtctctactaagaatacaaaaattagctgggcgtggtggcatgcacgcacctgtagccccagctactcagggggttgaggcaggaggattgcttgagcctgggaggtggaggtttcagcaagctgagactgcactactgcactccagcctgggcaacagagtgagcgagagcgagagggagaagcagaagcagaagaagaagaaaaggaaagaagaaagaagaagaagagaagagaatgcattactttactcattgtggaatctcaggtatctgctggagtaaggaggggcaggaagagggatcctcttcctcagtgtctcagctcagacagtggaagctgcctggg

SEQ ID NO: 735637 - DNA, 626 bp, Homo sapiens
ccccaccttgtagtcctcacctcgcagtccttggcttccggctgcgtcacccagggctctgcatctattgtcactgacatttttctccctttgtgtctctgtcataaggacacattggattacctaccccagcatgacttcatcttaactaattacatcttcatgatcctgtttccaaatagtcacactgaggtgctggggttaggacttcaacatatgtttttgggggacgtaggtcaacccacagcacattcttttctcaaagtgacctgatgtttatgcctgcgcttcttcctttactctctttcaactcaattcctcttctcccacttttcaggaaagaggcgatcttagctcaggccactscaacaaaataccttggactgggtggcttaaaaagcaaacatttgcttctcacagttctagaggctggaagtccaagattaaggtgccagcagattcggcgtactcacatggtagggagaggaagcaagctgtctcgggactcttatgatgacacgatactaccccacctcctcatacctgcacattaggggacagggtttccatatgggaatttgggggagacattccatctgtgacagagacctatttctcacccatcc

SEQ ID NO: 735638 - DNA, 680 bp, Homo sapiens
agaaaaggaaccctcacactggatcctgggacaccccaatatgaggtcagggagatgacaaggaacttcatgggtggaatgtcaggaaattttcattaagtcagagatttgctacttttcaatcccacatcttgccagctcccagaagtggtattgtgaaagaatgagattttatattgtgtttaatgtctaatcagttaaagtcatttacctattttatttgcaaaataatttttggcaaagaggaacatttttacatatcttcctagcaataagaatgtgttcaatgtttacaattgtttggttacttatgaccccagatgtgagattatagtaagtgattatcacaacgttgttgagacaaatcagcctcctaagacaaagacactttacattaattgaacaaaacacaatcttctgaaatagtctaacaaatgtaatgtctcaaatttaacacctgcggtctgaaggttttatgtcacagtccttgcaattattaaaacaaacctttcgatattacagaaaatctctttgtcctacttsgtatgtacacatggggaaagaaacccctctgttttatgaagacaggtaaaaagtaaatatagattcaatttaaattttgtgataactgtggatattcactagcctttcctatctatctaaacaaagggaagccaagt

SEQ ID NO: 735639 - DNA, 552 bp, Homo sapiens
tgatataactatttgcctatgggcaggaaagatctgcccaagtaggtcttgtggattgagtgacagaaggaattagaaaaaataatttaaaaagtaacattactactttttggtattatagtagaagagaagaatgagtgctttttactttatatttttacctgaggaactttaggagtaggagtggttttctaaatatgtataaaactgtctttactgtagggaaagtcaggaggagtttgtaaatatttgtgttgctttctctgttgtktgtctctaaatttgcctagattaacttcacatcggagtaactgccagataggatgcttcttcatctttgttttagaataaggaaatcttttgagtaataataataatagcacaagataaaatttatttttttaatgttttatttttaatggggtacatagtagatgtatatagttataggttccatgagatattttgatacaggcttacaatgcataataatcacatcagggtgaatgggtatctgtcccctcaagtatttaccttttgtgttacaaataa

SEQ ID NO: 735640 - DNA, 471 bp, Homo sapiens
tttacttggcagacacactgacttgggggttggtctttgtgcctggtttagcatcagtgcaacaccttttgttgatggatggagggaggaagtatgctaaaacaagacagtgatgcgtgtagaaaagcttgtgtctcattcaaagagtaatgagacatctagaggggaaaggagaggtcagaagcagggtttctgctaaagagaaaaagggctgtwtctccagggctgaattcacatcatctttggaacaagtgtcaatgttaggatatatgacacttctttctttgggagctgaataggagcctagacatgctgggtctttaaggacacgtttagaggcttctaggttcaccttcaataccagttccagttgccagttcactattccttggaccttaaggtgaacgccactgaagagtaggcatatttacattggaagactgtatgactctccactctttgccctgaagt

SEQ ID NO: 735641 - DNA, 557 bp, Homo sapiens
ttttctttgtattttcttattgtcattcatgctgactattagaatagtaacagccacttttaaagtagcaaagtcctgattcagaagtgaaattctataaagctcttcaaatagttcacatggtttgaaaaaattaagccagctcaatggagtggaagtgttactccctcmctccctatggtttctgaaaaaccattagcaacacatgtctcctttgaagcatttatgctaacattattttctttggtttgtttcccagtcctgctgcctttcttacaaataacactcgcaaagataaacttaactgcacataatgaggagaaaggttgtctggttcctttgtggcgttacagttgccaaatgcctaagaggatgagcagcaattgcacactcagccagtgggtcagagagacaaaaccgtggtgtcagtactgaccctcacagaagcatcatacccggaagatgcacatttgaaatgctatatggtggtgtttctgtgaatacatttttggaaagccgaatttaaaatgtgtatatatgtacctatacttcaatac

SEQ ID NO: 735642 - DNA, 541 bp, Homo sapiens
tactgtcattgacatgaggatgcaattataataatcatatgatgcactagacatttcttcagacaagataagctttgaaagtcacagagttgcctctctcaaaagaaggtagcaagaatagatgaagaacgattttatggtgaatttacgttgacttgagtaacaccaacctctgttctacctactctaatttttctacccaaaatatgtataataatgacatggtagtaatgcaattgctggatgagggaaaaaaacagtcaatgaggaataaaaatgaaagaaaaattgaaaaggagtaaaaggaataaaagtattttttgtattcaactacattgtatttcatttgaataaatatcactaattaarcaataaaacaaattatgtaaatatcacttcaaaaatattcccttccaggtacatttatctcatttaaacctaacaataatctcaattgtttctttagttttcagaaagatgaggaaatgtgcagagattagttaatgacttggccaaagtctccttgttaatgaagagacta

SEQ ID NO: 735643 - DNA, 637 bp, Homo sapiens
gaggaatttctaggtgtatatattatgaacaattggtccagtataagaaaacagtaacattttacatacgtaatgttttccagaaatttcccaactctttctaatatgtacaattcccaaaataaatgcagagctagtagctgttctgaggaatcttcaagcaaatttttcaatactagctttgttattaatcatcccaattttgttcatgttgtattacattggggaaaaatagttgtacaatgaacaagtatactactaaacaaaatgctcatctttttcttaagagtcaaaacggaaggctaataaagaccatttaaaataaaagggcccattactcctcagttttatatgagcttacatgctttcattgkgcagagtgtgttattaatttaacatgccagattcataggtttctgcaatatcaggtttgatgtattcattatcggcactcagtacattaattcacgctgaagtccggtaaatcaaaattataccatctggcttcctgttcttaatgatgaatttgatgtaggggtgattaagattgttaggcttttgaattttaatgtaaaaattaggggattaaaaaggcatttagaaatgaccaatagttagaataaacttactgacagga

SEQ ID NO: 735644 - DNA, 511 bp, Homo sapiens
cctcataaaatgagttagggaggattccctctttttctattgattggaatagtttcagaaggaatggtaacagctcctccttgtacctctggtagaattcggctatgaatccatctggtcctggaccttttttggttggtaggctattaattactgcctcaatttcagagcctgttgttggtctatttagggattcaacttcttcctggttcagtcttggrtgggtgtatgtgtccaggaatttatccattccttctagattttctagtttattttcattatttcctgtatctattatttatttcattttcttgttcattacttttatttattttattttgtagagatgggggtctcagtattccacctaggctgctctcaaactcctggcctcaagtgatcttcctgctgctacctcccaaaatgctaggattacaagctctacttaattttcttcaagatagaagcatgtccatgcatcaaggatccaatgagcagcatgaagatctct

SEQ ID NO: 735645 - DNA, 511 bp, Homo sapiens
cctcataaaatgagttagggaggattccctctttttctattgattggaatagtttcagaaggaatggtaacagctcctccttgtacctctggtagaattcggctatgaatccatctggtcctggaccttttttggttggtaggctattaattactgcctcaatttcagagcctgttgttggtctatttagggattcaacttcttcctggttcagtcttggaygggtgtatgtgtccaggaatttatccattccttctagattttctagtttattttcattatttcctgtatctattatttatttcattttcttgttcattacttttatttattttattttgtagagatgggggtctcagtattccacctaggctgctctcaaactcctggcctcaagtgatcttcctgctgctacctcccaaaatgctaggattacaagctctacttaattttcttcaagatagaagcatgtccatgcatcaaggatccaatgagcagcatgaagatctct

SEQ ID NO: 735646 - DNA, 642 bp, Homo sapiens
taaaaaatctaaaaatgtattgcctcaagattaacattaactgaacttgaaaaaaactaataaaaacattcatgaaaaatgtttccgttcactgatttgcattttcagacaaaaagctgctgaaggatgaatatgcctatactgctgtgtttagtgagacctagactttccagtaggaatgtactcacatatgtgtcactaaagtcagtacaaatacagactgtgtggtaaaaattaagcagctaaaccttgcagacacttggagagttagggcaaacacattgtaaatagatttcttcttttaacatgttctaacttttctctccctgttacctaggctgccaggggtgggtgggcaaatatcttttagcttctgaaaactcctttgtttgaaagcagagagaatagtggtttggcctggtataattgttttgttggytggcacagagttttaattattctgtgatacatcacaagatatattgatcacacagtaactacattgttcttcctctggggtcctttcttgtctactctagtttttgcttaggactggatgtttcagcttctctatgaatcttttatctgccctttgtgtgtctttttcttgttaatgtttttcttaatagattctaacagtga

SEQ ID NO: 735647 - DNA, 658 bp, Homo sapiens
agtaaacatattttctgttttatttgttaagccataatgtgatagaaatgtcatcctgtatgcatatccacacacatataccaagaaaagaagtgaaaacagtaataaaagcaaaccaaagaaatcagactaatcacaatcattcacatcaagaaacagagaccaactcttctaattccacttgcttactgcaccagccagatggaaagttgcttttaaattatgccagatttttcaaaccatcataacaaaatgtagttatcatttttgcatgcttttcatactgaagtaaaagaaacatcttagagtttattcttaatataaccaaattcttaatattttcatttattcagtgaactggaaagtaactctttaataatgaaaacattgatgtctttggatattttgtctaaagaatatgctcatatactttaatattgcatgtatacaattatctrttattattataagattgtaatttgatcttgattacagaacatttcattcttaatacaatatgctatttggtaatttttctacaagccaaagaaaacagattatttaaaattcacataaatttgaaatgtgcttatattttagatgtgatgtggttagcactggtattttttctaagttccatggatgttaacaatacttc

SEQ ID NO: 735648 - DNA, 603 bp, Homo sapiens
gaagcatttcagaggtaatgtataagtcttagaaaaatgtatgattggcatacatttggaaaggaaatggcaataataaaattacaaacatccacattttagtatcaaaacacttccatctacatagaagcctgaataaatttttcttctttcttagagagtagttatggatgtatgaatgcaggatgaaataatggatgtgtgaatggatggatacatagatgtttggatggatgaatagatggacaggtagataaatggatgaattggtggatagatggatggttggagtgctgactatttcattataaaaaataaataaaattgaatattgaaaatgccccagcttacaaaggatattttcctcccctttgaactctaaaaatatactyattttcacgaccacatatttaatatttaccatatattaaatcaaagacattgtttttaaacagtattgataattgagaatgtctttttcttcatctatactaaaaatttggaaaggaaaaactacctgccttatttccatgttatactcccctacatgaagctacatttcatcgtagaaaaggattttgaagccatcagtagattcagatt

SEQ ID NO: 735649 - DNA, 498 bp, Homo sapiens
cctaatccatcatcatttgtgagttattatgttatttgagacaaatgttttaagttgaacagatggttgtctgttcaatctagtctgtgagctataaattttatttttctcactagagatttccctgaacatttagtgattttaagttatttttaagatttagrcaaaaaataattttatagaagaattgcaaattttggcatagactctaatgtcttttttatagcaaaaaaaaaatctacattttaggcaaaggattcagagtgattaaacctaagaacatttaacacaatgccaatcatatttggtaacatggtggaaatagtataatctttcatattgaaccaatgaaaacaggtgcagaagatattcagtcttgcatttagaacttcaaatgacttaaaatgccctcctgagaagcatactttaagataatgttagttagggggataatgtcaaattggtggccaactttttattcatctggtcaacaattct

SEQ ID NO: 735650 - DNA, 498 bp, Homo sapiens
cctaatccatcatcatttgtgagttattatgttatttgagacaaatgttttaagttgaacagatggttgtctgttcaatctagtctgtgagctataaattttatttttctcactagagatttccctgaacatttagtgattttaagttatttttaagatttagacaaaaaataattttatagaagaattgcaaattttggcatagactmtaatgtcttttttatagcaaaaaaaaaatctacattttaggcaaaggattcagagtgattaaacctaagaacatttaacacaatgccaatcatatttggtaacatggtggaaatagtataatctttcatattgaaccaatgaaaacaggtgcagaagatattcagtcttgcatttagaacttcaaatgacttaaaatgccctcctgagaagcatactttaagataatgttagttagggggataatgtcaaattggtggccaactttttattcatctggtcaacaattct

SEQ ID NO: 735651 - DNA, 383 bp, Homo sapiens
attaaatgttagtacatatttgaaatcactggacagcttttatataaagttgaataacaaataatgctttgttttgacttacatgcaattttaaaagctttcatttagaagagctactgttactaagggacagtctcaataattattaaaatgtgctaaagtatatcttcaaatattttaataagcattgcagctaataacctctattatcacctgycatgtgtcccaaccaaaatttactgatgaaggaatgagcacagagtatgtttagctaacgaggtggtggcagtgacttagtagctgaacaaatgctcaacttctcaacagatcctcatccagaaatgtatctcacatccgggggtccatcacaaggccgatttcct

SEQ ID NO: 735652 - DNA, 636 bp, Homo sapiens
agcatgcttatctatctttcaaggctctggtctcaatgaattgcagcagccttcacccctaaaccttctgaaacatgggccccatcaatgactcttttcttcctttcttatcccaacactaatccgtccacttgtcttttccatctaactctcaacagcctcttcagtctttacacatttctccatctctacgttcattcaagcctgggatattttaatattcctaaaattgtttcctctccattattacccactgtatcaaattccttctctattacatttaaccaaaaataattttataaacaaattcaatcacatcacctccctaattaaaatattccacccacttcctattccaggaagacaaacttcaacacgacttttaaggcaccccttattttagaaagcacctcgggtgccggcgcckctccatgtctcttccattttacagacaaagaccattcagaggtaattttaggtcaaagcatgctgttcttttcttaagtacagggcctgacaggtcaaggtaagaatattgactttcattcccagtgagaggaaaagctaaggagcgtttctagctgagtaagtggcacacttccattttgcatggtcactcttgtgagtggtctagaa

SEQ ID NO: 735653 - DNA, 627 bp, Homo sapiens
cctggagcctcagctgttgcctgttcacctgtttccttttcagaccaaatcatggaaaggaccaggttatctctgatccatttggggtgtgtaaatatcaagaaggataaggtacctttcctggacttgagaacttatagcctaataagagaagacaggaataaaaaaagaaaagttttagttgctatgagactggcatataaaagtacagggacaggacaaagaaaaaaatggaaaattatcagaaatgggtataaagatggcttcatagaggaggtaaactgtgtctgagaaattagaaaatgcccagaaagacatcaaagagaaggataggctgaaaggtggaaggcataaatgctgttaaaaaaggcaaagagtcatgaaatagacaatgaatttctagaaactagaaaactggacacaatgggacagggcatggaatacaattaagtgacctctgatttaatgttcaagctagtatcaaagkagatgctgtgaattctaatcttgaaatagcacacataaaccagagctccccaggcaaattgtgacatatggtctccctaggcataaagttaatggtatagtcagaaggttaataacgtaggaaatgaattgaaatggctg

SEQ ID NO: 735654 - DNA, 422 bp, Homo sapiens
atgtcaaccttgctgtgttgagtgattcgttgaagggaacttgttccatcactgcctttgttcttttctctttatggaatctgccatagaaacagcctttcattagaaccactgtgtttctcagatttggttaaaaagcatctgtaggatgaactggcaaatcgggaggcttgaatttccaggctccatcgagatagttttcctgcggagttttgaawattcacttgttttcagtgtcctcatgcctgcatctgagaaacagagacactagtgtgtggcaccgaccaccacaaaggggcctggtggtgagtgctgggctgggattagcaaattgctccgaatgtctcaggcacaaagtggtacttaaatagccattccaggattaggataactgttctgagcccttctctcgactccattag

SEQ ID NO: 735655 - DNA, 581 bp, Homo sapiens
ccaaaaggaacctgctacaagatacaatgctttggaaactcgggaggaggagagaaaactgcatcggagggaatcaagggacgatctgcagggaggtgcctttaagttggctgtaaggggcactccagagtacagggagaagagacgcgggagggttcccaggcggagagtacsgctgatgacaacgctgcccgacagtgcggaaagcatgaggtcagctcggaccctcggctaccaagtggacccagaagggccgagcaaggctccgccagggtgtttaaagggtctggaaagcaccgaggagcaatggacggctctgagcgggaggacccttgcagtgagtgatctggaaaggaaggaagcctggagaccgcaagatcaattcggcaactcctgcgggaaggcccaggcccggaagtgatggagaccctcagggatgcgcagcgagcaggggcagcagtggttgggactggagtgaccacacccacaagaggggaaggtcggaccccagccaggcctcatctaagaaccatgcaggcaggagcgcatttcatccccatagttatcccgtgaggtcacta

SEQ ID NO: 735656 - DNA, 621 bp, Homo sapiens
aagaagccaatctgaaaggtcacatgctgtatgattccaattatatgacattctgaaaaagacaaatctatgaaaacagtaataagattaggggttgccaaggaatagtggggagggatgactaggcagaaaatttttaggggagtcaaactattctgtatgatggtggacacgtcatcatacatttggggaaagccacagaatgtacaacacgaagactgagctctaatgtcaactacagactttgggtgataatgatgtatcaatgtagatcaattgtaacaaatgtaccactgtggaggaggatgtcaataatcggggaggctgtacatgtgtggggacaaggaacattttgtactttctactcaattttgctgtaaacctaaaactggtctagtaaatcaagtaacattaattttttttaaraaaacctccctctatgatttttctctcaatatagttttgcccatttttgctttatatattttaggatcacattaataaggccatatgaatttagaatttttataccttcctgatgaattaaaacttttaccatttttaaccctctttattttggtaatcctttttgccttaaattctattttgtctcatattaat

SEQ ID NO: 735657 - DNA, 583 bp, Homo sapiens
atgcctccgccagagtagctggccaagatgcacccacacaggactgcgagcgtcttagactgctctctgagttggaatttagggcctgaattagtcaagcatcaaatgaagaaataatgagatgcaaactctccacatactatcttcacagctttaaaataaaacaaaatgtaatggcctttaaaaggaaatgtaggttagacaggattgcaagttaactacagttattttataacattaaagtaataaaaggtattttttgacctggttttacaaaggctatttcttcacacacatacacacacacactckaatacctacccatctccacacacatcccctcatatatacacactcacacacactcacacgcacacccactcacactcacacacatccacacacgcatacatacacccactcacacaccccacacacatgctcacgcccacacacatgcacactcacgcacacacccacatacacacacgcactcacacatgcacacacgcatacatacacccactcacacaccccacacacatgctcacgcccacacatgcacactcacgtgcacacaccc

SEQ ID NO: 735658 - DNA, 611 bp, Homo sapiens
tggcacgatctcagcccactgcaacctccgcctcctgagttcaagcgattctcctgtctcagcctcccgagtagctgggattacaggcacccaccactgtgcccggctaattttatttatttattatttatttatttattatttattttttktgtgtgtgagaaggagtctcgctctgtcgcccaagctgaagtgcagtgacacaatctcggctcactacaacctccaacacccaggttcaagtgattctcctgcctcagcctcctaagtagctgggactacaggcgtgtaccaccacccctggctaattttttgtattttagtagagatggggtttcaccatgttggccaggatggtctcgatctcctgacctcgtgatccgcccacctcggcctcccaaagtgctgggattacagacgtgagccaccacacccagcctaatttttgtatttttagtagagacgggggtttcaccatcttggtctggctggtctcaaactcctgacctcgtgatccacccaccttggtctcccaaagtgctgggattacaggtgtgagccactgcgcccagccagatgaatgtaattgtttaaaaaaaaaagcacaaagc

SEQ ID NO: 735659 - DNA, 634 bp, Homo sapiens
ctcccgagaaaaagcagaatgaccagcgaaatcggaaaagaaaagctgaaccatatgaaactagccaaggtagtaataatttcgtatcaacaaaagtactcaattctaatgtacttagatagaattttctaactcatactaaataattagtttgtacacagggattcctgataaaggaggtttgtgtatcttaagggaatatcagactgtttattacagacttgccatttgrtatacacctgacagaacagtgttagttcttcggggactcttttgttttccctgttgtaagctaacaatcttcttaaccacaggtttttctttacaccaaatatatattgtacaaaaaagaggttatgtcagagttttaactcttgtcttttgttagatcagtgatttgttaatgacagccagctaaaagtgcttcatttacattactgtcctttctgcctactgttcttccgtggcagttgtttagttgaatattggaacccattgggataaatctgtaaacatgatggttataatgccaaatatctttatataatcaaagaaagaaaaaatggcttggctttttttcctcccattctaaggaatagaaagcccagtcttgttgcatccttcttatctttta

SEQ ID NO: 735660 - DNA, 604 bp, Homo sapiens
aaaattaaaatatatacttacaggaagggaaaatttagaaatttattacaatttaatctcaatgaaatgaaaggtatttggaaaactcagtgtagtgaacctatccactggatagaatacaaactattgttagtggtgccctaccgtgctgaactacacatagcctttcttttcttgttttctcctctctaatttaccttcatcttttctttcttcaccttttctaccccttctgctcttactttttttcagtttataccttaagtcttatctttttcctaggggggacaaaagaaattgccttatgataggacttctgactgaagaggttcatgtttcctaaaccaatataataataacaggatttttagaaatgctaggactgrgccttttaaaaaatatttttaattgaacaactgtttcaaatattagaatttctaatacaaaaccttaaaaccaacctctttgaaattttcaagagtgtaaggacttggggaatcagacatggtccctgttctctcaggttttagatagtgccacacagaaaatgatcttcagtaagtgctgaatgaatatatttttggacatcagtgaaggagaacac

SEQ ID NO: 735661 - DNA, 331 bp, Homo sapiens
ggttgaaactggttggttggttaaaatttcatgttaaggatggtccatgcaggactcccatataggggaaaagaagtaactaataatcttcattgagcaccaactatatttcaggcactgtattaccctcatccccaacatatagtactgttttatttaatccttgaaacatccataargtaggtggtttttactcttgaaatccacagatttcaagaagagctaatagaacttcagtgatttgcccagtttcatacagtggttcagagatttagtcctacacctatttgactttaaactgtcaggaccagctgttctctgttgatcatac

SEQ ID NO: 735662 - DNA, 486 bp, Homo sapiens
cataaacaacaatgctggtgtctacaagtaacgtggtttaccagctctggtggtctgtctcataattgggaaagagagagagctaggttgctgagcacaacatttttgtctatccagacatgattagtccacttggctctagccagaaggtgccttttccaggtagtgacgatgtgcgcttagcacatggcttagtgttctcagtttattagagagtaaagtytcaggactgaggccatggaaacagaatcactctctcgcattctctgaatgggagtatgagtaattgtgtcgggtagcagcaaccggcagaggacaagcagcaggccttccctgcagtttcttttttatcacagcagaagtcttactgggcagaaatcactgtggcacacaacgcctgggcaccaaagggaataaaatctcacaggaattcaaagagaacaaagtcattaacactgagccaaagcctgctggcgtacatcgcag

SEQ ID NO: 735663 - DNA, 592 bp, Homo sapiens
gctattgttatttttattttccagatgaggaaactaacacccagataggttcatagctgttgaagatcatatagctaatatgtgcctctaaaagccatgctcttagccattccttcacggtggtgttacttagccttttccacattctggcacacatggaaaaaatgtgtggttataataatgttattactcatacacagcattggggacaattaataggatagctcaaatcttaaggtaattggtctgggaggccctgactgtgccaggtcccctctgattaactgacactctggctgtactggagcagggaacagracctgcttctccaggccaatagttaggtaagtcttcatggagaaaatgatgtcttaggtgtggctgaaagattagtaaaatttagtagcaaaagcaaaggatgagaatggggaagtggggaagtctgcttaattttctcctgtagaaaatggagatcatggtaatacctgtttcacaggttaaaaatgaaataaaggaacatacatggaaaaggctttgtaagatgtgatatcaatgttagctgttactattcttgaggtaaatgaataaaata

SEQ ID NO: 735664 - DNA, 593 bp, Homo sapiens
aatgttgagaacaggctgaaataatcagtgatacataatttcaatcttagctcaaaagattgggggaggaggagaagaacaattataggagttttcatcaaaaggtacaaatacaaagaaagacacatacaattatgggtgtacttatgcacacmaataatacacacacacatacacacgcataccctgtacccagtgctttatccatgctggtacatagtaaatgaatgttgaacaaatgaatgaaacaaagccagctccttatcaggtttggataaaatattggctgcttgtttttgtaggtcaccagaaaatgaaccgaaaacaaaataaatttactagttaagatgcattcttaaataattctttttcaaaattattctaaaaaatatttatcccccaaagttcttagagctgaataagactacatgtctttaattcttttttttttttttttgagatggagtcttgctctgtcgtcacccaggccggagtgcagtggctcagtggctagatctcagctcactgcaagatccacctcctgggttcacgccattctcctgcctcagcctcccgagtagctgggactacag

SEQ ID NO: 735665 - DNA, 631 bp, Homo sapiens
aggaagtcaaaatgccctgtaatttacggatttttatgagatttttgttttaatctaaatcaaccttgacaaaatggcaccaagaaacaaggaatttaaaagatccattctgagaagttgtgaagaaacttgaatttaaatcaagaattgaaacatttacatggttaatctgtgttttaatgctttatacctgacacctaaatcacactaaaattgtttgggggataactcaaaaaaaaaaaaaaaacctttcaaatgaaatggttgcagcctcaaggattcagattgtttatatgtaaggaagcaattgtaaatagcatataactaacaattgctcccatcgtggctgaatattttgacagataaattcaatattctagttccaacrgcaaattgtcccagcagctaagtttttaattgatttcaaaacatctaaatttgtagactaaatgtgatgactgactatcatacaaaaggcaaataaatactaacaacagacactacaagccaaaaacccagcatatcaagcaacacaaatatataaaataacagaataagccagtcttccattttaaaaaaaaaaaagtctaagaatgaatatagagagaaacgtaaatatttttcccctctg

SEQ ID NO: 735666 - DNA, 631 bp, Homo sapiens
aggaagtcaaaatgccctgtaatttacggatttttatgagatttttgttttaatctaaatcaaccttgacaaaatggcaccaagaaacaaggaatttaaaagatccattctgagaagttgtgaagaaacttgaatttaaatcaagaattgaaacatttacatggttaatctgtgttttaatgctttatacctgacacctaaatcacactaaaattgtttgggggataactcaaaaaaaaaaaaaaaacctttcaaatgaaatggttgcagcctcaaggattcagattgtttatatgtaaggaagcaattgtaaatagcatataactaacaattgctcccatcgtggctgaatattttgacagataaattcaatattctagttccaacggcaaattgtcccagcagctaagtttttaattgatttcaaaacatctaartttgtagactaaatgtgatgactgactatcatacaaaaggcaaataaatactaacaacagacactacaagccaaaaacccagcatatcaagcaacacaaatatataaaataacagaataagccagtcttccattttaaaaaaaaaaaagtctaagaatgaatatagagagaaacgtaaatatttttcccctctg

SEQ ID NO: 735667 - DNA, 588 bp, Homo sapiens
ttaaacaggatttagaaaggaaagactccagccagtggattctctgtccacagtcctcatcacctgccaagagaaggacctgggactccctgaggaggaaatgcagggaagagagagagccagggcagggagaggagaggagagacagcctccattcctgacctgcctggtctgtgcctggcttgatgggctctttccctcagggtggccgcagcaacagaacacaaggagccccaaagtgtagaggggacccgagcaagacaggaacttgcatggcagagcagcctggagcagatgaacaggcaggaggggcctccatccacccttcccagtcttgctctgtagctggggccaccgggggtaccagcagtgccccaccaggggcagagctscaccctggccttggcctggagagacacttcccccacctgaccgcaaaccctggcatcagtcagctgggacagcctctccacaatagcaggcttagtaacagcctctccacatgcttagaggtggtccatgagaagggcagactgtcctgtggttggctctcccagcattcctgggccctgctgcttaggtcaagct

SEQ ID NO: 735668 - DNA, 611 bp, Homo sapiens
tcactgctatggatcaggtgatactgatgcaattcagtgagcaggcagcttcaatctataggagtcatctgggcctgggagataggccagctccccctccacttgggcagatctcactctcctgcagccacgtgaatgccacaggtctaagacagatcctgtggtgttaacattttgtgttctcaattacgtagaacaaaatgaggccaaagctacttacggttattctaaatgatacttctgtttggcttcacaatgcgtttacatgcttgactcacctgtggtcagcagtctcagcctcagagatgtcacagtagaggaaatggtattgatggagccaagtccgccctccagcccactgcagaaacaaccaagcytgagttggccacctccctccagcctgtcctaacacatgctcaggacaggacctgaccagtgggtaaggagtttgggtttcaaagaagcagaaccataggctgagttcagagactgaatcaatagatagatagatgtcagacagactaataattatcaggccaagttggtgctggtcaagaacttggccatgagattgatctcaaggagtcagtggtggaggatatggttggttc

SEQ ID NO: 735669 - DNA, 568 bp, Homo sapiens
aatgagggttgcgggggcgggaaacagtggcaggaatgaccaagtgtgatgagctggggaatggcaacctgggacagcacagaggccggcaggaaggattgaggtgaactcccggagcccacgacacagcccgttcattcatggagctgcagccgcggcttctcagtcttcgctggccggagtcgccccttgctccccgctgcccccagagaactgggggaagggaggcgggcggctgagccccctgccctgtgagctcgccagcccttccttggctaggactctgagaagaactgcgtagcagccaggggtagcgattgggagtgggggtggaattcttgctcctatttctggtaggagaccctaaggcatttgacagactagtgtasgagaaggggactaggtcagctttttcccacccccctgaaaaaagactgcccctttctctgccgactgtgggtgaggcaatctagctgagccctgggaagccggtccagtagaatatagcatggtttaatatcccttcccttcaagagctgcctccagactcctcaacccacccctctcc

SEQ ID NO: 735670 - DNA, 522 bp, Homo sapiens
tttcacaacattattttgacacttgactctattccagagttgttgctatacaaggcatgtggcagaacaaaaaaaaagctggtgttgatataagagctttttacccagtattgacagtgagcaactttctttctttttttttttttttcttttttttttttttgagatgggttcgctctgttgcccaggctggtgtgcagtggtgcgatmtcagctcactgcaacctccacctcccgggttgaagcgattgtcttgcctcagccttccaagtagctggaattacaggtgcccgccgccacacctggctaatttttgtatttttagtagagacggggcttcaccatgttggccaggctagtctcgaactcttgacctcaagtgatccacctgccttggcctccctaagtgctgggattacaggcatgagccaccacacctgtccgacagtgtagcaactttctaaaactgaaaaatctcaaaggagatcattggaactgacttgttcatttattttttgtttt

SEQ ID NO: 735671 - DNA, 628 bp, Homo sapiens
gtacatatacaccatggaatactatgcagccataaaaaggaacgagatcatgtcctttgcagggacatggatggagctggaagccattatcctcagcaaactaatgcaggaacagaaaaccaaacaccgcatgttctcacttataagtgggagctgaataatgagaacacatggacatagggaggggaacaacacacactgaggcctgtcaggggttgggatggggggagggagagcatcaggataaatagctaatgcatgctgggcttaatacctaggtgatgggttgataggtgcagcaaaccaccatggcacatgtttacctrtgcaacaaacctgcacatgtaccccataacttaaaataaaaattaaaattaaaaaaaaagaaggccaatacagtcatccaatgagagatgatggtgcctgagaccaggatggagtggtggaggtagtgagaagtggcgtgctggggttggctaactcacaagagccaattattcaatgtttaggaagtttgcaagccagttgttaaatacatcattattaaaaattaagtcaaagcatcatattaaataaattatgtacaacaaaagtaatatatgcttaaggctcatcactttttaattgt

SEQ ID NO: 735672 - DNA, 649 bp, Homo sapiens
tcacccactttacctcatatacagaattctgtgagattttgttaaattagtttatcaatagcttgttttagaaatgctaagttttaaaaaaatatggccacttttaaagaaagatggaattgtttaaagtggagatacttcatgggaagatttttaaacatgtgcatgtgcccacgaaaacttagatgtgagttaattgctgaccatgtggatttagaatctgttttaaactgggtgtatttagaagacagtgggtcttcattggttgtggttttagtatctaatgaaaccagttttagtttttagaccagtatagctatcttgagaattaactttggagtctatgtggatacctggggctgggctttgattctgtcatcttcagaagtagtgtcactcttccaggtagggcacatgatctgtttgtgagcctgatttttcatttgggggaaatttttcttttcytttgcagaagagagttggtttatatcctgagaaaagtagttgcccaaataattaacaaatatggatactgctgattcttctttcacttctttttttatttaggctaattttccccagcatcctttgccatgtggctactttaccagaacaaaggcaaattcctttgcctcattcttgcatcatt

SEQ ID NO: 735673 - DNA, 619 bp, Homo sapiens
aaaaaaaaaaaaaaaaaaaaaaaaaaaaaagagtatacacagggtgacagaacttcttgaaacttgtatgcttctaagcaaccgcctgcagtgtactgtgaattcagatttttaaataaaaatctgcaaatattaaatagcccatatattgcattgccttttttgtgtcaacagtgctaatttgttgtcattcaacaaatatttgttgagcacctacgacttgccggtcatttaaacatttaaaatatcgaacaattaggccagcgcagtggctcaagcctgtaatcccagcactttgggaggccgaggcgggtggatcacttgaggtcacgagttcaagaccagcctggccaacatggtgaaaccctgcctctactaaaaatacaaaaattagttgggcgtratggcacatgcctgtagtcccagctacttgggaggctgaggcaggagaatgacttgaacccaggaggcagaggttgcagtgaaccaagatcacgccattacactccagcctgggcaacagagacagacttcatctgaaacaaataaaataaaataaaatattgcacaatttcttccttctcctcttcacgcagagccttgaacaaggggagtgtcc

SEQ ID NO: 735674 - DNA, 506 bp, Homo sapiens
cacttcctgttcattcactctcgaccttgctgctgtctggctcttccccagcctctgatgaaactgctcttgcaagcactaaactgacctccatatcgcaaagcccaatgcaatccctgctgcatttgactccactgttagtagcttcattcttgactctttctccattggctggtctcactgctttccctgcttagcttttacctctcggagtttttcctccagcctcctgatgtgcttctctatctctgctctgaaatgatgatgtctccacgatccaaccttgactcaagagtcttccctctctatttggccttcttrttaatatcaaccactttcatgattttatccaccagctgatggttgatctgatgactccacaactggaggctctaattctgttctttctcccaccttcacattattatatatatcagtggcctgctggacatttgcatctggttgtcccattttaacataacatattcaacactgaactaccaaac

SEQ ID NO: 735675 - DNA, 506 bp, Homo sapiens
cacttcctgttcattcactctcgaccttgctgctgtctggctcttccccagcctctgatgaaactgctcttgcaagcactaaactgacctccatatcgcaaagcccaatgcaatccctgctgcatttgactccactgttagtagcttcattcttgactctttctccattggctggtctcactgctttccctgcttagcttttacctctcggagtttttcctccagcctcctgatgtgcttctctatctctgctctgaaatgatgatgtctccacgatccaaccttgactcaagagtcttccctctctatttggccttcttaytaatatcaaccactttcatgattttatccaccagctgatggttgatctgatgactccacaactggaggctctaattctgttctttctcccaccttcacattattatatatatcagtggcctgctggacatttgcatctggttgtcccattttaacataacatattcaacactgaactaccaaac

SEQ ID NO: 735676 - DNA, 558 bp, Homo sapiens
gtttcaagtctaaactgaatgttattgattgctatactacttctgaaatctttatttcaaacatcccactctttatcatttccatcacttcctagctttctgtctaactttcccagtatttttattgcaatgatatcttgacctgattgacaattccaatttctacygattccaccacttttcatgagtcatcgtcactcttgtgtttcacttcccttcttattcagcctagattatgtgattcagcacagtttagtcttcctttgaaaacactcttaaccccattacttttttctccctctgcttggaaaaagttaaatctaagttaatctcaactttctctttacttcattcttgcaactaagcagcaattattgctggagataaatgtgcagttgtggagactggactcaccctcaggtgagccaggttttaattaagaccagaaggagaaaaggaccgtgtatttaaaaggatgaagatataggagagtttgattattgttgtatggagaagcagtgggaagttttgccaaaggtgaaacaatatggggatgat

SEQ ID NO: 735677 - DNA, 595 bp, Homo sapiens
agaggtgtgagccaccatgcctggcctgttgttactttatagatgtggaaaataagacatcatggttaagtaacttgcccaaggtcacacaggtagagctatcaatagcagactggaaccaatagaggccctcacagaatgattcttgggagatttcagttttcatctgaactttctcagggggatgtaataatgtaaatggactcttggcccctccatcctggaagcttggccaagtggcctaaaccaggggtccccatttagtttctccagcccccttttttcttgctgagttgttttaaaagttaaaaagtgcttagtgaccttggacaacattagcaccttctaagtcctggaatccrccaagaaggaggaagggagatggtgctgaattcccctaaggcagggctcaggaagcaagagaaccctgtggtctaacctttcccatctgctctcttgttcccaggctacgtgcaggcctgccgcgccctgatgattgctgcctcggtcctgggtctgccggccattttactgctgctgactgttcttccctgcatccggatgggccaggagcccggtgtggctaagtacaggc

SEQ ID NO: 735678 - DNA, 648 bp, Homo sapiens
aagtaatgacaatgttctctccagaagatagggttatcagaaactttcactttctttgtggttcccttccagtaggtctgattttcttaattaggtatttttgctacacgtttgaacattttcttagtaaggtgttgaggggggagaagtgggcattatttttataattaaagatacacacacagaatgtaatagtaaaataaacaggtaaataaagagggaaggttgaaaattgactctgttttgttgatacagcctagtcccagctgaagataccacatctggtcacaagatgtatggaatctctcattctcccagctccaccgcagcctggaaaaaaaacatctgaaaaccaccaagttctgtctttctttctctcattccaagcttcccaaacaagctatgactaattctattccccaaccaccttgaagmtggggagaaagagggccctagagagggatatcccccagtgttaacctcagtgtttgttgtatctagggacatcacagtttataatgcaatttcttatggattcctcaaagtctgataaaataatctgattactcagttaagctgaaaaataggccaaggacctgaggatcccatcaagatgcagagacaacaggaagacctgatggatgtgcc

SEQ ID NO: 735679 - DNA, 631 bp, Homo sapiens
tggaagtcaagaaccctgggttttcatgctcgacagctcattgggtcctcgttaaagtaagcagctcagcttttctgttgctcagtttgcttgacataaaaccactgattccctctccacttccctgggttgtcatcaggtttataagagagcaaggatgtcagagtgctttgaaagaggtttgttagaattggatatgtgttgtagaaaagaaatatgatgatatttttctctaaatgttaacctgtcccagggaaaccttcagaaccatcacgtgggcctttctttggatcacgtgtcacagggaactcagcccaggtgagtctagccctgaacacagcacagtgcgtattcctgggcagcagcacattcttcaattgcccaggtggggagggaatggctggggccttagggagacacggcccatggagcacaaggaggagcaatagactcggagccaagggaactgagtcyccatcccagttctgctcctaatttactgtaaaatcttgggcaaatcagttccatctctgaggcaaatctctcagccaaagtggactagatagaccaagtcaatcctctcccttccttccttcctgtcttcttccctccttcctccctcccacccatg

SEQ ID NO: 735680 - DNA, 583 bp, Homo sapiens
atttccatattcaatcattcatttacagattcatacaacatttattagcatctgccaggctctgtgctaggaaaagaatgtacaaccctgggagagactcaggagcttcccttgaggaattcggcagacactaacaaatacaaaaaatcacaacattacaatgagctaaaacaggggtacacacaaaagaagaayatcaagaaggaaaggaactcaggaagtaggggagatggtaggaactaaaagggccagggaggtttcactgggcatgcatgcctggcctcaaaggttggataggagttcaccaggtgaggagagagaaggcatgagggatatggtgagtgggcaaaggccctgaggtctggaagtatgtgacctgttcagggactggcgaggggttcaacaaggctaaaagttaagaagtttagcagggcatggaagaagctcaggcagaaagggctccttgtagccatatggtgaatagccttgaaggccatgttcaggggcttaggccttaccccacagtcaatgttacagaaaacctggtggcagcatagaggcaagtgaatcggtagaagagact

SEQ ID NO: 735681 - DNA, 610 bp, Homo sapiens
agctgaattattctgttagatacctaatttctcttaagttttgagattaagataagagaaaatcaagcctatcatttgagtaataatgcaattttgaaaagtacactgctcagaagtttaaaaatttctggtacagtcccaaactgaagacccacttttttcttatctcctgttgcttcagcttactaaggcagagattactctccatttctacactatatctgatgtatctaaattttgtttatatgtacctactttatatgcagtaggaaaaagattttctaaaataagatayattttgttcaccaagcaaaattcaattcagtaatgagaatgtcatacctttttccacatgagttttgatcccagctcttctttccctggctttctgggccatttctctaagtttctcttcatgtttttccttttctttctgagccatttttctctctacttgggcacgcatttccacagcttcacgagcctgttggtaaagtcacatgttaaacaggacactatcatgggataaatatttatggctatcatccaactccctaacatctggctggtaagagcaattatacagaattcagatttgttattgctaatt

SEQ ID NO: 735682 - DNA, 644 bp, Homo sapiens
aaacctatctccaggagggctcgaatttgtataggtagctgatcaaaatcagtagaaatttaccattcagcctaaggcattagatttgcattgcttctactgtgaccttggaaacagaaaacaggtgaggtgtctttctttctaggtcctcctgtcaatcacgttgagatcaagtcaccccaagggctcccttctgcctcattaccattctaatttgccttattggatccacctagggtagggtctttttttttttttttttactctaataaaccaatattttagattaagggaaaagagaaatggggtaagaccagcttatcttagtgaccaargaactgaaaaaatgagaacactggaaagccaagtctcactgagtctgtcctgttcagcaggacatctatgtctgaggccttggcacccttccaggaaaaaccagacatggggtgcaaaaaaagagcaacaggcaagaggctctaccaaaataataagcagagagtagtgagtggatccaccttagccagacatattttaaaataagaggaagtgcagagaaaattcctcttccagcctggccaacgtggtgaaaccccatctctactagaaaacaaaataattagccaggcatcatggcacgtgcctgt

SEQ ID NO: 735683 - DNA, 644 bp, Homo sapiens
aaacctatctccaggagggctcgaatttgtataggtagctgatcaaaatcagtagaaatttaccattcagcctaaggcattagatttgcattgcttctactgtgaccttggaaacagaaaacaggtgaggtgtctttctttctaggtcctcctgtcaatcacgttgagatcaagtcaccccaagggctcccttctgcctcattaccattctaatttgccttattggatccacctagggtagggtctttttttttttttttttactctaataaaccaatattttagattaagggaaaagagaaatggggtaagaccagcttatcttagtgaccaaagaactgaaaaaatgagaacactggaaagccaagtctcrctgagtctgtcctgttcagcaggacatctatgtctgaggccttggcacccttccaggaaaaaccagacatggggtgcaaaaaaagagcaacaggcaagaggctctaccaaaataataagcagagagtagtgagtggatccaccttagccagacatattttaaaataagaggaagtgcagagaaaattcctcttccagcctggccaacgtggtgaaaccccatctctactagaaaacaaaataattagccaggcatcatggcacgtgcctgt

SEQ ID NO: 735684 - DNA, 646 bp, Homo sapiens
caaatcttaactctaggcagtggtaaaaccacagtgcccagtaatggttagtaaagaatacaagagagtgtaggccgggtgcggtggctcacgcctgtaatcccagcactttgggaggccaaggcgggcggatcacggggtcaggagattgagaccatcctggctaacacggtgaaaccccgtctctactacaaatacaaaaaaaaaaaaaaaaaaaaaaaattagctgggcgttgtggcaggtgcctatagtcccagctacttgggaggctgaggcaggagaatggtatgaacccaggaggcggagcttgcagtgagctgagatcgcgtcactgcactccagcctgggtgacagagcaagactctgtctcaaaaaaaaaaaaaaaaaaaaaaaaaaaaagaatacaagagagtgtgacccatagttcaractactcaagtctatgtgggtctgcttcctgaacagctggtaaacagtggagaaagccatactcaaatgaatttcctttcaatttcagtgcgtcctttcactacaaaacagcccaatcaatgtcctgggttctgttcactcagactgagaaaaagaagtaaatcatccatagattttggcattttgttattatcacaaagtatgctagacatacac

SEQ ID NO: 735685 - DNA, 609 bp, Homo sapiens
aactggcgagtgctgtcccgcaaatatcaataactaacacggatcgagcacttactacatgccaggctgtttgaatgtttatgtctttttaatccactctactaccctatgaggtgtgtgctattactgtcctgattttacagatgaggaaactgagacccagattcacacaatcacattcaaccacagcaatttgctggcagaggtggtaggggtggtggggttacaagctgcgccagcctgctgggaggtgcagccaggggacccctgtgtaacagctgctctcctggtccagcctgtgaagtgaacctgacgctggacaacaggctcgactcccagggcgtcctcagcaccccgtacttccccagctactactcrccccaaacccactgctcctggcacctcacggtgagaccccaccctgcctgcccacctgccctctgccgcaagcacactacaggtccctggtgacccgggatgagagggggcagtgtcccgcctctgctgaagcgcccacaggctgagccctgggtacacatcctgccagggtggagagggctgtgggcgaggtctccctctgtgggtcacagcaatgcctgtttgttgagt

SEQ ID NO: 735686 - DNA, 565 bp, Homo sapiens
agctggggacatgcacctgtccctggggaataaacggccatttgggatcccagaagttccaggctccaaggcactacaaagagtatgtgatcctcccctctcacttcagagagtgcagcaaaggtgctgggagaggacaagccctgtcctaagtcacacagagagtgccacactgtgccctgacccctagtccatgccacagtgcccagtggccactaagcggcccccttcatgtagcctctgagtccacgccggctgcaccctgggratgctctcatttcactgctcccagcctgggcctgggtaacggcaggtggcatgggatggatggcggtggctgtgagcatggggttgtgcatgggcggtggcgggagagaggtggagggatggtgcaggcgcaggggcgggacaggcggggagggtggagggagacaggagacttctccggacacaggctgaggcgggtgggctcaccttggttttgcggctggactctgagctcagcccgtttggggtgctgtggagctccttggacaccacacacaggaactctgcctggtcctcg

SEQ ID NO: 735687 - DNA, 411 bp, Homo sapiens
ggacccaggcatcaagctgcgtgtgccctggctccctgtatacccataaccgaggctcttctcccccaaaaagcccaggtgcccagtcccctagacttagccccattctccaaccacaaaagcagccgtcaggagcatcactggagcgagtcagcaggggtcacaacctctgccctccctgcccctcccctgactttaggtcccctcccgctgtctcccatctgyctggaggtcaaggggtccctcttcctctcttctgtccagtgggacccctgctcctccccctccccgtctgagcaagatgcctgggtcttgagaggtgcgggcaccgcaggaggggagttgaaagctgggaggccaggtactgggctgtctggaatttactcttgccttctgagcccacactggagc

SEQ ID NO: 735688 - DNA, 542 bp, Homo sapiens
ggaggatactcctactgaaaggaagggcagaaaagaggaccgtggtccagaagctagggaaaagagtgcgtttgaagaaagtggggtgtagtctaccatgttaaaacctacaggcttgctgggtgctgtggctcacgcctgtaaccccagccctttgggaggccaaggtgggcggatcacctgaggtcaggagttcgagaccagcctggccaacatgacgaaaccctgtctctactaaaaatacaaaaataagctrggcatggtggtgcgcacctatagtcccagctactcggaaggctgaggcaggagaatcacttaaaccggggaggcagaggttgcagtgagccgagatcgcaccactgcactccagcctgggcgacggagcaagactccatctcaaaaacaaacaagcagaaaaacctaccggcagatcaaggaggataaggcctgggaagcatccatggggtggagtgctaggggatgcttggtgagtgtgatgagggcatttgatgggtggagtgggagccaggtctcagggatga

SEQ ID NO: 735689 - DNA, 388 bp, Homo sapiens
cattttcctaatgatgagtgacattgagcatctttccatgtgctgttggctatttgcatattttcttcggagaaatgtctatcaagtccttgcacatttgttaattggggtttttgttgctgctgagttctttggatagttttggtttttctctattattatgttcttaatttcattgagttatgcttcatctttattatttcttttcttctgcttgcattgggtttmattaccgcttcttttcctagtttcttaaagtgaaaatttagataagttatccaagacttttttcttttctaatataagcacttaatgttataaatttcctctgtgcacgacttcagctacatcacacaattttttttttttttttttgagacagagtttc

SEQ ID NO: 735690 - DNA, 588 bp, Homo sapiens
ttttatgttatcagtaaggcttccagtctacagtaggctattattagttaagttttgggggagtcaaaagctatatacattattttctctttttttctttaagaaacagggtcttgctgtgttgctcaagctggcctcaaagtcctgggcacaagcaatcctcccgcctcagcctccctagtatctaggactacaagacatgcacagattttcaactgcacaggaggtgacccccgcacctccaatccccacgttgttccagagtcaactgtaaactattttctataccctctaactgttgaggtcaggctcaaactgagaaaggaaattattccagcaaacttagaacaaaggaacaggagggaagtaaagtaccagcaactggtactttaattgaggcagagatccttaattagaggacaaattcctcragtcctgggagcagacacaagtctaagttaaggggtgagggttacctgtgatgaaagcaagctcccagaagctaacctcttcctctgggaggccacctcatctcccaggcatgctctgatcacacagctctatgctccgcccccttcgttcactcct

SEQ ID NO: 735691 - DNA, 478 bp, Homo sapiens
gaaacacaacaaataaaaatgtgaatccttatggaaaaataagggttggcacaaaatggggtgatgatgatgcttcggtcaaccttacctgcacacaatggtctactggaaagggcacagatatggcaactcatcccccaatccagcatgtaggttctctccactctgcctacactatcccatcaagagaaygagctactcacttgaccaggactcatctggagcctgtttcaataggctaccaaggagaacagatgttaaagaagaaaccttcaccaacttcccagtagtcaaatgcataaaatgttcttcttcttggctcctaagtgctcctacagaatttctataccaatgatgaaaatattaaaagtataagatgtcctaatgtgtcttaagaaagatcaatcttaacactgaaaatgttgtgaactcgtaaccaagtttcatttcttttttcctccatggaaatctctcctgg

SEQ ID NO: 735692 - DNA, 620 bp, Homo sapiens
gactgcttgagcccaaggaggtccaggctgccttgagctgtgatcacaccaatggactccagcctgggcgacagcaagaccttgtctcaaaaaacagtacaataagcaagcaatccagctgggcgtggtggctcacatctataatcccagcactttgggaggctgaggtgggtggatcacctgaggtcaggagtttgagaccagcctggccaacatggtgaaacccttgtttyttctaaaacaaaaagaaaaagctgggcatggtggcgtgcacctgtaatcccagctactcgggaggctgcggcaggagaatcgcttgaactcgggaggcggaggttgcagcgagccgagatcacgccactgcactccagcctgggcgacagagcgagactccatctcaaaaaaaaaaaaaaaaaaaaaaaaaaaagaatggacaacataagaaggccccacatgggactagcagaagttttagaaagaatacaggtgatgaaaggaaatacaattcagagaaaatttcactatcgaacactattcggagtgagaattctccagatttcatgacagacttaatcagactgacggtgaatgttgagcaaaataagaataaatctagataa

SEQ ID NO: 735693 - DNA, 620 bp, Homo sapiens
gactgcttgagcccaaggaggtccaggctgccttgagctgtgatcacaccaatggactccagcctgggcgacagcaagaccttgtctcaaaaaacagtacaataagcaagcaatccagctgggcgtggtggctcacatctataatcccagcactttgggaggctgaggtgggtggatcacctgaggtcaggagtttgagaccagcctggccaacatggtgaaacccttgtttcttytaaaacaaaaagaaaaagctgggcatggtggcgtgcacctgtaatcccagctactcgggaggctgcggcaggagaatcgcttgaactcgggaggcggaggttgcagcgagccgagatcacgccactgcactccagcctgggcgacagagcgagactccatctcaaaaaaaaaaaaaaaaaaaaaaaaaaaagaatggacaacataagaaggccccacatgggactagcagaagttttagaaagaatacaggtgatgaaaggaaatacaattcagagaaaatttcactatcgaacactattcggagtgagaattctccagatttcatgacagacttaatcagactgacggtgaatgttgagcaaaataagaataaatctagataa

SEQ ID NO: 735694 - DNA, 620 bp, Homo sapiens
gactgcttgagcccaaggaggtccaggctgccttgagctgtgatcacaccaatggactccagcctgggcgacagcaagaccttgtctcaaaaaacagtacaataagcaagcaatccagctgggcgtggtggctcacatctataatcccagcactttgggaggctgaggtgggtggatcacctgaggtcaggagtttgagaccagcctggccaacatggtgaaacccttgtttcttctaaaacaaaaagaaaaagctgggcatggtggcgtgcacctgtaatcccagctactcgggaggctgcggcaggagaatcgyttgaactcgggaggcggaggttgcagcgagccgagatcacgccactgcactccagcctgggcgacagagcgagactccatctcaaaaaaaaaaaaaaaaaaaaaaaaaaaagaatggacaacataagaaggccccacatgggactagcagaagttttagaaagaatacaggtgatgaaaggaaatacaattcagagaaaatttcactatcgaacactattcggagtgagaattctccagatttcatgacagacttaatcagactgacggtgaatgttgagcaaaataagaataaatctagataa

SEQ ID NO: 735695 - DNA, 588 bp, Homo sapiens
gaatatcttctgtcctcataatataattaataaggacaattatattatttatttcaagaaacattatacctttcatttctcccattcttcatattagaagtactaggtttcccagtgtatgtacactagacactggrgtaatgaatgaaatataataatttggagggaaataggtaacttataaccaaaacttacccaggattgcatatatgcatatttacaagttagtgtatagctctgacttggattacaaagtgcgaaaggaaattgtcaaaatgattgtagtgcagaatagaacgttttttcccctttccaggaatcatttccactttgtctccaaagtaggaaatcaacagcatcggacatgtggtcttggtggaggcagttctggcggtatctcaggctctggttgtaacgacaggatactattggacaactcattccttaaaatatccagaggcatctaacgtataaacaaacaaaaaaaaatccgttttaactttacaaggtacacatacagctgacccttgaacatgagtttcaactgcacaggtccacttatacacagctgcttttcaatacaagttt

SEQ ID NO: 735696 - DNA, 594 bp, Homo sapiens
ctgctgccctgaaaggatgcactgagaacatttctgtgtcatttctaccacagatgcgctacttgaatctaattatgaagagacaagagacaaacccagattgaggggcattcagcaaaataattgccctgtactctttaaaaaacggcaatgttgagaaagacaaagaaagactgaggagctattccagttaaagtaggctagagacactgggaaccaaatgtgatgcatgawtcaggatattcttttattacaatgagcatcattgggacagttggtaaaatgtgaatattgtctgaagagtataatattgtatcaaagttaatttcctggtcttgaggattgtactgtggttatgtaagagaatgtccttgtttttaggaaatagatgttgaaatatcttgagataaagagcattatgtcggcgacttattatcaaatagtacaggaaaatgagtgtgtgtgtgtgtgtgtgtgtgtgtgtgtgtggagagagagagagaagggagggacagagggacagagagatataaaaccaatgcacctgggtgcggtcgtcacgcctgtaatcccagcactttgggaggccagggt

SEQ ID NO: 735697 - DNA, 594 bp, Homo sapiens
ctgctgccctgaaaggatgcactgagaacatttctgtgtcatttctaccacagatgcgctacttgaatctaattatgaagagacaagagacaaacccagattgaggggcattcagcaaaataattgccctgtactctttaaaaaacggcaatgttgagaaagacaaagaaagactgaggagctattccagttaaagtaggctagagacactgggaaccaaatgtgatgcatgaaycaggatattcttttattacaatgagcatcattgggacagttggtaaaatgtgaatattgtctgaagagtataatattgtatcaaagttaatttcctggtcttgaggattgtactgtggttatgtaagagaatgtccttgtttttaggaaatagatgttgaaatatcttgagataaagagcattatgtcggcgacttattatcaaatagtacaggaaaatgagtgtgtgtgtgtgtgtgtgtgtgtgtgtgtgtggagagagagagagaagggagggacagagggacagagagatataaaaccaatgcacctgggtgcggtcgtcacgcctgtaatcccagcactttgggaggccagggt

SEQ ID NO: 735698 - DNA, 622 bp, Homo sapiens
ataagcattcagtgcataacatttttagaggatgtatatgtttgtgtattggtagatatatgcaatatctagaatgatacacaagaaacaggtatcaacagttgcttctgggaaatgaaaccttccagagtaaggactgcagtgcccctaacaccagaagagttgccataaacatagtagatgcaataaataaatgtgtcaaatgactcaatcaatcaatcaatcaaaaaggggaaaattgacaaggcacggtggstcacacctgtaaccccagccctttgggaggccaaggcagctggatcacttgaggtcagaagtttgagaccagcctggccaacatgatgaaaccccatccctactaaaaataaaaaaaacttagccaagtattgtggcaggcacctgtaatcccaactacttggaaggctaaggcaggagaattgctcgagcccaggaggcggaggttgcagtgagccgagatcgtgccactgcaccccagcctgggtgatggagtgagacgctgtctttgaaaaaaaaaaaaaaaaaaaaaaaaaaaaaaaaaaggtggtggggaaatcagctcatgaacattttactaattatccttttgtatatgtggaatttt

SEQ ID NO: 735699 - DNA, 604 bp, Homo sapiens
caaaatctatttcttagcaccagcaagactgggtctgtccagtgggttgtgggtttggggagaagcagaggaaagattgacatcatgtggaatctggaagagacagaacacatctcttggtgcttttgaaggtacagtgactccatctagtagtaaaaggtgttcaaatgaatggcttcaaatttgaccagattatcaaatgctgcttccctgataaacagctcagacatgggttagaagaggtggccctgggatgggaagcagtgcagactctcatgtatgaatagctccaattctcaaaaaattcttttagttaactgctgtctgtcttcttctacattgcactcaagcytaactctgcacttttaaaatcaacatataaattataactttctctcctatgataacttttcaaatgttttttgacatctattcagtaccgagctcccttttgaaaactgggccatcatttcccaacctccaatttctgactgtatttccataatttatttaaagactcctaacaatggagccacaatcataactacaggtcccctttatatctcaggatgacattcatttggttctaatccttgaactcatt

SEQ ID NO: 735700 - DNA, 612 bp, Homo sapiens
atatttgcagagaaatccaataattttaagtgatattggcaaatactatgatattagaaatctaggtggtacttaggaatctattttcttagtctctattctgtggccagggaaactctttattccttttgtccctgctatatttgagacaaagatcttgaatgcatccactcttccctaaggaaatgccatcaactcatcatccccataccatgcaaatgccttttacagctgcagagcaggtgtgggcagatgmatacagcagcatatgaacacatgtttaccctccttggccacactttgtcttactctatgttttctaggaacacattttggggtggaaatgcctttattccatttatatttagtcaattatctggtttagcttccattcttacaacctaattaaattcagcccatcaactcagtttaaggcatagcagctgtagacacttcgtttatctacttggagagaaaaaagataagttggtacaggggttccccatcttgtgaatgcaattcccattcaactacatgcaattgaatatgagcatgggatggtattctggacctaatgttaaattctgctactaagctatcatagttgaaata

SEQ ID NO: 735701 - DNA, 593 bp, Homo sapiens
ttcaaggaagttctaaaggccacattgtaggaagagaactgagactgaaaaccatatggttcagtcaggcatgaaaatgcagtaacatgggtaatggataaggccatttgttcagtaatttttcttcttgtaaacaggtgtttggcctcttgatgctcagaggaaccactcaggtctgtgccattcatggattttctcctataatcaaaaacttttcctgtctctgactatatgccttacaaataggttccagttgagaaatttgggagtaaaggtatcaaccacccttgaaatraggtatttataaagtgcagctgggacacactacatctcagtgaaccctgggcataagtagcccagtgctgtggagaaggaagaagggaattatatcccagtatcagctaccaactcacaatgagaacttcctgttagcttccttcccttggtaattcaagtacagacacgccccaaagcaagtgttatctgctgggctcctgggtcctgctcaaaacccagagcagggtggtgaaaaaagtggtaaatctgggcagtaaggtaataggattatgcctttcaaacccacctgggcattt

SEQ ID NO: 735702 - DNA, 615 bp, Homo sapiens
aaatatgttatggcaaggtacaaacgtgtgaatttctacaattttgtcagtctatgaaggctgactggctttttgatgtgattcgctagccctttagagtaaacattctttaaaagtagaaaatgtttgctggcagctagctcggagacactaccttacgatgttcgttaaaaacaggaaagggaaaacagccagcatgagacgagtggagttcatttttgcagaagattaagaaaaattttgatcctgaaatcccaaagcatcaatttttttgagaaagtatttaaraaaaagatacttatgcattacagctctttatacatttattcaaatgtacatgattagagtttaaaatgattctaagtagctgaactacgttcagtacatttaaagactgttcacagaataactgggcttttttttccccctcaaagtgttttgattataagaggccaataaggattgggacaagtggaataaaacgaagtctttctatactgtgaagattttgaatagtacttgtcaataaagcacctcctattgtaatcttagggagccttgcctctgccctccaaggactgtctcagagatactaacctcattaaaatatgaatg

SEQ ID NO: 735703 - DNA, 615 bp, Homo sapiens
aaatatgttatggcaaggtacaaacgtgtgaatttctacaattttgtcagtctatgaaggctgactggctttttgatgtgattcgctagccctttagagtaaacattctttaaaagtagaaaatgtttgctggcagctagctcggagacactaccttacgatgttcgttaaaaacaggaaagggaaaacagccagcatgagacgagtggagttcatttttgcagaagattaagaaaaattttgatcctgaaatcccaaagcatcaatttttttgagaaagtatttaagaaaaagatacttatgcattacagctctttatacatttattcaaatgtacatgattagagtttaaaatgattctaagtagctgaactrcgttcagtacatttaaagactgttcacagaataactgggcttttttttccccctcaaagtgttttgattataagaggccaataaggattgggacaagtggaataaaacgaagtctttctatactgtgaagattttgaatagtacttgtcaataaagcacctcctattgtaatcttagggagccttgcctctgccctccaaggactgtctcagagatactaacctcattaaaatatgaatg

SEQ ID NO: 735704 - DNA, 609 bp, Homo sapiens
ccctgagcatcccctctgcacaagggtcctgctggatgtgaagatacagcagtggacaaagtgaaggggtccctgtcctcccagcacttgtggtctgggcctgaaatcgccaggcggcagcctccctcttatacagagtccctgggccgccgccttgtttatgtacagcccatgagctgagattggtttttacatttataaaggattgaaaaaaggtcaaaagaataatatttaatgacacatgaaaatgatgtgaaattcaaatttcattgtccatacataaagtttcgtgggacacagctgcgcccacatttgcgtactgtccccagctgagcagagtggtggcaggggcctggcacccggcaccctgagctatggactatgtttagagaagatgcttgccaggttccagcatgccagcctcacttcagcggccttgcacctgcagtttgcaacctgtgccctgccctgcggctgacrtcatcctatctccggaagggcaggtccccaactgctcatgcccctgccaaatcatcttcctttctctggaggccaacagcactttcctcctagtgggcacaaccgaggttcctctagacgtgttgaaca

SEQ ID NO: 735705 - DNA, 610 bp, Homo sapiens
gtgagtattcagcctacctgatttgcacagggcctggaaagccacacacaggggtcccggccgctgctgggccagtgcagggatctccaggagcctctcctgaggcgtggccctggtggccccgaaggagttcaggctccttccccaaaccttcaggcagcttgagagctcctttgctaaatagatgggcttattagtgggcctcaggaaccccctcaaatattagaaatcaccattaatcctgcatcgttgtagagaagggacagcagagctctctagaacacrtacgcccagtctccatgtggctggagagggctcctttcctctgatgttttcagaaagttcaggaaaaaggacatgagaagggcccaaagagcctaattaactttgacttgacttcaacaatgggcaggagaataagaccccttttaatataaaattaaaacctctccaccagagccttatcctcgccagcactttctttcattgctttaaattggtcttctcggccttgtaggactgtggtgggcgggcccaggagcccagactcgcccattctgggcaagtgtgttcacatagctctgacaatgccagctctcggtcattgtca

SEQ ID NO: 735706 - DNA, 607 bp, Homo sapiens
aaccaaggagtctgactcctggatccgggtgcctgttggatccaggctcccactcccgggccctccggtcgaaccaagggtcccgacagggcccgaggcacccgcattcctaggagacaggagctcggccagggcgcatcaccgggtcctgctccgagccagaggaygtagtgtagacacccacccccacaccgcccctccacagagctcctctccccttggggcgtcgctgggcacagggcaggtcgctaggaatccccagtaaaaccacgctcgctcagaggttcgcggcttcctcagagggcgctggggaaagagaggggacctgatttcttcgaccctcggaggaaaagtgctcggggcctcctagggacacagccctggaagctcacctcatcttagcttaggccgcggcgaggtggggaggagagttaggagagggggagaggggctctgcgccctgcagaggcctttaattctggaggaaaaagactgggacacacccaagcgagccaaggcccgagccccacgcacctccacccacccggggcggcgcacagccagctcctgccgggcgtgagcactcgatcaagggagcaagtggaat

SEQ ID NO: 735707 - DNA, 615 bp, Homo sapiens
atttatttatgttttttaatgtagtaagtgggcagctaaatgaattgcaatttgtcatttttatggttaatttgaaatctcgctcttgttgcctaatcctgttagttggtggcaaaacaaggagaaacgcgtgtttcggcagcagtgattctaacaggcgttttatgttaaattacagcagaacccagaacaaaagcaggcggcggacttgcagtcccagcggcctcggccggtccgcgctgccggtgtgagccccgaaggaaagcaccccaagctggctgaccccgcgcacccccggccacacccgcccatcctggcttcgagattaagaagcccagtttggcaccccaattatgtttggcaatgtccccggtgccccagacccgcactccgctgcctcctggcttctcatgcccgcgaagcrcggcctcgccctgggcgcggggcatcaccggcgcggaggcccgagggcgggtcacttcggatccctttcttcccttcctcgtctctgcctcttttcctttcttttctccctccgcctctctgtcagctcttcccgtcgtttcctcggcacccagctccagtccaggcgctgtcccagggtaggaagaaggg

SEQ ID NO: 735708 - DNA, 582 bp, Homo sapiens
ttcccggttaatcagcaatttaagttttgggacatgtgcctcccacaccaaatttcaagagggggagagggagcatggggagaaagggggtgggtgagagaacgttggctcttttttttttctttaattttttccgaagccagatgcacatggtttttaggaggcacaacatcstggtcttgcttcagggctctgatttaataaggatggcaagaaataaatgattcacttgctgatattaagagagtgcaaatgcacctgccccaggcccttcaagtcagggcatatgtttgtaaattacatgccgactgtgaacctgtgggtggagccccaggtggggaggctggagagacaactggaccgtgtcagtggatcttcatcagaactgtggaccagaaaatccaaggatgtttcagaatagatgcaggtcctagctacactccagatctcttgaatcagaatcttggggtgggcagggcattgtttttccagaaattccaccgatgaatcagacatgttcctttggttaagaatcactaaactagctaatctctagccagaactctcatctgtcaagagagg

SEQ ID NO: 735709 - DNA, 634 bp, Homo sapiens
agtttaatattagttaggacaaggcaaaaaataaaaatagagttcagaaattgttcgtcagctaaaatgactcaagtcaacaacttgacagagctcttacttataaagattccttcctcctggcattcctttatattcattactaatgtagtatctaggaagagaaaaaaatgaaatatatattaattatgttttttaagaagtcagaggmgatccaccgcactcagaccccaagcctaagtgtgcacggagcgcgcgcacgggtgcccgccgccctccgccatcgcttccgtgtccctcacccccgagaagccatttttctccgtcatctctacacataaaggtcttgttcttaacagactaaaatatgtaaaaccagagatttcttccttaattagagtgacaagtaaaaacacaaaagaaggcttctgtcaaaaaaaaaataggactaggcagctagcctgaaattgagaccccactcattgatcccgatcgttgtattttctgtcttataacataagctactagatggcaggagccccatgttcctgagagcagcagagccactgctaaagaggggcttcaaaagctacttcgggcggcggcaaaattcctccgcgattagaccaataaa

SEQ ID NO: 735710 - DNA, 502 bp, Homo sapiens
ttacagaaaaaacactttactattagattctcctgcagacaatactgtagccattattattacggtactagtgaagaattcctggttcccttctaaaccccatctcacccggcttacgctgcttaacaaagctcctcaattttagtaaacacgcaaccctgacgaggagaacagctttgaaaaccaagacgtgacactattattccaaatgtaggacatgaaaaatttacattagtgccaaatctataatagaaccactaaaactagtcatgtatcccgttaacyagtaatacaatctgatatataactgagctttgcaacttcgtcgagggcacaatccaacttctacaaatgagacgagcttctaattcaattatagcctctcttttcctccattcaagcattttcattccccttatctctttctaaagcattttccccattttttctgcttgtcattcctcaaagtttttggagaaattacaaaaccttaaatcacact

SEQ ID NO: 735711 - DNA, 589 bp, Homo sapiens
gaacaattctaagggagcaataaagaggaaatggttttgccaagcatcaaatatattataaatctttgataactaaagcagtttggtacaagtgcataattacaggacaggctaatggaaaacaaaagagcatatagaaatttagtgtcaattaatggtaayagctcaattggtagggaaaagatgggctttctaataaatattgttgggataactagagagtcatatggaaataattaaaattggatcaatttctcccatcaatgtgaaaagatgctccatcttgctcataataagagaaatgcaaatcaaaactatacttaagtacatttctcacctaagaggttggcaatatccaaaatgttttctctagtggtactctaatacattgctaatatacaccatttttccatagaggggaatttggtaatatctagcaaacctgagaatgcatttaccttttgagcaagaaatcctgcttctaggaatctcccaaagctatactggtaaaaatacaaacaacacaaagctattcattgcagcaccatctgtaatagcaaaagactggaaataattcaaatgcctatca

SEQ ID NO: 735712 - DNA, 589 bp, Homo sapiens
gaacaattctaagggagcaataaagaggaaatggttttgccaagcatcaaatatattataaatctttgataactaaagcagtttggtacaagtgcataattacaggacaggctaatggaaaacaaaagagcatatagaaatttagtgtcaattaatggtaatagctcarttggtagggaaaagatgggctttctaataaatattgttgggataactagagagtcatatggaaataattaaaattggatcaatttctcccatcaatgtgaaaagatgctccatcttgctcataataagagaaatgcaaatcaaaactatacttaagtacatttctcacctaagaggttggcaatatccaaaatgttttctctagtggtactctaatacattgctaatatacaccatttttccatagaggggaatttggtaatatctagcaaacctgagaatgcatttaccttttgagcaagaaatcctgcttctaggaatctcccaaagctatactggtaaaaatacaaacaacacaaagctattcattgcagcaccatctgtaatagcaaaagactggaaataattcaaatgcctatca

SEQ ID NO: 735713 - DNA, 589 bp, Homo sapiens
gaacaattctaagggagcaataaagaggaaatggttttgccaagcatcaaatatattataaatctttgataactaaagcagtttggtacaagtgcataattacaggacaggctaatggaaaacaaaagagcatatagaaatttagtgtcaattaatggtaatagctcaattggtagggaaaagatgggctttctaataaatattgttgggataactagagagtcatatggaaataattaaaattggatcaatttctcccatcaatgtgaaaagatgctccatcttgctcataataagagaaatgcaaatcaaaactatacttaagtacatttctcacctaagaggttggcaatatccaaaatgttttctctagtggtactctaatacattgctaatatacaccatttttccatagaggggaatttggtaatatctagcaaacctragaatgcatttaccttttgagcaagaaatcctgcttctaggaatctcccaaagctatactggtaaaaatacaaacaacacaaagctattcattgcagcaccatctgtaatagcaaaagactggaaataattcaaatgcctatca

SEQ ID NO: 735714 - DNA, 551 bp, Homo sapiens
attcaaccactttaatttttagctccgtaaaaaagtgagaacatgctaagtttgtctttctgtgcctagcttattttacttactataatgacctccagttctatccattttgttgcaaatgacaggctctcattcttttttatggttgaatagtactctgttgtgtatatgtatcacagtttctttatccattgatcttttaatggacaccagttgcttctaaatcttagctactgtgaatagtgctgcaataaacattttctcttcaatatactgatttcctctcttttgggtatatacccagcagtgggactgctggatyatatggtaggtctatttttagttttttgaggaaactccaaatactttctccccttctgtgggccgtctcttctctttgttgaccgtttcctttgctgtgcatcagaaacttttaaacttgatgtgatcccctatgtccatttttgttttggttgcctgtgcttgtggggtatttctcaagaaacctttgcccagttcaatgtactagagagtttccccaatgttttctt

SEQ ID NO: 735715 - DNA, 615 bp, Homo sapiens
tagaatgttctacccaatgactgcataatatacattcttttcaagcatgtatgagacattcttcagggtctaccatatgctagattataaaataagttttaataaatttaacatgaataaaatcataaaatattttctgagtacaatagaattaaatatgaaattcccaaatatttggaaattaacatactcctaaataatctatgggtcaaaaaataaattacaaaaagaattagagaagaatttgaagcaagtgaaactgcagaaatttatgggctgcagtactaaaacaatgcttagagagacctttatagatttaraagcctttatcagaaaagaaaaaaaggccttaaatctgtaaacttagcttttctcttaagacactaaaataaaaataacaaacccaaagcaagcaaaagaaagtaaatataaagactacagcagatatcaacaaaatagaaaacaaattatatagggaaaaaagctatgaaacaaatagttctttgaataaaacaacaaaattgacaaatctttagatagaatgactatagtgaactgaacggtgtcccccaaaaagccatgtctgtaacctaatccctgaggtctgtgaatatt

SEQ ID NO: 735716 - DNA, 544 bp, Homo sapiens
acaagccattagattgacagcaaaatttttccacactataatgattcactaatgtgttgactgctatcacacaataatcaattagaaaacttaaagaatagaaaatctgaactatttttaatgtgttttttcctcttttcacattgagatcacttacatacaataaaatgcataggctttgagcgatgaactttgacaaatgygtatatccatgtaaccataatgctggtcaagacaaaaagcatttccatcagcactaaatgtccccgtgtgtcccttccagtcaactcaccaccaccacccagaggcaatcactgttctaatcctagtaccatagagtaggtttgccggttctaaagcttcatgtaaatggaatcatacagtttgcactcttttatatctgactgctttcgcttgacatgttttcaagattcatccatgctgtgtttatccatatgttatttgtttattatacggatataccacagtttgtgttttcttttcttattttaaaaattaaaagaatgctttatgagtttgcgtg

SEQ ID NO: 735717 - DNA, 544 bp, Homo sapiens
acaagccattagattgacagcaaaatttttccacactataatgattcactaatgtgttgactgctatcacacaataatcaattagaaaacttaaagaatagaaaatctgaactatttttaatgtgttttttcctcttttcacattgagatcacttacatacaataaaatgcataggctttgagcgatgaactttgacaaatgcgtatatccatgtaaccataatgctggtcaagacaaaaagcatttccatcagcactaaatgtccccgtgtgtcccttccagtcaactcaccaccaccacccagaggcaatcactgttctaatcctagtaccatagagtaggyttgccggttctaaagcttcatgtaaatggaatcatacagtttgcactcttttatatctgactgctttcgcttgacatgttttcaagattcatccatgctgtgtttatccatatgttatttgtttattatacggatataccacagtttgtgttttcttttcttattttaaaaattaaaagaatgctttatgagtttgcgtg

SEQ ID NO: 735718 - DNA, 540 bp, Homo sapiens
cctctgcagccaggtgacaaaacagaggcaggaggaacatgagccaccatgctcagttccttcattaaaacttagcaaccagatgaatcatccctctcttccagcaaggaatgagtgtaagtgtgtctggagcggaaggggcaaccaaaaaaaaatgagcatttaatgaagtgtcctccaaatggaaatttaagaaaggaaaggtcctccaatgaataatagtaataagacttacatttcattttgagcagtgactatggctttccaggacttctccaccaacccatagctctgtgatttcaggtaggttatttataatactatggctaacttgtacagagaaactactatgtacctccatgataaatgctttccatacacgaactcacttactyttcacatcaactccatgaggagaatactgtaagtatccccattttacagatgagtgaactaaagagtttaagctatttctcaaagtcacctttgtaagtggcagagccaaaactgaaacactagactgactccagagcttttatt

SEQ ID NO: 735719 - DNA, 625 bp, Homo sapiens
aaatcctagaggctgatttaaaaaaaaaaaaaaagacaatgctgaatctgaatctctactgctgggtaaatgagctggaaggaccgttactggaaagaaagtgataattattcacaccaactttagctaggactgggttagctgtggatggcatcagagcaaggagagggcatgytgctttgctgtgacattcctttagttttcctcacccccatttctgtggcttggtctaaagggatttctacgacctggttcgaaatctgagatcagatttggaacagaattcctgccaccttctgggatgctgcaaacccagctggaaaccctgagcctctgtgacagcaccacattatactttccatgagttacatcctcaacgcctcctgaggctgctggccaagactgtgcacagagaagcgaggcatctttcctggggctgaaaggagtctgtgttagaaaatgtagagcagagtacagcattcttccctcctgtggactcagaaaaataaggcagagcaaataccagctagcagctactttgcattctgggcaaacccctgcaatgtgagaccatcaggctgcaaaatgggccccccaggcaatactgaaatcagcaataatatgg

SEQ ID NO: 735720 - DNA, 600 bp, Homo sapiens
tactgtgtgtcagactctgcaccaatatgagtgtataagacaagtattcactactgtatgtataccatgtatgtgcacagtgaatgaattcatgccatcaggatgttcacagtcctctgatgagcagctcttgcctaatttgtcaacatttgtgttgcttccccagctttcacatgtgtcctggatgcttcagggcaaaacgccaaatatccattgcctagggatatccaagtcatcacatgggtatgtgggccaatcaaagataagaaaggctcactggactttaagctccatgaggcaggccccattatgccacagcaaagagcacaaaagcacaggcaattatagtcaattctaaagtagcactgcccaaatttctgccacaaatgctgttctgccatttgcgtctcaagaggaatgccgcaaagacaatayacctgctactctaagtggctcctcattttgagagctttagaaactggggcgcatcactggaatccacaaagagaaaagaccaatgacttttcttaaatgtgttggtcatctaactctaagtttgcacgtggcaggaccaagtggtggggttgtccatcaggtaac

SEQ ID NO: 735721 - DNA, 551 bp, Homo sapiens
ttttatgttttcatcgtatccagtgaccttgctgaacttactagttccaagttttcctttcttttttttttaagattccttaggattttccatgcagaccatcatgttctcttcaaatagggataattttatttcttcttttccaatctgaatacctgctaattcctctccttggctttttgtgctgggtacaacttccagtattatgttgaataagagtggtgcaagagaacattcacctctcagttgtgygcaataattcattttaaatattgaactccatttgctaatattgtttaggatatctgcatcaattatcacggacaatggtctgtggggtgttttccatattatattggtctcatcttggaaccatggtaatattaatctcatattattattctctcaatttctattttctggaagagattgtatagtttctgttctttaaatctttagaattctccagtgaaaccatctgggccttaaactttcctttctaaccatgaattacatttaattgttgtaagactatttaaatgatctattta

SEQ ID NO: 735722 - DNA, 615 bp, Homo sapiens
gtgcaacagacatattttccacaaacagaaatgaagacaccaggtataatatcacaagggaatcctcttggtttgcaaataaagttatatgacaagtcttggcaaaggtttaaagaaacaacagagactctaacaagtctcactgattgaraaaaagttaaataaaattaaggctttccaacaacaacaacaaaaaatccaggatataaagacaccattgcaggaagacctgggattcagttacctggggctaaggccatcacaaatgctgccatcagtccaggatcactagcaccagagtcaagaccctgtgcagggagatttcagagtacacagtaaggaagcctaggaataaagttaagaaagtcaaaattgttaaccatactacatttaaattcttctctctcaagagcagtttatgccagtaaagatcagtgaaaacatctggctagatgagtcttgatggccagaagaccaagatgattccatcagtctcactgttcctcttttatctcagagactgaaaaagtgctaaaggtatagaaagacatatgataaggagtagtatatgcaggaagaaaacacctttgtttagtcagaatgcacataggatcc

SEQ ID NO: 735723 - DNA, 631 bp, Homo sapiens
gagaccctgtctcaaaataaataaataaataaataaataaataaataaataaataaataaataatttgcttgctgctggagatatacaatggtacagccactgtagacaacagtttgacagttattccaaaaattaaacatagagttaccatatgacccagaaattccactcctcggtatcatatatacccaagagaattgaaaatacatgttcatgtaaaaacttgtacatgaatgctcatagcagcattattcataatagtcaaaaagtggaaacaacccaaatgtccatctgataaatggataaacaaaaagtgctatagccatatgatggaatattattcataaaaaggaataaaaaggaataaaaaggaatgaagtactggtatatcctacagcgtgggttaacctgaaagaagccagacatagaaagccacatattgtatgattccgttgatatgtaatgtccagaatggggaacccctagagacagtrgattagtggctgacagaggctgagtgagaggaagaattgggactgattgctaatagatacggcatttctttttgcaaggatgaaaatattctaggtgatatggtgatggttacacaacacagtgaatataataaaa

SEQ ID NO: 735724 - DNA, 656 bp, Homo sapiens
ggttttgccatgttggccaggctgggctcgaattcctgacctcaggtgatctgcccacctcggcttccgaaaagcgttgggattacaggcgtgagccaccgcgcccagccgagaatctacttttaaaaatggggtttaattttaaaatgtacttggaagacaaacacgaatagctcagaattttttttttttaagtctgggttagcaattgacaatgatggaacaggacaagtgacttgcaattacacatataaaaacatttttaaaaaggatggtactaccacaagaaaaagcagagaaaagaccaaaatgaacaaaaaaaagaatgaaagaaaaagccyggagtaagctccaacatgtattaaaaatactaaaaatacagtatattaaagataccgtttgaaataaagaagtgattattcaattaatgatgtgagacaacagaaaaaattaaattcttttcttaacatgttaaatatttaagtattaaaaacacaatgaaaatactgtagaaagaaacataggccaatatttattcaatctcaaagtgacaactgttttctaagaatatgtgccaataaaatgaaacaaaaacatataaacttcacaacataatattctaaaatttctgcccataaacaacaaatgatttaaaa

SEQ ID NO: 735725 - DNA, 612 bp, Homo sapiens
gattctgaatcatgtacaagccctagtgggttcagggctgagtttataacttctctgggaaaaaaaaacaccccttaattttttttttttaattagagtctgggttaagatctttaagcttccttttttcctctctatggtgaccctgcatttttcattttgtgcatcaaggaatctggctttctatcaggatctcacttctatcgtcacattccatatgagcccaacatttacctcctatcattttgatgtcatttaaattcacaactcttggttaataagataagtatatgtcgttagggcagccagagycttagcctacccactctagactcagttctccttcagggtctggtattttgaaatttccctagctttcctatttcctcagatctatatcttaaagtatgttagtagtatttcttcaaaacattacaattctctttagagaaaagttgttttattcttattaactatttggctatattgttgaaaacagatttgagaaatgtcttagaggtcatctagactaatgcagtatccagtgtttgaattctcctacttctagtaatatcactatttacgaaaaattgatgtgtgccagtttgctaa

SEQ ID NO: 735726 - DNA, 590 bp, Homo sapiens
catgtaaataattagcttattgttatgttatcagtagtaattattttttctagtgagtcacagtacttcaggcattggttttaatctaaacctttgagttcacaccatgtcagcacttcagtattgaatatttaattttttttatagttcctcatataaaatttttttatcctttctggtcattctctagatgagctccagttaatctaatatcactcaaaaaatattatcaaggactgaatataattttctaggtatcagatgaagaataatgtgtggatttgactgacatttctaagrtctgaatttctttagtcaccttgtggtagcactctttagaaaattatatttaccactgtttattttcctttcttctacacttggtgtgaatggctctggatttttttctccttttccactgaagtcagctcatatttcaaagatcaccaataagtacaagtcttacagccaaagtcttttatctgtgccttactgagacattttaatgtctttggtcaatacctggcaagacaagttttaatgaatgtcatgataaatatgtgatgcgaagctgtgaatattctgtcatt

SEQ ID NO: 735727 - DNA, 590 bp, Homo sapiens
catgtaaataattagcttattgttatgttatcagtagtaattattttttctagtgagtcacagtacttcaggcattggttttaatctaaacctttgagttcacaccatgtcagcacttcagtattgaatatttaattttttttatagttcctcatataaaatttttttatcctttctggtcattctctagatgagctccagttaatctaatatcactcaaaaaatattatcaaggactgaatataattttctaggtatcagatgaagaataatgtgtggatttgactgacatttctaaggtctgaatttctttagtcaccttgtggtagcactctttagaaaattatatttaccactgtttattttcctttcttctacacttggtgtgaatggctctggatttttttctccttttccactgaagtcagctyatatttcaaagatcaccaataagtacaagtcttacagccaaagtcttttatctgtgccttactgagacattttaatgtctttggtcaatacctggcaagacaagttttaatgaatgtcatgataaatatgtgatgcgaagctgtgaatattctgtcatt

SEQ ID NO: 735728 - DNA, 586 bp, Homo sapiens
aggctgacttcagattatgcacaaacacacactttagagtagagaccagataggtttgcaagtgaaatattctctggctttattcaaaaagtaattttcatgagatgctgtgcttacttatacaggaagcagaatctttttttgttcagcaaaatactttggtttgttggtttcagatgacccaacagaaacttgcttacaggaattaggggaaacaatcaggtgattattcggctcttatgtacattgaggtcaacaaagtgtggtytaatagcctaataacagtttgctcctgagcatgactatccaaggacaatgttagagaggcagtattgcattacaggtatagggtataggaaggaatagaaacaagagatcaagagttgaaaagattagaacacttggtgaatatcgtacaatgcagcatgatcctaaattatttgggacataattaaataacaaagttaaggtgccatacatttattcttattgtgtgctggtcaccctatatacagatagtctgatggatttaaaagcagagagacaggttagaaatagataggaaagaaagctgaaaaagaagttt

SEQ ID NO: 735729 - DNA, 612 bp, Homo sapiens
gaagtatgtttggagtcagacacacctgggtgtttagatctaacttctggttctttattaactaatttagggatatggggcaaatggcttaacttctttgcaccttgtattacttacctctaaatagagaatgatccctaatgtcactgtgctcatctgagctaaattgataatacatatgtaaaagttatttaatcctttatgggtatgtggtaatcagtagcttcatttcataaactttgttgaatgaattgatttaaaaatcctaataataatgatgggccaggcacagtgactcatgcttgtaatcctagcaatttgggaggccaatgcgggcagatcacttcaggccaggagttccagaccagcctggccaacgtggtgaaaccttgtctctactaaaaaatacaaaaattagccaagcatgatggtgtacacctgtaatcycagctacttgggtggctgaggtacaagaataacttgaacctgggaggtggaagttatagtgagccaagatcccactgctgcactccagcctgggctacacagtgagaccctgtctcaaaacaacaaaccctaagtaataatgatgacaaacatttaaaaaatacc

SEQ ID NO: 735730 - DNA, 608 bp, Homo sapiens
gtcatttttcattgccacttcactcaaaattagggccaagataatttcaccataaagaaaggtataaatacgccaggtgcagtggctcatgcctgtaatcccagcattttgggaagccgaggcgggtggatcacgtgaggtccagagttcaagaccagcctggccaacatgatgaaaccccatctctactaaaaatacaaaaaattagctgggtgtggtggcgcacacctgtaatcccagctactcaggagactgaggcagragaatcgcttgaactcgggaggcggaggttgcggtgagtccagattgtgccactgcactccagcctgggcaacaacagcaaaaaaaactccatctcaaaaaaaaaaaaaaaaaaaaaggtataaataataagtatagcattttccttgctgatgcacattaacattgacttttcattaaaattacttttaaaaagtatacttttagggcaagggttaggaaattataataatccttaccactcatgtaaaaagagcatacataattgttttaaatgacaataagcctgatcaacttgaactaagtattttttaaaattgcttttaaaagatcagtttttaaagaaa

SEQ ID NO: 735731 - DNA, 608 bp, Homo sapiens
gtcatttttcattgccacttcactcaaaattagggccaagataatttcaccataaagaaaggtataaatacgccaggtgcagtggctcatgcctgtaatcccagcattttgggaagccgaggcgggtggatcacgtgaggtccagagttcaagaccagcctggccaacatgatgaaaccccatctctactaaaaatacaaaaaattagctgggtgtggtggcgcacacctgtaatcccagctactcaggagactgaggcagaagaatcgcttgaactcgggaggcggaggttgcggtgagtccagattgtgccactgcactccagcctgggcaacaacagcaaaaaaaactccatctcaaaaaaaaaaaaaaaaaaaaaggtataaataataagtatagcattttccttgctgatgcacattaacattgacttttcattaaaattacttttaaaaagtatacttttakggcaagggttaggaaattataataatccttaccactcatgtaaaaagagcatacataattgttttaaatgacaataagcctgatcaacttgaactaagtattttttaaaattgcttttaaaagatcagtttttaaagaaa

SEQ ID NO: 735732 - DNA, 628 bp, Homo sapiens
tgaaaacacacacgagtcttaattaaacagtcaatatcagactttaaggcattcctctcccaagaggcgcttcctttaaagtcagattcaggacaataatgactattcttaccattatgattcagcattattctgaatctagatcaaaagaataggtaacaaaaattagggtaattatttcaggtaaggtggaactaaaagtatggtgtcaatgctatgattatacctaaaacatctgaaacaacttaaaaaaaaaacacttttagactaaactttaaaatctactgaatacatatttaaaaaaaaaaaaaaagtcaggagccttcctgtatagcatccagataaaaagtaacagtgttgacggaagattgttccattcaaattaccaacaaaaarattaattgaaaatttctcaaagagaaatatgcaggaattacatgttaaaactttactaaaatgtaaaatatttaaacaaatggcgagaaataaggactttttaaaatgccacttaagagctgggcgtggtggctcacaccttataatcctagcactttgggaagccagggcaggtggactgcttgagcccaggagtttgaagctagcctgggcaacatggcaaaaccctatc

SEQ ID NO: 735733 - DNA, 602 bp, Homo sapiens
cgcccacctgagcagactaatcaataacataatattaggaagtgatcagaactatgaaggaaatcatgtaaggtagagggatagatagataggcagtggcggaatggaaagtggcactgagtatggggaccaggaaaggccaccggggaagaccattccagatggaaatatttctgggggaattctctgacatggggacaaaaatggggcatgtgagaaacagccaggaagtctctgcagcctgggcacattgggcagggtatgaatgaaagtaaacagagacagagaagaaaccagggaccagttcwttccggctacacaggccatggcaaggacttcagattttgttctaagtgggatagaaagctactggaagtctataagcaggacagtgacatataggatttaccttaaaaggatcactattacaggggaaagagactgtaggagaggactggaagtgggaaaacgatgaggttggtttaattttccaggtaaaagatgatggggacatgggctagtggggtggggacggaagaggtgagaaatcgttggatttagagtctatttttaaaataattcaggatttgtcaataggttgg

SEQ ID NO: 735734 - DNA, 580 bp, Homo sapiens
tattagacacacaagtggaaatgttaaatagggaacttgatagaccagcatggagtgaagggaaagatcaggactggaaatagaaaagtgagtgtcattagcatttaaacaaagttgaaagcagaaggctgaatattatcgtaattactgccagcacctgcttctcaatttacagctctttctctagggatgcaggagtgaatgaaaagctatttttcaatctttctgttccacctttcccttctctaccccctcgagattaccccatccagcttcaagtggtcactgtctgctattcctggaagtgactttgcctctcctgcccttcaccgcatttgggccggtgcagctggactggtgcacgtgggagcacatgctytggtcatctgctaaggcagagtcttcccagtgctggagcttggctgctttgcccatggttccaaactaagtctaggcctgacctctctaaagcctggacccctgacaaaggcaagtcttttcccaggagcttgcctgccactcctctcaccattccacagggccttaatgtcttttttgtttgttttttgttgttgttttc

SEQ ID NO: 735735 - DNA, 671 bp, Homo sapiens
atgcttacctctgtcatatcctccctgcttctgccaagcttaggctgctcttccacaccagcataaacaaccatattcctatatagtaagagttcatatttatcatacgcatagaaaaaaatattagagcttcatggatagaaagcattagaaggcacttttaatgaactctaactagatgctaagtttggggagatgagtacagcagtaacagtctaggccttaaaaatctatcagatcactgtgtcctaatgacaaatggagtaaataaggagagaaaaatatgtatttctctgggctggtttaggcatatgtattattaataggtaggaatataatttagagcagctattaataacctccttagccatataaccatgggattcagaaaggctaagggtttttgcacaaggaaagaggcaggaatgaggcatagcattggcaggagcaaaagaaagagaggactagggaaggggaaagataaaagaaycttcaagtgcctctgaacctccccagaaaccaaaatatgataaagcagttatatcaaaggcatttaatgataaggtgcacagtaagttacttactttggccaggtgtagtatccccagtgagttttttccacaaagcaacttgactcccattcttttttagttcttggtatagttttgctg

SEQ ID NO: 735736 - DNA, 598 bp, Homo sapiens
aaaaaaggtcagcatcggccgggcggtggcccacgcctgtaatcccaggactttgggaggccaagatgggtggatcacgaggtcaggagatcaagaccatcctggctaacacggtgaaaccccgtctctactaaaaatmcaaaaaaaaaaaaaaaaaaaaaaagccaagcgtagtggcgggcgcttgtagtcccagctactcgggaggctgaggcaggagaatggcgtgaacccgggaggcggagcttgcagtgagccgagatcccgagatcgcgcctctgcactccagcctgggcgactgagcaagactctgtctcaaaagaaaaaaaaaatcagcatcactaatcattaggaaaaggcaaattaaaaccacaatgagatattaccttatccttgtgagaatggctattaccaaaaagaccaaagacaacaaagtgttggcaaggatgtagagaagagggaaccctggaacactgttggtgtgaaggtaaactagtacagccattatggggaacagtatggaagtttctcaaaaaattaaaaatagaactactatataacgcaatgatcccactattgggtatatatccaaaggaaa

SEQ ID NO: 735737 - DNA, 629 bp, Homo sapiens
aaatttgtataagtaatgagaagccaaatattaatccccaagacaatggggaaaatgtttccagggcatgtcagaggtcttcaaggcagcccctcccatcataagcctggaggcctaggaggaaaatggtttcgtgggccatgcccagggtccccrtgctgtgtgcagcctagggacttggtgccctgcattccagctgctacagccatggctgaaaggagcaaatgtagagcacaggctgtggcttcagagggtacaagcttcaagccttggcaacttccacatagtgttgagccagccagtgtacagaagtcaagaattggggtttgggaacctctgcctagaattcagaggatgtatagaaatgcctggatgtccatgcagaagtttgctgcagggcagggccctcatggagaatctctgctagggcagtccagaagggaaatgtgggatcagagcccccacacagagtccctactgaggcactgcctacaggagctgtgagtagagggccaccatcctccagaccccaaaaccgtagatccactaacagcttgcactgcatgcctggaaaagccacagacactcaatgccattccatgaaagcagcctggagggaggctgttccc

SEQ ID NO: 735738 - DNA, 629 bp, Homo sapiens
aaatttgtataagtaatgagaagccaaatattaatccccaagacaatggggaaaatgtttccagggcatgtcagaggtcttcaaggcagcccctcccatcataagcctggaggcctaggaggaaaatggtttcgtgggccatgcccagggtccccatgctgtgtgcagcctagggacttggtgccctgcattccagctgctacagccatggctgaaaggagcaaatgtagagcacaggctgtggcttcagagggtacaagcttcaagccttgrcaacttccacatagtgttgagccagccagtgtacagaagtcaagaattggggtttgggaacctctgcctagaattcagaggatgtatagaaatgcctggatgtccatgcagaagtttgctgcagggcagggccctcatggagaatctctgctagggcagtccagaagggaaatgtgggatcagagcccccacacagagtccctactgaggcactgcctacaggagctgtgagtagagggccaccatcctccagaccccaaaaccgtagatccactaacagcttgcactgcatgcctggaaaagccacagacactcaatgccattccatgaaagcagcctggagggaggctgttccc

SEQ ID NO: 735739 - DNA, 577 bp, Homo sapiens
tgtcctagtcagctggggcttctaaaacaaactaccttagactcagaggctgtgaacaacagaaatgtatcgttcacagttctggaggctgagaagtccaagatctagacatgtgtaggttctgtgtctactatgggcctgctttctgattcatagatggcatcttcttactgcgtcctcacaggatggaagggttgaggcgcttgggcctcatttataaggacactaatcccattcacaagggctctacccttacaaccaaatcacctctcaaagcttccacctcctaataccaccacttcaaggatagaatgttaacgtgtgaatttgtggggagacacaaagattcagttcatagcaaggggtaaataaatttcccaggtagtctagacagccaagaggttccagcaggaaaagctcgtgarggaggtgacatttatctggaccatgaagaatgggtctgagagaaggagtgacatcagtaggctaccttccagttccttgcctgaaagcggggaccaagctcttaactttcctgtagattcaatggctttacaagcttgcactctcgtgttta

SEQ ID NO: 735740 - DNA, 591 bp, Homo sapiens
atattactcagagccgtaagccaaagatggacccagcccaggaaagtggcaggcagtggtctggagtgggaagacattggggaataaaggtggtcagaaggctaccaggaaagcgcaggggcaagttacaataggggaatgagctgtgtcagggttaagaagcagcagctgacacaagactcactagacccacgtcccagcctagagcaaccagtgttaatgacagcagcmccagtggagcagaaagcagtacctcaaggacaggcaatggcagcaggattggccctggtccagctgctgaggatgcagactgacctaacatccgagaacagtggaacatccctgaggatgccctggaggaactaaggtcttgccattaaacagggacacccactgagctcatatagcctgggcattcccatggaagtgactccatatccacctagagacaggggatctctagttacttttgagttatacagcataagaaataattaagggggaaattaaaggaaagaatattttcaatggctcctcattgccaatcttccaaacctgttgcaagatattcatgatttgaacccacaccac

SEQ ID NO: 735741 - DNA, 631 bp, Homo sapiens
ttcttcctcctcttcctcttccccctctcctctctctttctctccatgtctacagtagagaaaagtgccagataaaatttcaagtgatagaggagaaagtgctgctccaagagatacaagactatccaaaaagaagagaagataactgacaaaggaaaagaaaacttagtcacctcccattctgtcagcaagaaaagtattctgtaaattacctatgttttcaaagagacagaaaagactgcatatagctgatggttgctgttggttgaagagacccagaagggaggagtggagacagcagtgctgtccctgagatatagtcatggcaggggagtagacttgaaacaaactctttcagagtcagctaagctagcactgtggggaagaaggacagtaaggttttgtaaccttggaaaactaaccattgagttaaaagttaaaccttgtctttcaattaaaattttttstctagttctgctgtatttctagcatcctgagagtgctgaggacatttgggggatatcatcctagccacatgaaactaaaatatcatctttgtagattgattggaagttgtactaagaaacattccatagttttataaaactcagatctccctgaatatgagtca

SEQ ID NO: 735742 - DNA, 537 bp, Homo sapiens
ctttaacaccccactcatcatctcttgaatggatacagtgtgtgcattcctgttaatgtgctgcccttatctggaagtagttatgtcccaaggagcctgaaggaaaattgtaagctcacttaaacgcccttcctatcatcctagtgacttacatcaacacagcataagatcacttargtttgggcagtcttgtttcacttatgattcactcattttgctcttgaacctgaaatgcctacatttctttcccaatatgctgctgagctaacctaaatacaggaccttgtatttattcccgttgtttttagtctcattagaggcagctcattactgcagtgtagcagtatattttttgtattttaattttatctccctctgccaaattccatattcttagtcattgaagaacttgtatatgacttgtattgatatcatggctaaaacatttggtagggttgggtcaaggtcagacctctggcattatgttagaaacctctataggttgatgtatttcattcagctgtttacagattgttg

SEQ ID NO: 735743 - DNA, 537 bp, Homo sapiens
ctttaacaccccactcatcatctcttgaatggatacagtgtgtgcattcctgttaatgtgctgcccttatctggaagtagttatgtcccaaggagcctgaaggaaaattgtaagctcacttaaacgcccttcctatcatcctagtgacttacatcaacacagcataagatcacttaggtttgggcagtcttgtttcacttatgattcactcattttgctcttgaacctgaaatgcctacatttctttcccaatatgctgctgagctaacctaaatacaggaccttgtatttattcccgttgtttttagtctcattagaggcagctcattactgcagtgtrgcagtatattttttgtattttaattttatctccctctgccaaattccatattcttagtcattgaagaacttgtatatgacttgtattgatatcatggctaaaacatttggtagggttgggtcaaggtcagacctctggcattatgttagaaacctctataggttgatgtatttcattcagctgtttacagattgttg

SEQ ID NO: 735744 - DNA, 512 bp, Homo sapiens
ttttccttctttttcttcttacacattggttgtttcatattatactcttgacatttaaaatttttggttcttggcattatttgtttcactgttgcatagtaacatttttgttctttgcaaccatctgcttattttaaggtgtgtaatttttcaatggctggaatacttttatatctttacttgccttaaatgctaatctaggatctttgtgtagcatttttttyctttatagaccttagatcttctctttaatgagcacttgatacagaaagaagaaattttatttagttgataatattttgttttacatctcaataagcattccacatacactaaaaaatatagattgccataaaattattacattgtataaagaactagccatttttatcagtgaggaagtgaggctcagcaaggtagaaactccccccagggcacttaggttttcatcctactcatctcatgtctcaggatccttctattcatacttgagaagatcctgcctgcagttc

SEQ ID NO: 735745 - DNA, 596 bp, Homo sapiens
atattcaacattcttaaagaaaagaatcttcaacccataatttcatatccacccaaactaaacttcataaatgaaggagaaataaaatcctttacagacaagcaaatactgagagattttgtcaccaccaggcctgccttacaagagctcccaaaggaagcattaaacatggaaaagaacaaccagtaccagccactgcaaaaacaagtcaaattgtaaagaccatcgatgctaggaagaaactgcatcaagtaaygagcgaaataaccagctaacatcataatgacaggatcaaatttgcacataacaatattaaccctaaatgtaaatgggctaaatgcttcaattaaaatacacagactggcaacttggatagagtcaagacccatcagtgtgctgtattcaggagacccatctcacgtgcacagacaaacataggctcaaaataaagggatggaggaagatctaccaagaaaatagaaaacaaaaaaaaaagcaggggttgcaatcctagtctctgacaaaagagactttaaaccaacaaagatcaaaagagacaaagaaggccattacataatggtaaagggatcaattcc

SEQ ID NO: 735746 - DNA, 551 bp, Homo sapiens
aataactgaaacattatagattgctgtcaggagtgtaaaatggtgtagccattttggaaaactgtttggcagtttcttaactgttaaatagttaaacataaacttattttgggacccagcaatatcaagcgaaacaatgtacacctccaaaaaaactgtacataaatatacatacattactcataataaccaaaaactgaaacaactcaaatgcccatcaacaggtagatgaataaagaaataaatacatgcacaatagtcccccrttattctcaggagatgcattcaagacccccagtggatacctgaaacctcgaatagtaccataacctatatacgctgttttttcttatacttatgtacctatgataaagtttaatttataaattaggcacagtaaaagattaacaaaataaccaataataaaatagaatgtttatagcaacgtactataataaaattatgtaaatgtggtctctctttcaaaatatcttaattttttggcaggtaactgaaactacagaaagtaaaatcacgaattagtgggagac

SEQ ID NO: 735747 - DNA, 510 bp, Homo sapiens
cctatctctacaaaaaataagcaaattaactgggtgtggtggcttttgcctgtagttccagctatgcaggaggctgaggtggtaggattgcttgggcctgggaggttgaggctgcagtgagtcatgatcatgccacttctctccagaaagagcaagaccttgcttcaaaaaaaaaaaaagaggggggaagggaggaaggaatttagagaacatgcaggtcattgcacagaatggaagtatacctgtatgtrttattaaagtttgtgatacagtgtttgttagcctacacacaggccaattggttattttttaagtagcttttatccatccagtgtggaaatactgaatatttatggctaggtcctgaaatttagacctcaagagtagtcattggttcatctctaagtcatgagcagttagctgtctgttcattagtgtgtccttaaaaaaatcagtgttttgagttggggaagttgtatcttttagaaaattgagataaggattaggaag

SEQ ID NO: 735748 - DNA, 655 bp, Homo sapiens
aaactatattagtgatgtgtactgtcagaataataggaaattcttatggccaaacgtttcactgtctatatttgtatgtacaaatatatttttgatactgttcatgaacacctcaaatatacattgaatatggaatatttttcttttttggatattaatccagaaaggctacaattaaaataataacagaaagacatacagagtcacaaaactaatagaatcaattaaatagttacagaatacacagactatcaaagtaaaatgtaattgtttccctgttaagcaaataaaacaataactaagcaagagtgatttatataggagaatcagattccaagtgttataacacttaatgtaaacaccatgagatactctagtatttaatgattccaactatattgttagcacctctcaacttatgtgcatatgtttgaaagtcatccagctttctttttgtacaaagttgtgaatgaaagtaagggatgaaagggaataagacagmatagggaagaagaaagggatttagtgagggtggaatgggaggaaagaatgggaaggagtgatggaaagagaagcataaaaagaaagagagtaaaggtagagacttacaaatttataggcatatgaggcataggatatgattttctgataccca

SEQ ID NO: 735749 - DNA, 570 bp, Homo sapiens
gatgtttgctgatggtgtacagaagggagagattcaatttttttccatatgcagaatcatttgtcttaacattacttaagattttaacacaacactaatctacaaagctacctctattttaaaatatgacacttacatatatgcatgataaatttttccaatttgtactattggaaactacagaccctaaatgatgcttagccctaatttggggaacgaaaagagtagagagctcaatggctctgcttaagaaatttaagtgatttagcagtggagggtggcaacataaaaagacaggagttttgatttggattatagtcaktctcaagaaaatggagaggtccagacaagataaaattcctataaaagcaagaatgatggatttttagaatagtgatgtataatcttcaatacaaagttgctgtttgaattagctattcagttttctgaatctccagtaaatgtcagccacatattagtgtctgggaatttggagagcttttcatgaggaacaaagcaacccaagaaaaaatgagtcattttagaaggcaagatggagatcaggggtca

SEQ ID NO: 735750 - DNA, 589 bp, Homo sapiens
ttacagatttatcattttggccttagataaaatagagaaccaaggaccaatatttatctcaaacatcaccacacaatagatatcaactttgtattacatttttgaaaaggttatataactactggagacaaagttaagtttttccatttgaagatttgttgacagtgtaaaagagattaattattaattactgagattatttttgtcttcaaagtcatataacctcattcattaaggcccaaataattgcatwtaagtttaaacatcatatatatacgatgaaactcattttacaacaaatactgaaaagaaggatcaaaaataaagagatgcccaaagtgcttatctgcccttaaaatagaactatttcaattcggcaagaaaaatagtgaattctgggattatacatctaaaacagttccataaaaatgtatattagattctgatgcaatagttgtccctcttttaagaaactttgtttggatatattgactaaattggacaggttaaataattttactgtggaaaccacttgtcaacattgcatagtggaagagtcacacataaacctacccaagccattatttct

SEQ ID NO: 735751 - DNA, 524 bp, Homo sapiens
cctacccttcataggtagcaggagagggaagtcactcccgaagtctgtgatttcagaactgtcttgcctcagcaggagcctgtaggagagacctccgtagaaggggctgaggcttccccaggaaatgtactgttttctactctgaaagtgagctcagatcaggagcataaaggactgggaaacatgctcaagttcccctgcctcagcacctagtgaatatgtggagaggaagagggacttcagtgggtatgagaaacactctccayctgaaacaacaaccccctgtcttagactgttttctgttgcttataacagaatccctgaaactgggtagtttataaagggaagggatttatttcttgcagttatagaggctgggagatccaaggttgaagagttgcatctggtgagagccttcttgctggtggggtttctctgcagcgtccggagttggcacagggcatcgcatggcaatggggctgagtttgctatcatgctaactctggtctctcttcctcttctta

SEQ ID NO: 735752 - DNA, 688 bp, Homo sapiens
tctttgtctccctggtctctcatccttcagtagtttagcctaatcttcttgacatggtggctgtcttctaagagggcagatgtggaagctgcagggtctcttaagaaggagccctgcaagtcacatgttgctgctctgaaacatcctactgggtcaaccaagtcacggggacagcccagatccaaggggagtggagacagacgccccctctggatgggaggaacagttggtggccatctctgcagacsacccaccccaaggatgcacactcaccgaagatggtaggtctacctctttcctcgagtctgaccctcaagtccttgcttgaaattgcctcaaatttccagtaacagccaagtcaaaattggacatttgtatttgttagaatttttttccatttagttgaaatctaattcccgttccagggtggtgatatgaatttaggcaggctctttaaaccttcctagttatgaaatgaactattttccttgtcaaggattagctcatgatggttgtggcagaagaccccagtgttaaaggagatataaatacacacacacacccttttctgctgtaaagtggttctgccctgggggtgtgggggtggggggtcacagaacaagaaaatgtcgcaaagaaagcccttagaatactttgtctttatagccttatctcacataaaatggct

SEQ ID NO: 735753 - DNA, 580 bp, Homo sapiens
catacctacttctcaaccctaactggatgactttgaagcaaatcccagatgtcgtatcacaaatatagttgctcattccacatggtgaagagaagatgcctttcctttccctgcactttgacacgaataccaattccaaatatctcacatttcctctgaagccttgtactatttctgtattatttgagatcatttgtattgcaagtaacaagctaaccagagctaacataagcacaratggtccctggtggtctagtggttgggattaaaaaaaaaaatttcattgaaagagtgccaaagcatcttacagaaccctgagaaaaaactgaattccacaggaatggcaggaaccttgacagcactggcccctgagcagcaggcatctcagacccttctaggctgttgtcatgaacgtgactcacaacacctttccaagtctctgttttggttagacgtctataatcctagaagaaagacaggagaatctgatcctagacttgggtcaggtgtacactccttgaccaattagccacagagaagaacagggaggtgctgccatcgagtccacctctggccaggt

SEQ ID NO: 735754 - DNA, 605 bp, Homo sapiens
caggaaaaatacaataaaatcacattgtcagcatgtggaagaaatgcattctgttcattctgaagcgatttcaaacgacgcatgctgcaactgtgaacgcgcagaggccagaatacaaacgtgtgtggtccctccagaaattaggrgccatcaccagatgccccgtctggactctctcactctagtcagatgagtgcacagtccttcatttacaattctaaaatgcagaacagcctgagagcctaaagtttttattcagtacccatttggtggcaaaatctgacctaaacagaagagatatatttacttactcttacagtgattgttcttatgttccactgtaggaatattagtgtgtctggttgtaagtgctaccctaaggctcagttgaggagtcatatattatatggtatttgagctacattccgaattctgaaacacatctggccccaagtatttcaatgaaggggctgtgaacctgcattatggttcagtttagtgcaggcgtctatcacatgaggtctatgttgaggtcacacagctaacagaccaaaagtcaaggaatcatcaatagaagtaacaagcttatcatattcctgctgctt

SEQ ID NO: 735755 - DNA, 633 bp, Homo sapiens
ttaactttaggtcatgaaattcagctaacagatatatcaatccaaatgatggactggtcatgactgctaatagaaggaatttctccttgttattaaaacaactacaccagaggcaagctagcctgccacttagacaaatcacactctaagttttaaagtctaatttcagtttttctcttacaagaaagtcttttagaaaattctttttacattacctaaaggcacaccrtgcattacaaaaactaataatgcattcataaaagcattcaaaagaaaattacagctgtagctcctttcttatcttcccacccttagaaatgactctactctcttacactgctttcaaaaaacactcagatataattaaaagcagaattgatgctctttgtacattgaagtgattcagtgtatgtaccttcaaattgattttaggttccaatcacacacaaaacaattagtccatgtttttccatttggtccatgcctaagcaataaaaagcaaattacggctatattctcccaagctgccatgatgatgaatggggtaataaccatactgtttccatgtcatgggaactcatgataataagaatgagcattaagtatttatggcaaagatatattatgagctaa

SEQ ID NO: 735756 - DNA, 633 bp, Homo sapiens
ttaactttaggtcatgaaattcagctaacagatatatcaatccaaatgatggactggtcatgactgctaatagaaggaatttctccttgttattaaaacaactacaccagaggcaagctagcctgccacttagacaaatcacactctaagttttaaagtctaatttcagtttttctcttacaagaaagtcttttagaaaattctttttacattacctaaaggcacaccgtgcattacaaaaactaataatgcattcataaaagcattcaaaagaaaattacagctgtwgctcctttcttatcttcccacccttagaaatgactctactctcttacactgctttcaaaaaacactcagatataattaaaagcagaattgatgctctttgtacattgaagtgattcagtgtatgtaccttcaaattgattttaggttccaatcacacacaaaacaattagtccatgtttttccatttggtccatgcctaagcaataaaaagcaaattacggctatattctcccaagctgccatgatgatgaatggggtaataaccatactgtttccatgtcatgggaactcatgataataagaatgagcattaagtatttatggcaaagatatattatgagctaa

SEQ ID NO: 735757 - DNA, 598 bp, Homo sapiens
ttttgaaattcatatggaaccaaaaaagagctcgaatagctaaggcaaccctaagcaaagctgaaggcatcaccttacccaacttcaaactatatactacagggctacagtaaccaaaacagcatggtactggtacaaaaacagacatatagaccaatggaacagtagagagagcccagaaataatgccatacacctataaccatctgatcttcaacaaagttgacaaaaaaaaagagtaatggcaaaaaaaaaaaaaaaaagcaatggaaagkactccttattcaataaatggtgctagaataaatggctagccacatgcagaagattgaaatttgaccccttccttacaccatatacaaaatcaactcaagatggattaaagacttatgtgtaaaaactcaaactataaaaacactggaagataacctaggacatgccattctggacataggacttggtgaagatttcataatgaagacaccaaaagcaattgcaacgaaacaaaaattgacaaatggcatgtaattaaattaaagagcttctgcacagcaaaagaaactatcaacagagtaaacagacaacctactgagagaaaa

SEQ ID NO: 735758 - DNA, 574 bp, Homo sapiens
cttgaattttcaaaataggttctatagctctccacccttatggtccagattatcacctaggagaccaagaggagatgaactctttctggggaagggtgcatttagtgaccatactgccttactaaggtgtgcagtgagagttagggttagagtcagaaatctttttgagttgatttttgagaaggcctttccaatgttcaaaatgataccagatacctgcaaatgggagtgtgaaatgtccattgaataccttgactagtggtccattgttgaatggcctttgcaatcccttctcccaagtctcacmggggtgatgtgagccagacagatgtcacacatgcagggagttgtattacaggaggggtaacactgagctcagggactccactgcttttatagcaaacagtaagcaagcttgctctctgtcctgatgggagacatcccttcatttttcaaggttgcttgctgcaacctaaccctgagaaatgtcttggataaagagtggtgagagccttgcattcttggcatacttagcaaggtgtgtaggagtacaagagcctcacagaaaggagcc

SEQ ID NO: 735759 - DNA, 550 bp, Homo sapiens
ccttctggctctatgaattttggctattccagatagttcgtatatgtggaatcctgtactatttgtccatttgtgtctgacttatttcactttggcatactcttttcaaagtacatccatgttgtagcatgtttcagaacttcattcctttttgkggctgaataatattccatattacacatataaataaatgtggtatgtatataccacattttatctgttcatctcttgatggatacttggatcgtttccaccttttggctattgtgaataatgccgcaatgaacattggtgtacaagtatctatttgagcctggattttcattcatttgggtaggagtggaattgttgggtcttatggtaggtctgtttaaatttctgaggcccaccaaactgggaatcttttaagaatctagcaaatggtttttctctcctctgtcttcagttattttatttatagtatgccatacatatatccatcatatataaatatacatcttgctatattccccctcccactgtttgtgattttgtttgtttgtttcttagg

SEQ ID NO: 735760 - DNA, 631 bp, Homo sapiens
tatttttgcagagtgcttactaccaagattttgttccagccttttggactatgcttgatatacaaataaaagtaacaagggattaaaacagaattcttctattgggctcagagaggactcttcaccaactccggaaaaagaatttgaagccagttaatcccactggagctaaaagtcttaaggataataacttttattacatgaactcttctagacaaaaatagaattgtaagttagggggaaatgtgtattctgcatcatccaaaataaaatttgccatccttggatttcttccttgcctaagcccagtctttagaacaagaagtatgatttcacaatgtaggaaattattttaaaatatctttgaaagccmgggtgcagtggcttacacttgtaatcctagcactttgagaggccaaggcaggaggattgcttgagtccaggagttgaagaccagcctgggcaacacagtgagacctcatctctacaaaaaataaagaaaattttaaaagtaacatgcgtggtggcccatgcatgtagccccagctactcaggaggctgagatgggaggattgcttgaacccaggaggtcaaggctgcattgagccaaaatcaaactactgtgctccag

SEQ ID NO: 735761 - DNA, 611 bp, Homo sapiens
ctccctattgctccctttctctcaccatgcaacatgccagttcctctttgccttctgccatgaatggaagcttcctgaggtactcaccagaagcagacactgatgtcatgcttcttgtacagcctgcagaactgtgagccaaataaacttttctttataaattacccaccctcaggtatgattatgattatgattatgattatgattttttgagatggagtcttgctctgtcgcccaggctggagtgcagtggcgtgatctcagctcactgcaacctccacckcccaggttcacgccattctcctgcctcagcctcctgagtagctgggactgcaggcacccgccaccacacccagctaattttttgtatttttagtagagacagggtttcactgtgttagccgggatggtcttgatctcctgacctcatgatctgcccgccttggcctcccaaagtgctgggattacaggcgtgagccaccgcacgcagcccaggtattattttacagcaacgcaaaacagactaagacacctggtttggaagtttttaaaacagctccatatttacatttttttctctttgtattcctactaaaacaagctcactaaag

SEQ ID NO: 735762 - DNA, 578 bp, Homo sapiens
atttgaaaaacaatttgattagatcacaacattttaggggcttgtttattatatatagtgaggcatacctacaattactgtttttgttttcattagccatttaaacacaaattcaagtttctgtcttcaaggtatcctttgctatatctttgagtttttaaacaagccttttgaaatgagaagataaagatgaagatatccaaccttgactataaacaactttcaaattttatacttaattgggcartaaacaatgctgtcttattaaagccatatagtcttttctgctcttaaacaattggtagtcttttcctggaatgtcattgtctgcctagtgttgtcaaagacttgggtaatcttgctgaaagaaagtaaaagtagcactattagaaaggctctcctgaaaaagaaaaagaagtgctatttgtggacaatgtgtggaatgcctttttaaaagatcatttaataagactgcttttgggtatcacttgaaagtatgtttatggatgggaatgttgaaattgcaaatctaaattgtttgtgtttagggaagataatgagaagacaaacacttaaat

SEQ ID NO: 735763 - DNA, 694 bp, Homo sapiens
acattattttgaagaagggaattgacaaatccaaagtaaggagactactgggttcctttggaacccagtgccggtagagccattgaggtagctttgatggaggtcagtgtacttgtggccttcataggagctatttgctgattgttcttcagaataagacattaactgggtttgggagaaaagggtcatggaacgatttgacagttgcgtgactggactcaagaaaattytggggcttctgtctcagcttctctctttgtaataattcctaatgctttcttgaagatctatcttaaattgcaacgatgagaatagctggtaggtgaaacagcaaaactaaagaccttggaaacggatagtgagggttcttgaatataacttctaagaatcttggggccaagtgaggtagcttatttttctctgtagctaattgcttgctgtgtaatctgttgctttgctactggacattgcagtagtctccttacttggtcttcttgctgccagttgctctctttttccaatctgtcttagtctgcttgggctgccataacaaaataccatagatttggtggcttacacgacagaaatttattttctcacagttttggaggctaaaagcctgagatcagggtgccagcatggtcaccttctggtgagggctctctttctggcttgcagagggataccttctcac

SEQ ID NO: 735764 - DNA, 584 bp, Homo sapiens
agtttctaattttggtgaagttcagtttatcaggttattcttttatggattgtgcttttggtgttgtatctaagaaatctttccttaactggtcacaaatgttttttcttatgtctacttgtagaacgtttttttgagaccrggttttgctctgttgctcaggctggagtgcaatggcatgatcatgtctcactgcagcctcgaccatccaggctcaagcaatcctcccacctcagcttcctgagtagctgggactacaggaatgagcctggctaatttttattttcttatttattgtagagatggggtcttgccatgttgcccagactggtcttgaactcctgggctcagaggattctcccaccatgggcttccaaagtgctgggattacgggtgccagccactgcacacggccttacttttagaacttttaagattttctttcacatgtaggtctgtgatccattttgagttaattttgtaatatggtgtgacgtatggattgaagtttttttgtgtgtgtgtgtatgatgagccactgttccaacaccatttgttgaatagattccataaattactctttc

SEQ ID NO: 735765 - DNA, 608 bp, Homo sapiens
tttcctaatggtgagatcaatttcttttttaggatagtgatttcattaataccttatggaatttggtttagtttgagtcatttttgcagtaaagttctatttttgtaagtaattttgaaagtcctatgaaatgtttgctgcaagttagtcatacagagaattgctttgatatttcaggtattttgatgttatgtccaaaagtgcttttgttgacccaaggctactgtattgtatttttttttttttttttgagatggagtctcactctgtcacctaagttggagtgcagtggcataatctcggctcactggaacctctgcctccccggttcaagtgattctcccacctcagcctcctcagtagctaggagtacaggcatctgccaccatgcacggctaatttttgtatttttagtagagatggggtttcaccatgttggccaggctggtctcaaactcctgacytcaggtgatctgcctgcctcggctttccaaagtattgggattacaggtgtaaaccaccatgcccggcctactgtattgtactttatcccaattctttgatatataaaccctttccctctctttaatcatgattcttttaaaaat

SEQ ID NO: 735766 - DNA, 503 bp, Homo sapiens
aactggagcgaggtagtgtctcattgtggttttgattggcatttccctgatgattagtagtgttgagcattttttcatatacctgttggccatggtacgtcgtcttctgagaaatgtctgttgaggtctttttcccttttgaatcaggttttttttttttttttctgctgttaagttcctgatatattctggatattaacgctttgtcagatggatagtttgcaaatattttctcccattctgtaggttgtttcttcactcttaattgcttcctttgctgtgcagaagtttttagtttgatgtcatttcatttgtccatttttgcttttgttaccagtgcttttaaggtcttactgaaaaaaacactygctcagcccagtgttgtgaggcatttctcctgtgctttcttctagtagtttcatggttttggattttacatttaagtcttgaatccattttgagttaatttttgtatgtggggaaaggtaggggtctggtctcct

SEQ ID NO: 735767 - DNA, 593 bp, Homo sapiens
attgtgctaccgcactctctcaaaacaaacaaaaaaacatgccccacaggacagtaccttaattagctagagtagatctgagagggcctcttcttgcctgcactgtgctccccagagctgatctaattctgtatcaataggctgttcccatggtcttgccatgcgcttgaagctgcrggagccttctcactgttcaggctggggtgtggttttcagaaccaccgggttgactactgaaaaccaagtgagccttacagctcttatcgctgggtaaagtgatcttgcctggtgcctcttggtcttcagctcaattttccaggttgtcctggccaagtcttgctctgttacgctcagtgcctctgcccactctttccccgccagcccttccctcccgccctgcaaacttgtcccttggctgtttcaccaggttctgcctgtatccttgcctccttggtacacaccatttcaggttcttccctttctgtgtcccattgtcctagttatgttctgttgtttgtgtaatgcccaaatttttctgctcgtgtggccttgaaaagtaggccagcctcagaggctgctgagctgaaaatgga

SEQ ID NO: 735768 - DNA, 593 bp, Homo sapiens
attgtgctaccgcactctctcaaaacaaacaaaaaaacatgccccacaggacagtaccttaattagctagagtagatctgagagggcctcttcttgcctgcactgtgctccccagagctgatctaattctgtatcaataggctgttcccatggtcttgccatgcgcttgaagctgcaggagccttctcactgttcaggctggggtgtggttttcagaaccaccgggttgactactgaaaaccaagtgagccttacagctcttatcgctgggtaaagtgatcttgcctggtgcctcttggtcttcagctcaattttccaggttgtcctggccaagycttgctctgttacgctcagtgcctctgcccactctttccccgccagcccttccctcccgccctgcaaacttgtcccttggctgtttcaccaggttctgcctgtatccttgcctccttggtacacaccatttcaggttcttccctttctgtgtcccattgtcctagttatgttctgttgtttgtgtaatgcccaaatttttctgctcgtgtggccttgaaaagtaggccagcctcagaggctgctgagctgaaaatgga

SEQ ID NO: 735769 - DNA, 653 bp, Homo sapiens
taaatctttttgggaataaagttggatatggaaacctatgactatatgtttgtttacttatatatattttgccctttctctgaacccaaattgtgccaaaatattctattttcttctacttggtagaagggtggagatatttatttcatcccaatctcccttgggaatctaaagaaaataaaaatgtttcctgaacatttttaaaatgggttaatttaccttggaatgtggcaattacactctgctacatataaagcatttatttataccattggcggacattgaataatgtgaattttcttcatttttgaaagctataatccccaaaccaaaggaatggtgtgcagcatctgttgaattttcttagtccttccattacaatgacgctaaaaaacagaagaaataggaatgaaaaatgaactgaatttcaggtaaagtaaacaataagttcccactatgcaaaaggcatgcaaaatggaactgccaggcacatgactctgcstgtgtgtgtgtgtgtgtgtgtgtgtgtgtgtgtgtgtgtgagaagtatggggaacctgagtaaggaaccaggcctggagtgcagatgcaggagagagggttctggagttcacgacttttggaatgggaatgattctatgtctgctagagct

SEQ ID NO: 735770 - DNA, 516 bp, Homo sapiens
gagatgtttttatgggaagtctgttgatatcacactttgaaagtgaattaatgatgagcttgggtaaattgaatattcaaaaagaagtcaaggaaggcccccatgggaaatatggcatatagtgtggtagtaaatggggttcctgtctcatcctcgtaggttgcagctctgaactctggttcccctctctctcttgggttgctctgccaagaagagaccagttgaagaataacwctgtatttcactatatggcattgttattacttctatttgcatattaatgttctagaatcagatggcagtgcaactacatacatgacaccagggagtataggaagaaggagcgggtggtttactacaggacacagattcctgtgtttgatctaaaaaataaaaaggcagtaaatacaaaatgtttttaaacaagagaagctttaaacctcaatgggctttggttcttgggcttgttagaacagtttggtctttgaaacactgagtgagctctcagggagagct

SEQ ID NO: 735771 - DNA, 599 bp, Homo sapiens
tttcagtttctaatatggaaaatattgatagctataccccacataaactaagctctttggagtccttagcaattttttttttttttttttgagacggagtctcactctgtcacccaggctggagtgcagtggcatgatctcggctcactgcaacctctgcctcccgggttcaagcgattctcccgcctcagcctcctgagtagctgggactacaggggcgtgccaccacatgtggctaatttttgtatttttagtagagacggggtttcactrtgatggccaggctggtctcgaactcctgacctgaggtgatccacccgcctcagcctcccaaagtgctgggattacagacatggccaccatgcccgaccctgtccccattttctatagaaggaaacttagacccagagaaattaggaagtgtgtccatactcactacagtgaacacccttggcacccctgtcaagtgcccatgtggtcatgatcaccagtgctctgcacccattccccagttccgtgtgccttgctgccaagggcttatggctggaaaattcttcaaaggcttgcctgtgggctgccatagccgcctcacctgtagc

SEQ ID NO: 735772 - DNA, 599 bp, Homo sapiens
tttcagtttctaatatggaaaatattgatagctataccccacataaactaagctctttggagtccttagcaattttttttttttttttttgagacggagtctcactctgtcacccaggctggagtgcagtggcatgatctcggctcactgcaacctctgcctcccgggttcaagcgattctcccgcctcagcctcctgagtagctgggactacaggggcgtgccaccacatgtggctaatttttgtatttttagtagagacggggtttcactgtgatggccaggctggtctcgaactcctgacctgaggtgatccacccrcctcagcctcccaaagtgctgggattacagacatggccaccatgcccgaccctgtccccattttctatagaaggaaacttagacccagagaaattaggaagtgtgtccatactcactacagtgaacacccttggcacccctgtcaagtgcccatgtggtcatgatcaccagtgctctgcacccattccccagttccgtgtgccttgctgccaagggcttatggctggaaaattcttcaaaggcttgcctgtgggctgccatagccgcctcacctgtagc

SEQ ID NO: 735773 - DNA, 643 bp, Homo sapiens
tacaggttgcaataaagctttcctgagaatcttcttttgaaaaagcaaacaggacacagactccagagttttcaaattattgtgatttctaggattcgtttttatggtttgggagtggaatgtatggcttaagcaaacacaattaaatccaaattacccgtggccaygcagccactggctgtctttccgtgtgggaaaaggcagggctttgtagggctagaaaatatctgaaaaaaatatgaagtgactctgtctttttttctttccctttttgtaaatgttcttttaaaacacaccaaattcctgaggaatttgctgttttatctgtttatttttttgatttgttagtgtcctagagcatgaaatcttatttaaaaggcactgttctttcttgatatggatgcccatgattttcattcttactttctaagtccaaaaatgaaatgcagttctgcctcattgggagcatttctgtattcttaaaatgtgctggtgtttttccggctaaagatgtttcagaagcagtgggtaggcaatttgttgtgattcatagtgaatttatttatatggagaattttctccaaattttaaacacagtgtaccctttggtacttcgcgtatgtgccaaagtgtcatctccata

SEQ ID NO: 735774 - DNA, 695 bp, Homo sapiens
taggtggtctgcataaggggctgggaaaccaggcttcccacagccttgggggttccctccaatttgttacctctgaatgcttggaacatctgatgtgccagaggtccaggaatttgtgatgaatgtacaatgaagacatatgctgtactcaaactagcaaaagaggccaaggaggggaatctggaaactagtatttattgagactgatcatgtgccaggcattgtgttcgatactttacattcatctcatttaatcctcataacagtcttgcaagttagatgttcttactcatgtgaagaaaatggggtttcaagaagctaaataacttgcctaagcccatcaaccttgaaaatggagaagccaggatttcagcccaaggtaatctgaccctagcagctgttatctttccatttaatgagasagagagagagagagagagaacttgaaggcttgaggttcagaggaggtgaggatgccttatgacttgtgatttactgggcaattactaggccagttttcactttagccaaccttcgtcaagtaattttgaaagagcatgtcttccttcttttgcttggttcagagaaatttaataggccagttttgactttagccaaccttcgtccagtaattttgaaagagcatgtcttccttcttttgcttggtgcagagaaatttagaacaaggggaaata

SEQ ID NO: 735775 - DNA, 572 bp, Homo sapiens
aaacaattttggcttgcttggcctgggacactggctttggggctttgggagagataagacacttcagtgttttcctgacagctgaactaaagaaaacctcttacacacacgtcatctgatttgtttcatgtcattttgatcactccttctgacagttccgatctaatttttctttcaaaaaagggtatcaatttcaaggtttaragttcttaggatttagaatccgtgattgaaagagtgaaatttaatcttgaatcaaggttagggaatatgagcaaggttcgcaggtttcttctcgatagaagactcttgtgaccactatttattatggtaatgctttgttattataaacctcccatgaataatattttggggaactaccacacaacaaggcacacattataacccctggtttgggggttgggtgatatcaacgaactgagaagcacaattatctcatggttatgcatgtctatgaagtgtgttaatacttttgttttttacaacttgtagaatattttcattgtaggtgaagcatcagacacatttttattcaaaggaagagaaataaa

SEQ ID NO: 735776 - DNA, 628 bp, Homo sapiens
taaggtattgggttgaattgtgtccccacaaaattcactagtccctgtgaatgggaccttatttggaaatgaggtctttgcagctgatcaagttaagatgaggtcattagggcggggccctattcgcatatgactgtgtccgtatgaaaagggggaaatttgctgggcgcggtagctcatgcctataatcccagcactttgggagaccaaggcgggtggatcacctgaggtcaggagttcgagaccagcctgacaaacatggagaaaccctgtctctattamaaatacaaaattagccaggcgtggtggtgcatgtctgtaatcccagctacttcggaggctgaggcaggagaatcacttgaacccggggggtggaggttgcagtgaactgagattgcgccattgcactccagcctgggcaacaagagcgaaactgcatctcaaaaaataaacaaacaaacaaataaataaataaataataaaaggggaaatttggacccagagccaaggggaaaatgcttcctgaaggttgtagttgtgctgccacaagccaaagagcacccgagatggtcagcaaaccaccagagctaggagtgagaagtgaggagcagatttgcgtggccttctg

SEQ ID NO: 735777 - DNA, 589 bp, Homo sapiens
ggcatcttgttcaatttcccatccatcccctcaagcataggttattagaggttgaagcatcttgcccaaagttaacggccagtaggtggcagagctgagtcctgaagccagagcccatcgcactaaccaccggcctacccagcctacagttggtcgtgccctctgctgggtcttttctattcccagcccagaaactgggtgtctggggacgctccccagagaaagttgcatcattcaccagccgtgtgactgtggccaagtctcggtcacttctccatacctcagtgtttccatttgcaaaacgggaacaatgatattccttcctcctaggggtcatcgggaaggtcaaatataaaaagggcttggtggtgtctggcaccttctaagccttcagtggatggtggcaatggcgctaaggatgatggagatgatggtgatgatgktgtgcctcaacccttccttcccacaggctgctgcaatgcgtgtggtggtgattggagcaggagtcatcgggctgtccaccgccctctgcatccatgagcgctaccactcagtcctgcagccactggacataaaggtctacgcggac

SEQ ID NO: 735778 - DNA, 674 bp, Homo sapiens
aattagggatttcttcttggtttggatccattgttggtgaactagtgtgatttttggggggtgttgaagggccttgttttgtcatattacaaggattggttttctggctccttctcatttgggtaggctctgtcaaagggaaggtctagggctgaaggctgtcgttcagattcttttgtcccacagrgtcttcccttgatgtagtactctcccccttttcctatggatgtggcttcctgtgagctgaactgcagtgattgttgtctctcttctgggtctagccacccagcaagtctaccaggctctaggctgctactgggggttgtctgcacagagtcctgtgatgtgaactgtctacgggtctctcagccgtggataccagcgcttgttctggtggaggtggcagaaggtgcaatagactttctgaaggtctgtagctttggtggtttaatgctctatttttgtgccggttggcctcctgccaggaggtggcattttccagaaaacatcagctgtagtaatgtggagagggaccagtagtgggtgggaccctagaactcccaagattatatgccgtttatcttccactaccagggtggatagggaaggaccatcaggtgggggcagggctaggcatacgctcagactgttcaggaggctcagactctccttgg

SEQ ID NO: 735779 - DNA, 674 bp, Homo sapiens
aattagggatttcttcttggtttggatccattgttggtgaactagtgtgatttttggggggtgttgaagggccttgttttgtcatattacaaggattggttttctggctccttctcatttgggtaggctctgtcaaagggaaggtctagggctgaaggctgtcgttcagattcttttgtcccacagggtcttcccttgatgtagtactctcccccttttcctrtggatgtggcttcctgtgagctgaactgcagtgattgttgtctctcttctgggtctagccacccagcaagtctaccaggctctaggctgctactgggggttgtctgcacagagtcctgtgatgtgaactgtctacgggtctctcagccgtggataccagcgcttgttctggtggaggtggcagaaggtgcaatagactttctgaaggtctgtagctttggtggtttaatgctctatttttgtgccggttggcctcctgccaggaggtggcattttccagaaaacatcagctgtagtaatgtggagagggaccagtagtgggtgggaccctagaactcccaagattatatgccgtttatcttccactaccagggtggatagggaaggaccatcaggtgggggcagggctaggcatacgctcagactgttcaggaggctcagactctccttgg

SEQ ID NO: 735780 - DNA, 674 bp, Homo sapiens
aattagggatttcttcttggtttggatccattgttggtgaactagtgtgatttttggggggtgttgaagggccttgttttgtcatattacaaggattggttttctggctccttctcatttgggtaggctctgtcaaagggaaggtctagggctgaaggctgtcgttcagattcttttgtcccacagggtcttcccttgatgtagtactctcccccttttcctatggatgtggcttcctgtgagcygaactgcagtgattgttgtctctcttctgggtctagccacccagcaagtctaccaggctctaggctgctactgggggttgtctgcacagagtcctgtgatgtgaactgtctacgggtctctcagccgtggataccagcgcttgttctggtggaggtggcagaaggtgcaatagactttctgaaggtctgtagctttggtggtttaatgctctatttttgtgccggttggcctcctgccaggaggtggcattttccagaaaacatcagctgtagtaatgtggagagggaccagtagtgggtgggaccctagaactcccaagattatatgccgtttatcttccactaccagggtggatagggaaggaccatcaggtgggggcagggctaggcatacgctcagactgttcaggaggctcagactctccttgg

SEQ ID NO: 735781 - DNA, 520 bp, Homo sapiens
ggttctatttagcttaaaagagatttgagagacataaaagtcaatgcaatgagtgattctttagtggatcccagtttgaatagatgcagaaaacatttctgggactgagtatcagataataacagcaacttatgtcaattttgttaratatgatactaatcctgcagttatgtgggaaaatgtcctcatttccaacatatgaaatatttatagatgaaatatgaactaatttactttaaaatacttcagaaaaaatatgaactggcaaaacattaacaatggttaaatctaggttatagctatatgattctatgttttgtttctttggaagaataaaaaaagtggtggttttcaaagtgtggtcctcctcatctgagaacttactggaaatgcaacttctagggctctactctagactgagtcagaaacttgggaagacgggtggttgggggacagcaacagtgtcctaacaagtccaccgggagattctgatgcacagtaaatagtttgagagccactg

SEQ ID NO: 735782 - DNA, 634 bp, Homo sapiens
aaaatgttttttccttttcttttctttttttttgaattgagatttggtctcaatatgttgcccaggctggtcttgaactcgtgggctcaagtgatcctcccacctcagcttcccaaagtgctgggatcacaggcatgagccaccgagcctggccaaaaatgtttttttctcctgttaatctgttttatgtcaatttaatttgtatcccagccaaagaacctagaagtagggaggaagccattttccctcccttacagcacaaaataactaaccaacaagagtaagaggtttcacaacagtcctgaattacatgctctgaagacttagstttttttaatagtatgctatttatgtaaactggattataatgtgacataattgtctttccttgaaaaatatcattttactttacatcactgtctattcagtgtgtggcttaaaattaattccataccttatgcattgttttcatcctctatggccatcaataaagttatcttgcagttccccatgagttttagtacagtcattaccgggaaatttaatagaatcaaggcagaacccaactgatagctttagtattttataatccagagtagtctattacataactttgaaaaatctgccattattt

SEQ ID NO: 735783 - DNA, 603 bp, Homo sapiens
ccttttacaaacattataccggttaagtcattcctgtactcaaaaaaccccacagcaacttttaatcaccataaaatccacaatccttaccaatgtacaaggcgcttcttgatgtgtcctccggccacctctccagataattttctgtcttttttaccttgttcagtgcatgtcgcctattctgatctgttcatcgttgcagttwcctttttcttttcttttcttgagacggagtctcactctgtcgcacaggctggagtgcagtggcacactcatgactcactgcagccttgacctcctggggtcaagtgatccttccacctcaacctcccaagtagctggaactacattcacagactaccatgcccacctaatttttgtattttttatagaggcagggtttcactgtgttttgcaggctggtctcaaactcctgagctcaagagatctgccagccttggcatctcaaagtgctgggattacaggcgtgtgccactgtgcctggccataagctacacattgttatattgagaagatcctcttgaaaacatatgagttacagctggccctctgtatatgaggattctgcatctgcaaatacaa

SEQ ID NO: 735784 - DNA, 664 bp, Homo sapiens
ggcaaattacaatagcctgataattacaaccccaaactatatattactttttaattttttaacagattggcagccagaaaagaatattttctttgtatttattttttaaacaagtaactttgaacttacttcacttccttccttccttctttccctccttcctttcttccttccttccttccttccttccctctttctttcttttcctttcctttcccttctttcttcaaatagcatctggactggatctaaactaaactcayagcacatttattttgagtgtctgctttgaggatcagtgagactcaagtgaagtcttccccatatgtagacatgttactactttgagttactctcagttatacagttaatactctgagagtaactgtcaatcaacctaagcagtacaatctgtcagcaggctagcaggctaagagcggtctgtcagttactttttactaactttgtagttcttcatccatagtcatctttacgatttcactggaaataataaaaatacattcattcatccactcaataagaaaacatttactgagcacctactttgtattaggtgccatgaaggccttagagatgtgggatttgatggttaattgtttgtgtcaacttgactggatccggatgccaggtatttagctaaaca

SEQ ID NO: 735785 - DNA, 505 bp, Homo sapiens
caattaagcaaatgcgataacaggagagaactacccagcacagcacagagctcacagtgagcagtagcttataatagtttatttctgttatattaatacccaccacatctgtctattgtgaagttagattattaaaaactgttcctgaactgcyatctgcattctaagttgggaggggagaagcccagcacactgtacttagaaagaaattatccttccgggccaacgaagatcttgagcaattgttttttagctaaaaaactaattccacattttgtattcatcaaaatgcccattgctttatctggatttgagggtaggagaaatccacatatttgacaacattcctttgaatgaaactaagaagtaatgttggtagtggtggcctgagtgatacatgtgattgtggcagagattaatggtgaccaaagaaacttaacaagttttaaaattataaaataggcctctcagtgccgcttaatcacacaggtccagtgtgtgcttg

SEQ ID NO: 735786 - DNA, 631 bp, Homo sapiens
cagtgtggacccaaagagtgagcagtagcaagatttattgcaaagagtgaaagaacaaagctttcacagtgtggaaggtgacctgagcgggttgccactgctggctctggcagcctgcttttattctcttatctggccccacccacatcctgctgattggtagagcagagtggtctgttttgacagggcgctgattggtgcrtttacaatccctgagctagacaaaaaggttctccacctccccaccagattagctagacacagagtgtggacacaaaggttctccaaggccccaccagagtagctagatacagtgtcaactggtgcattcacaaaccctgagctagacacagggtgctgattggtgcgtttacaaactttgagctagatagagtgccaattggtatatttacaatccctgagctagacataaaggttctccaaggccccaccagagtagctagatacagagtgtccattggtgcattcacaaaccctgagctagataccaagtactgattggggtatttacaatccctgggctagacataaaggttctccacgtccccaccagactcaggtgcccagctggcttcacccagtggatccctcaccaggactggaggtggag

SEQ ID NO: 735787 - DNA, 611 bp, Homo sapiens
ggtggccacaagcccaggatccctcccagcctgaaggaactgtactcatattgccctgggttggcagcctgggttctctgctgagttaccccaaagtggtttcaggacagcacaattatttattaagtagctctgrtgctgaccttaagaaaaaacagaacaacgaaagtattaagcgtaaaacctttctcttttaatgaatgagtaaatattcatgttattattcctagaaataagaactctgtccgcctgggtaacatagtgagacaccatctctacaaaaaaattaaaaagctagccaggcgtggtggcatgcgcctgtagtcccagctacttgggaggcctaaggcaggaggattgcttgagcctgggaggttgaggctgcagtgagtcatggtcatgccactgccctccagcctgggtgatgcagcaagaccttgtctcaaaaaagaaaaaaaaaaaggaagaaagaaaagaaaagaaaaaagaactctgaagaccttgggaaagaatggtacttagtagttagagttctgtatataaggaaaatatttccaaatgctctatgaggtctggaaagttatttcactaagtacattcaaagttgcaac

SEQ ID NO: 735788 - DNA, 611 bp, Homo sapiens
ggtggccacaagcccaggatccctcccagcctgaaggaactgtactcatattgccctgggttggcagcctgggttctctgctgagttaccccaaagtggtttcaggacagcacaattatttattaagtagctctggtgctgaccttaagaaaaaacagaacaacgaaagtattaagcgtaaaacctttctcttttaatgaatgartaaatattcatgttattattcctagaaataagaactctgtccgcctgggtaacatagtgagacaccatctctacaaaaaaattaaaaagctagccaggcgtggtggcatgcgcctgtagtcccagctacttgggaggcctaaggcaggaggattgcttgagcctgggaggttgaggctgcagtgagtcatggtcatgccactgccctccagcctgggtgatgcagcaagaccttgtctcaaaaaagaaaaaaaaaaaggaagaaagaaaagaaaagaaaaaagaactctgaagaccttgggaaagaatggtacttagtagttagagttctgtatataaggaaaatatttccaaatgctctatgaggtctggaaagttatttcactaagtacattcaaagttgcaac

SEQ ID NO: 735789 - DNA, 482 bp, Homo sapiens
gaagtggatccttgctcagtctaacctcagctgacaccttgattgcatccttgtgagaccctgaagtggaggacacagtcaagccatgccctgattcctgacccactaaaactgtgattttgtttatcttttccaaaaaccaactttttatttctttgatattctgtattttttagtctcaagttcatttatttctgctctgatcttttttactttccttctgtgtattttgggtytgttttgtttttgctttcctaattcctttatgtttatttgaagtatttctacttttttgaataaaaattatttatatttaattttatatttctttctgctttttgatataggcatttattgctataaatttccctcttactactgcttttgctgtatcccatagattttggtatattgtatttccatttttattcttttcaagaaattttaaaattttcttcttaatttcttcattgacccattgg

SEQ ID NO: 735790 - DNA, 482 bp, Homo sapiens
gaagtggatccttgctcagtctaacctcagctgacaccttgattgcatccttgtgagaccctgaagtggaggacacagtcaagccatgccctgattcctgacccactaaaactgtgattttgtttatcttttccaaaaaccaactttttatttctttgatattctgtattttttagtctcaagttcatttatttctgctctgatcttttttactttccttctgtgtattttgggtctgttttgtttttgctttcctaattcctttakgtttatttgaagtatttctacttttttgaataaaaattatttatatttaattttatatttctttctgctttttgatataggcatttattgctataaatttccctcttactactgcttttgctgtatcccatagattttggtatattgtatttccatttttattcttttcaagaaattttaaaattttcttcttaatttcttcattgacccattgg

SEQ ID NO: 735791 - DNA, 683 bp, Homo sapiens
cagctgacaccttgattgcatccttgtgagaccctgaagtggaggacacagtcaagccatgccctgattcctgacccactaaaactgtgattttgtttatcttttccaaaaaccaactttttatttctttgatattctgtattttttagtctcaagttcatttatttctgctctgatcttttttactttccttctgtgtattttgggtctgttttgtttttgctttcctaattcctttatgtttatttgaagtatttctacttttttgaatamaaattatttatatttaattttatatttctttctgctttttgatataggcatttattgctataaatttccctcttactactgcttttgctgtatcccatagattttggtatattgtatttccatttttattcttttcaagaaattttaaaattttcttcttaatttcttcattgacccattggtggttcaggagcatgttgtttaatttccatgtgtttgggaagatttagaggttcctcttgttattgatctctaggtttattccactgtggtcagaaaaaaccatttgatacatgatgtaatttctacttttttgaatgtattcagaccttttttgtggcctaagatataatctattcaggagaatgttccatatactaatgaaaagaatgtgtattctgcaggatttg

SEQ ID NO: 735792 - DNA, 612 bp, Homo sapiens
attcttctaccctcttagatctgtagctggcctaagaatgaaacggacataagacagattaacaggagaaaagcatacagacttcatattttcgcatttacacaggagtctttaaaaagaaaacaacagcccaaagaagctgttaggcccaaaagcttctatacctttttacaaaaagaatgacaaattgtgrggatatgacgaggcaaggagcttgaataaggggcaataaattgtgggacagtgactaggaaatatatgggggaaactaatgcaagatatggattattttagtaagtttgtttgtgcatgtccatttctgtgttgattccaagtctctgaaaataagaacgttcttttctcttgatacagggaaggcatcctttccatgataaatttgatcacctgcttttaggtggaaaggagggcagagatccctttctgcatctgctgtttctcaatttccttcagctcaaaataatcaatatgccaaagcagcatattttggggtggcatattctgaattccttcactattatgagaggctgatgtttaagtgctcaagaatcaggaaaaactgagacattcaagagaagtgccctggatcctgca

SEQ ID NO: 735793 - DNA, 612 bp, Homo sapiens
attcttctaccctcttagatctgtagctggcctaagaatgaaacggacataagacagattaacaggagaaaagcatacagacttcatattttcgcatttacacaggagtctttaaaaagaaaacaacagcccaaagaagctgttaggcccaaaagcttctatacctttttacaaaaagaatgacaaattgtggggatatgacgaggcaaggagcttgaataaggggcaataaatygtgggacagtgactaggaaatatatgggggaaactaatgcaagatatggattattttagtaagtttgtttgtgcatgtccatttctgtgttgattccaagtctctgaaaataagaacgttcttttctcttgatacagggaaggcatcctttccatgataaatttgatcacctgcttttaggtggaaaggagggcagagatccctttctgcatctgctgtttctcaatttccttcagctcaaaataatcaatatgccaaagcagcatattttggggtggcatattctgaattccttcactattatgagaggctgatgtttaagtgctcaagaatcaggaaaaactgagacattcaagagaagtgccctggatcctgca

SEQ ID NO: 735794 - DNA, 557 bp, Homo sapiens
tctttgcctcttccccagcttctggggtttgctggcaatcctctgtgtttcttggcttgtagacatcaccccaatccccagggaggcagagattgcatctccccaatctctgcctttctcatccaatgccgttttctgtgtgtctcttcttttcttrtaaggacaccagttgtgttggagtaagagtctatcctactccagtatgacctcatcttaacccattacatctgcaatggccctattttcttttatttgtttgtttgtttatttatttatttatttatttatttatttatttatttatttttcgagacagagtcttgctctgtcacccaggctggagtgcagtggcgtgatctcggttcactgcaacctctgcctcctgggttcaagcttgtaatgtctcagcctcccgagtagctgggactacaggcgtgcaccaccatgcctagctaatttttgcatatttagtagagacgagatttcaccgtattggtcaggctggtcttgaacttctgacctcaggtgatccgcctgcctcggtctcccaaagtgct

SEQ ID NO: 735795 - DNA, 649 bp, Homo sapiens
tccctctgaaaccagtaggggaggatccttctttgcctcttccccagcttctggggtttgctggcaatcctctgtgtttcttggcttgtagacatcaccccaatccccagggaggcagagattgcatctccccaatctctgcctttctcatccaatgccgttttctgtgtgtctcttcttttcttataaggacaccagttgtgttggagtaagagtctatcctactccagtatgacctcatcttaacccattacatctgcaatggccctattttcttttatttgtttgtttgtttatttatttatttatttatttatttatttatttatttatttttcgagacagagtcttgctctgtcacccrggctggagtgcagtggcgtgatctcggttcactgcaacctctgcctcctgggttcaagcttgtaatgtctcagcctcccgagtagctgggactacaggcgtgcaccaccatgcctagctaatttttgcatatttagtagagacgagatttcaccgtattggtcaggctggtcttgaacttctgacctcaggtgatccgcctgcctcggtctcccaaagtgctgggatttcaggcataagccaccacgcccagcccctattttcaaataaggtcacattccgaggt

SEQ ID NO: 735796 - DNA, 550 bp, Homo sapiens
ccaggctctgtgctgcctatttccttctgccagagggggtgatcccccagatgaaggatggagcagggggttcttcctgccttcctaatgtctccaccccgggccatggatggggacaacagaaaggaagggaccttgctaaatataaagctctgtgcaggtggragaatcatcatgattgcttgtatattgtccttactatgactatggatttctctctttctcccactgcagcaagactcagggcaagtttggcaccacctggttgatccctgaagggtggctgtgcccttgtcccatcacttctctgatcctcagcctgggagcaggaggagggctgcaggctggtgtgatgctgaccagcaaggttcttccttgcagaaggggtaagtggtggccactccagattgtgcaggctggagcctacgcagtactcctcttctcccagggacagaatggagctacctggaggtgactgtaggagatggtgaacacagcatctccctggggggcctgtagttgcgaagtgctcctcctgggctccactcca

SEQ ID NO: 735797 - DNA, 438 bp, Homo sapiens
acctctgtccaaacctctgggtctcaggatacccttgtgtgccaggcacaggggtgacactatgaggttaagggcgtggactctcaagccagattgctgggttcaaatcccagctcctcgagctactagttgtgcggcctgacctttctgtaccttattttcctatctataaaatgtcaataataatagtacacatcaaatgagttaatatgtatgtgagattaaaagaaactggggccagaagatctagcagccgaattcacctcctagggaatcacaaaagtatatagtgggggamcctgcagcttgctggcatggttgggcacaagatgaaggtaggaaaaactcattgagatgacagggactcctctatatggagaccctattcctgtagccctgaggtgcctgggtgatgggtaaagtcctgttggggaggag

SEQ ID NO: 735798 - DNA, 597 bp, Homo sapiens
acactaaaagacactaatctaacctcctctggctggcgtgagcacagaattgaatattagaaacctggacttaaatccagacttcaccatgttttttcagttttctttatttaactttaaaaaaattgacaaataataattgtacttattcctggggtacataatgatgtttcartgtaattagcctatccatcatctgatttattgttcctttgtgttgggaacactcattgtcctcctagctatttgaaacttattgttaactacagtcaccctacagcggtatacaacgctggagcttattcttccaatctagcagcagtattgtatcctttaacaaatctctccctattctccccttctccctaccctcagacttgaccattttttggtcctttaatcttaggcaggttattgactattcatgaaactcagttttctgatccataaagtgaacaccaagttgtctttaccagttaggggaactaaggttctacacaaggcacctagaataacctggcacataatagacactcagtacatgcagaattatctctattttcaactttctgagatagccttgtgcattttgctcta

SEQ ID NO: 735799 - DNA, 597 bp, Homo sapiens
acactaaaagacactaatctaacctcctctggctggcgtgagcacagaattgaatattagaaacctggacttaaatccagacttcaccatgttttttcagttttctttatttaactttaaaaaaattgacaaataataattgtacttattcctggggtacataatgatgtttcaatgtaattagcctatccatcatctgatttattgttcctttgtgttgggaacactcattgtcctcctagctatttgaaacttattgttaactacagtcaccctacagcggtatacaacgctggagcttattcttccaatctagcagcagtattgtatcctttaacaaatctctccctattctccccttctccctaccctcagacttgaccattttttggtcctttaatcttaggcaggttattgactrttcatgaaactcagttttctgatccataaagtgaacaccaagttgtctttaccagttaggggaactaaggttctacacaaggcacctagaataacctggcacataatagacactcagtacatgcagaattatctctattttcaactttctgagatagccttgtgcattttgctcta

SEQ ID NO: 735800 - DNA, 592 bp, Homo sapiens
tcttgctctgtgggttcaggtgacagctggttgtttaaagcagcctggcaccttccactctcctttttccttccattctcaccatgtgacatgtctgctgttctccagccttctgctgtgactgtatgcttcctgagacctcatcagaagcacatgccagcatcatgcttcctgggtagcctgcagaaccctgagccaagtaaaccacttttctttataaattatccagtcaggtaatttatagcaatgcaaaacaaactaacacaagttactttccctctctggacattatctttaaaaagatgatgtcaccagagcaccttcagcaatccttcctgcgccataaatatcttctataatcaagcaatctattagagattcactaaaatttgcagcactttcaaattaacttactttccctctttctatgarcaatggcaaataatctgtatggttaagagatatttttcagacgttaagactttttttttcaagagaataagcacctgccaaactattttcaggaacaaattccctcagtcctctgaagttatttggagtttgactgtagctgtcaaaatggatagacttc

SEQ ID NO: 735801 - DNA, 599 bp, Homo sapiens
acacaccggggccggtcgtggagtggggaaattggggagggatagcattaggagaaatacctaatgtaaatgacgagttaatgggtgcagcaaaccaacacggcacatgtatacatatgtaacaaacctgcacgttgtgcatatgtaccctagaacataaagtataattaaaaaaaaaaatagggcctcagctcccttattgccacttcctcagtatctagcatggctccaagcacatagtaggaacttgattaatagttaaagaataaatgagtgatggtttggggaagagtgtccaagtcatcagaatttacatccaaaaatttactgcacactatgcctggtaccttcttgtgttaccaggctgctaggtaaaacattcttaagcaccagatactatggtttcctcttrcttcctccaaaagcacatattgtcccataggaaaccgggcaactctaatggtgtgctggcactcttttccctaccaaaataatactcttattggaaaatcaatgaatccaactttgatttaatgaatcctaaaagggatcctcttagaaggcttttggatagtacctagagtcaatgggaaggtttg

SEQ ID NO: 735802 - DNA, 516 bp, Homo sapiens
tatgacatgtgctttgagatgtccaaggagggggattttcagggataatatgggaaatgattaaatgaacaatccctacctttcctagaccagctcaaactttatccactcatgaaccactgtccaatttttgccacatctattaagcaactatattattggctcaatatttttctttaattcacctcacaaattgccacaaatgttttcaaaaggaaactttacatcactgttataagtggaaarccagtatcaaaggccacaatgggtaattatttaaaaatgaaaatgaatgaactttatcaatttacagtcaaatgttttgctcactaaagagagcttgaggctggctctcttggctacaaaaagattgagtcttaaagttgttaaagaaatattagcatcagagtcttgcctcttaaagcaattagaaatatggaaagagaattgaaaaaaatgatattgcaatgtgagttagtgttatataatctgtttccatagatatccttagtagtt

SEQ ID NO: 735803 - DNA, 561 bp, Homo sapiens
acacttgatttggagttaggcagacctgattttgaagccccagctctgccatatccctaagcatggttttgaacctgtttcctagtttcttcatttataaggggaagaaatgataaccatgagagtgatcatagcagaagataccattcattaaatgattacttgatgcaaggaattgtattaagcagagtacagaggttttcattwacttcattaaaacaaaatctgtgtcacagtagatggcattacctgcattttgcagatggaaaaacttgaggtttactatacttaagtaatgtaagtattacttaaattaaactatttaggcagcctaaatagtggcaaagcaacaactgaaagccagtgccgtctgagtttggttgttgtgtgagtttcctggggctgccttaccagagtaccacaaacagtgtggctcaaacatgagaaatttatcaccttgcaattctggggactagaagtctaaaatctggcccatgctccctctaaaatatgtgggggagaatccttggtctttcttagtttttagggtttgcagataat

SEQ ID NO: 735804 - DNA, 561 bp, Homo sapiens
acacttgatttggagttaggcagacctgattttgaagccccagctctgccatatccctaagcatggttttgaacctgtttcctagtttcttcatttataaggggaagaaatgataaccatgagagtgatcatagcagaagataccattcattaaatgattacttgatgcaaggaattgtattaagcagagtacagaggttttcatttacttcatwaaaacaaaatctgtgtcacagtagatggcattacctgcattttgcagatggaaaaacttgaggtttactatacttaagtaatgtaagtattacttaaattaaactatttaggcagcctaaatagtggcaaagcaacaactgaaagccagtgccgtctgagtttggttgttgtgtgagtttcctggggctgccttaccagagtaccacaaacagtgtggctcaaacatgagaaatttatcaccttgcaattctggggactagaagtctaaaatctggcccatgctccctctaaaatatgtgggggagaatccttggtctttcttagtttttagggtttgcagataat

SEQ ID NO: 735805 - DNA, 633 bp, Homo sapiens
tctgtttggccgccagtctcttgtctctctcttcagcaatggtgaggcggataccctttcctcggggaagagaaatccatcgtttgttgcccttgccaatagtgaaaatgttggaaacttgagtgccaaagctgttgccactggtgtctttcacatgaaccacgtcagaagatcccgggtacctctctctgttggggatcacaccaactcttcccaggtgagcacctccagtcaccatatatggcttgccagtgtcgaacgtgatgaaatcggtcatcttgccagtctccaaatcaatctgaatggtgtcattcaccttgatgaggggtcagggtagcggatggtgcgagcatcatgagtcaccagatgagggattccytttgtgcccacaaagatttttctcactttgcacaacttgtacttggtctcctcaggtgtacagcaaagcaacctttggtgtcacggatcagatggaaattctctcctgtcttgtcaatgctgatgacatccatgaacccagcagggtatgttatatcagttcggaccgtgccatcgatctcaatgaaccgctgcatgcaaatcttcttaagtctgttccttaggaaaatgatgaggggaagacactctctcaac

SEQ ID NO: 735806 - DNA, 615 bp, Homo sapiens
ccataatgaggaaaatgaatcaactaatggcagtcaacccagaaatggcacagatgttagagttagcagacaatacattaaaatgttgttatagccaggtgtggtgactcatgcctgtaatcccagcactttgggaggccgaggcaggcagatcacctgaggttaggagttcaagaacagcctggtcaacatggtaaaaccctgtctctactaaaaatacaaaaaaattagctgggtggggtggcgcacgcctgtagtcccagctacttgggaggctgcggcacaagaattgctggaacctgggtggcagaggttgcagtaagccgagatcacgccactgcactccagcctaggcaacagggcaagactccgtcataaaataaaataaaataacataaaaataaaatattgttataactgcattccacatgttcaaaaagttaagagagaaagaatagatttaaaagacccraaatcaaacttctagaaaggagaattatattgtatgggattactgttagatcagaaattacagaagaaaataatagtaaacttgaacatatagcaatagaaattttctaaagtgaaatacaaagagagaagaatttctttaaa

SEQ ID NO: 735807 - DNA, 634 bp, Homo sapiens
aatttatttcatttgatgttaatatcgccacttcagctttcttatgtgtattcttttcatggtataatctttttccatcctttcacttttaacctgtgtctctgtgtttaaagtgtgtctcttctaagcaggtaaaatgtacaaatcttacaacagtaaatttccatttgccctgccccatcttagtgctactgttgtcataattacacctatatacatattatgtttaaaaggttttttttgtttgtttgttttgagacagtctcgctctgtcacccaggctggagtgcagtggcaccatctcggctcactgcaagctccgtctcccgggttcacgccattctcctgcctcagcccccagagtagctgggactacaggtgcccaccaccatgccgggcaatttttttgtatttttggtagagacggggtttcaccrtgttagccaggatggtctcgatctcccaatttcgtgatccgcccacctgagcctcccaaagtgctgggattacaggcgtgagccaccgcgcctggccaggttttttattttttaggtagagaaaaggtctcaccatgttgcccaagctggcctcaaacttctgggctcaagcaatcctcccaccttggcctcccaaa

SEQ ID NO: 735808 - DNA, 653 bp, Homo sapiens
gaaaacccagctgtcattttcaagagtaattatctaagtatatctatcataaatttgatctagatataatgagcagaacgagagggaaataggagttcaaactgcaaactctgagtcctttgcctttataaaacagtaagatccagtttggcaatcttgagcaaagggctccattatttttctgttctctttcaaaaatagctccaccttcaagattacacaaattagatcattctgcagcaggattcctcctcacagagcagctcctaggaagtgcagacaggctgtctgatacagcaaaccagtctttcaaaaaagaaaaaaactcttacagttacattagaaaagaaaaaatattaaaaaagaaaaaaacatgatgttttggacttttctatttcgctgcgttagtgacaaaggctatggggytacagttattaatggcttctgcaatctacctctttggaaaccatcaaataaataaggattgcagaggggacaccagacagcaaacacaacagcagagtaattagggatattgagactcagccattcccacagcatcactgtggcctaaagcataagaagaactcatccaggtttttaaaacaatcaggtgccaacctatggattattctatcacccagtacattccc

SEQ ID NO: 735809 - DNA, 583 bp, Homo sapiens
atcatttctcaagagtttcattttatggtctttctcttgttctgtaaaatgtgggcatggatagatataaagtgcctggtgtccatgcttttgtgaaatcccttcctcttccatgtgaatgggacctgtgactttcttctaacccagagaacacagcaaaaatgatgtgatttatctgagtccattgatgayattgattacgacttcccttcaccacattatttaggactgcgtcgtaggagactgggacacatatccactttgctggcttgatgaagtaaactgctaagttgaggaagcccacatggcaaggaactgtgggcagccttcagccaacaggcagcaaaaagctgagctcctcggagctacagcctcaaggaagttacttctgctaacaacctgaaaaagcttggaagctagtttctctctagtggaatttttagggaagagcatggcccaggcaagataaataatgtaagtggaaaaacctgtcaacaataaaggttttaaaggaaaaaacaaaaaacatgtaatttagaaagtaactgccaggaaaaaaaaaaaaagagactgggccagtggc

SEQ ID NO: 735810 - DNA, 593 bp, Homo sapiens
cagcgcctgcgcctacagaacgagcatcgaggtgcgcgggggcagcgggaggaggtgccgcctcctcggggtcggcgcctcccggcagctcttggtatctgtgcagctcggctccttccttgggagtgttcggaagaggtccctaagattaacaaaatcaagggcgcagagactgagacagcgcctttttggtgaccaatgtgtccaacgagttttgttttcagttgcgcagcacccaccttcttagcagaaactccctgttcgggcttccctgtgccccacccccttccaggcctgatggccctaggcctccgtgcttggttggccggcaggctgactctggtggtagatctgactgcgttgccctccggtaattggagttctgttgacagstgagcagcgcccttgggtagttggaggtctgttgacagctgtgcgcgcccttcagggtcagttccctctcaggcctgcagggcctcattctagttgcacatcaaattcctaagcactgtctcctgtggcgccctcccaaaccagaagagcttcccacttgagccgcatgcttcctgggcttcggagccctttcctgcaaa

SEQ ID NO: 735811 - DNA, 555 bp, Homo sapiens
ggtacctaacttgtggcaaattgttgctttataagtaaggatccagtccaagttcatgtactacaattggttactttggtctctttgcttctggaacagtccccaacatttattgtggcattgactttttatagagtctaattctataattagaatgccctgctctggatctatcagaggaaatgcttcctcgtgcatttaacctgcttctccactctctgggtttactgtacactggactcctggtaggagcctgattagaggcaggtttaatgtggcaaaaattcctcctagcggggcaaggcccccttccccagaaggcaggcagtgtccatctgctccaggattggtgtgtttctatcaagaatggatgttggattttggcagttycctttttggcagctcttgagatgatcacgtggtgaatcattttctattactacagtgaattacagtcacttgaattccatcctactgggtcgtgctgtagtatcctttttatgtatgctggatttgatttgctaaaatcttgttaagaatttttttgtctatgtt

SEQ ID NO: 735812 - DNA, 519 bp, Homo sapiens
aggcctagtgagtcccaccaggtggctcctcgctgagggtgccaggtgtgctgggactgggtggagggtgagaacccaccagtgctcccctggagtccattagtgcccctcgtgggttggggtctccgcagagcaggtggcctcggggggtacaaaggcaatggtggggtgatggggccagccaggaaggggcccatccttctccccgggagcacagggacaaccagagaccggcatgtaaccaacaagtcatggggcagggtgtgcctgcggagatgtgtgtgtggtcccaaggcagtcccaagtcaaagcattcgtggaagccccttggggcccccttcaggggttcacttggccgaggagaggcctsggtgtggtgaggatgcattggtggtgtcagagctggtgctgttggggacagcagcaggagcatgtgtttgagctgccctcacctcccccgccgcccccggccccacggcaggcggtggagcaccggatccgtgaggagcagcgggcgat

SEQ ID NO: 735813 - DNA, 555 bp, Homo sapiens
attaggattcttgaggagaatggtcttaaacatggcttaggaatgcttactaatataatctatgtttgttttatttcagtatggaccaatatttacagtctttgctatgggaaaccgaatgacctttgttactgaagaagaaggaattaatgtgtttctaaaatccaaaaaagtagattttgaactagcagtgcaaaatatcgtttatcgtacaggtaaagaatattttcagatagtccattcgaaatccaacattggaatccaggagtagttttaggtaaaaattacatcctcattcctctatcaagaatgatgagggtccattattttattcttgaggtatgggtagaagaggaaagagttatgggtagaatagtttggccattgaaatgcaaatgaatggcagcytaatacatttagatttgaattagacacgtgaaagtgataaggttacctcattgatgttttctttagagaatatttggaatctgtatcatgttacagcttccaagatgtcactaactctgttccactgctgtgtatacagtgttctac

SEQ ID NO: 735814 - DNA, 594 bp, Homo sapiens
ttgtcttttcgaattatttctctttctaatatcggtctgttttgcgctgatttcgtaaatgagaatatggattagagattttcttgtatagtgagctctgctctctagcgctcattccattgcagaggaggagaggacatctgctctgatttctcaggccggcctcctcttccagaactgctcagctctttacctatctagttgtgttcactgtttggtccttcttagtaaggagaggctgggagaattgaaatgggttgcaatcagagactctttttgccctgttcaaatcttcaaggccaaagaaggggaaggcttagatttatcatagcatagaratctcatagattaggagaaataaggaagcaacaggggcagggggagccttgataaggagtttcccttttgttcggagaaacgcatctatgtgttatggctgcccaaatgcaatgaggtagtgaccccttccccagctgaggtgtttcagcaaaataccttccatttgcatggtgttgtaaggttttaaaattatattttcagtgataaagttttgctgacttattttcacttagagtgtaagaccctcgaagacag

SEQ ID NO: 735815 - DNA, 641 bp, Homo sapiens
ctttgcaccctggtgaaaaaattattggccatattcacgtgagtctgtttctgatctatgttttttttttcctttctaaattattgtcttgattaacctagctttatactaagcattaaaatcagcctctatgagccctccaactttattcttcatttacaaaactgttatggctattctagttcttttgcttttccatacatatttcagaatctgcttgttgatacctacaaaaaatcttgctgggattttgrttgggatttcattaaatctatagattaatatgggaaaaattggtatcttaagaatttgggttttctagtccatgaggatattattttccttcatttatttaggttttcttttattcctttcatcagccttttaatttaacttgttcaacattttgtagttttcaacatgtaggtcctacagatagatgttttgttagatttatatctaagtatttttgtttttggagttgttatagatggttttgtttttcaatttttgtttcaaatttttcattgctaatatagaaatatttttgtatgtcagccttgtatcctttgaccttactagatgcgcttattagttctgggagctattttgtggatccttggcattttctatgtaggcaa

SEQ ID NO: 735816 - DNA, 583 bp, Homo sapiens
aactatgcatcaactctgtgcctagaattattttagatcttttccatgtatgttgctaattatacatttactaaatattaatagaaaatcttctaaagccctcttttgttgacatcatgtgcccagttacaggtaagaaagaaatacgtttatgccaatcatttaaccatcatctctacttggagaaatytgaattacaaagcacagctttcactgacctgggaaggagatctacttctactacagaatggattgcatgagtaggaaaaccggaaagtttcccagacgctcctaaagttattgtttgactattgtttttgttggggtgaattaatagccaacaaggaactgagcaaagtattttaaaatcagccaaaatatttattgaattaatgaagggccagacaccttgtctgctggctctccttggctttcctcgtcagaagtctgtaacatccataaggctgcatttcctcatggaaagcttttaatacttcctatattctgcactatccttatacttcctatatctggcattttcttttagcttaagtttacctttttttaaagaataatcttcctt

SEQ ID NO: 735817 - DNA, 625 bp, Homo sapiens
tcataatgtaagaaacttatttggatccaaatttaacctgcaaaacaacaaccagaagacaattaaggaaatatgaaacatgtatactgactggatattttatgatattaaggaatttttgttaatgttttaggtatgataatggcattgtgattatggtttttgtaaaactctcttagagaaatacatggaaatatttactgaatagatacccaattgaatagatgaaataatgtgatatctgaaatttgcttcaaaataatctgggagtaggtgggtatagtacagatggcataagactggcaatcaactggtacgtgttaaagccaggtgatgggtatatagggctttactgtactatagtctgtcttcttactgtgtgtttaaaattttccataataaaaaatcttttaaaaagaatcactatgtttasaagtttggggttttacccagaatagagattctaattgtggggggatctgccatgtagtaagtaactgttaccttggagttagccttctgctccctctaggacaaatagttcttggtttatttagcgaaaattttttgcattttgggattcttaattctttttgagatgtttggaacagtccactgcattact

SEQ ID NO: 735818 - DNA, 592 bp, Homo sapiens
tatttttgtatctttacaaaatactggtgtttggattattttcccttccagtttttcttgatgtataatatattactgcaatgattagaatgggaaacatctatgatattctaggaagaaccaaatatgcctatgagataactgggaaacaactatgactaattccttaaaagtaagatctgatcaaatgccacaacaatgtcaacttccatgtatgaagcttgaattcctgarctccaaagtgaggctgtttcaacgttctgacgaacagctccttgactggcactgtgtgggggtggagtggaaacggccctactttggaggaagaggcaagcatttcccaccaagtactgggaaatcaggcaattcaaactctataggctttgggttcttcacctgtacactgaggatgcaacattagatgattcataagagcatataccagcattctatcataacagctactgataatgagtaaacattttaaaatgttattgcaaagtttttttctgttccaaagtagacatggaactgataaacactatatttgattttcatctgatgactggtattaccccaagagaagggagag

SEQ ID NO: 735819 - DNA, 625 bp, Homo sapiens
gacctggacaagtctgtgctggcaaggaaatgtagaatcccaaattccatgcagattgacggtgaatcctgccaggttgccttccaccacagctagctcgtgacttcacccttcattgggccaggcagaatgaccggagccagcgccactgtgctgcagaagcagcaggcccaaatgctgcaagagttaataaatgtccagtacccacggagaggagaggaaactagggtgcttgatgactaaacacctatcctggatccacttcgcttgtatggtgacagcatgaggtgtgactgagagaagattaatgatcactgggcytgggtacctcccaaaaggagtgctgcaggagtgctgtggagctaattaaccagccggcatgaaaagtgaaaatagacgagggaacagggtgtttttttgtttttttttttttcccctctgtggtggcccagtactgtgcgtagacctacatatactatttttggttttccttcttaagtatgcaaaatgacataatgttgaaagcctctctcagtagccttctccaaggggagcaatactgagacagtggactctggatcccgctgcctgggttcagactcagctctgatatatgccagagtgg

SEQ ID NO: 735820 - DNA, 605 bp, Homo sapiens
gaagcaaataaagttcccatgattggtgacagatgagccaaaactgaaaaagttttttgttgttattatttttaaacagctttcagaaaactaacaagaaagacattttggtcttgacccagcagagggtgaatgtccccctggatggaaattctgtgaacgaaatttctccagagtaacaattctaatyaattattcaaagccaggggttgattttctaaggttaactatggtctcctgtttaggtcattaaaaactggtttctccttttctttggtgtctgctcacccaggcattgatgagaagctttaacagcagccttgcaataaaggctctacttttaaggtgagtttgtcattttgcagacttggtttaagggataattagcaataaaaataaattttgtctaggttctatataaccaaaaacgttagaaatccacttattctcttatataagtatggaaacaacagacattaatattatcacaaggcattgcaagatcttttgaattaaagagttaaccataattttatgatgctttagtaataaacatacttcttaaaacagaaattaaaactgaaacgttatttgacatagtaact

SEQ ID NO: 735821 - DNA, 626 bp, Homo sapiens
ggggtggatgacatgaaaattttgaaggtaacctgcatgataactatgttttggtattgcagaccagaaacaacaaattattgacagaaacagagcaggtccatggatggatgttcctttttatttttatttttctgagacggagtccgctctgtctctcaggctggagtrcagtggcacaatcttggctcactgtgacctccgcctcctgggttcaggtgattctcctgcctcaacctctggagtagctgggattacaggcacgtgctaccatgcccagttagtttttttgtatttttagtagagacagggtttcaccatgttggccaggctgctctcgaactcctgatccactcgaacatctgatcactcaggtgatccatctgcctcggcctccgaaagtgctgggattacaggtgtaagccaccgcatccggccaatgttcctttttaaatactgtttttggaactctaaggagggagggaatggtaatggctgagaaggagcagacagaaacagggaaaatacttgtaagtaggagtcatggaaggcaagaggataagtgagaagcaggtcatggatagatagaggcagaggattaatgtcaaaccaagggcctgtctcat

SEQ ID NO: 735822 - DNA, 612 bp, Homo sapiens
cccccatctcagagttgggggcagcagatccagccactgcagctgggagggagtccaggtgtcaggaggaaggggctgaggtcttcagggctggtggctcagggtatatgagtagcctgacacaggcacccatgtccccagaccttctctggccatatggagtcagagtgacctccagtcccctggaagattgccaagagcaaggcagctcctcagcccctgaggagttagcagcagattatccagagagggtctcaggctccttatcagaactgagctagagggtgatttaggcctgtggaatgcaggagcaagaaagccaagttactggatacaaggtcagggcctgcctgttaagcagcaagagcaacttagccagagctatttaaatctctatcttagaaattcccgctgggttgagccagcaaggsgagtgtgggggcaagggttaagaggcttcagctgtggggaaggaagggccatggacactgaaaacaacaggccaggcctggatgtcctgacagcctagacctaaatagagaggtttttagtgtcctggtaggtcatttcagcctgcttgcaagtgaatgggtcttagggtgtaaggtacat

SEQ ID NO: 735823 - DNA, 632 bp, Homo sapiens
tgactatctgtgtcaggttggcaaggcatctaacctcagtgtctggtgccctcagtgatgaactgtggctagtggttcttgtcctacttcctgcaggcgcttgccgcacccagtgggacagcagcaaggcagatactcccaaaaaacaggtagctcttggcacgagtgttttgctcttcttttccttccttaccttctacttgtgtttctcctatcatcctcctttggaaaagtattggatttttcttctatctatagcacgcctcccattcccaacacttcagcgtctggccctttcgtggggtccctctcacaaacagcctgctgacactgcaggtcccttggaacagggaccattccttttcctctcagtacctgggcagctccctctcaactccaacttatctctccacacgatgggcagagatttggtgatttcgggtttcattcttcagacagygcccctgtagaactcctccacagtgtcccttgatgcagtgtgggtgtggggaggggccaagatcttgaccctcctgaccaggagaaggagctgctgtgactctacagccccggtctcacagccactgggtttatcatctgccttttgggatcagcaaaagggtttcctaaag

SEQ ID NO: 735824 - DNA, 388 bp, Homo sapiens
atactacaaggctttggtaaccaaaacaacatagtactgatacaaaaatagacagatcaatggaacagaatggagaacccagaaataaagccacacgtctacaatgaagttaacttaaacaaagttgacaaaagtaaacaatgggaaaagaatactttattccataaatgatgctgggaaaactggctattcatagggagaagaatgaaactggaccrctgcttcttgccatatacaaaaattaactcaagatggattaaaggcttcaatgtaatacctgaagctataaaattcctaaaaagaaaacctacaaaaaactcttctagaccttggcttaggcatagaatttatgactaagaccttaaaagcaaatgcaacaaaaacaaaa

SEQ ID NO: 735825 - DNA, 589 bp, Homo sapiens
aaacccatacatgtatatatctatatatacagactttaatctggatcagtaaatgattgatttcagtcttgaatcctgaggcattaaaacaaacaagaaaaaatgtgataatccaatttaatatggaaaaggactaatatgcttcattaaatgcactgtttataaaaacctaattttaaaagagatattttcctggggtagtttttcacaacttttggacacattctctcattcatattgcctgtaagtttcactctctttgatggaaagtttattcaaataaagatataacccgtgtgtgtgtgtgtgtgtgtgtgtgtgtgttaaactttcagcattgttaattgcacattatgttttcatgttctgctccctcacaggtgtgtgtgtgtgtgtgtgtgtktgtgtattaatctttcagaattgttaattgagcatcatgttctgctccctcacaggtgtgtgtgtgtgtgcatgtgtgtgtatgtgtgtgtgtgtatgcatacacacatagaagtgcctttaatcatttttgtaattgttacaaaaagaggggaaagaaacttcagaagatccattgacattcagt

SEQ ID NO: 735826 - DNA, 606 bp, Homo sapiens
tacaggaactagttctttgaggaaaaataaaaaataagtataggtctaataaataaaacagaaacatttaatgggcaaaattacaaatgagaagagtttaacagatttcatatttttaattagaataaaatattgtttataatgctatactaaagaacttaaaaattcccaatggatgtttctgtgattgattcaacggggagtagaaaacctgaatagcttaataataatggacaaagaaacttaaaacctctccatgtgtccaacacttttttctaaaatatgcttacgggccaaatgacttacagatacrttctttcaaattttgaagaagtttctagtttccatagcgtttaaattctttcaaagaaagaagatataaaaagatagaatgcttcacaaatcattttacagagattgtacaattgagacagtaaatcttgatgatgatctcatagcacttgatcttggccataaaattaaatgtaaattaaattacaaaattaaatctgcaaaacaacctcctgttataagtacaaaactggaatactaacaaaagaatggggtttgaggaaaggggtttgttagaagaaggatatgacacta

SEQ ID NO: 735827 - DNA, 614 bp, Homo sapiens
gatttccgagaattctaatagtcaacgaaggattctcttgaagacttacactgtacgtaaataggcagaaaagggaatatgttccaggcaaagaaatacatttaggaggctgtggcctatagtgtaatgggtctgttggttttaacttcaagtctaaaatatatcctttccacttatgttgtttttgaaaagctaatgagtatttcttagccaatagtattcttacctctagaattaagatgaaatacctgcagtgcttggcaacagtaagcaatcaatacaaatttattgtcacctttttccaaaaaaacataatagaagtacagtcaaaaattagaaacatgttattttatgaatttggggtaagaaatatgtttgtttagagttcattgcaatcatgaatcccatacatgtaacaggtagcacagtaacaaaactgagwgctttttaaaattctaaacgccttggacatttatattcaaatgaaatgacatatggcaggatagcatctcttgcccctttgctccttgttactcatggcatcctcattacttatggggaggagacttgttggcataataaagttatcaaactcttgctgtgaaaagcaattg

SEQ ID NO: 735828 - DNA, 611 bp, Homo sapiens
tgagtgggatccactttctctgcatccttgtcagcatttggttctagctgtgttttattttagccattcagttacgtatatcgtgatatctccttgtgattttaatttgcacatccctaataactaatgatattgaacatattttcctgtgcttatttgttatttgtacgtactctttatgtgttttgcacatttttatttggattatttgattttttactgttgagttttgagagctctttataaattatagtgttttgttgcatatgtggtttacaaatagtattgctctttctatagctcttattttccctttcctagggccaaatttttaataaggccaagttatcaattttcccttttatggattataatttttatggcatgtcttaggaaatctttgctcaggcctatatcctgattttttttcttttttaaaatatctttcaatttttwaaatttttaaattttaattcttgtgtttacatagtagatatatatatttatggggcacatttttttttgtacaggcatgcaatgagcaataatcacatcatgtaaactagggtctccatcccctaaagaatttatattttgtgtcacaaataatc

SEQ ID NO: 735829 - DNA, 554 bp, Homo sapiens
gtttcttttcttttgctacttttaggatcctttctttatccttgacatttgcgagtctgattactaaatgccttgaggtagtcttgtttgggttaaatatatttggtgttctaagaccttgtacttggttatgatatctttctctaggtttgggaatttctgttagtattcctttgaataaactttctactcctttctgtttctatccctcctctttaagggcaataactcttagatttgcccttcygagactattttctagatcctgtaggtgtgcatcattgttttttggttcttttttcttttgtctcctctcactgtgtattttcaaatagcctgtcttttagctcactaattctttcttctgcatgacctgttccactgttaaagaactctgatgtattctctagtatgcttattatatttttcagctcaagactttctgcttgattcttttaaattatttcaatctctttgttaagtttatttgatagaattctgaatttcttctctgtgttatcttgatttttttttttttttttagtttctcagca

SEQ ID NO: 735830 - DNA, 586 bp, Homo sapiens
aatagagttccaatcaagatgttatgttgagcaagcatgggcaagttttcatttcactccaaatacataaaattagaggataaaatattttaaaccatgtgtaaagtaagtaacagtggttgaaaatcacaactagaaattatcargtgtgagaaagaaagaaaagactgatgatagtcctgggattagaaacatatcttaatgtttaatgcttctatgggaaagagggctgtggccatacatattacgcacactagaaatgggaaactaatctcccagttaagtaccagattacaaagaagcaagcagtttttgggaatggggaaaaggaaaatctgcatcccctagcctagattaatattagcatatgagtcaggaccccaggttcatgagcaggctatacactctatgccagccatgaggatgtgtcttgctgatatccaactacatggggattaattgacccaagggtcaagtagctgcatcctgaaatccatcaccatgtttgcaccaaggccacacctcttagctgctcttagtcaatgattgactgtgattaagatactgaggcagagctgttactcag

SEQ ID NO: 735831 - DNA, 586 bp, Homo sapiens
aatagagttccaatcaagatgttatgttgagcaagcatgggcaagttttcatttcactccaaatacataaaattagaggataaaatattttaaaccatgtgtaaagtaagtaacagtggttgaaaatcacaactagaaattatcaggtgtgagaaagaaagaaaagactgatgatagtcctgggattagaaacatatcttaatgtttaatgcttctatgggaaagagggctgtggccatacatattacgcacactagaaatgggaaactaatctcccagttaagtaccagattacaaagaagcaagcagtttttgggaatggggaaaaggaaaatctgcatcccctagcctagattaatattagcatatgagtcaggaccccaggttcatgagcaggctatacacwctatgccagccatgaggatgtgtcttgctgatatccaactacatggggattaattgacccaagggtcaagtagctgcatcctgaaatccatcaccatgtttgcaccaaggccacacctcttagctgctcttagtcaatgattgactgtgattaagatactgaggcagagctgttactcag

SEQ ID NO: 735832 - DNA, 620 bp, Homo sapiens
tcctctagcagcagagttcctgtcgctgcacattcttgccagcattgggtgttgtcgttgttctgagttttagccattctaataggtatgtagtggtatcttgttataatttgcagttccctaatatgtgatgttgggcatcttttcatatgtgtattttccatatatgtatattctttgatgaagtatctgttcagatcctttgcccatttttaaaaatacagttgtttgctttcttatagttgagttttaagaattctttgtatattttatatactagttcyttatcaggtatgttttttgcaaacatatttgttcagtctgtgacttatttcttaacagtatattttgcagagcagaagttttagtaaactctaacatcaatttgttctttttagattttactttttatattatatctaaaaagtcactaccaatacactgtcacctcgattttctcctatgttattttctaagaattttaaatttgtgtgctttacatttaggtcttttatccattttgagtcaatttttgtgaaagcagaaagtctgtttctcaatttattttttatatgtggattcactttattatttttcaaaagttaccttaaagcgttaca

SEQ ID NO: 735833 - DNA, 502 bp, Homo sapiens
catacaactaacaagaatacaagtgagaagtatatgaaaattacatcagatttataaacaaagaaacaatttttatctgaggggcttagaaaaagtatacagaaggaggcaaaataacaatgtaaaaaaataaaggaaagcactctgtttctttgctagacattttcccccttgtattcattagcgatttgtatggttcatttggcaaaagtagggaagaagaaagtgaatttgcataagcacaattaatgacttcttaaaaattcagcagaattgcaattaaatctgagtggattccagttccaaaatgtccttctcttacagtaaaaaacagtaaaaaamtacctgaaaagttttcaccataaaactgtgcctcacgcttttacatttttaaaggaatatttaaatcttatatggttaagatcagatacattttttatcaaagaacagggcaactgcttttgtattaccatgcctagcaccatgaaataaagaggcaaag

SEQ ID NO: 735834 - DNA, 584 bp, Homo sapiens
tgcagtttaaggttccaaactcccctggccacctcaggtttagtttcttcactgaagatttggaactgacctaaatgatttgacaagtcttatttgattacttaaaaaataactaaacactttttcagtgagctgtcctgtaatcaasacttttcacacagatgttggcaaaataaggcagatattcagctgggccctgtgtgctcaacgaaagggccccaggagaactggagctgcagaaagtccctgggacccccgacacttgcctatattcttttcctctcacgcaccactgcaccatatctttgcttttaaataaaagcctcctgtgagtatgtcaagtgagtctgttgagtattttcaaatattcaaactgaagaaaataatatattctgtatactatttttctacataatttatcttatggaaagctgaacatttcttctgatttgacctttctagtatgtaactctacatacgagcattccagtggagttgaaccaattatgacatatggagcatgctgagagcaccaaattatttctagcatccctcttttagaaagtgaaatatgcctattttcc

SEQ ID NO: 735835 - DNA, 635 bp, Homo sapiens
tgagtgcattgattctaaaagtgctgtgttttagtaacattagctgtgaaataagcaaacacattaaggtcaaaattgtttccttctatgtgtgtgcacaatgatttagaggaaaaatcccatcacatttcttaagaattaggctatacctgcagaagatgattatgcaatgaagataacatttccccccctagtcttgaagaaggcccagaagctgctatttagaagtctaatccttgtttagactcatgataaatatgcagactcttccaggtgaagagaacaaggagggtctagaggcctggttattgggatcctttaggaattgtgtctaatgccaggaaacttttcagaactactcccaatacttttyaacattgcttttcatggtggatcaaggctgagactttgacttaaacaaaaaacaagaattcttgtattagagacaacccctttatcagtacttggtatttggtgtgctattattgaaaaaagaggggtaaagaagtgtattctgaagtaaaggtaacaagagtatgccctgacagagacaatgtggttgctggcagatttgccagacaaattctgacacctgggatactgggttctctaactgacaccataacttctataca

SEQ ID NO: 735836 - DNA, 624 bp, Homo sapiens
aataaactaatttcttatgaatctttaaaatttgcctttttatataatgctccgggctaaaaatttaataagtctaatttaaatatttcttcttagaaatgttcagtaaaccttgacaggttagtgaaaactacactgaagtgttacaataaattacatcaacagatatttatagacacctgctaaatgcaagccattcagttagtagctatatataaacacaaactgcctacaacaagtgggaataagcaaggtaggtcagctcaaactaagaaaattaagtatgtgggagaatagaaataaattgttatttttatgccattaggtaatgagatgactatcaggctccagtatactaaattagactaccatggtatcatgaacaggaaaacactatgaagagtattaagagcccactcagtgcaatgtaytattaaaactaataacctaaaataacagtaataagacaacaatactactttcaaggatatgtcaattgacattaaataatgtgctaaagaatttagtctgctgaaccttatgatcaccagaccaaaagaatcaactaattatattattcagggaatatttcgctgaatatatatgctatattccaggcacttt

SEQ ID NO: 735837 - DNA, 620 bp, Homo sapiens
tttctgtctcaccacgtcagcaaaattgctcttgctaaggtcatcatatatccatggttactaaatccagtaatcaatgctaggtccttgttttaatgagcctgtcatgagcatttgacagtgttgatccctccctctttggtattcttgttggctgctaatataaagtactcttctggtttctgtcctaccyaattgttcatccactctttcataacctccgttgctagtgccctcttatactactttcttatcatttctatttatactttttcctttggtaatctcatctaatctacatgctgatggctttaaattctacctacatgctgatgactccaaaatgtatatacctccagtccagtattctcccctcctcctttatccatccacttacctaatcaatatcctgcttgcatctccaatagatatcttgacttaatatgtctgaaactcaactcttgttcttcttgacgaaatcatcttctgcccacagtcttcccaatctcaattttaattgagacaaatacttccttccagtttctcagatgagataacatggaatcatccatgactctgctttctctcatctttatatcaaatccttcagaatatctatt

SEQ ID NO: 735838 - DNA, 627 bp, Homo sapiens
gttttctaatctctagtactagcatcatccctagttacactgggagcccgataaatgttttatgactgaattttaaaaataaaataaaaatagcaaatgagctaagccttattctatatgacatatcatcttcacaaaaataaatacaattttaaaaataaatataagtaattgcctctaatggcagttctggcatcactgctattacaaagtaatcaggactaatagtaactttagtttttatgggatagatttttccttaaacatgtaaagatgtatttcaagacaagaagaaatggatgagagactaaagtctatgctttcttaagagttgggcatagtttaatcattagcctatgtgaattaagctagaagaattctgtcctcattaacctttgagtactttcaatctctccagagaacargtaaagaaaaagctcagatttgctgtccatccacttgtgatgacacaaatcatggaaaaactttgaactaaaccttcaatttgattaacacggtttatttactaagaatctctgataataacaaaaggcaaagcactgacacatcagaattttctctcaaggagaaaaataagtctttattaataatgctttaaagttgtat

SEQ ID NO: 735839 - DNA, 617 bp, Homo sapiens
tatctataatgcatcctaataaacagaagaagtatattcttatacaatgaagcagcttgccattgacttttactttagatgcttttctgcagaaagagaaaaatagacaaatcaaaactccctttcagtacaatatattcagtcctgctgtgtagagcattaagacaaagaagggaagagaagaattagaagactaaagggaagaggatgaagcagtttgagtagtagtagttactccaggtaaacaaaaccataaatggaaagagacagcataaatatcaaataatttctccaatttatatacccattatgagatgcctataccacctgtttccattaagaaaattcctaagattttgtattcagtttggtctttccattagtgaatactgaatgcctttcatgtatcttcatttagaagtaatgcacgttcaggaaacatatcttaagaagtgtatcacggcygggcgcggtactcacgcctgtaatcccagcactctgggaggccgaggcaggtgtatcacgaggtcaggagatcaagaccatcctggctaacgcggcaaaaccccgtctctactaaaaatacaaaaattaggcgggcatggtggcgggcacct

SEQ ID NO: 735840 - DNA, 596 bp, Homo sapiens
atacacacacacaacacatgcacacatatacacaaatacacatgcacacatatatctatgcaagaagggttatttttatttctttatgcaagtagccctgactttgcttgtatatgattgtaattgaactgtcaacctaattaacaactaaactttgaataatgctaatgagaaatgaacacagcatcagaggaaagaccagctctacaggtgataaaacttcacaatagtgacattttccagtgtaaagtcacagttactgtgatctgatcaaagaaacagacccccattgggtccaattataaccacagtttcgaaaaaattattgagttatgttcataatctatgcaraaaggcctttgcagtgtaggtcttctccccatagctgtgatcttttcaatttatatccaagctccatagattcagataaaaattgagagcctaattcatttagcccacaaagtgcataaatcaggattcatttaagagggatttttattattaaaatctaatctcaataaatgcatattttttggtaacccacatattcaaacaataataattacaaaaataaatctaaattaatgtcctttatt

SEQ ID NO: 735841 - DNA, 610 bp, Homo sapiens
gtgtccttttttcccaataaaaactctgtctcttggtcacatggacatttccatcctatttctgtttgaggtagaaatctgctcctgtaccttgagtcccacctgcttctgccttttcagttgacttgctccttcacctgccacttgtcttggatcaccagctttagccatggactaagtctttaacatgggyatttaaacatacttaaaacacttccttcaaaaagcaaagcataacagtgctaaagcaaattttcatgggtcctcctctgcctactgccttcctccctctaacagccaaataattttgcatctactctcaattttgcactttcctacaccaaatatactgacatttttagtgctaaatccaggaaattttttcttagtctttgttttactcagattctcttcagtatttgaagagtgtaggccactctctgtgcataaaacagtctattcctccatgggctcctagctaacagcctgcagtttgtcagttttctttggggtttcttgatcctctgcctaccactgaaatggcagtgttctttcgtcagcactttctgctgttaccccatattccagaggtatttagccatggctatgc

SEQ ID NO: 735842 - DNA, 601 bp, Homo sapiens
tactgagttacttacactaatgttgaggtatttgggttcagagaaaaataggcaagtaaaggaaaattgaaaatagtttcaaattctgagatgcaaagaagaacccaaaaaaactaaacaaccagttttttattgccataggtcgaatgttcctttttaaaaaaatccctcatccttttctctcctctttcaatcatatcccacaaacgttaatgctcattaatactctgtctagctatagcattatccacatttttgcaatrgctcaaaaatgtctccaagccataactgctgcaactgcttataacttgatggactattaggtgacgtttccagttgtttgagaagtaccagcctataaacatacccaagacaatatattacaactagggattatgttgtgtaaaatttatacatatatatctctccatatatgatttcaaggatagataatctagagtctacataatcaggctattggctggaaacataaataaactaaaaaaaaataatttaaaaaaagcactccaggtttctaattcagcttctggagtgttaatgttttgtgtgaccttctgaaagctctttgagtttttaccac

SEQ ID NO: 735843 - DNA, 562 bp, Homo sapiens
tatcaggagattaaatactgagattaaagagtactctcttcccactattatgttcagttctgattttccagctgtgtagctagaacaaagaaagaatgtgggttttttttaaagaataagacaaggctagaaggtatgcccttgtgagggcgccactgactgtgtcatcacaggagggccctgatacatgaatattcggtctccaggaagccaagtatgatattcacaaccacataataatgtgctaacctcattcacrgtaatcacagataatgtagtatttgtgtctgccatacagttttgaaggtaaaatatggaacctattttggaaatttcacataacatcttaagctgtattaatagaaccagaataacccaaaataaagaggtaatgaatgcacttgaccctgcatcattcagacctcagctggaatattgtgcttccttttgggctgcagacaaacagaagaggactcaggagagtgacaagagaggaagcaagctcatgccttgtcacatataaagtggttgaaagactgcaattgttagagaaaatgatgca

SEQ ID NO: 735844 - DNA, 629 bp, Homo sapiens
aggggtatttcttagaagttcattttatgaagtctcctccacaagttctttttgatagccaataattcaaatgtcatgctacttctttaaatcactccagtcattgaatagcataatcttttcagggggcaaacagctgggctccagtaggctttaaatgttcatttgttttccaattttttgacttgcataggaagaagtaatccctttcatgtgaaatattcccctcgattaattttaaagaaccaatggcattgtctgataatgggatgaaagcccaattcactgaacagaatgtgctatttgtaacctggattatcctttaggtttttcggcatagtcctcgagaagctgagaatctgtcattttattgattaaaatacacgtacagatacacacgtttacattagaaataaaaatgttgtaagctcaaataggcaggrtatttcacctgaaagcctgaaataaatgtgatgagaacctatgaactaagttccagtgtaaacaagtgggttaaattctcattatagaaacttccagtgagcaatgcagcatgactgtgggaccataattcaggaacaatctgcagagcaaaatatagaggcactaattttgttatatttgcagcc

SEQ ID NO: 735845 - DNA, 591 bp, Homo sapiens
attaaatgaaaacatttgaaattataaaagtagtaaatattttttagtagaattaaatatatatatagtaaaaagtgaaagctgttttacttccattcccagagaaaactttacttaaattttatatagttttttccagagttcttcctacacctgaaaaacacastggattatttttgtgtacaaaagaaaagaaatcattctatatgtatctcctttacttccactctttttctttccacttaattcatacagataaactttaccatttaaatggcctctggtgattcctttataagaatgaaccattagatagttaaccagtttactaatgacagacatttatattgctcccaagttgttgccattgttcatttatttatttctttagtattaattcctagataagttgctacatcaaaaataatgtacatttaatattgcaatagttacaaggaaatctgtacttttttcagtaatatattagtgtctactttcaaaaagctttaaattctgagcatcatattgtcttctaaatctttgacaaaaattaatgtaaatgaatatgctattttaattgtcatttattta

SEQ ID NO: 735846 - DNA, 627 bp, Homo sapiens
cttgggctgggatcatttttcaaactgtacaaccatacttggcagccttgagaaagctccctggtagataatccctgtagggtagaatgctgtatttccggaatgacaagtttgctaattcaatacttgctgtagcagtctccctggacacaagagggcaggcgttctttaatatgtgtaggtgattgaatattacaagtactaatgtttaaggagtagtctttcatttaaaggcaagattctttatgaaagagacaggatgatggaaatatataggctatccagagttctagagcaaggagagtgaactggcctgcaaaaactatagttgaggaggctaattctatagtttagagtttaagataataaagaaaaggcccagagatgggacaaagttytgacacattgcctttgaaaagaaacacatttctttgactacatacaattataatctttttaaattttttttttttttgagacagggtctccctgtgttgcccaggctggtgtcgagctttagagttcaagggatcctccagccttggcctcccaaagtgctgggattacaggtatgagccaccacaccctaactaaaattataatcttgctctcatctgtcattagcag

SEQ ID NO: 735847 - DNA, 566 bp, Homo sapiens
cccctataaatatgtacaattatatgtcatttaaaaataaaataaaacataattctcaaaaatacacatttcagagacactatggtgtgctatttttcaagtccacatttcaaccaaaaattaccaggcactacagttaacaatattgtgttacatatttcaaaataactataaaagaggattttgaacgttcttgccataaggaactgataaatgtttgcggtgaagaatatactaaatatgtatatacattgtgtaatgatcaagtcatggtatttgctatatttgtcacctcaaargaaaaaggaaggtacgaccccacacttaagtcactggaaactgtttccaagtaggtcttgatattgggtttagcggacaaagacaaaacaggaaaatatggttttaagagttaccagagagggaatctcaacataaaattagaaattaaagaaagaacaaaattgaaattctagatctgaaaagtacagtaaatgaaatgaaaaactcactgtatacttcaacagtaaatttgagatggcagaagaaggaattagaaaacctgaaga

SEQ ID NO: 735848 - DNA, 601 bp, Homo sapiens
gccttccaagtagctgggacgacaggtgcacaccaccacacctggctaatttttgtactttatgtagagacggggtttcaccatgttgcccagactgagctcctgagctcgagtgatcccccaacctcagcctcccgaagtgctgggattacagctttgaggcactgtgccccaccyggtagcctatccttaaggtaaccttctggttataagtgggatgagaccctttcactgggtgcctcattgaatcaacacctgtctactgagtgctggtctaggctctgcagcactctcactgagctaagagccatccaggggagtgaatcaactggatttctgttgaaattccttccatttcttcatgctgtattcttctttgtaatttatatttttctcacccaaccagagaagattttcagagtggaaaattccaatggaatgaaacccttccgcccagatttattcttggaaacagcagaggaaaaagagctagaagtgagtatatcttcccgtattcatttccttggcctgctataaaattaccataaatgtaatggattaaaacaacaaaaatttattcacttacggttctggagactag

SEQ ID NO: 735849 - DNA, 646 bp, Homo sapiens
acagacacacccaggatcactattttgtatccttcaatcaagttgacattcagtgttaaccatcacaagtccaccccttgtcaacttgaatccatacacatctcctcagatcatacatattcttcaaataaagagagtaataaggccataattaaacctaacataatacaactatcctttgtacaaccggaaacacaccaatccccaagccaaatactattacataaagttaacaatacttaaatgttggtaggaagtcaataaatcttatgttacgtgatgaaggaaaaggaaataaagatattttcttgtacaagtgtatacatgcacaaacatgtttttagcaaaagaaggaggaaatactcatgacaattacagtctctgagttggcaactggtcacatggtcctggctggtattgatgactaccttcttctactacccattctgtgttctctttgccttcagcaagcacctcagctggtmgtggtttattcctggtggaatgacccaaaccttcattcttgagtatttttattgctgcctaaattgagctattatagtttcctattggccttaatcacagggcatggtaatactaagagacaccctaatggatctcctgtattccatgcatactcttcctt

SEQ ID NO: 735850 - DNA, 588 bp, Homo sapiens
ctcacacatttttctatctccccaagtagtctgagctcctcaagcacagaagctgtgttttctacttcttttgcaaccccatagtatccagcacagagccaggcatttaagagatatttattaaaagattgataatttaatgaaatgaaaaagaaaaatcagcaatattttgaaagtgatttaaactgatactactatcaccaacaactttaaagaagttgttacaaaaaaaaaaaaaaaaaagaagttgttacaaagaaatgctccctctcagggatgtaaaatctgaaaagcaattaagaactcttcttttatcaccctttttacacttatttacatcctgatgctctaattaaggcaactaataaaagtttcaagttgttaaagttaagagaactactgtatttagatgaagaagtaccagcagcctcagccaaaaargaaaacaggagggcttgttttgtctttctcttaaaaacataaagagaaaagttatctcccacggattaaagaaaaattaagataaatatgaatgtggctagccactgctctttaccactttaaagaaaaaaaacaagcagtggcgtt

SEQ ID NO: 735851 - DNA, 624 bp, Homo sapiens
attcacggatagcttgccctcaaattttaacttcactctttcaggctaaacaatgacattttgaaccttccttcaccccaccagattgctagttttagaaataacttttatatgatcttacagctaagtagcccaaaatcctatgtatttttcttcgacttatttgaaattattgaagactttcagaaagttgttaaatgtttcaaaggtctgaaaaggaaaaaactgaaaatcagaaagaatatattctgaatctcaagttaggaaaaataaagaacagtatgttcttctaccatccttaaatacccataacattagtattattttctcatcaagataatagatacagtgttaayatttaatttcaaaattaacactgaaagatcaagctaccaaagacttttatgaaatattatttctgccttttggctggaactgccatcttccagtaattcaccaaaatgattaacacaaaggcaaagagaaaaggcaccaacagatgttctccaggccttttagaacacatggagttgttccttcggccacatacatggaaacctacaagaaaggtgatattgtagccaggtgcggtggctcatgcctgtaatcccagcactttgggag

SEQ ID NO: 735852 - DNA, 558 bp, Homo sapiens
atgtttgctgtagtgaattgaatttagtgaggtgcaaattccttggccaaattgttttcttcagaatttgaaagacctcatactgggaagaaacgtgtagaaactgacagaggacactcgggggttctagaaatgtgtctcttctctgagaggtttggtattagatagaatggaaagcaaacacaggtggcaggtcctctttgaccagaccacttcttgcaaggaatcttcagtaagaagttgttgacacatctaggataattactgtggaaagctgggctggaccctaggtaaaattcatctttcctttggagacccatgctactgatccttgatatcaaaaactctcagtgctgggccccagcagcccwaaacaacttccctctcctcccatcaaaatgcactctcaggatgagctctctgccagatgaaagtggtgggttataaattaaattagctcatctcagataacaatgtccacctgtcactttttgctcatagagctgaaatgaccttagaaatcatctaggccaactcatgcatattgtagatatggaa

SEQ ID NO: 735853 - DNA, 476 bp, Homo sapiens
ataagcttgtggcaccaggagtttcaggtggtggaaagaagctctgttttcattggtgtgaggttcttttgcaattatttaaaatatctaatggaaacaatttttttttttttgagagggagtctcactgtgttgtctgggttggagtgcagtggtgtaatytcagctcactgcaacctctgcctccctggttcaagcaattctcctgcctcagcctccctagtagctgggattacaggcaccagccgccacacccggctaattttttttttttttatttttagtagagatggggtttcaccatgttggcctgtctggtcttaaacacctgacctcagatgatctgcccacctcggcttcccaaagtgctgagattacatgcccagcctctaatggaaataatttaagcagaatagattctatgggcttttgaaaaaggcgtattcaatccagttgtattatgtattttgatgtag

SEQ ID NO: 735854 - DNA, 633 bp, Homo sapiens
atgtgctgggatctcactgcctcatgctttcagggatcctgctctagtcctcacaccacctctcttaagtcttcatcctttccctttcctggtccctcctcatcaatatttcaatgttttggagtatgtcgataagctgaattggtttttttggattgtttwagcagaagttgccattggcaagatgcaaaccacaagctgccttgaaatagagtttctttctttcttctggaagacattgcagtagcccctgttagttacttaaacgtaagtagttgtgttcagtgccctggaaagagagtgtaacctggccttcccttatttgaaaaagacacccctcccctggaaatactcattgatggaagagctttttgggggtcggagtaggccaagcagataaatatattccttttttttttgagacaaagtcttgctctgttgcccaggctggagtacagtggcataatctcggctcactgcaagctctgcctcccgggttcacgccattctcctgcctcagcctcccgagtagctgggactacaggcgcccgccaccttgcctggctaattttttgtatttttagtaaagacagggtttcaccgtgttagccaggatggtcttgatctcctgac

SEQ ID NO: 735855 - DNA, 633 bp, Homo sapiens
atgtgctgggatctcactgcctcatgctttcagggatcctgctctagtcctcacaccacctctcttaagtcttcatcctttccctttcctggtccctcctcatcaatatttcaatgttttggagtatgtcgataagctgaattggtttttttggattgttttrgcagaagttgccattggcaagatgcaaaccacaagctgccttgaaatagagtttctttctttcttctggaagacattgcagtagcccctgttagttacttaaacgtaagtagttgtgttcagtgccctggaaagagagtgtaacctggccttcccttatttgaaaaagacacccctcccctggaaatactcattgatggaagagctttttgggggtcggagtaggccaagcagataaatatattccttttttttttgagacaaagtcttgctctgttgcccaggctggagtacagtggcataatctcggctcactgcaagctctgcctcccgggttcacgccattctcctgcctcagcctcccgagtagctgggactacaggcgcccgccaccttgcctggctaattttttgtatttttagtaaagacagggtttcaccgtgttagccaggatggtcttgatctcctgac

SEQ ID NO: 735856 - DNA, 506 bp, Homo sapiens
gaggagctggcaccattctttctgaaactattccaatcaatagaaaaagagggaatcctccctaactcattttgtgaggtcagcatcatgctgataccaaagcctagcagagacacaacaaaaaagagaatttcaggccattatccctgatgaacatcgatgtgaaaatcctcaataaaatactggcaaaccaaatccagcagcacatcaaaaagcttatccaccacgatcaagtrggcttcatccctgggatgcaaggctggttcacatacacaaatcagtaaatgtaatctatcacataaacagaaccaaggacaaaaaccacatgattatctcaatagatgcagaaaaggcctttgacaaaattcaacagcccttcatgtcaaaaactctcaataaactagatattgataaaatgtatctcaaaataataagagctatttatgacaaacccacagccaatatcactgaatgggcaaaaccggaagcattccctttgaaaagca

SEQ ID NO: 735857 - DNA, 506 bp, Homo sapiens
gaggagctggcaccattctttctgaaactattccaatcaatagaaaaagagggaatcctccctaactcattttgtgaggtcagcatcatgctgataccaaagcctagcagagacacaacaaaaaagagaatttcaggccattatccctgatgaacatcgatgtgaaaatcctcaataaaatactggcaaaccaaatccagcagcacatcaaaaagcttatccaccacgatcaagtgggcttcatccctgggatgcaaggctggttcacatacacaaatcagtaaatgtaatctatcacataaacagaaccaaggacaaaaaccacatgattatctcaatagatgcagaaaaggccttygacaaaattcaacagcccttcatgtcaaaaactctcaataaactagatattgataaaatgtatctcaaaataataagagctatttatgacaaacccacagccaatatcactgaatgggcaaaaccggaagcattccctttgaaaagca

SEQ ID NO: 735858 - DNA, 610 bp, Homo sapiens
ccttctctcctctaaattctaacccttccttccctggtttcctcccagccaatgaccttgcttcctccacttcactaggaaaactgaagcagtcagagtagagcaaactcctccatctgtttcatccacctgagcatctgcccccaacagctctaccttcctttctgctacctaaggctggcattaccacttaggccttcactcctttctccaatgggctactcagccattctctcctatatcataaatatgctaatctctgtagaaacattcctatcggcacacagccatgcttcatctcctccattttaataacccaaaaactctctatatcccracttccttctccagccactaccccattctttcctccccttcacagcaacactctgaagagttccagtttctctcctttcatttgctcctaaacccactccatccctacgtcttaaccctctggtcaaatccactgatggcctacacttggctaaatctaatggtcaattatcagtctttgaataccatgtaacttctgacctgatgccattattttatatgccaattaagctgtcacatgccatgaactgtaaaatgcattctgattttagag

SEQ ID NO: 735859 - DNA, 608 bp, Homo sapiens
gcaaactgatgcagtatagcatgtaatttttaccaccttggcttagagatgaggacactgaggctcagaaggaatgtgaaacttgttgaaagtaactggtttctagtacacttttgaatgaggcccatgcctgactgcctccacactgttttcctgcttcctcaccaactgctcattcatttgaccacgcarcaagtcattgttgagccagacgccgtggctcatgcctgtaatcccagcactttgggaagctgaggtgggcagatcaccagaagtcaggagttccagaccagcctggccaacatggtgaaatcctgtctctactaaaaatacaaaagaattatctgggcatggtggtggccacctgtaatcccagctactcgggaggctgaggcaggagaatctcgaacccaggagacggaggttgcagtgagctgagatcaagccactgcactccagccagggcaacagagtgagactccgtctcaaaaaaaaaaacccaaacaacaacaaaaaaaacaagtagttattgaatgccagctgcatatctggcacttgggatccatgagtaagcaaagcaaacacctgggcccgggtgacactgatat

SEQ ID NO: 735860 - DNA, 525 bp, Homo sapiens
tgtgctccatctcttctgtttgccccctccaaaaaacaccctaccctctcctccctgccctgtgtccccgagtatagacctcatgcacaggtttcctggctctccagcttccagatgggtctgcccagcaggaggcaccagcagaagtttggtgggaggaagaaagagaggtcagggtatttcttcccccacctcaatccttgacaggaaactggggctgcttcccttgaacaaagttatcagcaggtctcaggtgccctctccacacaattcakatcacacccttcaccccttccggcccaaagatggacaccaggttctggagttaccagctatgggatactaaaccttcactcccgatttccctacccacacctttattgagtttctctcagatcatcctaatttaaatgtgccacctatttcctgctgagatcctggattatacagtagatatcaccacctcataaggttacaagtgagagaccatgttatgactagatgctaggcactgagctatagtta

SEQ ID NO: 735861 - DNA, 525 bp, Homo sapiens
tgtgctccatctcttctgtttgccccctccaaaaaacaccctaccctctcctccctgccctgtgtccccgagtatagacctcatgcacaggtttcctggctctccagcttccagatgggtctgcccagcaggaggcaccagcagaagtttggtgggaggaagaaagagaggtcagggtatttcttcccccacctcaatccttgacaggaaactggggctgcttcccttgaacaaagttatcagcaggtctcaggtgccctctccacacaattcagatcacacccttcaccccttccggcccaaagatggacaccaggttctggagttaccagctatgggatactaaaccttcactcccgatttccctacccacacctttattgartttctctcagatcatcctaatttaaatgtgccacctatttcctgctgagatcctggattatacagtagatatcaccacctcataaggttacaagtgagagaccatgttatgactagatgctaggcactgagctatagtta

SEQ ID NO: 735862 - DNA, 628 bp, Homo sapiens
gagcctttctacaatccaaaccctcccaattaaggagacaactttgaaattaaccctaactaagtctcagaagtgtccttggacttcaagcaagctgagtaccttgggggacttattctggctcttgttggacttgatactcatgtctaccgaagtgtcaggtgacttgggttccaatcacagctctcgcattcctagcagtgtgaactctgacaagttacatggcctctctgagtcatatcttcaactgtaaaatgtggataataatagtacctgcctcctaggattgtcctgaggatatacagagcataaaactagtgccccaacgtcaatgaaaaaaaggagccctttgtgtaagcagaatgggggaaagcacccataaccaaactctaatcagacaaagtgtcagctctttagccattggagtcaccagtaaacttggcctgagagagtaamccttcaattcactattgctgtctagctaagacaggcttctcggggtgccattgttatcagggatggggaggaatgggacagagcaccagtaccttttgatgaggaggagagtcactgcttaggtactgctggggaagtcccagtcaggcagtgagatgctccaggcactaaa

SEQ ID NO: 735863 - DNA, 626 bp, Homo sapiens
actctgaccgtcaccagtgccttgaaaggaaaagggggtgtcctagtgaatatctgggggcagggctgcagagtgggcctctctgagaaggtgacatccaagctgaggcctacaggatgagaagatgccagctgtgcagatatctgggaacagggccccaggcagaagaaacagcaagggcaaaggccctgaggcagcactacctgaaaaagagcaagagagctcgtggagccggtgcagagtgggaggtgacgggagcttttcttcacccgtccargctagatgactgtcaacagatgagatggcatctgagctgggcaggagtcagggcccagaagcttctgctgataggatcagacaatcctgctagcccacgcatttgtttgtatccagaaatttgcggaggggctactgaacctctcaggaaaatcagttgaagcctctccctctcaggggcttggaggtcgggcacaaagccagataacagggactccagaaagagctacctcaagggagtagtgggcatctcagaaccagggctgagactgaccaccgttgtgagaactcaccctcactcggccaccctggcagggtccctgtgcctgtgaaaggggctgtgcttgtgc

SEQ ID NO: 735864 - DNA, 536 bp, Homo sapiens
ccaagatggcgacgagagtgacctctggtcgtcctcactgctacactcccactgtgaaagccccaaatggcagtttacaaatggcatggcaaccacaggcagttaccctatatagtctaaaaaggggagacaagaataatccaccccttgattagcatatcatcaagaaacaaccataaaaatgggcarccagcagccctcagggctgctctgtctacggagcagccattcttttattcctttactttcctaataaacttgctttcactttaatctatggactcactctgaattctttcttacgcgagatccaagaaccctctcttggggtctctattgggacccctttcctataacaaaatcgcctacccagggagccaggaatggggttaatctacaccacattaagtcagaggtcgggaaagctagctcaatacatcagatagatgataccagcagaagggccacacacaactgatgcccctgcaggatccccagctatcatttgattttcaaaatgacccccaatgtgatta

SEQ ID NO: 735865 - DNA, 502 bp, Homo sapiens
tctacaaaaaatgcaaaaattagccagcatggtggttcatgcctgtggtcccaggttatcaggaggatggctggagctctagaggtcaaggctacagtgagctgtgattgcaccactgcactccagcctgagcaacagagtgagacccygtctaaaaaaaagaagggaaaaagaaaagttgtttctgtgaaaactaagttaagtgtttcgaatagccctgagaaaagcaagcttctaaatagaaattgatgaagaattagttgtaagataaagatggagggggaggaaaattataaaaatctggaagggttctgtatgctgcttagccagtgtctttaaattctcattaaattcaaaatgaaccaaaaaaggaaatcacctgattcatgcagggaagacaatgtgagacttcacccaattaactcatttgttaatcaaccattaacccaatattaatattagtattcacagtacaaattagtatacagaatactagtatgtg

SEQ ID NO: 735866 - DNA, 502 bp, Homo sapiens
tctacaaaaaatgcaaaaattagccagcatggtggttcatgcctgtggtcccaggttatcaggaggatggctggagctctagaggtcaaggctacagtgagctgtgattgcaccactgcactccagcctgagcaacagagtgagaccctgtctaaaaaaaagaagggaaaaagaaaagttgtttctgtgaaaactaagttaagtgtttcgaatagccctgagaaaagcaagcttytaaatagaaattgatgaagaattagttgtaagataaagatggagggggaggaaaattataaaaatctggaagggttctgtatgctgcttagccagtgtctttaaattctcattaaattcaaaatgaaccaaaaaaggaaatcacctgattcatgcagggaagacaatgtgagacttcacccaattaactcatttgttaatcaaccattaacccaatattaatattagtattcacagtacaaattagtatacagaatactagtatgtg

SEQ ID NO: 735867 - DNA, 627 bp, Homo sapiens
agcacaactagcaccttctaaataccactcatcactcaaaggaaccttggagaaatgatggattccagggctgagttatggaaagtataagatgacccttgggtattgtgtgctagaaggtaaggaaatgatcaaagaacaaggggacaggtcaaagggacatagaagcctgtgtgaaggaactcttgctagccaaacctgggataagtagagaatcagcataaataattctcaaaagggtcrtcaccagtgatggaacaaagcgaatcacagtccacctgatgggactcaatgggcaggccacaggagcacttgtgcactattcctgcccgagatgcatgagtggaatccaatgcttagggagcatcagacacacccaggctgaggggcacaacacagcaactggcctgcccccttacaagactgcaggtcatcagagtaaaaaaaaaaagctgaggagtgctccagactcaaggagatccaggagacaggacaactaaacacaatagtgcatcctgaaccggatcctttcactacaaaggacattatcaggataaatgggaacccatagctcattgctaaccccggctctgatggctgcattctagtcatgtagaagagggcccc

SEQ ID NO: 735868 - DNA, 627 bp, Homo sapiens
agcacaactagcaccttctaaataccactcatcactcaaaggaaccttggagaaatgatggattccagggctgagttatggaaagtataagatgacccttgggtattgtgtgctagaaggtaaggaaatgatcaaagaacaaggggacaggtcaaagggacatagaagcctgtgtgaaggaactcttgctagccaaacctgggataagtagagaatcagcataaataattctcaaaagggtcatcaccagtgatggaacaaagcgaatcacagtccacctgatgggactcaatgggcaggccacaggagcacttgtgcactattcctgcccgagatgcatgagtggaatccaatgcttagggagcatcagacacacccaggctgaggggcacaacacagcaactggcctgcccccttmcaagactgcaggtcatcagagtaaaaaaaaaaagctgaggagtgctccagactcaaggagatccaggagacaggacaactaaacacaatagtgcatcctgaaccggatcctttcactacaaaggacattatcaggataaatgggaacccatagctcattgctaaccccggctctgatggctgcattctagtcatgtagaagagggcccc

SEQ ID NO: 735869 - DNA, 631 bp, Homo sapiens
acaagtctgacagcttcctacttaaaatacttttcaactaagatcaatacagataygaacaaatacgattttttaatactataggatgaaatatgtcaacattggaagagctgcatgatttagtgaattgggatttttccaaataatgtcgtagaattgtggcatcaagtaaaagataaaatagacaaatgggtattactgtaacagactctgtcaatatggtttcagattccacatgcaacactgaagttttgctataatatgtatgaaagaagaatacccacaattatctgaaaatgcttctaaaatacctttctttcctaacctcttcaatgaaaacaacagatcacaacagacagaatcagtaacagacatgagaatttagctgtcttctcctaggtcagaataatgtgcaaataaatatatttgcaaaaatagaaaacactgccacttttctcactatattattttggggtctggaaaacagtcactgctcaaaaaagatattaatgttagataatttgttatatttaaataaattaaaatgttttttagatttctcaatttataaattataaatatcaatagatataactcacatacataaaagttttttgggatcctccaattt

SEQ ID NO: 735870 - DNA, 527 bp, Homo sapiens
atctcatttggagatagatcattgaaactgaaaacaaagacaaaaacaaacaaacaaacaaacaaacaaacaaaacaacctgaaaatctgaagtacatgtttaagccctgaagcctgggatacagcatctgggtattcttaatgatcccaattcgtggtgctttgtggaaactgtaattttgcaaagcagatgacacctgttagcagcttcttcatagcttgaatgtggtggcctgttcacacaagcacaggcacaccatcaaacagcatgtgatttgtagtttcatttttggcgaragacacacttttcacagaatgacaggtcacagagttgcaaaccagcttcattctttgatctccgttaagagacaaacagtgtagcaaatatagctttgctcgtttgtcttttgcttattagctgtgtaatttgactaacagcttaaaagaaagcttagttataccactctactatgtactaaaaaataattatctactgtactttgattactgtactttgattccctcgc

SEQ ID NO: 735871 - DNA, 573 bp, Homo sapiens
tctgcccgccagagaacaacccccctttgactgtaattttcctttgcctacccaaatcctataaaacggccccatccctacctcccatcgttgactctcttttcggactcagcccgcctgcacccaggtgaagtaaacagccatgttgctcacacaaagcctgtttggtggtgtcttcacacagacgcgcatgaaagctcccacartttcttggctccttcattattccgggggctgctttgcatgtacagtcctttcacagaacagatgactatttaaatggctagcaatcactatcccataagttaagggatatgtaacttcatagaggagaaaacctagacttagaaaggcaaaataattcctctaaacaaccacctaggagaggaaccttgcagagtagagccaatacgaaaagggaagcaattttgaaagcgtgtcaacaccagctaggctggcgtgacttgggagcaacatgccaggctaagattctgggctgggggaacaggaatgagagccctggagatcagggatcatgagcccagggacattcagatttggaaaagggctgct

SEQ ID NO: 735872 - DNA, 622 bp, Homo sapiens
ggaactttacagcagttaccttttcttcttgcattagcactgcaaggtagcagtcactacctgcattttacagatgaggaaacaggagattaagtaatttttccaaagtgataaaatgagtaaacggcagaggcaaaggagctgaagtcaaactcagggttcctggtccattattattakaccccagcatcccactgctgatcacacgaggagctatgaaactttcctgttaaatctactctccagagagagctctccaggcctagatgtccagaaatggccattggcaggaaaaaaatgacagacaaacttggctataactgtgggctttgggtaaattactaagctcctatggtatttatttcctcctctgcacataatgctgctctgtaagtaacaatacttctttcacatccattgggtgtctttttatataaggttgagatgagatgtttgaaaatcttgtagaactgtgcttcccacatgataggcatctaataaatgccattctaacctgaatttctgcagaagtaaaatggaatttatggcaccaaaatgataatgaggagaaagtttctttccctgagcctttcggagcatgtatttgactgttcctccacct

SEQ ID NO: 735873 - DNA, 573 bp, Homo sapiens
ggttctctgctcttgaaccctgttttctgttgtttaatatgtttatcaagacaatacgtacactgctgaacatagacccttatcagtagttctaactgggggcgggttcccctgataggtcccctccctttgtatgggagctctgttttcactctgttaaatcttgcaactgcactctcttctgatctgtgtttcttatggctcaagctgagctttcgctctccgtccatcactgctgttttccaccatcacagacccactgctgacttccatccctctggatctggcagggtgtccactgtgctcctgatccagccaggtgcccattgccatttccgatcgggctaaaggctcacyattgttcctgcacggctaagtgccctttagcctgggtgcatcctaattgagctgaacactagtcactgggttccacggttctcttccatgacccacggcttctaatagagctataacactcaccacatggcccaagattccattccttggaatccgtgaggcgaaaaccccaggtcagagaacacaaggcttgccaccatcttggaagtggcctgc

SEQ ID NO: 735874 - DNA, 555 bp, Homo sapiens
tttattcttctgctaatatattaattgacttatagttgttaaatcaaccttgcattccaagtataaaatccagtcgttctataaaatcctttttatatgtactgaattcatttagctaaggctacagtttgaataatgtcacccaaagtttatgtgttggaaacttaatccccattctaacggtgttgagaggtgggacctttaagaagtaattaggtcatggaggcatcattctcatgaaaggattcaggccattatcactygagtgggttagttataaaaaggatgagttcggcctgatttcttctctgtctctggcttgcttctgccttctgatgtggggtggtctcctccagctgccggtgtcatgctcttagacttcccagcctccagaactgtgagctaaataaatatctgttctttataaattacccagtcttgggtattctgttatagcagcacaaaatacactaagacagctaatattttgttgggaaattgtttgtagttttcttgttttgtgtgatgtctttggttttggtaacaggaaaatac

SEQ ID NO: 735875 - DNA, 586 bp, Homo sapiens
tgaaggtcaccttaatgctcttaaattcaaaaatatgctaatttaaataccaaatcctattaatctaaaacacacattgcaaacatacaaatatctcttctcttcacatgtcagtgcccattcatgtcatggtttggaaatggggacaktagattccccttgagctgcaagtcagcatatgtttctttatagttaactttagcaaaatttatacaaaatagtaattaacaacaatcttctttatttgttaactcaaaagaaaataccttcaaaactgcattttaagtttctgtactaaaatacagaaaaactacacaaatattgaaaagttgaaagttctttaatttttttattcctgttatcactaccacaatttacagggcaatatacttgatgtaatgaaaaagaaacagacaaagctacaacagataaaagagctcaggaatgtacgtctaatcgacactatattgcattcattaatagctgcacttttgcaaactgtggctatgatagtcctgcacaagaagggttttctgtttaagctgcaataacttttctgaccatggatcaccattccttctgtggc

SEQ ID NO: 735876 - DNA, 639 bp, Homo sapiens
gtgtgctgcaagactgtatgtgtttctgaatcctctgcttcgagggaaaaatcatattagtagaggataagtttactcagtactggaaaaattgtgtagattttaggaacttgttggagcagaaaggcgattaattgtgagaaatgaaagtcaattttagtggcagcaggtatatcaagtacatcaagtcttagttcaatgtttatagattttgaaaatttataggttcattattcctttcatttgtttcttcttttgtcccatttttgtcaagcatgtatttattttgtttgamtccttttttgtctcatggactgagaagaaaatataactaaggttggattatcccacaatttgctctgtgtctaattattctgaggtggattgtaatgaagccagcaagacttatacattggaattttaaatgtatgggattgtaaggagggtagaagctacaaaccaaagataagatatgcctgcagatctgcttcagatttcctgagggcagtagatgaaattatttctaagggccttttttaccactgctctttaagtatatgagtaataaacaaaaagaacaaagtatgtggttcagaaggaataaaacaaaaaagaaagaaaaggatcaatgaaatagaa

SEQ ID NO: 735877 - DNA, 632 bp, Homo sapiens
atgtacctaggggaaagcttgatggtaatggatgtccatctctagttgtgagcagagtttgcccctgccgaagtgaatctgagcagtatcaaacctgtgactttagtgttctgtgtaaagtctgatgtagctttgaaatgaaaagtgacagtgctgaagattaacttttytctttgccctgtttttgtagtttgcaccaacagtccaagtctcattgttacttatttctggcttttaggagttacttcaggcttgatgtgaaagctcctgattgagcatctggctgcaaatgtcagggtcctatatagaattattcttagagccacaggtccagtcttccagagagcctgtcatttaaaacaattgtaataaaatataatagggggcagaagtagaaaacataccaaaaagaacaacaaatgatgagtagatgttttaggttacaagtttatatataatgtctgtgtctgtgttaagattagggaattgtgaggtgagtctcggaactcaattctttctgttattttggctagaccctttggaagtagtgtgctatagaaaggccaagaatcagatgggtccctagggcctgtatctttatcttccttctagaaatgagtctgtctgcatca

SEQ ID NO: 735878 - DNA, 632 bp, Homo sapiens
atgtacctaggggaaagcttgatggtaatggatgtccatctctagttgtgagcagagtttgcccctgccgaagtgaatctgagcagtatcaaacctgtgactttagtgttctgtgtaaagtctgatgtagctttgaaatgaaaagtgacagtgctgaagattaacttttctytttgccctgtttttgtagtttgcaccaacagtccaagtctcattgttacttatttctggcttttaggagttacttcaggcttgatgtgaaagctcctgattgagcatctggctgcaaatgtcagggtcctatatagaattattcttagagccacaggtccagtcttccagagagcctgtcatttaaaacaattgtaataaaatataatagggggcagaagtagaaaacataccaaaaagaacaacaaatgatgagtagatgttttaggttacaagtttatatataatgtctgtgtctgtgttaagattagggaattgtgaggtgagtctcggaactcaattctttctgttattttggctagaccctttggaagtagtgtgctatagaaaggccaagaatcagatgggtccctagggcctgtatctttatcttccttctagaaatgagtctgtctgcatca

SEQ ID NO: 735879 - DNA, 637 bp, Homo sapiens
gtccagccatgagagacgaattgaaacaaaatatggtatattcacacaatggatgaccatgcaggggttaaaagaaatgaagaaatctccatatcttgctatcctgctatgtatagcattaggtgaaaaatttaagggcagaatagtgtctataatatgctaccttttacctaataaaggaatataaatataaatacatatttatatttgcatatattaatacaataatggaatgataaacaaaaaactagtgaaaatggttatttggtagagagtgaggagggaggtaactgagtggcagggataaaaattgatactagacttttctaaacatactttgataagtgtacttagtttgaccttggaaccatgtgaatgtttttacccarttttaaaataaaattagataaaaataaagacaacaacaacaaataatgcaatctctaagaactggaaaccaaatgagccaaaataaaacaaatgtattttatatttgtgaatttgtgtcttaggcacacatgtgactttaagacacaacgaattttggaaatgcattcttagtgaaatatattctaaggacacaactggaaataaatcttaaactgtacttagatatcatattgttagtttttatatt

SEQ ID NO: 735880 - DNA, 549 bp, Homo sapiens
catagtcatttattacagttaaaggaaaatgttataaaacatttggatatttctcatatgctccttgcataaagtaagcagatttatatttatttcaatatgatcaaaccctagagcttaaatgctttcttttgtatataatttatactatataaatatttaaatatacaacagtaatagttaatatttaagaatagtaaatatttaaatatacaagagtwgtccaaaacaaaaataagagttctggatcttactagctccaatactactttactttgaaatattgaatgagtgatttcatatttctaatattatttatctttaaaattgggaaaaaatatcctactgaatatgattaattgagaaccctaggtacaaagtattccttaaatttgaagtgataactactgaaagtgtatcccagagggaaatggtctaggttggaagatatacatatggtggtcataaagaacattcagcctcattggacttctaaaaatatttttttgctgtgagtgatagcctttttttttttaattaattttttta

SEQ ID NO: 735881 - DNA, 549 bp, Homo sapiens
catagtcatttattacagttaaaggaaaatgttataaaacatttggatatttctcatatgctccttgcataaagtaagcagatttatatttatttcaatatgatcaaaccctagagcttaaatgctttcttttgtatataatttatactatataaatatttaaatatacaacagtaatagttaatatttaagaatagtaaatatttaaatatacaagagttgtccaaaacaaaaataagagttctggatcttactagctccaatactactttactttgaaatattgaatgagtgatttcatatttctaatattatttatctttaaaattgggaaaaaatatcctactgaatatgattaattgagaaccctaggtacaaagtattscttaaatttgaagtgataactactgaaagtgtatcccagagggaaatggtctaggttggaagatatacatatggtggtcataaagaacattcagcctcattggacttctaaaaatatttttttgctgtgagtgatagcctttttttttttaattaattttttta

SEQ ID NO: 735882 - DNA, 497 bp, Homo sapiens
tgggctcccaagtgcagctgcagctacccagccatggatccggacctgggcatccctgcactctcagggacccgggaagccccccttctcccacaggcttggaagtgcctgctcccactccctggcctctcccaactcccagggcctgctctgatttcagagcaaagttgaagcaagctgagcccaggcactgtcgtgaccctgacaggtgtgcacacgttcaaggcagygctgacatgctagccctacaactgcctcagccccctctgaaactttgggcaccaacgagctcagggaggctggggggaactgagggtggctcgccatgagtctgcaggcacccattggcacaaacagcctgggcgccctggacagcatgttgatggccatgggaggcagacaggttcctgggcggaaaggggcaggtccctggtgaagccctaccttcaagccatggacagcctgaaacctgggggccaggctgtcagttccagctg

SEQ ID NO: 735883 - DNA, 497 bp, Homo sapiens
tgggctcccaagtgcagctgcagctacccagccatggatccggacctgggcatccctgcactctcagggacccgggaagccccccttctcccacaggcttggaagtgcctgctcccactccctggcctctcccaactcccagggcctgctctgatttcagagcaaagttgaagcaagctgagcccaggcactgtcgtgaccctgacaggtgtgcacacgttcaaggcagcgctgacatgctagcccyacaactgcctcagccccctctgaaactttgggcaccaacgagctcagggaggctggggggaactgagggtggctcgccatgagtctgcaggcacccattggcacaaacagcctgggcgccctggacagcatgttgatggccatgggaggcagacaggttcctgggcggaaaggggcaggtccctggtgaagccctaccttcaagccatggacagcctgaaacctgggggccaggctgtcagttccagctg

SEQ ID NO: 735884 - DNA, 625 bp, Homo sapiens
taatttaactgattgtacacaatgaatttttatttggtgctagcttaattttttaaaaacctattttaagaccaaattgtactgatacatatactatcaaaagaaaaacttcagacaaattaaatttaagagagtttaatttagcaaagaagggttcaccaactgggcagcagcccaacgtgaatagactcagagcaattccagcaatgccatgttgtcagagaggatttatggatggaaaagggaatgtgatgtatagagattggaagtcaggtgcagaaacagaaataagataatctgygtttatcttatttgaacagggtttgaacagtctgtgcctgtgaatggtgcaagtatggctgctgtgattggctgagacttcatggctgcttgttacaggagtaagttacagcctgtttacacaaccagttaggttacttcaccatgtatggtgaaagctttaggccgaacttaaaatatgtaaagagggagctatagactaaacttaatttaacaatacttatcggtacagtgtactaattttgcatctttgagaatttcagttacattggctacagattggatcctaagcacaccacatctatttctattgtgtatatctgtg

SEQ ID NO: 735885 - DNA, 550 bp, Homo sapiens
tatgtgagaatgaaacaacttagcttatgtggagtaacttagaatgatgcttaggacataataagaactcattaaatgcttgtcatcgtttgctattattagatcgtttccacatcatgggttgtcatgtgtctggaccctttgtgaagaaatctggctttattaacaatatttawcttttcagttattctttcattcattcacccaattcagaaaataggtaccaaagattcactgtctttctaatcttcccaaccaccaattacagagagtcaaacatttttatggcaggattcctcgacaaacactcaaactggattaaagactgaatgtcgttatttaaggtcaaagttatttaagaacccttctaactttatttttacaaattgaattgaactgaattgagtgtgctaactacactggtgcagcatctttgagttacctttggttctgctggtatttttgttctgttttggttttatctattcttgaattgatctaacggatcccatttttagtgagattttgagaatgttaaaatgacacagca

SEQ ID NO: 735886 - DNA, 613 bp, Homo sapiens
aagaaacagcagaaatttgcatggggatccccttcagttttggccaaatactcaactgtgcatgtgtgaggtagggctctgaaacttagcctgaacagccactgctggggcgaaagaagtgggaggtgctgtgagtgagagatctcagaggttacgggtggctaggagacattggagttctcacaaggaagagggaagacagtgtgttgaataacccagacataatttgacaccctcagaaagttattgctttaggagtagaactagtctagccttagaggaagggctacttctcacctatcacaataaagcctaaagagaccactaagatcagcctcagcatctagtaaattaactgcctgcaaaggaaaactaaattctctttaaaagaagcaaaaaatcattcagatttttagcaaaatagactcagcagtttccaaaakgcaataaaaaattactagacacagaaaagacaggatgtgtgacctttaaccaagatgaaaaagacaatagaactataatcaggggacatagatgttgaaactagtacataagattttaaaacatctattataaatatgttcaaggaaataacaaaagataaaaaatgagt

SEQ ID NO: 735887 - DNA, 600 bp, Homo sapiens
aaaattcctcacaaatgacaaaaatgttctttttaaagaaatctaattagatagttttgaaagacaggcaattggaaagtgggtgttagggttaaggaggtacagtgtgtttgtgtcccattgtaaatcagtacagacccagcttaagaactgagggcttctgattccttgtaagagtttaggtagattgagttattcagtgaccataatttccatttaataaaagtaggttgtatacagagcacaaatgatggcatctccgcccttgatcatatgttctccctcattatgtatttaaatgggtctgtgtgtgctcaagtcattgcactggtcattggaagtaatccatggttgattctgctggggaacaaacattaacacagattagatttttctgaaacaggatcacaccatcctcttttttaatttwgtacaaaatcttccttcataaaggttcaaatacaccaaaataaattgtaagtgaacagaaaagttaaatataaaagcaaaaacattttccaaaagtaggaaaagaaacagagccaagtattttcctgatctagaaaacagaaaaagatttttttccgcaaaaagaaaccc

SEQ ID NO: 735888 - DNA, 573 bp, Homo sapiens
atacgttggttagagtatcctctgcttctattcatttcctgctacgacctagcttcctcacattctgctcagcgttttctgtgccttgtatcttctgtgtattcatagcttccgcttacacatggtcccacccagccccattctactgtacttcatcactccttttagatcatcttctcagtttctgttcccacaaccaattgcctgattctctttctgcttccaagtgtaaactcctaagagaatctcactcctctagccaactaacctccgtgaagggcctgaggggccatggggaggtgcaggggtatatcacccagcccagaacacagctgcgtatgcaggaaatagtccttatgcaggaactattgacatggtaggtatcatcttggcctgtatagcatagttccactgcctgtgtatactcatatcaaamtaatattgcagtgaacataaatagcctctctacttattttctgtatccattctacttaaaaggacaggggccatgatttatttaattttgtaaccccaacacttattatggtacctggcactgccataagtgtttgt

SEQ ID NO: 735889 - DNA, 666 bp, Homo sapiens
acctgccccatgtgttaacaccatccttgcctcttttcctttgtccctgcaaccttttcttcttggaatggtttcattctcttcttttgcccttccaagtactttccaaatcaaggccctgattaagatgtttctcctgcttaaagccttctttgaacaaggctttcttaaaatatccttttctttttattctgtatttcagtagaagtctgcacaatacagcttttttatgtgctgttttagtcttgatctcagattatatactaatggcaggaggagaggctaacatttattgaatgtctacaatgtgtcaggtgttgttttatgttcttttcacggtctcatccttgctytatattataatcacctacaaagtgaaaaaatgttatgcgggtgtccagtcctagccagcctgatttaaaacaattgatgtgggggctaggcatctgtatctttgagaagcagcccagacaattctaatgtgtattcagggttgagaaccactggctatggatgtgcacagtatgaattttgttagattgcatctccttggggagtgtgtcaggtttcactgaacaaaactgaacttggagtaactgagaaatttacatttcatttcattaaccagcagactcaaatctgtaagttaaagaatattaaaaaata

SEQ ID NO: 735890 - DNA, 528 bp, Homo sapiens
agtaaatttactgttaccaactttggaatccaactaactatatgtttcaaagaaccatctgaaaataagcaaagagatataaactttaaaaattaaatgtaagcacataacatttaaatcatttcttggtaagtaggatatctagagctgtgctatttaatataatccctagtcgtatgagtctatttaaatataagtgaatttagagtaaatatgcagttattcattatactagctacattttaagtgtacagtagctgtatgtgggtagcagataccattttgwacaatacagacatagacatttccaatcatcacagatagttttcttggacagtgttgttctagggtattttaaataaaggaatatttgatgtttactatttataatgatgaccgcacagaaaatgatctaagaagcttggtgtttcatagtctctttgcgtcttttcactacccctctcaaatcttgatgagattatttggcatgctctttgacagacaaaggctactttataataactttaa

SEQ ID NO: 735891 - DNA, 528 bp, Homo sapiens
agtaaatttactgttaccaactttggaatccaactaactatatgtttcaaagaaccatctgaaaataagcaaagagatataaactttaaaaattaaatgtaagcacataacatttaaatcatttcttggtaagtaggatatctagagctgtgctatttaatataatccctagtcgtatgagtctatttaaatataagtgaatttagagtaaatatgcagttattcattatactagctacattttaagtgtacagtagctgtatgtgggtagcagataccattttgawcaatacagacatagacatttccaatcatcacagatagttttcttggacagtgttgttctagggtattttaaataaaggaatatttgatgtttactatttataatgatgaccgcacagaaaatgatctaagaagcttggtgtttcatagtctctttgcgtcttttcactacccctctcaaatcttgatgagattatttggcatgctctttgacagacaaaggctactttataataactttaa

SEQ ID NO: 735892 - DNA, 528 bp, Homo sapiens
agtaaatttactgttaccaactttggaatccaactaactatatgtttcaaagaaccatctgaaaataagcaaagagatataaactttaaaaattaaatgtaagcacataacatttaaatcatttcttggtaagtaggatatctagagctgtgctatttaatataatccctagtcgtatgagtctatttaaatataagtgaatttagagtaaatatgcagttattcattatactagctacattttaagtgtacagtagctgtatgtgggtagcagataccattttgaacaatacagacatagacatttccaatcatcacagatagttttcttggacagtgttgttytagggtattttaaataaaggaatatttgatgtttactatttataatgatgaccgcacagaaaatgatctaagaagcttggtgtttcatagtctctttgcgtcttttcactacccctctcaaatcttgatgagattatttggcatgctctttgacagacaaaggctactttataataactttaa

SEQ ID NO: 735893 - DNA, 515 bp, Homo sapiens
tggccgtcttccttgcttgcagatggccatcttgctttgtccttgcatggcagagagagtgtgagcaagcaagctctcaggtgtttcttctcataagggctctagcctcatcacgagggctccaccctcatgatctcatgtaactctaagaccttccaagggccccatctccaaataatattgcattggaggttaatattttaacatataaacttgagttgggggcaggtgggtacaaaattcagtccctagcaggccctgatgtaaaaacaagcatggcatctttgggratcagcaaaatggccaatttcagccagagttagatgagcaaaagatggtatgaaacaaaccagatgagcaggaggccacaagtccaagaggcaggcagtgccaggtgatctaggtgtgccattataagaaatccagatttagttccagtgtgatgggaagcctttggagaattgagagctgggaagtgacaataagtatattttaaagaaaatcacttaggttgc

SEQ ID NO: 735894 - DNA, 563 bp, Homo sapiens
tgtgtgatcttgagcaagtgaaataacctttctgagtctgttcacttgttattaaatatgaataataatgatactacactgttataatggtttacacacctggctaaggtctctatcctctcccaaatctatttcctgcttgacaggcccccttcttggtaaatgacacctccacccagctagcagtccaatgacccctgggagccatttttgtcacctctctctcacttycaatcaatcaccatgccctgtccatcctacatttgaagtgttcgttggccctacacacattttcccatttccattgtttctcctctcctctcctctcctctcccccagaccaagccattagctctgaactcaactgcaaaaaatagcttttggcttatcttaccagtttccatttcatgtaggatagaacatgaaatctgtaatggaaactacaaagggcctacagagtcttctggccctgcctatcactgatgagcacctctcacttattgcttctttgattctctgggctgcactcagaggtgctggccttaggatccttgactgtgcca

SEQ ID NO: 735895 - DNA, 650 bp, Homo sapiens
cttaaggaaatataactcaatctaaaatatattcttacttcctgcgtatttatttttttaagcaattttatgttgtatttcatttttacacgtggatatgtgcaattcaccattttgggaatgggatcaagaggttttgctaaagtcaaacaggtttttaaaaacttttattgtaaaayaaaacagacataaaaagtcatacaaaacaaacagatagtgaattataagactaacacccactcagattaagaaatagatatttgtgaggtatcccagaacatgtcacctccctctctccaaaaataaccactatcctgactattatagtaatcacttccttatatttctttatatttttttactcaagtgtacatccttagcactgtgtattcttattcactttaaaaaaaatttgttgtttttaatttccttttaatctactgattttccctccatcccttgctcttgcttataatttatttgttgaagatccttggtggtttgacctgtagaatttcccactatctatattttgctgattgtgtattcatggtgcacatgagtacaccatgagcacctgtttctctgtcctctgtgttacctgaagatcacagcctgtggatccagagaccaacaaaacattgactcag

SEQ ID NO: 735896 - DNA, 633 bp, Homo sapiens
ttagctctcctagttcttgggccttagaacttggactggaactagaccattggctctcctggttctcaagcttgctgactgcagattgtgggacttctcagacttcataactgtgtgagtcaattccttataataaatctctctctccatatatgtatatacatatatatatatacatatacacacacacatatatatgtctctatatatatacctgtctctctctatatatatctctctacatatataaagtatatacacacaatataattatacatatatgcacagtgtgtatatatatacaacacaatgctataygtatgtgtatatatcctattgttttagtttctctgtagaccccagactattaatacagacagagtagaaggagatggagtaaaacagttggtgggggtccagctcatttagaaccttgttggttgttgtgagaactccagcctttactctgagtgagaaggggggaataagagagttgtgagcagagaagtgactggagtggacttgagttttaaagttgtaaaagcgtcactcttactgctgtcttgagaatagagtgttggagtccaggggttgaacacggggaccaattcaaaggcaattgcaataattcag

SEQ ID NO: 735897 - DNA, 633 bp, Homo sapiens
ttagctctcctagttcttgggccttagaacttggactggaactagaccattggctctcctggttctcaagcttgctgactgcagattgtgggacttctcagacttcataactgtgtgagtcaattccttataataaatctctctctccatatatgtatatacatatatatatatacatatacacacacacatatatatgtctctatatatatacctgtctctctctatatatatctctctacatatataaagtatatacacacaatataattatacatatatgcacagtgtgtatatatatacaacacaatgctatatgtatgtgtatatatcctattgttttagtttctctgtagaccccagactattaatacagacagagtagaaggagatggagtaaaacagttggtgggggtccagctcatttagaamcttgttggttgttgtgagaactccagcctttactctgagtgagaaggggggaataagagagttgtgagcagagaagtgactggagtggacttgagttttaaagttgtaaaagcgtcactcttactgctgtcttgagaatagagtgttggagtccaggggttgaacacggggaccaattcaaaggcaattgcaataattcag

SEQ ID NO: 735898 - DNA, 592 bp, Homo sapiens
gtgaggaagtgggggaccctgagctaaggcagggatataggggtgggtagattggaagggatgtgagagttaattcagatccacggggcttggtgactgagtggagaatcagtgatgacacccacctttctaagtcaggtagcttactagatgggggtgcagtttaccaggaaatggaatactgggtggttttggatcttmtgagttcaaggtgtctgtggtccagtcctcttaacctccctcccttgcctgcttctcaaggctgtttgctcaggaccagcaatttcccaggggcgatctgtctgtgtgcagctgcagccacagggtgacacttcttttgttttctctttttatccctttcctgtctgggctgaatccagccatgttgtaaacatttttacggtcaaagcatcttggcagcatccttcaagctccagcctggtgcctccgctccgtgactcactggcaaagatcttgctgcataggatcagtttgtttttttcaggggggttggagtggggcggaaggaagagcctccggttacggtgctcttaatgacttagtcacagcctggagttctctgcttcagact

SEQ ID NO: 735899 - DNA, 592 bp, Homo sapiens
gtgaggaagtgggggaccctgagctaaggcagggatataggggtgggtagattggaagggatgtgagagttaattcagatccacggggcttggtgactgagtggagaatcagtgatgacacccacctttctaagtcaggtagcttactagatgggggtgcagtttaccaggaaatggaatactgggtggttttggatcttctgagttcaaggtgtctgtggtccagtcctcttaacctccctcccttgcctgcttctcaaggctgtttgctcaggaccagcaatttcccaggggcgatctgtctgtgtgcagctgcagccacagggtgacacttcttttgttttctctttttatccctttcctgtctgggctgaatccagccatgttgtaaacatttttacggtcaaagcatcttggcagcatccttcragctccagcctggtgcctccgctccgtgactcactggcaaagatcttgctgcataggatcagtttgtttttttcaggggggttggagtggggcggaaggaagagcctccggttacggtgctcttaatgacttagtcacagcctggagttctctgcttcagact

SEQ ID NO: 735900 - DNA, 622 bp, Homo sapiens
cacacgtgtatgatggagtgagggatcctctttctccaacttctgctcagcctgagaactctcgactgtgagagaagaggaagaatttggtgaggcacagtcagattgtacgctgaagatgaggtttattgatctgcccctcctcaagttctgggttctgtgaagaagagtctcttgccttccaaagatactcttraaagaaaagcaagggcatttttgctgcagttttcagcttcctacatgtgtgattaagcttttccttgtttaacatgcaccaagagcaaggacagaacttctctcacttaagatggaaataagatctctatgtacttatttcaagtttaaccaagagttgagtaattgtgctgaaaaaaaaaaagcacaaatctcacattaaaaaggtaaatgttagtttttatgtcagaataacattgttaatacacacacaagcctatatgaaagcaggaaactaacgcatgtctgtaattattttgagacagcctgcctaaagtttagcctaattatgttaataagaaaaaatttttttaagaattatataaattgtcctaggccatatttttattcacgttgctttagtttgtgatttcaatagctttactat

SEQ ID NO: 735901 - DNA, 608 bp, Homo sapiens
actgagtaattgtggtttccacatttgaaaacaactccttttataattattcactgctttttgtcagtgaaatagacatcttgcctcctgaagtagcttcatcacagagtgtcatgaagacagacagtcaggctgaaaaggacagttctttgtggactctacccttcccttcaaggagtatgtcatatgtcacaaaagaaattgccttacactggttcatgtttgcagttactgttgtacattgcatagatgtacacacgaatttaaatgtgatgtctttgtatatatctgtataatgttgagattacttacgaaatatgtctgagtgacacttttcactctygtacagccaaaataatgtatatatggaaaatgacagacaaattctctaatctctttggtatctataacttattagaatcctctggatgagggttagaagagactttttccaaacttctacatgtagaagtatcataaatgtgctacacatttatgtttgtggatttaattaaagtattttaatatggttttcagtgctaaaattggagtcagatacttcttggttttaagctgtctacctaattgctgtctcccagcagatcggt

SEQ ID NO: 735902 - DNA, 620 bp, Homo sapiens
aataaagggttcttgatgagagaatttggcaacatgtgattttccacaaatataagcttgattttgatgcaaccactcatttctttgaaaaatcagggggcattcacacacaggtgttctagatttccttacagtaaaacctaccctttacaaggaatagctgtgttcactttgaagcagtaaagaagcaggtgtccactcatggcaaatgaggaactccctttttttttttttttttttgagacggggtctcactctttttttgtgtgtgtgagatgggggccacccaggctagagtgcagtagtgcaattacagctcactgtagcctcaaccttctgggctcaaccagttcttcccacctcaacttctgaagcagctgagactacaggtrtgtaccaccatgcccaggtaatgcttttgatttttagtaagatgaggtcttgttatattgcccaggctggtctcaaactcctgagctcaagtgatcctcctgcctcagtggcatgagccactatgcccagccagaagctaaaaatattaatcaaggagtcataactaaggatgcactgcacacccgaagccagggaccacaagaggtcagcaactgggactgcttcct

SEQ ID NO: 735903 - DNA, 620 bp, Homo sapiens
aataaagggttcttgatgagagaatttggcaacatgtgattttccacaaatataagcttgattttgatgcaaccactcatttctttgaaaaatcagggggcattcacacacaggtgttctagatttccttacagtaaaacctaccctttacaaggaatagctgtgttcactttgaagcagtaaagaagcaggtgtccactcatggcaaatgaggaactccctttttttttttttttttttgagacggggtctcactctttttttgtgtgtgtgagatgggggccacccaggctagagtgcagtagtgcaattacagctcactgtagcctcaaccttctgggctcaaccagttcttcccacctcaacttctgaagcagctgagactacaggtatgtaccaccatgcccaggtaatgcttttgatttttagtaagatgaggtctygttatattgcccaggctggtctcaaactcctgagctcaagtgatcctcctgcctcagtggcatgagccactatgcccagccagaagctaaaaatattaatcaaggagtcataactaaggatgcactgcacacccgaagccagggaccacaagaggtcagcaactgggactgcttcct

SEQ ID NO: 735904 - DNA, 605 bp, Homo sapiens
aaggtttgtacctgctgaaaccaatctataaagacagaaagagattgggcatggtggctcacacctgtaatcccagcactttgggaggccaaggcgggcagaccacttgaggccaggagtttgagaccagcctggacaacacggtgaaactctgtctctacaaaaaatacaaaaaaattagccaggcgtggtggcacatgcctgtgatcccagctgcttgggaggctgaggcaggagaatcatttgaacctgggaggtggaggttacagtgagctgagatcacaccactgcactccagctgggtgacagagcaagactctgtctcaaaaaaaaaaaaaaaaaaaaaaaagaagaggtatttgcttcttcatagacattaatgaaagtctgtagatcatgaagaatcagcaaatatgacactaccaaaataaactcataaatctccwgtaatcaaccccccaaaaatagagatctacaaattgcctgacaattcaaaataattaagatagctcagtgaaatttactagaatgtatatatcaactcaataatatcaagaaaatagtagatgagcaaagctaaaagttcaataaagatacagaaataa

SEQ ID NO: 735905 - DNA, 549 bp, Homo sapiens
tactgaaataccccctgccactgacctttggcccccagatgcctcccactgccactgctctccccactgggaacccctgaagttcccacaggctcataactaaagggctaatgtctcgcacagcagcgagcacccaggaccgagcagccacatggccgggtctgctggtgaaagcatccattctgactgatcaggacctgaggggcctcatggttacatattttgataatatccctaattataaataaggctcagttatatagtttgaaaacartgcttctcctcattgcaaaatctcttagaagactccgtagatccaggaacggaaatggaaaatgacagcgtgtcaatctctgaaggttttgggcatttccattagcactccatcttcatgtaaaccagaagatatgcagtttcctgcctagagagaagagaagacacatcagcacagcggcatgaaaccttcatcagaaaacaatgcttcattaatccgtgacaggacaagcgtcagcaaacttccaggcggctggattaggccttcatctatcc

SEQ ID NO: 735906 - DNA, 581 bp, Homo sapiens
tgtatttgtaattttttgtagggtcatgttgcccaggctggtctggacctcctggcctcaagtgatcctcatgcctcagcctcccaaactcctgggattacaggcataagtcaccacacactgggccaacatacatttctttttatttctttttaattttagtttttttgagacagaatctyactctgtcacccaggctggagtgtggtggtaagatctcggctcactgcaacctctgcctcccgggttcaagcgattctcgtgccttagcttcccaagtagctgggactatagatgcatgctaccacacctggctaatttttgtattttttttgtagagtttcatcatgtttgtcagactggtctcaaactcctggcctcaagtgatccatccacctaggcctcccaaagtgctgggattacgagtgtgagccacgatgctcagccaacatacatttctttaacactttctatgtttaaggccttttgctggtgctgggggtggtgaagggaagggaagaaagtagatatctggaaagacctgaccctagggagacaggcaacaagcaacatggcagaga

SEQ ID NO: 735907 - DNA, 581 bp, Homo sapiens
tgtatttgtaattttttgtagggtcatgttgcccaggctggtctggacctcctggcctcaagtgatcctcatgcctcagcctcccaaactcctgggattacaggcataagtcaccacacactgggccaacatacatttctttttatttctttttaattttagtttttttgagacagaatcttactcygtcacccaggctggagtgtggtggtaagatctcggctcactgcaacctctgcctcccgggttcaagcgattctcgtgccttagcttcccaagtagctgggactatagatgcatgctaccacacctggctaatttttgtattttttttgtagagtttcatcatgtttgtcagactggtctcaaactcctggcctcaagtgatccatccacctaggcctcccaaagtgctgggattacgagtgtgagccacgatgctcagccaacatacatttctttaacactttctatgtttaaggccttttgctggtgctgggggtggtgaagggaagggaagaaagtagatatctggaaagacctgaccctagggagacaggcaacaagcaacatggcagaga

SEQ ID NO: 735908 - DNA, 551 bp, Homo sapiens
aacacaaaatgctccattcactggcagaagctggattgtcataacatgtcttgtgtaacactactaaataccttttcttatcacagcagtgcaagtttgcacctgttcagccacattgcatgcagtgctgtctgggtaacaccagtagaaggacacaaaacaaaacaggaacgaatcaacttagagtctcagttgacttttccctttctttctgaatttttggtgccattttcacaaaactcatggtttactttattcctatgaatcatataatttcctttcttcactttacttgtagaaatacattacaatattattttcttttttaaaaaaatatggaatgcttcaagaattygcatgtcatccttgcacagggaccacactaatcttctctgtgtcattccaattttagtatatgtggtgctgaagcaagcactacaatattatttttaaattgaaaaatcataggctatgaagacatatgttttccctttgtctcagaatcacacagccctcatatcaatttatgcattttcctaaagtgaaaggac

SEQ ID NO: 735909 - DNA, 613 bp, Homo sapiens
cctgttactcctacctatgctccctaattcacccagctgctggtcatccacagcccctaactcagtcattcagagtttcaccaaaccagaagtctctttcctcagagcaggtggggctgactttccattgctctaatgctaaaggaggtttggggtaataccctatctccatgactgggctatagattctagaattgttccatgtaaagaatgaggattggctgggcgtggtggctcatgcctgtaatcccagcactttgggaggccgatgcrggcggatcacttgaggtcaggagttcaagaccagtctggccaacatggtgaaaccccatctccactaaaaatacaaaaattagccaggcatggtggcgcatgcctgtaatcccagctactcgggaggctgaggcaggagaatcccttgaacctgggaagtggaggttgcagtgagcagagatcgcaccattgcactctgcagtccagcctgggtgactgagtgagactccgtctcaaaaaaaaaaaaaaaatgaggatctctgaaaatagtcctttgtcatctttttaagcccaaatagaggaaggtttccagtgagttgggccatgaagatggagcaga

SEQ ID NO: 735910 - DNA, 547 bp, Homo sapiens
aggagactcttgaacctgggagttggaggttgcagtgagtcaagatcgtgccattccactccaccctgggtgacagagtgaggctccatctcaaaaaaaaaaaagacagacatggtctctactctcatgaaatttccattccactggagaagccggacaattaaagactgtgattagtggtgtgaaggaaatacaaaaagagtaactggagttgtggtaggaacagggacacgaacagcttctttaggcagtgatcagggaaggcytcattgagtgaatgacatttgaactgaaacctgaatgatggggagaacatatgcagccagcaaggtgaagacaatagatgggggagttttccaggtagaggaaagcaaatgcaaaggccctgaggaaggaataatacagctaggaagtaagtgagaagcatgcgatgacacagagatgagtagtagtcagattaaatacggattaataacaatgctaaaggattttaattttattctatgtgtgatacaaagccaaacattattatataaaagtgtgtttg

SEQ ID NO: 735911 - DNA, 644 bp, Homo sapiens
cctgggcaacagagcatgaacctgtctcaaaaacaaaacaaaaaaaaagagagatttttcagaggaaatcactgacaaccactgaaataacaacatatgcaatttactgtgtgtaggaacacccctctttccttctggaactatgctgtctctggctaaattagaagtaactcaattggtttgtcagtgacttttatatgggtgagtagtaaatgatggcttcgttaacactggctgagaaaatgtcttacaaccattcgactttttcccacagaattcaccgcaccccaccctaataaccaccatacaacccagccctatgttatcctacattttcagagcgggcccacagtaagacagaaaagggcctatttccatccaaggctgcctcgtgtgggtacctcttgatccctaacagtccaaaactttttaagattcctggkatagagtttgttctttctgggcttagagaagaagaggtggtcaatctgcagggtaaagaaataactgattgtcccagaagcacaccctatttctctgtagcacaaagcagcaaggcaatttaaatgagatggtgtgtggaaaaagcatggcactgcgccaaaggcttatatatgttttaaaccttcaacaaggtttctatg

SEQ ID NO: 735912 - DNA, 536 bp, Homo sapiens
catcacgtctgccctgtctctgttttgcacgtgtgcacacacgctgcaccacggcagggtcaggaaggatggtgcaaccctggggaggaaggggtcccaggtggggtcaggtgtgggctgtgacatcaccccttcctctcagaaggatccccaagggatcctggggaccgggaagtstgcacagctgtgctgggcaccccagtcctgatgcagcaatgagtgtttcctggcagagaggtgcccaaccatctgtgcaccttcccctttccctggcccagctgcacctggcccgggacctccaacatctgcacagccattctacctccctggttctatcttggagagagttatagagcctcttcctccccttgcagctcctttctccagtccctgcaaaactccctctggtgtgagcatgacttctgctcccctgtcctaccaaggccacagtgcatctcataggctccttggaggtcatttaaatctggttgcacttcatttactgcctccaccaaaactcgtctctcctcaccagt

SEQ ID NO: 735913 - DNA, 347 bp, Homo sapiens
tctcaaggaggctggcagagccccaggcctgcctgggagcagatggacagagaaaaccctagagtgcctccactttctatcatcactatgacaacccttccatgggatcctaatgttggggtgatgcctgacttttctggcctaaaactgagagttaaacagaamgcaatccttcggggggcaaggagatgtgcaaggaagggtatggcaccagaacgacctcagtttgtcttagctcctcacttaccagttggatgaccttgaacatattcctgatttctctgagatgcagttttggcaaatagaaatgcttatcccccgtcacagatttgaagtgagaatggctt

SEQ ID NO: 735914 - DNA, 580 bp, Homo sapiens
gatgatttgcaatctacacacaggtcaagagtgtaagcagagtaaccagctaagagctaccacagctagagagagaatgacgctttggactaatggtgaagaggaagggaattgggtgtgacaactggggaagaagaaccccaaggtgagaccacagggtgactctccaccagcacttgcctggcagggatactgccaaatgcaaggatgtcctggcaccctcctgggtggatagaaactagtcctggtgcccctcaaccttgcttccttgatactttctccacattttcccaggactctcagacaatccagctgtgccttgccccttaggagtttaccccttagggattcttatggctgaatgggaaatgctccatagtgatggggaaaagcacaytgaaaaatggcatagagagtacggtatggcttttttttttttttttcaaaaacaaaaaatcagctgggcatggtggctcacaccggtaatcccaacactatggaaggccaaagcaggtggatcacctgagtcaggagttcaagaccagcctggccaacatggtgaaactccatctctactaaa

SEQ ID NO: 735915 - DNA, 625 bp, Homo sapiens
tatatgaaatgttcagaagagagaaatccacagagacaaagagtagattggtgattgtctagggctgtgaggtggagatgagaggaggatgagacctaactgctcctcatcacacagggtttcttgtgggggtgataagaatgttctaaaactggattgtggagatagtcacacagctctgggaatataataagaacacactttaartgggtgaattaaatggtatgtcaattatgtctcaatcaagctgttttagaaatcatatagagtctattaaacaattactagaataagtgaatttagcaaggtttcaggatgtaacatcaatgtacaaaaataaattacatttcaatattctagtaagaattggaaaattatattacaaaacaaataccactgacaatagcatcaaaacactagccaaaataaaatacccaggaataaatctaatgaaaggtatgtgagatctataaactgaaaattataaaatattgctttgcaaaattaaaatattcctaagtggagagatatagcacgttcgtaaattggaaactcaatattgtttaagatttccatcctccctaaattaatgtatagatttaacataatccatatcacatataag

SEQ ID NO: 735916 - DNA, 666 bp, Homo sapiens
ctccctccctcatagactcatagtgagaaatgagtaagatggtgtgaagtaaaatgcttaacccagggcctggcgcataacgaatgctttgaaattgctagccctctatgcaccaagcaagccctgtgctaagaggtggaaatagaaatgtgtaatacataggacatagtcttttgcctcaaggagctcatagatataataaaagataaagatggcttccctatagagattttctcatgtccagtttgggactgtaatgtagcctgaacccttccacccacctccccctgcccatccccaccccttttcaaactcctaagtctgtcctgtctagtcccagttgggcaaattgcagaacctcacgtttggtggaatggtctctgatatggtttggatgtttgtcctctgcaaatctcatgtcgaaatgtaactcccagtgttggcggtggggcctggtgggagctgtttgggtcatggagtcagatccctcatgaatagcttggtggtgtccttgtgataatgagcrggttctcactctgagttcatgtgtgatcttgttgattaaaagagtgtagcacctacccttctcttgctgccgctttcactatatgcatgcctgatctgccttcaccttccaccatgagtacaagctccctgaggcctcac

SEQ ID NO: 735917 - DNA, 597 bp, Homo sapiens
tccccgttcatcattctccagtaacttactcttctttattttatttttattttttactttttggctttagctttctttcttttttttaattgtactttaagttctagggtacatgtgcacaacgtgcaggtttgttacatatgtatacatgggccatgttggtgtgctgcrcccattaactcatcatttacattaggtatatctcctaatgctatccctccccgctcccctcaccccatgacaagccccggtgtgtgatgttccccaccctgtgtccaagtgttctcattgttcaattcccacctataagtgagaacatgcagtgtttggttttctgtccttgcaatagtttgctcagaatgatggtttccaacttcatccatatccctactcttattttttttaagcatacttatatcaacctaaataacagagaagttttctaaaagaaaaggtatttatttggaaataggacattacaatggtaaaatgtgtgccatagtgaactatgtgtgtattcagggaggtaaagggagacaaaagtttttaaaggaaaaatgaggaggattacataattgttttgaaataattatcctt

SEQ ID NO: 735918 - DNA, 602 bp, Homo sapiens
atagatccagacttatcccagctcctggaagggagcctctaaacctttggaattcctcaagtgatccgagtgtcttagtcattcatggtagacccccaggaccacatctgattgtttatgctaaccatttgactctgggagagttagccttgccagaaagaccaaccatatgattagccaggaacaagacagagtcttgattggagggcaaactgtgtggcacactcaattaaacgaaaaggtggcagattgtaagggggcttttcaggaaactcctccaacagcagagctcaatgggaacaacgtgggattttaaagccagacctgggttcacaactctagttaatgcttcttacgagtggtgtgatcttgggcgggactctggagcttccatcttctcatctgtaaaatggggatggtaatattagggtcactgtgggatcaaatgagatcrggtggggatggctcccagtgcagcctgacacgtggtaggaagttagttctcttggaaactagaataacatgccaccaccacctggtggcaagatttggaattgcaaacaaaagtctccagaagaaagcagttttaagatggcttgcct

SEQ ID NO: 735919 - DNA, 557 bp, Homo sapiens
taccatatgccagacctgcaaaaggcatggaggatatagttagggtgacacagttcctgccctcaaggagcttagtacctgggggaaagactgccaattacactacagtgtgatgaatgttaaggtgggcattccagaatgctatgggggcattaggaggggaaggtggcccactcttrggatgggtgcagtgcagtggtcatacttgccaaaagaaatcagtccaggcaggggaaactgcatgtacaaagtcctggagaccatcctgaatactcattacgcaatgccaacaaagttgtgtgatgttgctaggccatgaagttcaagggcagaatagcaaactatgaggcagagtcagtaagatgaggcaagctcacacatagccttgcaaaccacatgaaggagatttaactttatctcaatgacagtgggggaaatcagtggaggtgttggcatgggtgtgatgtgatgtcaccaaggtcccaggtgagatgtcacatgaaggtaataaccataatgatgattatgataattattagtattggtggtaactgtaa

SEQ ID NO: 735920 - DNA, 557 bp, Homo sapiens
taccatatgccagacctgcaaaaggcatggaggatatagttagggtgacacagttcctgccctcaaggagcttagtacctgggggaaagactgccaattacactacagtgtgatgaatgttaaggtgggcattccagaatgctatgggggcattaggaggggaaggtggcccactcttaggatgggtgcagtgcagtggtcatacttgccaaaagaaatcagtccaggcaggggaaactgcatgtacaaagtcctggagaccatcctgaatactcattacgcaatgccaacaaagttgtgtgatgttgctaggccatgaagttcaagggcagaatagcaaactatgaggcagagtcagtaagaygaggcaagctcacacatagccttgcaaaccacatgaaggagatttaactttatctcaatgacagtgggggaaatcagtggaggtgttggcatgggtgtgatgtgatgtcaccaaggtcccaggtgagatgtcacatgaaggtaataaccataatgatgattatgataattattagtattggtggtaactgtaa

SEQ ID NO: 735921 - DNA, 516 bp, Homo sapiens
cacctctagtaagacacaggtctgcagttagtttttgaagtggatccaggatggtggtctgaggttgcctgtaaagaatgaggtttttctggcctttggccaaagcaaagttaactaacggaagggataaaaattgtcttgtgtgggccaagctgatgttgctcaataggtwtttttttgaattgtgaggaaaagagttgccttattttttccacttctggaatcatgagaaccagggctgggagtgaagttgcatgagtcacagcagtgcatacaattttcatattgactttcagatgtcaacaattcctttatctgcattatttaacattaaccaggcactgcccagacctgcccaaaccctgtgtatgtaagatgttgcccttctgcacctgacagcttccaactcagagagctgagggaaaggggtctctgagtcctggatatgtccatcaccaagctgctgaacaaaaggcagacactaggtgcctttgcacttggagccaaatcactact

SEQ ID NO: 735922 - DNA, 464 bp, Homo sapiens
taaacataatcctgataaaatctgcataaaagagatgacagctagttttcattttctgagaaaattacgcatgcaaacacatctgtagagactaatgttttctagaactaaaaactgagccataatatagcattgatccttttttgagcgggggatgttaggcaatccggtggataatggctaaagtattaagctccatttgtgtcaaagatactgaatcattgaaaatgaaaactcatgtaatgatccttgtataatggttgaaggtttattatcaaargataattcagggatggcatttatccaggtaggtgagaaaatagaatttaaatgttttctgggacagaacttggagaaactgaaagaccagttaatatataaattaaatattctgcaaattacacttacttaagtagcattgattgatgttttgattcaattacctttttctattctgtatattt

SEQ ID NO: 735923 - DNA, 464 bp, Homo sapiens
taaacataatcctgataaaatctgcataaaagagatgacagctagttttcattttctgagaaaattacgcatgcaaacacatctgtagagactaatgttttctagaactaaaaactgagccataatatagcattgatccttttttgagcgggggatgttaggcaatccggtggataatggctaaagtattaagctccatttgtgtcaaagatactgaatcattgaaaatgaaaactcatgtaatgatccttgtataatggttgaaggtttattatcaaagrataattcagggatggcatttatccaggtaggtgagaaaatagaatttaaatgttttctgggacagaacttggagaaactgaaagaccagttaatatataaattaaatattctgcaaattacacttacttaagtagcattgattgatgttttgattcaattacctttttctattctgtatattt

SEQ ID NO: 735924 - DNA, 643 bp, Homo sapiens
tctgtgtaggtcataaccaatgagtccagtgtcataagaacagtgtgatggggcagaaggatggagaagccagaggacaaatggcttccttttctgtgcagtggtggcgaagaatagaaacctctttccttctcaagattttttttctttcttctcttttctttttttctcccaattcatttaatcccaaaccaaggaaaggatattgccattagttgtgtagatataagtctggaataactgtaactcaaaaacaggatgaarcatagctattatatatacttcatttattcatatatgtgttaatataatgtagatctgtaagtaaaagctatcattatttatagggatagagatatgatgactgtttttaatctgttgaagttataagtttaatcagaaaatcattctaacaaacatgggtttataatgtgagaaactggttccagaaaaatgaccttaatgaatcccaaagtgtaataaaagtcatttgcaatttatataaacaacaaaataagggtgagtaagcagcaaatcaaaaatgttgaaggctttctaaaagatagaacattgatgaattgaatgaaagaaagaggccacagaccaaaacacattgaaaaaagataattaaaagggaggataa

SEQ ID NO: 735925 - DNA, 601 bp, Homo sapiens
  misc_feature 377: n = A,T,C or G
gtgattttagcatacggataagtaaaataaatgacagcaatttcacaaggtatgagagggagctactggggatattctgttatacagtatgtgaacaacatgtaaagtggtatagagttatttgaaagtagactaagattagtttaatattatttaatacattggaaaacactaaaaactttttttttaatgagaataattgatatgctaatgttacaggaaaggggatccrgatccagaccccaagagagggttcttggatctcatgcaagaaagaattcagggcgagtccgcagtgcaaagtgaaagcaaatttattaagaaagtaaagggataaaagaatggctactctgtaaacagagcagcccgagggcggnaatcagccaaatagcctgtctgcaagcacactaattctttcttccgcttttaaaagactctgatgcattgttcagtataccagctgcaattttcagctcctgaatttctgctcatttctttgtaattatttcaatctctttgttgaatttatctgacagagttctgaattctttctctgtgttatcttgaatatttttgagtttcttcaaaatagctattttga

SEQ ID NO: 735926 - DNA, 542 bp, Homo sapiens
aatcaggatcttgaagagatatagcacttcagtgttcatcacagtactattcataatggccaagaaacaatctagatgtccattgaacgatgaatggataaagacactgtgatatatacatacaaaggctcttccatttttaacttagctgtggaacacgtaagaagattcagttcraaagaggcaatgcctgggctcttgcatataaaaatccactttttgttttgtttgtgacatgagtcttgaatgtaaaccttggacaaacacaactctaaccacgcacactcagtaggaaatgttgatattaagatgaaaacatagcaacaatacaatatataagggattactttaattagacactccagcactagatacggttcttttgcactttgcattttataaagcaaataacaaacccaaacataggaaaagaaacagaattctttttcctatatttttaagctaataagccaaaataattaatgagcattagcacgtttgtcattcccagtgggactttttgtgcctaatgccaacctcat

SEQ ID NO: 735927 - DNA, 558 bp, Homo sapiens
aaggaacactaggcaaacacgcagcccagcgatccaggatataggaatgagaagacacataaatcgtgggatgaagagggagatatagggccaatgttgagttcgactttaataaagattttgaggagcctggatttgaaaggcctaagatgtggaggatgaatatatcatagagtagaaaatgagggttagcctcagtcagacacaccagcagctgctcagagtgagctcttcatctcacaaattgcctcagctctgagccatctaatccacatcagtgactgacagctatgccccaagtaaggttatcatgaaagtaacgcctcagcactgtcttgagacaaacatgagcataagtatcgtaactaatygatagtggaactgcactttccagcagaagacaacaccataaagactaaggtttttttacagacagactgttaaaacaagactagatgaaaacaagcaaaaagtaccatattgtgtgaactacactaacattttgaattcccaactatttacttgatacgggctgataattttattcctaattcaatg

SEQ ID NO: 735928 - DNA, 603 bp, Homo sapiens
tagaatttttgcaatggtaaatgaacgttggcttcaacttaaaaatcaccggttgcgttggccctgaccaagatcatcagcctgtcctttgaagcccggcattgacttctcctttctggctatgaaatcctagatggcatcttttatttatttttttaatagaatgctgtttcatctacattgaaaatctcttgttttgttcagtcactttcatcagttatcttagatctggataatatgctgtggcttctccctcagcacttgttgcttcactttgcacttttatgttgtatatagagaagacatctttccttaaattgatgaaccaacctctgctarcttcaaacttttcttgtgatgctttctcagctctctcagccttcacagaattgaagagagtcagcaccccttgctccgaattgtgctgtagcttaaggaaatgttctggctggtttgatcttccatccagaccactacaactttctccatagcacctataaggctgttacaccttcttactattgtgtgttccctggagtaccacttttaaattcctccaagaacttttcctttgcattcagaacttggcaaactgtgtggtgc

SEQ ID NO: 735929 - DNA, 455 bp, Homo sapiens
ttttctggctactttccctgcatatatcagtcaataagtagattgaaatccctctagaattgattcaccagtcttcctaagcatttgcttctatttttctctttttagagtcagctgttattctatgagcctcggctggggaactcctctctcacagggcccaatcagaattccacttcaattagcttaattggaggaagaygcaaccacattttcaattaaagttctaaacaggctattagaacagactatttttgtcttccagattaagctctcctaatagtcattttttaaaaggtacaaatcttaaaggagaaaaagtggtcacaattagatcaattactgctagtaatcatttctcctagtaacattgggtcttttcacttaggtaatttggaagtaagacacttactcattttttattaactttaattttattaaattaatatattgtt

SEQ ID NO: 735930 - DNA, 665 bp, Homo sapiens
ccaatgctgcccaactgccaccagaggtgcccacaaacaccacctcacccctcagtgtccgctggggctgggaaacctcatgcgtcatttatagcccactccccagggagacaaattgctggtaaacctcaaggcagagttaagcaatgaaggtagggaacataggattgcttttgggaggacaacgctaaatggcacaggagggaaaagagaaaccaaaagcctggggggagggcgtgagaacaagagagtgagaatgtgcccgctrgttctcagaggctgggagccagataatgagagtgccatccaggcagaggagggatggggtaggggcagggcagagaaaagtctaggcagcgatggcaggggcacgaaatgctacatgtttacatggcagacccccctctgtctcctcagagagagcatcagtaaaacacctattgctcaatcatggaagtgagcaatagaataaagaggcattgagtccaacatccagactgaccaagtgacctgagagcacacacatggtctagccatatctcagtcacatcgccaagggggctggggacctggtttcttcccctgctagctttttccatctctcttctcctctctgtcccatttcccttttttgtcatttccatcctgattgggtcccaaatgga

SEQ ID NO: 735931 - DNA, 599 bp, Homo sapiens
tgtgcagcgaattcagactagggatggtgataaaatcaactgagctctttgaaaaggccacccgccttgggtttctggaattcagacttgtggggcttttactcttgaacaatttttaaggattgggtagtcaggttttcttttctttttctttctttccttctttctttttcttcttcttctttttttttttttttttttttttggkgcctgtgttgccctttataagcagccagctcagatgcatttagagaccatttttgtggaatgatttggaactgcaatctcccctccttggtttgctctcatcctttttgcatttctattggccaaatggaatgaaatagttcaatgtcataaagtcagaggtggctttaggctttgggcacactttctgaagaccaatggaggtggtctgggtgtgacaacgcctaccagtgtggagtagtgccctgctgcagcattcttagtggctgctggccaagaactggccttgtcctgggaaatgagtcatcagacataagcagcttgttcttggaggcagagctggcattggtttcaaggtcctcttgcatttggtgcacatctgctactgcttc

SEQ ID NO: 735932 - DNA, 599 bp, Homo sapiens
tgtgcagcgaattcagactagggatggtgataaaatcaactgagctctttgaaaaggccacccgccttgggtttctggaattcagacttgtggggcttttactcttgaacaatttttaaggattgggtagtcaggttttcttttctttttctttctttccttctttctttttcttcttcttctttttttttttttttttttttttggtgcctgtgttgccctttataagcagccagctcagatgcatttagagaccatttttgtggaatgatttggaactgcaatctcccctccttggtttgctctcatcctttttgcatttctattggccaaatggaatgaaatagttcaatgtcataaagtcagaggtggctttaggctttgggcacactttctgaagaccaatggaggtggtctgggtgtgacaacscctaccagtgtggagtagtgccctgctgcagcattcttagtggctgctggccaagaactggccttgtcctgggaaatgagtcatcagacataagcagcttgttcttggaggcagagctggcattggtttcaaggtcctcttgcatttggtgcacatctgctactgcttc

SEQ ID NO: 735933 - DNA, 645 bp, Homo sapiens
atcctgagtttactgaaatgtttaataacatttaaagctctttcttagtagaaggaagagattgctaccttttccattggtagttagcaagcatgtttctggggctatgtggtatattaaaaagaacactggattgagggtcaggacactggttctatcaggtatcaacttagtaaacctggatacctgggtctcaatgttctcatctgtaacacaaaaatgttgggctagagcagtgattcccaatttttttttttgtttgttttgttttagatggagtctcgcgtctcrctctgtcgcccaggctggaatgcagtggcacaatgtcggcttactgcaacctctgcctcccgggttcaagtgattctcctgtctcagtctcccgagtagctggaactacaggtgtacatcaccacacctgactaattttttttttttttttttttgagagggagtcttgctctgtcgcccaggctggaatgcaatggcgcgatctcggctcactgcaagctccacctcccgggttcacgccattctcctgcctcagcctcccgagtagctgggattacaggtgcccgccaccatgcctggctaattttttgtatttttagtagagacggggttccaccgtgttagccaggatgt

SEQ ID NO: 735934 - DNA, 635 bp, Homo sapiens
cgataccaatactgcctcaggtaaatggtataattatggacattgattttgtgagtgcgttatttttatccatgtgaaaaatgcattcacattcatggaataaacaataatatatatttatgatgttgctcaagtttgggattaattctctcaccttctgtcacaatgtagtccaaagggaccatgattggacataacatcacattgttccattatatctatgccatcaaattaattgtacagatgagcaacaggtaataataaagttggaggctttgtaagacatacgcacatcagaaggtgggagatgaatcctacaaagattcaggggtctgccaccttaggatatttcttattgtcgttcccacagtttggaatatgctgtatgacataccctctaaagtaaaggaaatttttactttgtacttcccacccactaagatggaaacatgacacctcgtaatcttacastgtatttgttcattcttacaccgctatgaagatactgagatggggtaatttataatggaaagagttttatttgactcacagttccacatggctggggaggtctcaggaaacttataatcacggtggaaggggaagccagcacttcttatatgacggcagacaag

SEQ ID NO: 735935 - DNA, 654 bp, Homo sapiens
ttcccaagatatgccataaaagttattctatgggcaatgagtttggaaactattataaactattactcccaatcttctcagagaaattcatagggcataagtattaaacaccctgagaatttgatcagaggatttaaaaaattgaaattattgatctcatactttcctatatatatctacatttatctatctatctacctacctacttaacctatctacctacctacctgtctgtctgtctacattataatctagttctactttgattaatgttactgaattctggccaggtttcccaaataacctttacaaaaaagtatgcttatcatattaagtaggtaaatgcacatgacagtgtaaaaattagagagaatttcagtctctctatgaaaccattcaaagtcgagtaaaactcaagtagtgattgtaacagctaaaacaataataaatactaaaatgtattcactatgtccctggcactgtgagggattcamatttttatttaatcatctgccaaaccctttgagtaagtattcttagcagatgtcacttgtgagtaaactgaggcccacagagttaagtaactttcttaagttattcagtccataaggaaaaaatgggaatgtctgccaggtttacctaatgccagaatcc

SEQ ID NO: 735936 - DNA, 529 bp, Homo sapiens
cttaaaatatatcctaaattacctggtcctcctcttattttccatttttcctgctattttattggcttcaaagtttctctcacactgaactatattctcctttgtttagcactagatgaaaaagcatactattaaggctttggccttgcattctctttttaatacctctggctctaacgttagggctttagtgctccaacctctgttgtacgcacttgagggaaatatgtctccgtgtctgcacatcatgtggtggtttctcctcctgagaagaggacgctgtcgggtgccacatgcaggaatctcaagtgtttgaggacaggagaygagactcatgtgtggtgccttttagacttccaagtcggtgctcactctcagacatgaagctgccctccttttggtcttctaggtaccatcaactggggataaaacacaaatacacagactagaaattccttggaagttgagctttaatttctctctagagttcttttttcacaagccaccctttcagaacttggagccaaat

SEQ ID NO: 735937 - DNA, 585 bp, Homo sapiens
gcatgcctgtaatcccagctactcaggaggctgaggcaggagaattgcttgaacctgagaggcagaagttggagtgagccgagattttgccattgcactccagcctgggcaacaagagcgaaactctgtctcaaaaaaaaaaaaaaaaaaaaaaaagaaaggwaaagaaaaaagaaaaccctgttgagattccagggcttgtaattgtcagaggtttatttggtatcttagcaactgctttgtgacaaccattgtatacttttgaaatgtctctctcaacaaaatcacaagtaattacatattgtggacatttttggcccctggggaatagttcaacatttaatattaaatttgtgcattgcaaattattatgtaaaaataattttacatgtagtcctgtgcatatgtgtgtgtgtgtgtgtatatatatatatatatttgtttgtatatagatacatttaaaagtacatacaataagcatatacaaaaaatatatacaataaacagtcttcgaagcaattttgagcattttagatgctaagtttataatgtttaaacattgcatttattactttgttttatatg

SEQ ID NO: 735938 - DNA, 383 bp, Homo sapiens
gtcatcataattctgaattatttttggtaaagttttgccacttgtgtaactatttgtagcttctggagccagaagttttatacatgaaaaggcaagactaccagaaggcagagtactccaatttttagaaattagggatgctgtttttatgttggaccttgtatatctcaggaccgggatgacgttggctccaagatgtyctacctagccaatcactttgcagtttccatctgactcagtcaagacacctgaggcctccctcacctaagcctgcaagaaaaggaatccacatacccacagattccaaaagcctgagtttataccctccctgcactcaacacagctggtatcagttagctttaaaactgcacccctgtatgcta

SEQ ID NO: 735939 - DNA, 586 bp, Homo sapiens
ccccacctcccggacggggcggctgccgggcggaggggctcctcacttcccggacggggcggctgccgggcggaggggctcctcacttctcagatggggtggctgcggggcggaggggctcctcacttctcagacggggcggccgggcagagacgctgctcacctcccagatggggtcgcrgcctggcagaggcgctcctcacatcccagatggggcggcggggcagaggcgctccccacgtctcagatgatgggtggcccggcagagacgctcctcacttcctagaagggatggtggccgggaagaggcgctcctcacttcccagactgggcagccgggcagaggggctcctcatatcccagacgatgggcggccaggcagagacgctcctcacttcccagacggggtggcggccgggcagaggctgaaatctcggcactttgggaggccaaggcaggcggctgggaggtggaggttgtagcgagccgagatcgcgccactgcactgcagcctgggcaacactgagcactgagtgaacgagactccatctgcaatcccggcacctcgggaggccgaggctggcag

SEQ ID NO: 735940 - DNA, 647 bp, Homo sapiens
tgaacagttcagcttgtggaaattgggatggtttatgattgctaaggaatttattagggtgaagataaatagatgggtatttgctcatcgtgacggactaaatgaaaagaaataatagatagatgagaagcagagaagttctgctttgaccgtaaaaacatggagtgtaatacmttctactgtggaatgcaggagtgtgaaagatgcattctaatgctgctccttcctgatttgctttccaacttgggacaggtcacacgaccatccatcccccaggtggctcagttaccagtgataggacgtaaggtctgtagagagtccgggaacacagcagtgccccctcagaagagagtgggcagctactgacagctcccagcgttctccccgcaggatcctaaaatagatggcacttaaaggccttggttgagggtgaggagggtgctggtttgtggtgggtaacacaggcgtcttccatgaaggacagcacacagtgcctgctttgtagctgtggccagaacaggagcgcacgcaccagcagagaccttggcttactcctcttggtcgctcttactgccgttaaattgtattctactgaaattcttgtgattctcagcaaacacagtgatgtttcttttgtccaaaggaca

SEQ ID NO: 735941 - DNA, 658 bp, Homo sapiens
ggttttaagcctaattgcctgtaatcccagctactcaggaggctgaggtgggaaggtcgcttgagcctgggaggttgaagctgtattgagctatgatcacaccacggcactccagcctgggtgatggagggaaactctgtcccaaaaagtagtaaaaccaagtgcccggtccctttcttgaggcctaggttacacagaggccttcactatccacccttcccatgttctcccgacctatgctccctttcattctgtrtaccaactggattttctcaaagcatgaggtcctttttgttgttgttgagatggagtctcactctttcaccaggctggagtgcagtggcacaatctcggctcactgcaacctcagcctcctgggttcaagcaattctcctgcctcagcctctcgagcagctgggattacaggcacccaccaccacgcccagctaattttttgtatttttagtagagacagggttccaccatgttcgtcaggctggtcttgaactcctggtctcaggtgatccgcctgcctcgacactccaaagtgctgggattacaggcgtgagccactgcacccagccatgagctctttattgttaaaggaattatcttagagctagcggcattttctgcagtgacttattctcacatggac

SEQ ID NO: 735942 - DNA, 533 bp, Homo sapiens
ggcaggaggactgcttgatcctaggaggcggaggttgcagtgactgtgccactgcactccagcctgggtgacagagaaaggctctctctcaaaaaaaaaaaaaagttcctggccaggtgcggtggctcacacctgtaatcccagcactttgggagtccgaggcaggcggatcacctgaggtcaggagtttgagaccagcctgaccaacatgsagaaacccccctctctactaaaaatacaagaaattagcgaggtgcggtggcacatgcctgtaatcccagctactcgggaggctgaggcaggagaatcgcttgaacctgcgaggcacaggttgtggtgagctgagatcgtgccattgcatccagcctgggctacaagagtgaaactccgtctcaaaaaaaaaaaaaaagaaaaaagaaagaagttcctgagctgaactgctgaatttctgagaggtaaagaccacctgttcatctcccccgtcagatttctagggtgagattcagccagggatatttttgaagttccccacg

SEQ ID NO: 735943 - DNA, 533 bp, Homo sapiens
ggcaggaggactgcttgatcctaggaggcggaggttgcagtgactgtgccactgcactccagcctgggtgacagagaaaggctctctctcaaaaaaaaaaaaaagttcctggccaggtgcggtggctcacacctgtaatcccagcactttgggagtccgaggcaggcggatcacctgaggtcaggagtttgagaccagcctgaccaacatggagaaacccccctctctactaaaaatacaagaaattagcgaggtgcggtggcacatgcctrtaatcccagctactcgggaggctgaggcaggagaatcgcttgaacctgcgaggcacaggttgtggtgagctgagatcgtgccattgcatccagcctgggctacaagagtgaaactccgtctcaaaaaaaaaaaaaaagaaaaaagaaagaagttcctgagctgaactgctgaatttctgagaggtaaagaccacctgttcatctcccccgtcagatttctagggtgagattcagccagggatatttttgaagttccccacg

SEQ ID NO: 735944 - DNA, 573 bp, Homo sapiens
attataggcgtgaaccaccgcacctggccaggcctgctcacactttcagctctgtctcctgcactcagggagaacactgggctctgcccggctgccctcctcccgcggcagctggaaacactttgcctcattggtttctcccctaacagagatcatggtctttagtgccacctattgaccggtgtctaaaaactgcctttgcgtatgtgttgtacggttttctaggtatttaaggcaagagggttaatccatcttggccataagttggggaagcctccacaatttttacaacattttgggagtctgaagggggaagactgcttgagaccaggagttcgaacccagctcgggcaacacagcaagaccccaatctctacaagaaaataaaaatactaaaagtagccgagcatgacaatgtgcrcctatagtctcagctactcgggaggctgaggtgggaggactgcctgagcccaggagatccaggctgcagtgagccatgttggcaccactgcactccagtctgggtgacacagtgagaccttgtctcaagaaaaaaataaaacattttaagtt

SEQ ID NO: 735945 - DNA, 662 bp, Homo sapiens
ctcgggatccacccacgttggcctctcaaagtgctggtattacagacgtgagccaccgcgcccggcctatttttaaatagagacgaagtttcaccagttgaccaggttggtctccaactcctgacctcaggtcatccacccacctcaccatcccaaagtgctaggtttacagtagtgagccactgtgcctagcctatttcatgttttattttaaattttattgatattaatagagattggggtggttcttactgtgtccggaattcgtgggctcttcgtctgacttgaagaatgaagccacggaccctcacggtgaatwtcacagttcttaaaggcggcgtggccggagtttgctccttttgatgttgtgttcggagtttcatccttctggtgggttcgtgatctcgctagctcaaggagggaacctggagatcctcgcgaggagtgttacaagtcttaaggaagcgcgtctggaggcgttcattctttctggagtgttcgcagtctcggtggcttacaggagtgaagctgcagacctttgctgtgaaagcaacctaaacccaaaaagcaacaccaccaccacaaaaacaaaaacaaaacagaacaaacacacccacccccacccccacaaaaaaactccaacacaacggaataaaacccca

SEQ ID NO: 735946 - DNA, 584 bp, Homo sapiens
gaataaaaccccagcacgttgctactactacctcagcagcctgcttttattctcttttcttgccccacccacatcctgctgattggtccattttacagagagccgattggtcttttttacagagagctgattggtccgttttgacagggtgctgattggtgcrtttacaatccctgagtgagacaaaagttctttacatccccactggattagctagatacagagtgctgattggtctatttacaaaccctgagctaggtgcagagtgctgattgatgcatttacaaaccttgagctggatacagagtgctgattggtgtattcacaatcccttagctagacataaagattctccaagtccccaccagattagctagatacagactgcccattggtgcatccacaaaccctgagctagacacagggtgctgattggtgtgtttacaaaccttgagctagatacagagtgctgattggtgtatttacaatcctttagctagacataaagtttctccaggtccccactagactcaggaacccagctggcttcacccagtggatcccgcactggggccgcaggtgga

SEQ ID NO: 735947 - DNA, 584 bp, Homo sapiens
gaataaaaccccagcacgttgctactactacctcagcagcctgcttttattctcttttcttgccccacccacatcctgctgattggtccattttacagagagccgattggtcttttttacagagagctgattggtccgttttgacagggtgctgattggtgcatttacaatccctgagtgagacaaaagttctytacatccccactggattagctagatacagagtgctgattggtctatttacaaaccctgagctaggtgcagagtgctgattgatgcatttacaaaccttgagctggatacagagtgctgattggtgtattcacaatcccttagctagacataaagattctccaagtccccaccagattagctagatacagactgcccattggtgcatccacaaaccctgagctagacacagggtgctgattggtgtgtttacaaaccttgagctagatacagagtgctgattggtgtatttacaatcctttagctagacataaagtttctccaggtccccactagactcaggaacccagctggcttcacccagtggatcccgcactggggccgcaggtgga

SEQ ID NO: 735948 - DNA, 584 bp, Homo sapiens
gaataaaaccccagcacgttgctactactacctcagcagcctgcttttattctcttttcttgccccacccacatcctgctgattggtccattttacagagagccgattggtcttttttacagagagctgattggtccgttttgacagggtgctgattggtgcatttacaatccctgagtgagacaaaagttcttyacatccccactggattagctagatacagagtgctgattggtctatttacaaaccctgagctaggtgcagagtgctgattgatgcatttacaaaccttgagctggatacagagtgctgattggtgtattcacaatcccttagctagacataaagattctccaagtccccaccagattagctagatacagactgcccattggtgcatccacaaaccctgagctagacacagggtgctgattggtgtgtttacaaaccttgagctagatacagagtgctgattggtgtatttacaatcctttagctagacataaagtttctccaggtccccactagactcaggaacccagctggcttcacccagtggatcccgcactggggccgcaggtgga

SEQ ID NO: 735949 - DNA, 524 bp, Homo sapiens
agggtaaccgcccccatgattaaattacttcccacccatccctcctagacatatggcgattatgggaactacaattcaagaggaaattgagaggggatacagccaaaccatatcaatgtccatactgcccaaagtgatctacaaattcagtgcaatctctatcaaaatactaatgacattctctataaaaattgaagtaaaatttcaaatctttttggaaccaaaaggctgcaaatagccaaagcaatcctgagaataaagaaaaaaactggaggtatcatactacctgacattaaaatatactacaatgctaagaaattcaaatattcttaccataaagaaatgacargtgtttgaggtgatagatatgataattatcctgatttgagcattactcaatgtacccatgtatcaaaatatcacattgtatccataaatatgtagttacatgtcaatgaaaaacaaaatacatctttaaaaaagattcacagaaacagataggcaataaacaatatttatatatg

SEQ ID NO: 735950 - DNA, 582 bp, Homo sapiens
ccaagatgatgcataagtcaaaacttttagatgtgtggtgaaaaacactaaagcaggttctgtctatccaaggaaattggaaacaacaatagaatataaaattaaggcatatgtaatctccatttttattttagaaaatatttaaattatgtcaatattcctacatattcaaaaaataattttatatctcaagcccatcctatactatgtgattttttaaactaaatattttatgaaattaactttttgccttaatactttttgtactttggaaagaaaataatttctagtaaaaagtgaaacgctttaaaaaagtaragcaaaagaaaagcatttgtataagcagccattaaaaaaattaattagaatataaggtaactataataaattaatagaagtattctatctttatttctactttgttttggtgttagaaatctaatactgtaaatgactacagataaaaatgatacatttaagattctattgcaccacccccaaattttaacctccaatcactcctatagtcaaatggagttcatttcatacatttgtcattttgttgatgggtctatgaaaatt

SEQ ID NO: 735951 - DNA, 624 bp, Homo sapiens
tgcatctgttgataacaagtttacataacagttgcctcaagcagttttctgaacccaccacagcccaaggtttacttcttccatattagattattattgcaaatttcacttgtttccattttgtatttataaataatgctacattggttttttcataatacatttttctttaatttataataaagttcagaagtaatagtaaaagtttcagaagtttggacatttttgtgatacttgatacctattgctaaatttttctcttataaattctcagcagcctagatgaagctagattgatcttatgttattctactctctaatttattattaacttcatgtstatatggttttctcattataggatctttaatttggtggtgggaggcttaacagaggcaatcaggagtggtgactattcattttcatctcagctgtaccctttgtccacttggctaaattctactggcataattaaattcatttgagtcttatgaccacaaagcatttttttgggcttcggctcagttaatatttctatatttttgaaacaaattattttaaatcacatagagtcaacgttgattactcttcattccctttgtattcattcattcattcaattgt

SEQ ID NO: 735952 - DNA, 627 bp, Homo sapiens
gatattcttctctcactgtgtccattttacttcctacctctttttgttttttctctatttgaggtataaattatcaatgctaactaactgtgagcataaaagctgagatatgcatgtggtataattttcccacattcacagtttttatgtgtcacatatatcatatgcattatatgatatatgtatatatatgcaaattatgagtgtacatgtttttgttttgttacatcttctratgtagttaaaatgaaaatgcttgtctgaaacgttaactccaaaaatttagtgtaggattttatatattaagaatatcattttaataattttatgtccaaaataaagttattaacaactatttcttagtttagaggaatgtaatcttatggctgtaataaaactgtaacacttaccttttgtctataggttactatatgtatttgtatatatgtagtgtgtgtgtgtatatatatatgtgtgtgtgtgtgtatatatatatatatatatacatacatacacattttatttttgtttatcttatattttgaagggtcacatgatagcatcctgtgatgcctgtggggttacaaagctgtgggactttcggaagctgttaccaattgtgtccat

SEQ ID NO: 735953 - DNA, 612 bp, Homo sapiens
cacctcatccctgggggttagagcaccaagcaggctgtcctgaatattcttgggaatgatcaatgagttaatgaagtgattaagaagaaaatttaaaattttcttgaaacaaatgttaatgaaaacacatcatactaaaatgtgtgggatacagccaaagcagtactaagaggcaagtttatagctttaagtgcctacatcaaaaaaagragaaaaacttcaaacaaataacctaacctagttcttaaagaattagaaaagcaagagcaaaccaaatgcaaaattagcagaaaagaaataataaaaatcagagcagaaataaatgaatttgaaatgaagaaaggaatacaaaagatcaatggaacaaaaagacagttttttgaaaagttaaaattgacatactttgagccagactaagtaaaaaagagagaagatgcaaataaataaaatctgaaatgaaaaagaagacactataactgataccatagaaattgaaaggattattagcagccactacaagcaattataagccaataaatttgaaaacctagaaaaaaatggataaatggctagacacatacaacctaccaagattgaaccatgaagaaatcc

SEQ ID NO: 735954 - DNA, 593 bp, Homo sapiens
tcccctatcagggagtgctttctataggcatagcaatttgatgagatggttgtacttattgtctgtgctcacagataatgatatagaggtttagagaaattaagtaacttgcatcaaactcagataataagtgacagagtcagaaattagcctcagacaatttgacaccaacatccatgagcctacctactttatcatagtgctataattctccagatgtctattttaayggtgccaaaggtaagcaactgggatcagacctatacagatacagtttacttctgccaggtttctgttcaggttcacaagctcaaaattagaggtttaattcaattgcaaaaatagagtttgacattgaaatttgtaccctaggacaaatttgctgttttcctttaagagcttattgctctgtttgaagaatgctcaaacaggtttagcctagaacaaaatgcgggaaagataaaggagccacaaaggtttaggatgctgcccttggagaaacttatcatgagctgataacttctaagcaaatagaggtagtaattggatgagttctcttaattgaatgcaatagagaaagcgcaaattctggt

SEQ ID NO: 735955 - DNA, 598 bp, Homo sapiens
cccagtttgtataatcaaatttcacatttccccattttgatcaagatctttctctcaaaatgtcactgattaactattctgaggttaggcgtaattgtccctcactgcagggtctgaacctgtccgagtttcctctgtcctacttttgggggttaggtatgagagtccatgtcagggacctgggccacatttagcaaaagagaggccaaaaggaaaatctttctcattgcagctttgcctggagttcaacattgagtttcactgtattagacccataggtattagcaatcatctcaagacactgggctaacattatcttgttgggagtgctggctttacaaagaatggtcrggcaaaaaaaaaaaaaaaaaaaaaaaaaaaaaaaaaaactttaatatgaaaatgcaaaaagtcattagtgacaatacaataaatccagtttgaatagtcctagattatgaacttaaattttaaggcaaccaactgaacagatcaaaaagttccgatgtatctggtgagatttgttggagccagctagcttgggttttcttttatcttgtataattgtgtttctactttcccagaggaattcatacat

SEQ ID NO: 735956 - DNA, 633 bp, Homo sapiens
ttacatcctgaagattcttgaagcctggaaacgtacaaaacatgcactaatggttgtgagcaatcccgtatttaagaagcctgtttaactttgtcagcatttccgagacttttatcattaaagtcactactaaaaccgccaatctgttagtttcactgacatttttgtgaatactgtttatattaacaaatatattcttcaatctttgataaggtggtactattagcctcaagtgagaggactgggcacctaagatttccctctggcctttctgggtacagagaaagcactgagatcatttacctgacatctacttatttattaaagctgaaaataaaaaaattctaatggaactcatttttccttcaatttgggtgctatgataatttattccaaattttgaaaacatgctaaatgttctccaattcattggtacccccttgttttacttttaaggaattccaagytgaaaccttttcaggctctcacaattctttcaagacaattctgaagcgtttggggactggggattatgccagttagttcctggatcagcagaggacagattagcttattcccagcccacttaaaaccatcagtcttgattagtcagtttccaatttgatctctatt

SEQ ID NO: 735957 - DNA, 596 bp, Homo sapiens
catatccagagtaagtgtctattccagtgagaacaaaccttggccctttccatgatggaataggtccagtataattaacctgccaccaggtagctggatgatcaccccaaggaatggtgccatatgaaggtctcagtgttggtctctgctgctggcaaactggacactcagcagtggctgtagccagttcatctttgatgagtgcaagtccatgttgctgagcccatgtgtaacctccatccctaccatcatggccactttgttcatgagcccattaggcgatgacaagggtggctagggaaagaggctgagttgtgtttacagaatgggtcatgctmtctgctcgattattagaatcctcctctgctgaggtcacccatttgtgagcactcacaggggatacaaatatcttcacagtttttgaccactcagagaggtccatctgcatatgttttccccaaatttgtcaccaattttccaatcatgcttcttccaagtccctgaccatccagccaaaccattgaatacagccatgaatcagtacataattacataatggccatttttccttctgtacaaagtgcacaaccaggtgg

SEQ ID NO: 735958 - DNA, 552 bp, Homo sapiens
atctccctaagcctttggatcccttcctttacattaaaacaaggaaaatcagtcatttccagcttgggccatcttttaatccatatttcagctaacagtgggccatcttttaatccatatttcagttaaccaagcaaataaactattagaagcctttctaactccccgagctgcaacattaaatgcaaaatccctacttagtgagcccaaatcaataaattcagcctggtccaactctatattccttccaccattaacccacacccttaatatccatttgcatgcctgctcttcagatttctgtttatawaaattagagaacttaagcagttcttttcaggtatagggcacctcctcatgagtcatattctgaacctcacctctgggagcctgctggtactttagtctagttataggtctagaagcaaatgggggtgttggggatagttcctgaggagaatcaacattatcttgcctggcaactgcctcaggggaggacatcactgttgcctcaggcaatgcagggcttttctcctcagacaaacatggaaa

SEQ ID NO: 735959 - DNA, 476 bp, Homo sapiens
gagaacttaagcagttcttttcaggtatagggcacctcctcatgagtcatattctgaacctcacctctgggagcctgctggtactttagtctagttataggtctagaagcaaatgggggtgttggggatagttcctgaggagaatcaacattatcttgcctggcaactgcctcaggggaggacatcactgttgcctcaggcaatgcagggcttwtctcctcagacaaacatggaaaggctgatggcagtgtaggtcagggaggagatgttgccactactggggatggggaagctgtttcttctggcaagaacggctcatcagagtttacaagctcaatgtccccagcttcaacagggtcctcccacatgtccccattccaagttgcagggtcccattcttttccaatcaatgccctcactttaacagtagacacctggcaaggctgtgcatgcacctttcattgcagatcagccac

SEQ ID NO: 735960 - DNA, 627 bp, Homo sapiens
tgtcaatttgacaggagctaaatttgcagttctctagccagccagcatggctctttcacaagtctacaagcccattgtatcaagcccattaaccttttagctagttttaaaaccttctgcaaaaaaaaaaacaaaaaamaaaacaaaaaaaaaactcatttataaaattgaataggctaggtactgaaagccctggtcttgtattgtctggaacttattctaggggaggatggttttatatacagtcctttctaaaaataaatttggagcagtcaattcttgcttttctttttaatgtttcaatctcctttaaaatgggaagcaatttactatagtgttaagagcataaactttatagttagagaacctaggtttgattctcaaatttgccactcactaagctaaaagatgttggtcgagttgctaagcatatctgtacctttcttctctcattagtaaaatagaaatagcaatactacctatataacataaaaagcatcattgggaacattaagtgcattagcccatggaaatttcttataacatatcctggcagacagtaagcactcaagaaacatcaagtataatgattgtatttaacactagtaataatattcaataccattt

SEQ ID NO: 735961 - DNA, 627 bp, Homo sapiens
tgtcaatttgacaggagctaaatttgcagttctctagccagccagcatggctctttcacaagtctacaagcccattgtatcaagcccattaaccttttagctagttttaaaaccttctgcaaaaaaaaaaacaaaaaacmaaacaaaaaaaaaactcatttataaaattgaataggctaggtactgaaagccctggtcttgtattgtctggaacttattctaggggaggatggttttatatacagtcctttctaaaaataaatttggagcagtcaattcttgcttttctttttaatgtttcaatctcctttaaaatgggaagcaatttactatagtgttaagagcataaactttatagttagagaacctaggtttgattctcaaatttgccactcactaagctaaaagatgttggtcgagttgctaagcatatctgtacctttcttctctcattagtaaaatagaaatagcaatactacctatataacataaaaagcatcattgggaacattaagtgcattagcccatggaaatttcttataacatatcctggcagacagtaagcactcaagaaacatcaagtataatgattgtatttaacactagtaataatattcaataccattt

SEQ ID NO: 735962 - DNA, 553 bp, Homo sapiens
ttatactgaccactaaaataggagatacaaatatgtctatgacaagtcaattaacaatttaaaacaaacacataatttttgtggtaggtacttagtctcaggaatagttgaccacaaatcaccaacttaaaaaagaattgacaatgccagaaatgcctccattgatggtcttgtgayctgtaaatggatgcttcttattgttggagctttctgaatattctactagagcattacataatgagactgcattgacaggataaaattagacaactagcttagtcaattctatttgaaaaataagttaatacattatttgcttccatgacattcaaaacaaatttttaattttgtcactaatatatgctaacagctttttttgtatgtataatgaacctctttggcagtgtgaagaagtctatggaccctatctcagaataatgtttttaaataaataagacagtaaaatggcaaagtaaaccaattatattaaaatattgatctatttatgggtccttgagggtccctggaactcaggtaaagaactctatggcta

SEQ ID NO: 735963 - DNA, 553 bp, Homo sapiens
ttatactgaccactaaaataggagatacaaatatgtctatgacaagtcaattaacaatttaaaacaaacacataatttttgtggtaggtacttagtctcaggaatagttgaccacaaatcaccaacttaaaaaagaattgacaatgccagaaatgcctccattgatggtcttgtgacctgtaaatggatgcttcttattgttggagctttctgaatattctactagagcattacataatgagactgcattgacaggataaaattagacaactagcttagtcaattctatttgaaaaataagttaatacattatttgcttccatgacattcaaaacaaatttttaattttgtcactaatatatgctaacagstttttttgtatgtataatgaacctctttggcagtgtgaagaagtctatggaccctatctcagaataatgtttttaaataaataagacagtaaaatggcaaagtaaaccaattatattaaaatattgatctatttatgggtccttgagggtccctggaactcaggtaaagaactctatggcta

SEQ ID NO: 735964 - DNA, 507 bp, Homo sapiens
acaacatgtgaagttgtacagtgttatttgaaagtggattaggctataggttttaaaagctacatattgtaaattccaaggcagccactaaatatttttaaatgtttcatgaatattgatgcaaaacttctcaatgaaatataagcaaattgaactgaacaatgtacaaaaagaattatatgccgcratcttgcatgttctactccaggtatgtaaggctggttcaacagcctttaaatgtttaaaaaataaatataattcatcatatcaacacacaaaagaataaaaaccatgtgatcacatcaagagatgcggaaaaaaagcatgtgtaaaattccatacctgtccatgataaaaactcctaacaaactagaaatagagcagaacttccacaacttgtttaaaaatttgttttttaaacctacatctattataatacctaattacattctctttaagattggggataaggcaagaatatcccctctcacaattattattcatcat

SEQ ID NO: 735965 - DNA, 507 bp, Homo sapiens
acaacatgtgaagttgtacagtgttatttgaaagtggattaggctataggttttaaaagctacatattgtaaattccaaggcagccactaaatatttttaaatgtttcatgaatattgatgcaaaacttctcaatgaaatataagcaaattgaactgaacaatgtacaaaaagaattatatgccgcaatcttgcatgttctactccaggtatgtaaggctggttcaacagcctttaaatgtttaaaaaataaatataattcatcatatcaacacacaaaagaataaaaaccatgtgatcacatcaagagatgcggaaaaaaagcatgtgtaaaattccayacctgtccatgataaaaactcctaacaaactagaaatagagcagaacttccacaacttgtttaaaaatttgttttttaaacctacatctattataatacctaattacattctctttaagattggggataaggcaagaatatcccctctcacaattattattcatcat

SEQ ID NO: 735966 - DNA, 625 bp, Homo sapiens
ttctttaaataggtttcttcaactggccaggtggcctgtatcaaaaacgagaaattctacttttggtgggaataggcagacatgacgggaggcgtgcaaggaaagaagtgcttgttatggttttcaacacagatatttggcactgaactgtatacggcgagggaactacgcagggtttctgtcctcaaaaaattctgaaataacrctaataaatatgacacatatgacattaatcttttgagattattcttgaaaaaaatagtaatatcaaaagcctactctataatactgagtgactaaaggcaagggatgcaaaacaatatttagtatgctgcaaattattaaaaatactacgtgtataggtatgtatgtttgcgtgtgtttagagaaaggccaagaactatatcaatctttaaccatggttgatgctgaggatgtaattgtgtgtactttttattttctgtgttagttcccatattataaaatactctataatgtatatatataaaagataccaacataaaaataagaaatgcagggcactttatttttaaacagtgctttcttcttaagacattgaggtgccaagcaagtgttaatttctagaattatgataagatggaaa

SEQ ID NO: 735967 - DNA, 485 bp, Homo sapiens
acctccacaaaagcttaaaacaactatttgaaacaaccacaaaaatatggaaactttgtaaataaaacttttgtgagataaaaaaaaatacaaaaatctgctccctcaccccagaacccagggaaatgctattcatgaaaaaggaaagaaaatacttcctyactttacccttgtcagggagacaaaattttacctctaccctcctagggttttagacagaacctaataattaaattgacataagtcagattaaccagagaaaagcatagaaatttaatataaattttatgtaatacgggagccctaataaggaaaagaagacccaaaaattgacaaaacctaaaagctaatatattaggttgaaaacagagaggcaattgtggaaaagtaactaaattctgtggggaagctaaaagatgacaagaattattttgacaaggtctgtttgcacaaaattctctgggctatgactccccactgaagaa

SEQ ID NO: 735968 - DNA, 545 bp, Homo sapiens
ccccatttccacatacggcacaatcaggagctgtgctatgcactctcctggctctgctttccagggaacagaagtagatataacaatttgaatttccccattgtaatctaaatcaatgactcctgtatgtatttgtaccctttttaaacttacactagaccttcctaaagtaatcctattgtccctgctggcaagggtccacagactccttttggaaccttttgtgggggttccccaggcagaaggctcacagcttttctgcagcataaatctactgtggcactactggctgtggcaggggacagacattgtacaggggtgagggaatgacctgagctggaaatgccctggtttagaacggggcctaggaccagcccctcagggcatttccctaaatcggkttcccttctttatcaaacttagagtgacactgactagcccagtgttttccttttttatattttggacatatttctggctcaacagttttcttctttcccctatctggtggcctgacttgctgattttttctacattctttttta

SEQ ID NO: 735969 - DNA, 561 bp, Homo sapiens
ttccattccaaccatcgctccagaaacacttcgatctggattcgagcccccacgatggacacaacttgccgagaccagctcggtcagggagaccctaacccagtggcactagaggaattaaagacacacacacagaaatatagaggtgtgaagtgggaaatcaggggtctcacagcctttagagctgagagccctgaacagagatttacccacatatttattaacagcaaaccagtcattagcattgtttctatagatattaaattaactaaaagtatcccttatgggaaacaaatggatgggccgaattaaaggaataggttgggctggttaactgcagcaggagcatgtccttaaggcacagattgctcatgctattgtttgtggcttaagaatgcctttaagyggttttccacccttaaagcaccttaaggtgctggtacccaaacatttttcttgagtgtgattgtgaattggcataattagagagatgattcccatgttctgatatcagcctagacataatcattctgtaagtttacattttgcacatttaaggtt

SEQ ID NO: 735970 - DNA, 585 bp, Homo sapiens
caaaaaaccaaacaccgcatgttcttactcataggtgggaattgaacaatgagaacacatggacacaggaaggggaacatcaaacccacttttgaatctctctagtaaatgtgttatttaggttattgtaatttttgcctctagaatttctttttgttttccktttagttttctatgtctttcattaatattttgattttgttcatacacagttttaactttatatctttgagcatctttaagaatgttgtttttaagtgtttttctagtatatttgctgtcaggcctttttaaataacaatttttgttgatttattttttttcctttgaatgagccacactttcaagtttctttgtatgccttgtgagttttcactggaactggacatttgaatctaagaaatgtgataattgtggaaatcacatcatccccttcctagtttgctgtttttagttatttttttttaattgtggctttctgtatcccaaggatctgcctgagatgtaaacttaaggtcttctcaggtcttttctgagactgtaccttttcctgagcatgtatgatcactttattattttctttgt

SEQ ID NO: 735971 - DNA, 604 bp, Homo sapiens
ttttgtattttttttggagagatggggttttgccatgttgcccaggctggtctcaaattgtcgggcttgagaagtctgcccatcttaacctctcaaagtgctgggattacaggcatgagtcactgtgcctggcctattgattgatttttgtatgttgaaacttgcttgcattcccgggataaaaccgacttggtcatgatctataaaccttttaatatactgatgaatttggttagctaatatcttgttgaagrtttttgcatcaatattcatcagtaatattgttctgtagtgttttcttgcagtctttggtcttggtaataatgtaatgctggcatcatggctttggaagtgtttcctcttttcagttttttggaaaagtctgaggggggttagtgttaattctttgaaatttgtgacatccaccaatgaaagtatctggtcataagcttttatttgttaggaggtttttcagttattggttcaatttctttactgtttctaaatttgttcactatagtttagcataattcagtcttgacaagctgtgtatttctaggaatttatccatttcatctagattatccaatttgttgacatacaa

SEQ ID NO: 735972 - DNA, 604 bp, Homo sapiens
ttttgtattttttttggagagatggggttttgccatgttgcccaggctggtctcaaattgtcgggcttgagaagtctgcccatcttaacctctcaaagtgctgggattacaggcatgagtcactgtgcctggcctattgattgatttttgtatgttgaaacttgcttgcattcccgggataaaaccgacttggtcatgatctataaaccttttaatatactgatgaatttggttagctaatatcttgttgaaggtttttgcatcaatattcatcagtaatattgttctgtagtgttttcttgcagtctttggtcttggtaataatgtaatgctggcatcatggctttggaagtgtttcctcttttcarttttttggaaaagtctgaggggggttagtgttaattctttgaaatttgtgacatccaccaatgaaagtatctggtcataagcttttatttgttaggaggtttttcagttattggttcaatttctttactgtttctaaatttgttcactatagtttagcataattcagtcttgacaagctgtgtatttctaggaatttatccatttcatctagattatccaatttgttgacatacaa

SEQ ID NO: 735973 - DNA, 649 bp, Homo sapiens
ttgtagtgaaatatgatagatagaatcctagtttttaattgctttctattacaacattaagctgaaaaaaattcccttgggtcaaagcttttgtatttgctgcatattctatgaattgagcaagtttccatgttaaatagcgtctcagagcatgtgttgttcctcaaatgctttctctttcctgacttttcggtctagatccagagttaggcctcataaaaatacacgatcttatctttgcctgttccaagtctcagctcataggtgaccaggtcccttttcacaaaactactgaagacagatccaagcatctcaactcacctactactgagttcaccagcaagatctgaaaggccttattgattaatggcttcccatgatataataggcttgtggtatttgattctcttcctatgatggttatagatccgttaatatctcaccattctatacccatgagacctcrtcttgaagggtcaatattatcttttgataacaattttggaccacagaaaagtataagaattaactgaaagtagacttcaatgaagaaaaaggggcaaaaaggaagcctaacaaatatcaatggatgattcctattacttagttaacaaaatgttttctattatgatgcatcagaaagtatgac

SEQ ID NO: 735974 - DNA, 620 bp, Homo sapiens
gaagactcagattttatttcaagttcagggttctgtgtttatgattatatatgattcagggagaatctgtttgaaccacttcatactaattgtgattggtgactgtaactaaaatgaatttgaattcagagagaaatctaaaattagatttctgcataaaaattctatgcaaggagtaatggacctttagaacattcagctttaggtaattgaaacttttgtagacaataggttatttccatttgaattcacrtattgcccaaagacagggtttcttgaaatattaataattccacatataccagcaataattttcaaagacttcctaggggcagaagttgttcttgaattttagatagacttttgataataagagttgaaagcaagggtttttatgtgaaagaggttaactggaaaactacatctaattgattaaaatcctaacatatatttcagttagttatattttgaggttgttagctttgcctgcttgatcccatttgattggtgataacttctggactgtatttgttatttatactgatataattgatataatatattgatataatatattgaattcttggtgaattcaaacctcttgatataatgtgtgtatt

SEQ ID NO: 735975 - DNA, 569 bp, Homo sapiens
gcattgttttgtgtaatcacaaagatatggtttggaattggaacttatgtttaaaagggaagcagagcataaaagttaggaaaatttggagcctgatgatgtggtagaaaagaaaacccgtttcctgggagaaactcaagccagctgcaggaatttgcataagtaacaagtagctgaatgttaatcgctaggacaatggggaaagtatctccagggcatgtcagaaascttcgcagcagcccttcccatcacaggcacagaggcctaggaggaaaaaatggtttcatgggctgggcccacggtccccctgctgtgtgcagccttcagacatggtgccctgtgtcccacctgctccagtcatggctaaaaggggccaaggtacagctcaggccatggctttagagggtgcaagccccaagccttgttagcttccatgtggtttgagcctgaaggtgcacagaagtcaagaatggtggtttgggaacttccacctagatttcagaggatgtatggaaatgcctggatgtccaggcagaagttttctgcaggggtggagcccttatgaagat

SEQ ID NO: 735976 - DNA, 614 bp, Homo sapiens
tgcaacagacatattttccacaaacagaaatgaagacaccaggtataatatcacaagggaatcctcttggtttgcaaataaagttatatgacaagtcttggcaaaggtttaaagaaacaacagagactctaacaagtctcactgattgaraaaaagttaaataaaattaaggctttccaacaacaacaacaaaaaatccaggatataaagacaccattgcaggaagacctgggattcagttacctggggctaaggccatcacaaatgctgccatcagtccaggatcactagcaccagagtcaagaccctgtgcagggagatttcagagtacacagtaaggaagcctaggaataaagttaagaaagtcaaaattgttaaccatactacatttaaattcttctctctcaagagcagtttatgccagtaaagatcagtgaaaacatctggctagatgagtcttgatggccagaagaccaagatgattccatcagtctcactgttcctcttttatctcagagactgaaaaagtgctaaaggtatagaaagacatatgataaggagtagtatatgcaggaagaaaacacctttgtttagtcagaatgcacataggatcc

SEQ ID NO: 735977 - DNA, 574 bp, Homo sapiens
taattttttaaagtgaaactgtgaactgaatttccaattttatgctgttcttttttaaaatctgtttaagctacaaaaatgaggattctctaaaaataacaagaataattaatagcaatttgataaatcatgaaaagactttttctgggaaaattgagaaattgagaaattgaatggctctaaagattagaaaacaaaatcttttgcaagttaagtgggttctaattcctgggctccaacaaaattgagggaagatctaatcaagttagatcattaaaaagaatttttgatgatcacgatataattttggcacataaygtgaaaaaatgtccaagtctttagtgaaattaaaaaaaataagactactttgacctccatctgcttatttatgtgatcagctctgtctataaaaactgaaaagaagaacagaattgatgctaagcctgtcacatcctggaaataagtcatatttatatatgtacctatggatatgtaaattgaaaaatgcctcatccaataccattaagtggtaattttctaataaacttttattttatacatttaatcattattt

SEQ ID NO: 735978 - DNA, 631 bp, Homo sapiens
agcagaacttgaggacatacaggagtcaaatacgttccataacttcagagaccagcttcaaaattaaaaggtaatactgcattttctccaaaataacatttacattacgcttatcttctaataatataatgatcaaggagaaaatgtaatgttaaataaagcttgtagtgaagaaaatgtagtgttacataataatgtgatgttaaaactaaattaagaagtgattttttcagttccattatagtggcatttcctaaccaggggcccttggactattgggcaggaagaggcaggattaatcagaactgcatgtaaaatgtttgtgtttatataaattttcccccaargaaagctggttctagcattcattgattacttaaattcgtgacccccaaaaaggttaagaaacactactacaggataagaatatttagccaccacctatggaaaattcatttttaaatacaaatcaacattcaatctaacaaagtcttttctaaaaagacagagtatccatgaagtacaggctagacctattattaagagaaaagaatatttttgtaaatctcaccacagatttattttctatcatttccagaagcctccaaagttacaactatttaaataaaag

SEQ ID NO: 735979 - DNA, 590 bp, Homo sapiens
cattgctggtaggaatataaaatggtgcagccattatgataactcaagatttgatagttctcaaaaatcaaaatatacaatttgattgtatatttacactcctacatatatattaccagcaattacactcctaggtatatatccaaaaggattgaaagcaggaattcaaatcccagcactttasgtggccaaagtgggaggatcacttgagcttaggagttctacactagcctgggcaacatggtgaaaccctgtctccacaaaacaatttaaaaattagccaggcatggtggcacgtgcctctagtcccagctactcaggaggctcagctgggaggatcgcttgagcctgggagattgaggctgtagtgagccatgatcatgccactgcactctagcctggatgacagagcaacatcctatctcccaaaaaaagaaagaaagaaagaaagaagaaaaaaaaaaggagaaagcagagattcaaacagataatgtataccaatgttcatagcagcactatacacaatagccagtaggtgaaaatcacccaagtgtacatcaacagacaaatggataaacaaaatatcgtat

SEQ ID NO: 735980 - DNA, 597 bp, Homo sapiens
agattgtaaaaaggacaataatccccaaactgatctactcattcaatgcaaaggccatcagatttccagttgatttctttggagaaattgacaagctgattctaaaattcaagtggaattgaaggggatgctgaataaccaaaacaatctgagaaaaaacaaagtagaagactcatattttccaatttcaaaactgactatgaaacaataaaaatcaagacagtgtggttatggcacaaggatagacttatagatcaatgaaacaggactgagagtttacaaataaacacacatgtctacggtcaactgattaggacagggttctaagatcattcaatgggtaaagaacagtcttttcaacaaatgtcggtaggactactrgatagccacaggcaaaaaaaatgaatttgaacccttactttacaccatgtacaaaaattaactcaaaatctgtcaataactaaatggatgtaggcactaaaactattaaactcttagaagaaaacataggagctcatctttatgacggtggatttggcaaagtgttcttacatatggcaccaaaaatctgaacaacaaaggaaaaaatagaaaagt

SEQ ID NO: 735981 - DNA, 621 bp, Homo sapiens
attcctgattcagtaggtctagggtggggtctaagaatttgcattctaacaagttcccggatgatactgtggctgctagatcacaatgagacatagtctctaacattcatgcacggccttatagtgttatggagaagaaaacatgttataataggaagcagtaaaataacagtaagacagtaaatcaaactcgtttcatcaaattgaagacagtactgtttatatgaagcaccattttatataccactaaggaagaaaatagtcaattaaaccatgacacatgctttcttactgcttacattttttatttatttkttaaatattgaaagagctctttagacttatttagaaaccgtaagaaccatatatcatgtacaaataagaaaatataagcaatctaaactggctaagctattcctaaaatttcttcacattcagtgttcaactcttctgatcacttttatattcaaaatcataggtgtcaaggttttccatgcagtattgttttttatactaacaagatccttgataacgcagcatttcttaaaagagtaatcctctgttgtctctgggactttcaagcttcagatgcacattcttagaagctttgatgatagtagc

SEQ ID NO: 735982 - DNA, 646 bp, Homo sapiens
aagacatcttgtgctcatggactggaataattaatattcttaaaatgaccaaactgcctaaatgaatctacagattcaatgcaatccctatcaatgtcattgtttctacagaattagaaaaaacaattataatatttgaagggaaccataaaagagcccaaacagccaatccaatcctgaacaaaaagaagaaacctggagacattacagcacctgacttcaaagtatattacaagcatatagtaaacgaaacaatacggtattggtataaaaacagaaacactacagttcaaccttcaaggcacaagtgatcctcccacctcagcctccaagtagctgggaccaaagggatgtgccaccatgcctggctaatatttktattatttgtagagacaaggtctcactatgttgcccagtctagtctcaacttcctgggctctagcagtcctcctgccttcgcctcccaaaatgctgagattgtagttgtgagtcaccacacctggctgtgattttgatttttttctaaatttgttgagacgtgtgttgtgccttaacatatagtctttcatggaaaattttctacatgctgatgagaagaatgtgttttctgtagctgtcggatgaaatgttctgtcaatgtctgtta

SEQ ID NO: 735983 - DNA, 646 bp, Homo sapiens
aagacatcttgtgctcatggactggaataattaatattcttaaaatgaccaaactgcctaaatgaatctacagattcaatgcaatccctatcaatgtcattgtttctacagaattagaaaaaacaattataatatttgaagggaaccataaaagagcccaaacagccaatccaatcctgaacaaaaagaagaaacctggagacattacagcacctgacttcaaagtatattacaagcatatagtaaacgaaacaatacggtattggtataaaaacagaaacactacagttcaaccttcaaggcacaagtgatcctcccacctcagcctccaagtagctgggaccaaagggatgtgccaccatgcctggctaatatttttattatttgtagagacaaggtctcactatgttgcccagtctagtctcaacttcctgggctctagcagtcctcctgccttsgcctcccaaaatgctgagattgtagttgtgagtcaccacacctggctgtgattttgatttttttctaaatttgttgagacgtgtgttgtgccttaacatatagtctttcatggaaaattttctacatgctgatgagaagaatgtgttttctgtagctgtcggatgaaatgttctgtcaatgtctgtta

SEQ ID NO: 735984 - DNA, 631 bp, Homo sapiens
caatttagaggctgatgttttgatgatgaatcttatgattattgatcctagcaatttggtatctaaattagctcaatgttatttgtggaactgaaaggagtagtgttctgtacatggtcttagttgcaaacaacaaaagagaattctagctaatttttgggaaaaaaaaaaaaagcatactggataaatacacaactgcccaaagagtcttgttagaaagctggaggacccagctctgaattaggcacaaaccaatgaaagttgggcatcagataagccggcaaatcaaatccactaagacagcctggctggatggacgttacaggcactggtacagcctggaactctccaacagcttctcattgctgctgtgaatgatttcccagttgtttctctatttttttcctctctcatgagacatagttccaggagggaacctctgatcactaaggctatatcatatgccygtacctaagtgtgagagcaagatgaaatgtgtttggttgcttcaatttttacaggggaaaatgcggctctaatgaacatctttcacttcaaaatccttttaaaataaagctgttttattttaaaataaataaaggagaggtatagtctttagggaaaacgttta

SEQ ID NO: 735985 - DNA, 487 bp, Homo sapiens
aagacattcactttaaaagtataaacaccgtagtaactttttttctttcattgttttcaataaaagggtaatggaagtaaactgacaagtttaggaggctttcagagcataaaggagaaaggctggcagctcttgagaacctctttgctttcagctgagagcaagtagagaatgcttgctctctggccctgaatgtcataacattatgttcagaatcattgaaatgtctgacaacactgttgattaaaaatgagaatcattaggccatgtctgccgttataggatgaagkgtagtttgaacagtatggaaaaaaactatcccaaaaggatgatttgtcttagacaatattaccaaaatttcaaattatactatgtatagtaatttgcagtaattcactttttttttatatttagcttcatcttaaaagttctccttcattggtaatgctttgaaaaatgctggatttagaattatgaagagactatc

SEQ ID NO: 735986 - DNA, 520 bp, Homo sapiens
cttggcctcccagcactttgggaggctgaggtgggcagatcttgaggtcaggagatggagaatatcctggctaacacagtgaaacccaggagatggagaacatcctggctaacatggtgaaagcccgactccattaaaactaccaaaaattaggccgagcgcggtggctcatgcctgtaatcccagccttttgggaggccgaggagagcggatcacaaagtcaagagatagagaccatcctggctaacacggtgaaaccccatctctactaaaagtacaaaaaattggccgggcrtggtagcgtcacctgtaggcccagctactcgggaggctgaggcaggagaatcacttgaacccaggaggtggaggttgcagtgagctgagattgcgccaaagcactccagcctgggcgacagagcgagactccatcaaaaaaaaaaaaaaaaatcccaaacatgtgctatatggtaatgttgaggatatgagcactaactgaaataaaagttgtcatttagaaaat

SEQ ID NO: 735987 - DNA, 584 bp, Homo sapiens
atttattggaaacttaccaatgaaccaagcatggtactaagtgtgttacaaacgttgtcttctttaactcttactgctaccctatacagaagtcattactaacatccccattttgcagatgagaaaaccaagacttagagaaagcaagtaacttgcctaggtaggcaaaactggtaaagacagagtctggtctatctgactcaaaagcttatgcttttaagctacttcctgcctgcaaaaggtagcagtctcatggaggagaaaatgtgaacctaagtaacttatagttcaaggttaaaaaktaatgttccatagaaaaagaaggaagatgttgagaaaggaaggaagacttgctatctaatatctaagctgcatattgaaagataaatagaaatgtgataaagggaggaaagtcattccagattggcaataacaaagaggtttcgggaattctgaggacgtacatgagaaatagaaactagttatgcctggaggatccatgttctacgtaagaaaattaatatcagaaagataagcatatatatatatacacacacatacatcggctaagattaaatacaaaa

SEQ ID NO: 735988 - DNA, 515 bp, Homo sapiens
cttactctcacgaggtacctcaaattttctgattttaggtgatctctaatgtctctcctggctctgaatttccacaattactctgtcagatatctgcagagtatttgccccttcaatttaacctgctctctgctttgaaggttgatctgcrttggctactcaactggcttccttgccatctggcatatggatggttttggtcagtgaaaatcggtgaaataataagacatattatatatatatatatatatatacacacacacacacacatatatatacatatatgtatgcgtatatatgtatatacgtgtgtgtgtgtgtgtgtgtgtgtgtgtgtgtatgtgcataggtctctgctaccagtgcctgacacaaatttcctaaattccttgggattttcaaggtgataggagtgtcttgcgttctaatgaggcaactcttgggtggacttctgaacaaggggtagtcaccagaaagaccaagacatgattataatctgagaacttcagactcag

SEQ ID NO: 735989 - DNA, 617 bp, Homo sapiens
aattccaagaagaaaaaagacttttaacctttctcttttaatcacatgctacagttagtacagttttaaaaaaggcattgtattttcctaagaagacaatctggtttcayggctcacaaacagaaaaagagagagagaaacccagtaagccatacattatgtggcaatgaggcactaaagctgtgagcccattttaccaaagctgtcctagctaaagaactgctgtctctatgttagatacagggcatgtgcttatttttgttgaggactctaaagtataaaacttgaatttaatcttgctactctttcaggccttgcttacagcaaagtagtcccacgggatttaggtaatagtatgttatacaactgtgcctttcacatatctaagctaaatttaaagttcaaaatgatctcattcactcagtcattttttacactcaaaataagatacttagtttcagttttcagttattttgaatggagatgtataattgaaattggatactattaagctttcagtatgaaagaatttcccctacttctccttctccatgaacataacatctataacaccataacatcctcaagatgtcttgaagttttcagggagcctagga

SEQ ID NO: 735990 - DNA, 631 bp, Homo sapiens
acttttcaatatattaaaacattttcaggatccttctccatcttagaagctgtacatttgtttatttgatctacgtacagtggcatggcatacacatggattcacagaccccttccaatcacattccaggtacacagtctatatctatatctatatatmtatatctatatctagatatctccatggctctgttatttttatctttaggaataacctattcaaataaaaatctgtgagactctagcatcgaatgctttgtatcagtttatgagattactttccattataaaaactagctgaatttgtgtcccgaaggaaatagtacaaataatctttcattagggctagagatatggctattgatctacaagcccagagcactgatttgcctccagaaagacaaacacatctctctgacatcatctacctctcttctatcttcttcagtctagccacactgaccttcttgctatttctcatttcactaaactcattcttactttagggtctttttaaaaaacacaactatattgagataaaatatatatattaataccatataatttatccttttaaagtatccaattcagtggtttttataatattcacaattgttcaatcattgccacta

SEQ ID NO: 735991 - DNA, 621 bp, Homo sapiens
ccttgactgtcgaatttttctttattttacttttttttactagactgatggattagctaggtatagaattttagattagaagttttctgttagaattttcgagatattgtttcactgtcactgagccttccacactactattaagaagtgtgatagcattttgattctaaattatggtatatcactatttttttttccctctgtggaaacagttgggaaaatctgttcacccttggtgttctgaaatttcacaaggtgccttggcttaggccattttgtaagttaactttatcaaaagaaatgcattcttaattattaacacattttcctgtattttctttgatgttttcctccccacgatttaccakttttctttttctggtcctgctattactgaggtatttgattcctggactaaatctctaatttaaaaaatttgcttctttccagtttcatttttctttttcttttttttaagttctatttttttcaagtggtatcctatacttctttaaaaaaatactttatctcttaatttttaatttgttttcaattttggctaacatttttatttttcaagacgtcctttcttgttctctgatcgttccctctttttctatt

SEQ ID NO: 735992 - DNA, 625 bp, Homo sapiens
cccaatactcatctatatgcagaggacgcatctcaacagaaatgaataagaagacatagtttctgttcttaagaagttaacggtatttaagaagaaggtgtgtgttaattatgtgcaaaagtatgtgcattgaagataaaatagaaatgtcttgagacattagaatggcctttasagagacttgggcatttaaggaggatcagaaacttaccagatagaatggggatggggaaggcataccaagaacaatatgacatatttaggagaaaactacaattaactcacttgcacctaaaaatgagagatcaatgggggaagtagtagaacatcagattgacgtgaaaatacaggcagacagtgccagataggaaatgacattgcttgttgtttgcctctctgtgtcttaccgaaaacatggccttgctttcatatttaatgtacttagagctgcttagggacaagttcaatctgaatagacagcactgttaattttacattattaccaactaaggtgttcttttataatgttagtctgcatcatttttattctggatatagtatatcttcaaattagataggattatccataaaattatctggagcattgaaccccaattgatgctct

SEQ ID NO: 735993 - DNA, 548 bp, Homo sapiens
taacacattctgaatgtactttctctgcaagccctggcacagccctcctgcactcagaagaaccagccagcactcgtgcagcgctgtgcttgggaccattttattttattattaaaaaaaatttttttttagagacaggggctcgctctgtcacccaagctggagtgcagtgacatgatcatagcttagctcactgcagcctggaacttctgggctcaagccatcctccagcctcagcctcctgagtagctgggactgcagggttgcatcaccaagcctggctaattttttagttttttgtaaagatgggggtgttgctacattgcccagtctggtctcraactcctggcctcaggcaatcctcctgcctcagcctcccaaagtgctgagaccacaggtgtttgccactaaacccattgggggccactttaaatggcaaaatcaccaaccaaatgcacaaaaatgcaaaagacatggcactaaccagaccttgggagaaagtacccattgacattgtgagagcagaaacaaaaaggcagggcagcccc

SEQ ID NO: 735994 - DNA, 545 bp, Homo sapiens
accctggcatgcaagtgaaattggcctatttctggaagatcataaggctgaatcaaattgagaaatgaggattgatgggaaatgagattgagaaccaaatgaggtcttacaagtcatgataaataaaccaggtttattctgttggtgaaggaaagccatggagagttttatcgtgttttgttgttatgttttgctttgtgttttatagggaagtggtatgctatgactcacagtttttatcaatcacttttgycgctttagggagagttgaccgcaaagtgacaagagtgaatcaatgattccagctagggggccactttcatggagagacatggtagcccatctaggatagcggctgggctggtggtgataaatggtcagcttcagcatagatgttgataaaagattaacacagtttgccaatggattagatgtggagtatgagggaaatgaaggaggaaaaaaatgactcttacctttttacttcagggaatattgggaaagttgaaagaaggagtatgcttgaggactatgtaggaatccaa

SEQ ID NO: 735995 - DNA, 545 bp, Homo sapiens
accctggcatgcaagtgaaattggcctatttctggaagatcataaggctgaatcaaattgagaaatgaggattgatgggaaatgagattgagaaccaaatgaggtcttacaagtcatgataaataaaccaggtttattctgttggtgaaggaaagccatggagagttttatcgtgttttgttgttatgttttgctttgtgttttatagggaagtggtatgctatgactcacagtttttatcaatcacttttgtcgctttagggagagttgaccgcaaagtgacaagagtgaatcaatgattccagctagggggccactttcatggagagacatggtagcccatctaggatagyggctgggctggtggtgataaatggtcagcttcagcatagatgttgataaaagattaacacagtttgccaatggattagatgtggagtatgagggaaatgaaggaggaaaaaaatgactcttacctttttacttcagggaatattgggaaagttgaaagaaggagtatgcttgaggactatgtaggaatccaa

SEQ ID NO: 735996 - DNA, 619 bp, Homo sapiens
actgtctctcctccacctaagcagccctcactccatgcctaccttcccaactcagtgcttatcttgtctactaagtttggtctgtagatgaagatcagcaaggctttgagaggaactcagagacccaatggttatttcctagtgccccagccttcctcaactggggatgactttcayattcagtgaccacaaatcctggtgaaatggatgtgtcctcaccatatctgtccatgtaggtcagatcgtcttcaaacaataatagctaatatttattaagttatttctttgtgtaccaaattattttcagagctttacatgtattatctcagtaaatccttataatcactccacaaggtaagtgttcgatacatgtgaaaaataaggcacaaagaagataagtaacttgcccgaggtcacacaagtaggaaactatctgaccttccagcatattgtttccagaatctgaacccagtctggaaaggtctcaatcgagtcaaaatctagattgtaaccaccactctttacttagtgtagaaagatgtctgtgatgaacagaaatggaaataaattttggagttaaaaggcttaacttagaatagcattagtctttattctttgt

SEQ ID NO: 735997 - DNA, 452 bp, Homo sapiens
actattatgattttagctccccccatcataaattgctaggccaagttcagcttaagccaggaacactcagattgtctgctagtaaagaaattaatagctaatgaataagaattcttagtacagaccctgagggcactattaagagacagggcttaaataagaactttgtaagtatttgttacacaaatatcaagttggaytgatatacataaacagaaaagagcattaatttgtggctcatttgtacttcccacaaaaaacaaccacttatcagctaaagcataggagtctttgacttgccaactactttctccgtgtgaacacattaaatggaacaggtccttgaaaatagctacaaaaatgagtttaacataaaattgaaaatattcatttagtatttatttacactaagcactgagcttaaggctgaggagataagggaacaaataaac

SEQ ID NO: 735998 - DNA, 478 bp, Homo sapiens
aatgaaataaaaaatagaaaagaacaaagatctaaagtcaatcatgtaagcatccacttcaggaaactagaaaaagaagagaaattaaatccaaagtaagcagaataaaaaaaaatcataaaattagagcagaaatcaatgaaactgaaaacagaaaagtaatgaaaaattgaacaaaatcgaaagctagttctttgaaaagatcagtgaaatatataagcccctatcatgtaagaaaacaaagagagaaacacaaattagtatcagaaatggaagacgggaaatcmctacagatcccatagatagtaaaaggctaataaaataatactataaacaactctaagtacataaattggataactgggtaaaataagtcaattatttaaagacacaaacttccagaactcacacaagaagatagacaatttcactaagactacatctattagagttagtgaatgaataatgaataatgttc

SEQ ID NO: 735999 - DNA, 577 bp, Homo sapiens
atgcaaaatgctatagctactttggaagacagtctggtagtttcttacaaaacttatatactcttaccatatcatacagcaatcacactccttggtatttacttaaaggggttgaaaatgtgtccaaagaaaaacctgcacacaaatcttcatagcagctttagctgccaaaatttgaaagcaaccaagagttcttctgtagataaaagaatccagagaatgaaaaaccattcmgccctaaaaagaaatgagctatcaggacatcaaaagacatagaacattaaacacatattactaagtgaaagaagtccatctgaaaaggccacatactgtataattccaactatatgacatccttgaaaaggtaaaaccataaagtcactgaaaagctcagtgatgcttatggggtgagggaacagcagagcacagaggatttctagggcagtgaaactgtttacgatactgtaatggtagatatatgtcattatacatttgcccaaacccgtagaatatataacattaagactagaacctaatgtctactatggactttgggtaataatgatgtcactgtagg

SEQ ID NO: 736000 - DNA, 596 bp, Homo sapiens
ttcaccatcttgcccaggctggtctcaaactcttgggttcaagccatcagcccacctcagcctcccaaaggaatcaacacttttttgaagatcttcaggggtttcttacatgcagctaagttggacccactgaaaaaggttttgagagatgcttagagtttgggctcttggagatgtggagamatagccatccagggagggtggcagcaactctgagttaggtttcacaagagatttggtcaacttgggctgtgttgtgtgaggatgatcagtaagtagcaaacaaggctaaaaagagagtttaaagccagatgaggttaatataaagtccctattaacaattttgatgttttgtttcataagcagaaaatatattctacatttttacattggctagatgacataattagagcagatcctcaggaagataaatctggcagtaatgagttggatggaacagggagaaaataggttggaaatagggccatcagctgggagactgcaaaagttcatgcaagtggtaatgaggacctgacctcagaaaataagggtttcattagaaagaaggaggcagggacatgagactttctggtaaa

SEQ ID NO: 736001 - DNA, 652 bp, Homo sapiens
aagttgtttatcagttctaggagcctttgggcacacaataatagtggaagacatcaacaccccactggcagtgttagatagattattgaggcagaaaactaacaaagatatttgagacgtaaacttggacgcttgacaaaatgaacctaacagacatctacagaatactctaaacaacaaaatacacaatcctttcatatgcacatagcacatctaaaactgaccacttacttggcaaaaagcaattctcaacaaatttcaaaaaacctgaaattataccaaccacaccctcagaatacaggactataaaaatagaaatcaacctgagaagatctatgaaaacaatgcaattacatggaaattaacatgctcctgaatgactyttgggtaaacaatgaaattaaggcagaaatttaaaagaattatgtgaaactaatgaaaacaaagaaacagcatgccagaatctttggaacacaactaaagcagtgttaagggaaaaatttatagtgccaaattcctacaccaagaagttagaatgacttcaaattaacaacctaacatcacacttagaggaactaggaaaaaaacaggagaaaaccaaccccaaagatagcagaagaaaagaaataaccaaaatcagagctgagctgaa

SEQ ID NO: 736002 - DNA, 652 bp, Homo sapiens
aagttgtttatcagttctaggagcctttgggcacacaataatagtggaagacatcaacaccccactggcagtgttagatagattattgaggcagaaaactaacaaagatatttgagacgtaaacttggacgcttgacaaaatgaacctaacagacatctacagaatactctaaacaacaaaatacacaatcctttcatatgcacatagcacatctaaaactgaccacttacttggcaaaaagcaattctcaacaaatttcaaaaaacctgaaattataccaaccacaccctcagaatacaggactataaaaatagaaatcaacctgagaagatctatgaaaacaatgcaattacatggaaattaacatgctcctgaatgactcttgggtaaacaatgaaattaaggcagaaatttaaaagaattatgtgaaactaatgaaaacaaagaaacagcatgccagaatctttggaacacaactaaarcagtgttaagggaaaaatttatagtgccaaattcctacaccaagaagttagaatgacttcaaattaacaacctaacatcacacttagaggaactaggaaaaaaacaggagaaaaccaaccccaaagatagcagaagaaaagaaataaccaaaatcagagctgagctgaa

SEQ ID NO: 736003 - DNA, 663 bp, Homo sapiens
atgccagaatctttggaacacaactaaagcagtgttaagggaaaaatttatagtgccaaattcctacaccaagaagttagaatgacttcaaattaacaacctaacatcacacttagaggaactaggaaaaaaacaggagaaaaccaaccccaaagatagcagaagaaaagaaataaccaaaatcagagctgagctgaaacaaatggagaccaaaaatccatataaaagatcartgaaaccaatagttggttatttgaaaaaataaataagattgacagaccactagctagattaatatagaaaaaaagaagatccaggtaaacacaatttgaaatatcaaaggtaacatatccaccaactccaaagaaatacaaaaaagccctcagacattgtattagtccattctcaatcagctgtaaagaactgcctgaggctgggtcgtttataaaaaaagatatttaattgactcacagttgtgcagggctggggaggcttaagaaatttaaaaatcatggaggaagggtaagcaaacacatctttcttcacatggtgacgggaaggaaaagtgctgaacaaagcggaaaaagcctcatataaaaccatcagatcttgtgagaactcactatcatgagaacaacatgagggtaaccaagcaccatgatt

SEQ ID NO: 736004 - DNA, 663 bp, Homo sapiens
atgccagaatctttggaacacaactaaagcagtgttaagggaaaaatttatagtgccaaattcctacaccaagaagttagaatgacttcaaattaacaacctaacatcacacttagaggaactaggaaaaaaacaggagaaaaccaaccccaaagatagcagaagaaaagaaataaccaaaatcagagctgagctgaaacaaatggagaccaaaaatccatataaaagatcagtgaaaccaatagttggttatttgaaaaaataaataagattgacagaccactagctagattaatatagaaaaaaagaagatccaggtaaacacaatttgaaatatcaaaggtaacatatccaccaactccaaagaaatacaaraaagccctcagacattgtattagtccattctcaatcagctgtaaagaactgcctgaggctgggtcgtttataaaaaaagatatttaattgactcacagttgtgcagggctggggaggcttaagaaatttaaaaatcatggaggaagggtaagcaaacacatctttcttcacatggtgacgggaaggaaaagtgctgaacaaagcggaaaaagcctcatataaaaccatcagatcttgtgagaactcactatcatgagaacaacatgagggtaaccaagcaccatgatt

SEQ ID NO: 736005 - DNA, 663 bp, Homo sapiens
atgccagaatctttggaacacaactaaagcagtgttaagggaaaaatttatagtgccaaattcctacaccaagaagttagaatgacttcaaattaacaacctaacatcacacttagaggaactaggaaaaaaacaggagaaaaccaaccccaaagatagcagaagaaaagaaataaccaaaatcagagctgagctgaaacaaatggagaccaaaaatccatataaaagatcagtgaaaccaatagttggttatttgaaaaaataaataagattgacagaccactagctagattaatatagaaaaaaagaagatccaggtaaacacaatttgaaatatcaaaggtaacatatccaccaactccaaagaaatacaaaaaagccctcagacattgtattagtccattctcaatcagctgtaaagaactgcctgaggctgggtmgtttataaaaaaagatatttaattgactcacagttgtgcagggctggggaggcttaagaaatttaaaaatcatggaggaagggtaagcaaacacatctttcttcacatggtgacgggaaggaaaagtgctgaacaaagcggaaaaagcctcatataaaaccatcagatcttgtgagaactcactatcatgagaacaacatgagggtaaccaagcaccatgatt

SEQ ID NO: 736006 - DNA, 584 bp, Homo sapiens
atggaaactttagcaaaggatcccctgaaacaagtgacgccaagccatttactgcaagcaaaggatggttacactgattcaggaatacagaaggtcaatagtagcctaatgctatgtcacaatgcctgtcattcacttcacttcctctcatcacctaggcaatacatcacctcatatcatcctaagaagaaggatgggggtagtacaataagatattttaagagagaaaggcatagagagtaagagagaaacagaacacattcgtgtaacttttattgtagtacattgttataattgttccattatattatttattgttaataacctcttgctgtgcctaatttataaattaaactttaacatagatatgtatgtataggaaaagacatacatagggtttagtcgtatctgttgtttcmtgcatccactggggatcttggtgcatattcccctcagataagggggaaactactgtaatatgaattttaagactcagtttccttatgtgcataatggagataataatatatacctcataaatgagacaacgcatataaattgcttcataccatgctgggcacaaa

SEQ ID NO: 736007 - DNA, 606 bp, Homo sapiens
attcttcactcactttttgttattttggaattttttgttgtttttgacttacttaagttcattgtatattctggatatcagccctctgtcagatgcatagtttgcaaatattttatcccatttttcaggttgtctgttcacgctgttgattatttcatttcgytgatcttcatttttaatacaggtccagagacctgtattatactatactgagaactcagaaaagttatactgaggagttaataaacatagtgagactgctcaccctgacaattgactacataatctctcgcattactgaaatcctcagggtttcttgtttttgttttcttactattaggtctccttttttctcaggccatcaaaatgcagttttctctcctactgcaagaagtcttttaacatgccacctgtaatctcacatcgtgtatctacttacccctaacccaaagccttgtcttccatattacttttttttttctattcattctcgattcctttctctaggtgattgtacaagaagatgtaaagaaattaagactttattccagccaagtaaataaagtagcttaaaatggttaggcagaagccaggaagtcaatggat

SEQ ID NO: 736008 - DNA, 633 bp, Homo sapiens
cagaaaaatacctttataatcctaatatatcacaattcctttagtgcctaatattgagggagcagcttttattcaagatggaaggaatattagatatcattcaatctagcttcctcattttacagataataaaactgaggatgagagtggtaaagtgatttgctcaaattcatgaacctgcctctcctaatattcagccaagtgtcttttccagaatgtcacagttccctgtataataagaatcagctttattttccacaagaataaaagaggttagagttagaaaaagaataagttttctggatacagagtgtcattgtgtctatgtgaaggaatgttagcaaaagtgaraaaaacaaaaaccttgtacagaataaaagaagttattcctggcaattgactgaaatggaaagaaatcataaaagacttgaatgacaggcaaatgaataatgtgatgagatatatcaaattttgactctactgagatcaaaaggaagaatagagtatagggaatgaaagatgatgtctggatttaacattcatttgggaatcatttcaaaatcttgagataaaaggttctttagaaataataaatgttgtgtttctttaatttttagggactgagagattcat

SEQ ID NO: 736009 - DNA, 618 bp, Homo sapiens
gcaaagtgttgcagatggatattatgtggctaatcaactgatattaaactagaaaaacatttctttctttattcctatgaacctaatgtaatcacaagcacctttacaagcaaaacagggagacagaataggagaatttgagaaagatacagctatagwagaaaggcacagagagatacaacattcttggctcagaaaataaaagctaaggtatgtgtgtagcctctagaggcttgaatgggcgaggaagctataatgactccatgttccttcttgcctcagagagaccttttatgtgctactacatctatctgggatactttccctccccacccactcctatgccacccccctaagccaacttctacctggctaccagggttgatataaaatattacttgcccagagaaaaactatctgaatttgcataatactagattgtatcccccctcccatcatgcattagtgttctgcaattatacattatatcactcgctactatttcagatcattaatatttgtgtaacaatttgtttacagagtttgttttctccaatagatttaagcactagagaatatgaggccagaatatatatccactttatttgttgtgatatc

SEQ ID NO: 736010 - DNA, 618 bp, Homo sapiens
gcaaagtgttgcagatggatattatgtggctaatcaactgatattaaactagaaaaacatttctttctttattcctatgaacctaatgtaatcacaagcacctttacaagcaaaacagggagacagaataggagaatttgagaaagatacagctatagtagaaaggcacagagagatacaacattcttggctcagaaaataaaagctaaggtatgtgtgtagcctctagaggcttgaatgggcraggaagctataatgactccatgttccttcttgcctcagagagaccttttatgtgctactacatctatctgggatactttccctccccacccactcctatgccacccccctaagccaacttctacctggctaccagggttgatataaaatattacttgcccagagaaaaactatctgaatttgcataatactagattgtatcccccctcccatcatgcattagtgttctgcaattatacattatatcactcgctactatttcagatcattaatatttgtgtaacaatttgtttacagagtttgttttctccaatagatttaagcactagagaatatgaggccagaatatatatccactttatttgttgtgatatc

SEQ ID NO: 736011 - DNA, 618 bp, Homo sapiens
gcaaagtgttgcagatggatattatgtggctaatcaactgatattaaactagaaaaacatttctttctttattcctatgaacctaatgtaatcacaagcacctttacaagcaaaacagggagacagaataggagaatttgagaaagatacagctatagtagaaaggcacagagagatacaacattcttggctcagaaaataaaagctaaggtatgtgtgtagcctctagaggcttgaatgggcgaggaagctataatgactccatgttccttcttrcctcagagagaccttttatgtgctactacatctatctgggatactttccctccccacccactcctatgccacccccctaagccaacttctacctggctaccagggttgatataaaatattacttgcccagagaaaaactatctgaatttgcataatactagattgtatcccccctcccatcatgcattagtgttctgcaattatacattatatcactcgctactatttcagatcattaatatttgtgtaacaatttgtttacagagtttgttttctccaatagatttaagcactagagaatatgaggccagaatatatatccactttatttgttgtgatatc

SEQ ID NO: 736012 - DNA, 598 bp, Homo sapiens
gtttgtgaggtcagagcagtgattagttaagaatcactagcacgtgaagatgtaagttgttttgaagcttccattttctccttctcttcaaaatcactcaagttgatcacaactagcacaggaggcctgtgttgagtttaggtgttacccccaggtgcatagtattgtcatcagagattttcttcaatcactaaagggagaaatatcgaaccagggatgcattctcagcattcaccaagtcaatcaggaaaccccatggagaaaaggattttttcctctrgtggaaagtagataatgctctaaatttctctccaggaaaagatgaaaaaggaagaacagattaaaaggaaaaggtttctgaaaggtaacataatcttcaaatatggagggggagggggagagagggaagatatttaacctgcagccacctctctgcagtgcttccgcagaaagcacagctcaaaactcgtcagcatccttctttgcagagcttcacttattttcttaacctcattctaactttgacccattccttttgttgagtcaaaaggatccagtaggaaccaagaataatttagaagtttttttgctttctaga

SEQ ID NO: 736013 - DNA, 590 bp, Homo sapiens
agattgataaatctagaaaaagattaggaatgatgagatgaatagattatcaatagatttcatgaaacaggttcgattcaatttgggccttgaatgatggtagagttaattattttggcaaaggcattgaggtataaaatgtttttctttaaaactgttagaatttattattaaaatgataaacttctttatcttttcagctggagggcttagcaatgcttccagcacatatgaaatcaycaataactcttagttgaattagtaaattacatgaccacaaaaaagtaaatctacttaaaaaaaacacacaaaatcccaccaccttgacaaaacttcatgatttttgttgatgatgctgttgttttgatttttatttcaaattcttcatttcttatttgtatagtttgaatagttatagtaataaagatataattttctttggttttataagttatataatggcacatacattttccatcttgatttagaatattcataattattctagtagcaaaagaataaataaaatggatgtattgtaatgtacatacctattctgtgttttttagataatggacgcatttctattc

SEQ ID NO: 736014 - DNA, 602 bp, Homo sapiens
tagaatcactatatattaataaaactatagttaatatatatcatattcttggagaaaaacatgcattaccatatatgaccctgtaattctgctcctaggtatatacccaagagaagtgaaaacacattccataccaaatcttgtatkagaacattaatagccatattatttataatagccaaaaaataatacctcacctgaggaatggaaaacaaaatgtggcgtatccatgcaatagaacattggccataaaaaaggaaggaaatactgatacatgctataacgtggatgaaccttgaaaacatgctgattgaaagcagtcagattcaaggccacatattgtatgatttcatttatataacatgttcagaataggcaaagcaggttagtgggtgccagaggctggggaggagggaatgggatgtaacttctaataggaatggggttttgtgggggtggtgaaaacattagaaattagataagagcaatggttgcacaattctgtgaatatattaaaaaccactgatttattttttcacttcaaaaatgattctaaagtacattagagagaataaagcttaaagaatagctgaggaattgtt

SEQ ID NO: 736015 - DNA, 632 bp, Homo sapiens
ctgtaaaagtggaacattatgtgctccctgtctgcttcagaatatgcaaggaaaatgaatagaattctcttaagggcttagagttgctaatgtgaatgatgagatgtaacaacctagaagttatacagttcattgtacatggatgtgcccccactgaattgaaatttttggagattagacgcgggaatcttcatttttaacaaacaattgtaggtggttgtaagggcaggagaattgctctcctcggagggagaacaggaactgtatcttttacatgttttgctcagagcccagcacatccccaatgcatgtggatgtttaaaactgtagttggtgatggatttagggtaaagttcagttgacttttagggaataagacccactacaacagatatgttatttttattaaagtacttgatagaggccacagattaarcctctaaaggaactgttcattccccttatttctgaatcacttgtcttctaggatatcaatgagatttgtcttggttttgttttatatttataacttatagcagaaataagactgtcacatatttctagttttatattacggttaccatagagtaccatctccaagtcattgtcatctcagtaaatgcttatgaaaa

SEQ ID NO: 736016 - DNA, 587 bp, Homo sapiens
ataaaatagaaaagtaaagtttcccataattccacacctagattatacttttaaaaaagatttatagctatcctagtggatgtgaagtggttatctccatgtggctttgatttgcatttcctaatgactaatggtgttgaacaacttttcatatgcttactggacatttttatatcttctgtggagaagtgtctgttcaaatcctttgcctatctttacattgggtcatttgcttttaatcgtttagttgtaaaagttattcataaattttggagactagtcccttatcagatatataatttgcaaatattttcttctgtggggtcgctttccactttctagatagtgtccctttaggtatgaaatattttaatattgaacaaatcgaattattgattttttctcttgtacttgtgcttttggtgtcataactaraaaacttttgcctaaaataaaggccataaagatttacacctgttttcttctgagttttatggttttaacacttacattgaggtttttatcctttttgaattacttttcatatttaatgtgaagtaaggatccatattaactcttttgcattt

SEQ ID NO: 736017 - DNA, 545 bp, Homo sapiens
gtgttaaattaatacttcttccttcaaccatcagcctttcttcatttctctatgcaataaacatatgttgtattgggcttacactgtgtgctagatacagttcacattatcattatattcactaaccattacagggatgaatgatatcatacagtatttacagtattaaaatggttatattatttgatcttagaatagcattgtaaaatatattattattgtcacttcacaaataaggaaatagaggcccggagagatyaggtggtttagacgtagttttgcatataggaagtagaaccaggactcaaggttttgtcctctgttcccaagcccattattctttttcctggcagacccaagggattcctacctttttattactgaggacatcttttattttatattttttctaaagattccttttattgcaagcaataaaaccagacacattagtcgtgctgccatcacaacaatctaattttagaacatttcatcaccccaaaacgaagccctgaggattagcagccaatccacaacccattctc

SEQ ID NO: 736018 - DNA, 644 bp, Homo sapiens
ctttcctgtcccaagctctatgcctgatgtgtaaattcaggacccaaaagggcacaaaaaagcaataactactaaatataaggaaaacaactctgtatacagcatgtataaagaaaagcaagatatatttggggagataaaagttgtaaaggcattaagatgtgtgttgagaaaaaataaatttgtgcatttaagaagttaaaaaaaaaaaaaaaaagcaacaaagtaaaacacactaccagggaaaattacttagccacaagggaagacaggaagaaaggcagagttataaaacaaattttttaaaactaacaaaatggcaatataagtctgtacgtgtcaatagtaataatggctatacattaactcaattattcaattaaaaggcatagagtggctgaatggttaaagaaacaagacccaactacacactgcctacaagaaatgaccttcacctataaaggtacataragagtgttagtgaaaggatgtcagatgatattccatgtaactggaaaccaaaataaagtaggtacaactatatttataccagataaaatagtctataaatcaaagactgtaaaaagagacaaataaggttactatataattataaaggtgttaaatcagcaaaagaacataac

SEQ ID NO: 736019 - DNA, 644 bp, Homo sapiens
ctttcctgtcccaagctctatgcctgatgtgtaaattcaggacccaaaagggcacaaaaaagcaataactactaaatataaggaaaacaactctgtatacagcatgtataaagaaaagcaagatatatttggggagataaaagttgtaaaggcattaagatgtgtgttgagaaaaaataaatttgtgcatttaagaagttaaaaaaaaaaaaaaaaagcaacaaagtaaaacacactaccagggaaaattacttagccacaagggaagacaggaagaaaggcagagttataaaacaaattttttaaaactaacaaaatggcaatataagtctgtacgtgtcaatagtaataatggctatacattaactcaattattcaattaaaaggcatagagtggctgaatggttaaagaaacaagacccaactacacactgcctacaagaaatgaccttcacctataaaggtacatagaragtgttagtgaaaggatgtcagatgatattccatgtaactggaaaccaaaataaagtaggtacaactatatttataccagataaaatagtctataaatcaaagactgtaaaaagagacaaataaggttactatataattataaaggtgttaaatcagcaaaagaacataac

SEQ ID NO: 736020 - DNA, 571 bp, Homo sapiens
ataacaacattgtattaaagatcagttcataaatttccacataattattgtagccatgagaataaagcatagcctactacattaaaagggccttacaaaatccaggataaattgtgtagaaatgcaactgtaccgatattttgtggcatttattttacttttccaaacaacacagttagagttgggtgggaagtgctggcacagaaccagggaagacagaaaactatgcatttgcaattggcaaaaatatacttttaaaattatctttttgcctaatatttctgggaaccaaaggaaaaaaactggggtggcaacaagtagaggatggggacactagagatgacggcaaatgctctacayccccaaattctgaaatatttgtaaggatggtcattgcataaaaggaatttggtctgtgtactttcagggttctatgatatatatcgtttggatattgatcttcagcaaattaagttaattcttggtgctcaataaaatcacaccaaattctgtgtaacctattttataaataaaactgttagtaaaagccctatccatttaaacatctgag

SEQ ID NO: 736021 - DNA, 508 bp, Homo sapiens
tttatattagtaagttatcaatttgaatcacaatttttagcacaatctcagcacattttttaaaaagcaaatacccattaaagaatacagaagcagaagcaaagagaccctaacaaaggaaagtaaataccatgattaaaattattttaatctttacataatggctttacataattaagttttacataatggcttcaaaagactggccagattccatgttatctataataaacagcaaaatatctgctggccgcaagaccaaataactattatcagcmaaaatgctaaaataggacatgcaccacaggcgagagaaccatgcagttttacctatcctacaaacagattttcagtcactgacaatgccaagttgaagctaatatattataaaaacctgaacaaagttaatttgaccaaatattgtcggcctttatgatctcaaaactatgccctgcagataaacattagctaatttcttctcaaatgcttaaatgaggttctgaaatgt

SEQ ID NO: 736022 - DNA, 583 bp, Homo sapiens
cacacacacacacacacacacacacacacactcacgggtcgattggtttctgtttactgagtgtcagtaagtgacccggctatgttacctttctgagccctggtttcgtcgtgtgtcgaatgggactgttattcccaacctcccagggttgttatgaggactgaatatgagctgtgattagtgcctgccrtatccttggtacttagtaaatgttggtttcctttttctccccattcctccccctggctttttttaaaaaacaggactcaggagccaacctcatcatagcttcttggccacctgtgtcttcttaccattgttggatttacccaaattaacctcttgggattactacctaagtaaataagagcttaaaagtgagctcttattccaggcagtttaggaaggggtctttaggtggagctcacatggcaattatcacagagaaggagggagaaaggggttttaatgtttatgagactcatatttcctctctcagttgtatgctagcccctccctcctgccttttcctcccagagttctagaatcatgcacttttagaactagaggtgccctggtctgg

SEQ ID NO: 736023 - DNA, 693 bp, Homo sapiens
gctcttataactgattctgggaaactgggatccctaggagagattccactgagtcattcattcaacaaatgcccattgcgtacctactgtgtgccatagtgtgacgggctcagtatattgcctcattcattacctcacaaggttatctgttaacagccacaagtcagaggcttttgacgtacagggtcccgggagagccaaaatagtatttgtttgtttggaataataaaagctgtcttcccaggccacaggaattaaaactaggagtgctaaatcagcaattgtctagccttgcctgagcttctcaaactgtactttagaattgcttgggggaacttgttagaagtacaaaccttggccagaacctyaaagaaccagactcaggcaatccaggatggggtccaccaatccaaggttttaaaaacaagaaccagatggggataggtgatgagttagccactggggattcagaaacccgagagggtggggtggcagtagttgggctttgcaggccagactggtctgggacactttgtgatgaacacaaaccttccctcttccattttgacctttctgccctggtgggctgcttttacgtaagagtattatttcttccttttgtaggcaaagcaaaaagtgtgagaaccagctgctctaaataaaacaattgaaggtggagttcagattgagagc

SEQ ID NO: 736024 - DNA, 658 bp, Homo sapiens
cccacaggcgctgactaggagcccacggcattctccctgctctccctatcataggagaaccgcaggcagccaactgtcccttccacgccccaatggaacctctctcctctcctgcccattgtctacgacagatcagagatggctctttctatgcaggggtggggacccagccatctctatcagctctgccggcactgcaggggtgactgactrgaggcgggaagccctcctgggcctcaaataactaggcccaagctttgactccctcatggctgctctagggactgcaagggaggacacgggcttggcctttcctaaagggctgctttctttcgaagtcaaggggatgctattttcttctttgtgtttctttggttctgacatcagaattctcctcagtgcagataacattgccctctggaatgggtgagaatcctaacacctgggttttcggttctgcccagcgtggcttaagtctccaccttaagtgaatctcacctgagacagctacagggtttgttttctggggaaaggaattaatgacttgagcagcactcacgggtcttaaacttagcatacagtttcaaataacccatgcccccacttattgaccccttactgttctaagcacttcatactttaaactgacttcatcctc

SEQ ID NO: 736025 - DNA, 642 bp, Homo sapiens
cttttttttgagacggagtctcactctttctcccaggctggagtgcagtggtgcaatctcggctccctgcagcctggtcttgaactcctgacctcagatgatccacccacctcggctgcacacagtgattttgctcattttagatactagaactttttaattaaaaaaaaaaattctttttttgaactgcagtgcagtggcattatctcggctcactgcaacctctgcctcccaggttcaagcgatcctcctgcctcagcctcttgagtagctgggactacaggcatgcaccaccawgcccagctaatttttgcatttttagtagagacagggtttcactatgttggccaggatggtcttgagctcctgacctcaggtgatccgcccacctcagcctcccaaagtgctgggattacaagcatgagccactgcgcctagccaaaaataaataaataaataaatttgagacaaactctaactctgtcatgcaggctggagtacagtggcagagtcacacctcactgaagcatgagtctgggagctgaggctgccttgagccatgattttgccattgcactccagcctgggtgacagagaggtcttgtctcaaaaaatccatccatccatcaatcaatcgttcca

SEQ ID NO: 736026 - DNA, 642 bp, Homo sapiens
cttttttttgagacggagtctcactctttctcccaggctggagtgcagtggtgcaatctcggctccctgcagcctggtcttgaactcctgacctcagatgatccacccacctcggctgcacacagtgattttgctcattttagatactagaactttttaattaaaaaaaaaaattctttttttgaactgcagtgcagtggcattatctcggctcactgcaacctctgcctcccaggttcaagcgatcctcctgcctcagcctcttgagtagctgggactacaggcatgcaccaccatgcccagctaatttttgcatttttagtagagacagggtttcactatgttggccaggatggtctygagctcctgacctcaggtgatccgcccacctcagcctcccaaagtgctgggattacaagcatgagccactgcgcctagccaaaaataaataaataaataaatttgagacaaactctaactctgtcatgcaggctggagtacagtggcagagtcacacctcactgaagcatgagtctgggagctgaggctgccttgagccatgattttgccattgcactccagcctgggtgacagagaggtcttgtctcaaaaaatccatccatccatcaatcaatcgttcca

SEQ ID NO: 736027 - DNA, 642 bp, Homo sapiens
cttttttttgagacggagtctcactctttctcccaggctggagtgcagtggtgcaatctcggctccctgcagcctggtcttgaactcctgacctcagatgatccacccacctcggctgcacacagtgattttgctcattttagatactagaactttttaattaaaaaaaaaaattctttttttgaactgcagtgcagtggcattatctcggctcactgcaacctctgcctcccaggttcaagcgatcctcctgcctcagcctcttgagtagctgggactacaggcatgcaccaccatgcccagctaatttttgcatttttagtagagacagggtttcactatgttggccaggatggtcttgagctcytgacctcaggtgatccgcccacctcagcctcccaaagtgctgggattacaagcatgagccactgcgcctagccaaaaataaataaataaataaatttgagacaaactctaactctgtcatgcaggctggagtacagtggcagagtcacacctcactgaagcatgagtctgggagctgaggctgccttgagccatgattttgccattgcactccagcctgggtgacagagaggtcttgtctcaaaaaatccatccatccatcaatcaatcgttcca

SEQ ID NO: 736028 - DNA, 636 bp, Homo sapiens
catccaaattggaaaggaagatgtcaaattatgcttgtctgcagatgatatgatcttgcatttgaaaaaaaacctagattccataaaaaactattagaaatgataaactcagtaaagttgcaggatacaaaatcaacatagaaaaatcagtagtatttctatatgccaacagtgaacaatgtgagaaagaaattaaaagagtaatcccatttacaatagcaacacgtaagataaaatacccaggaattacccaaataagtgaaagacctcaataacgaaaactataaaacactgatgaaataaattgaagaggacatccaataatggaatgacattccaggatcatggattgaaagaatcagtattgttaaaatgtccataatattcaaagcaacctatagattcaatgcaatccctatcaaaataccaatgacattgttcacataaatagaaaaaaaatcytaaaatttatatggaaccccaaaagacccagtatagccaaagctatcctaagccaaaagaacaaaactggaggaatcacattacttgacttcaaattatactacagagctatagtaactaaagcagcatggtactggcataatgatggacacatagacccagtggaacagaata

SEQ ID NO: 736029 - DNA, 598 bp, Homo sapiens
gcgttctcatccagtctctgttaccaatgggctgtgggatccagcccctacctcagtcctcagccggacatttgcctgtggccttgtgcagcacctgcggccttggcagggtggctgagggtggctgaaacccaggttgtgggaggatctggaaggagcctggctcctgtctccccatgtccatgtcagctcttggcctgacaccaggagaccctcagggttgggggtgtcacccccccttcctgcagcctccgcatcctcctcccatgccccactctgcttttctgctggctggtgcaggagacaatggctgtggggcatgtgggtgcacgtagggggggcctgcgtggcttgtgtgatttycccagacaggcaggcgtgagagggagaggaaattattctgtctaaaatctcagagatgagtccttgagagctggcagagtgactgcttcccgtctgggtggggaggcaggagacagggtgggccgttcccaggggcaagagcaaggcaggggagggccagtcctcagggagaatcccaagaaggccacagcagcacaaagataagccctcatatttcccacgtgtcacctggaca

SEQ ID NO: 736030 - DNA, 456 bp, Homo sapiens
acatactacaatatccccattgaaagggtacagttcatgagtttcgacaaatgtatacatttatgtaaccaccaccccggtgaagatgtagaataatccaccatcccagaaagttctcttgtgggcgtgggattttcgaagctcyccaggcgattctatggtgcagcggactctgagcatcatggaggctcactcaacaatctctgctttagaatctcagagaggttgtccaggacagcacttctcacactttagcatgcatctccttggatctggctgaatgcccattccatcccagagtggggcccggaaccctgcattcctaacaagcccaaaccacactttgaggctctgctacaagtctctcattttggaggtgaaggaaacggaggctgagagtgttgatgtgagtggcttgcaaatcctgattctgaagctcctggactaatgacaatc

SEQ ID NO: 736031 - DNA, 659 bp, Homo sapiens
atgtgaaattacccagtccaaaaagaaaaaagaacaaagaaagaagaagagttaagaaagcctaagacacttacagtacaccaacaagcaaaccaatgtgtgcattatgggtgtctcgggagaagaaaaaaaggagctgaaagcttatttaaggaaatagtggctgaaaacttcacaaatctagaaagagtaatggacatccagattcataaagctcaaaggaccccaaataagattaatccaaagaaacatacattaagatacattgtaatcaaactgtcaaaattcaaaaacaaaaagaactttaaaagcaactcgtatctcccacaaggatgaaaagcaacttttcatgtacaagggagcccccatcagactagcagtgaacttcttagcagaaactttgcaggccagagaagggactgggataatgtattcaaagtgctgaaagaaaaattgccaaccaataatcctatacttggcaaaaccgtccttcaaaaatgtagatcaagactcccaaacaaaygaaagccaaggaaaactgtcattactagtcttttcttaaactaaacgctaaagacaggtgaaatgaaaaaacacaaaacatcaatgtgaaaacacaggaaagtataaaactcactagtaaaggcaaatacataaac

SEQ ID NO: 736032 - DNA, 622 bp, Homo sapiens
gttttactctcactaatctatgacattagatcatttatatcaattttataaatcccttttcaagctgggtcaacgtcaaccctcacatagtccccgaataactattctgaattaaatatacatatcaattctctcctaccccgcatcagtactattttttttttttttttttgagacagagtctcgctctgttgcccaggctggagtgcagtggcgcgatctcagctcactgcaagctctgcctcctgggttcacgccattctcctgcctcagcctcccaagcagctgggactacaggcacccaccaccacacccggstaatttttgtatttttagtagagacgggctttcaccatggtctcgatctcccgacctcgtgatccgcctgcctcggcctcccaaagtgctgggattacaggcatgagtcactgcgcctggccagtactatgttttaaaataaattaatttagatttcaatgttactcacatctttgttattatggaccctaagagaagtatttccagcctatgtcatccagagtcaggattttaagcttaataaggtatgaaagactgtaactaccaacaaagcctccccaacccctcctcccctcaagaaagg

SEQ ID NO: 736033 - DNA, 610 bp, Homo sapiens
gtattagacaattcaaatcacgtgtgatctttcaggaacacatctcttgtgtatagagagggacatcctcatacaaatacctcgcttattcactcatgtgttatccacagtgaactattattaatgggtaacgttgcatgtcccaccttatttgctcctcaccttatatagcaggattatcatccccactttgtagatgagaacactgaggcaagaggttaagtaacttaggtcgaagaacattgctggtgacagcatcggcatcaaagccaggtctgtgtgacattctctttactctgtcatagaacctccctacatagcccactctcctgactcctaacaagaactaatgattctgtcactccaagaatagcatttccagagtgacacccatgaactgagcccacgctggcctgtmcttagtggaaattattggccactttattgtgcttaagcatatgatgggcaactgaattaggtgactcagggtattaaagctggaagggtctatatagatcatttagcatcactctactcatttttgaggtgagaacattaaaactggccagagtcacaccagtgagttgcactgctaaggactgaacatggg

SEQ ID NO: 736034 - DNA, 398 bp, Homo sapiens
ctccagagcagtgagaactatggaggaaatgtgtgattatctccaacaatgctgaaaagtctattttttaaaaatcgactgttcttaaggaaatactagtagctgtacattcctctatcatgatgactgtatctgtgtcagcactaatgtcagtatsaggcttcactaggcctcagagaaggaaatcacattgaaccagaaacaagatggctgtgctcactgttgcaactgttgggtttgaaaataattactgaatacgttaggcaataaattagacatgaattaggaaaggaagagattaaactgtctctcagtagcttaaatgattccaagacagaaactcataatagaaatcattgaaaaaacacacaaataatatgaaaatgtgataaattatt

SEQ ID NO: 736035 - DNA, 655 bp, Homo sapiens
acacttcacctgaaatgaaccagttctgttatataattaatctaaagtaattcctgatataaatagtgtaacatatatctagacatttgtttcacattatttttgatgtataaatgagtttgctgaggtagttctctgtgtgtgtgtatatatatatatatatatatttgacatcacaatttgaatatttcatagaaataccaaaattaagatgacaagaatttacttttgacccaatcaagagatggccaggcactctctttatcatyttttgataagtttggaaatcatgactatatcattggttgcctcatttttttgtttcacttttcctggttctttattattttaacctgctaaatatctttaagatatgctcacttttttctatcttcattgctacttcttaggtaataccaccatcatctctctcctagatgggtaaaatagttcttatactgcttttctgttatttctctgtggcttagtcagcctaggctgctataacaaaacgctgtaggctgattggctgtataaatttgtctcacagttctataagtccaagatcagagtgtcaggatgctaggatctcataagggctctcttccttatcacacactatagcccccttgttgtatccttgcatggcaaaaga

SEQ ID NO: 736036 - DNA, 551 bp, Homo sapiens
tccaacaaggaacagtgtggtatgaaggaacgaacaagattttaaatcaaacagacctaggttcaacttctgcctctgtcagaagctatttgtgtgaccatgagcaaatgacctacctgactttgcttcaggtttttttttttttttttcagtaaaatactaccttgaaaaatcttcaaaggattagatataatatagagagttgatcttcattatatgtggattctgtatttgcaaatttgcctactcattmatatgcatttgtaacaccaaaataaatattgtgttcctttcatggtcattcatggatatgtacaaagcagcaaaatttggagtcacctaacatgcatgttcccagctgaggctgaacaaggctgtctgtgctctgccttcttgtttgactttgcctactataagtagtatggtctagtcagtcccacagaaacacacataagacaattttatatatcgatcagtttacaaaaatgttcagaccaaaggcttataggaacctaaccttgtgtgtctagtaggagcagtgcttaagtatt

SEQ ID NO: 736037 - DNA, 652 bp, Homo sapiens
tacttgctcttttctgccctctctattgatacgatttagtaagatatccagttataggatggctccactctctgacagcaccaaatccacatcaaactcttactttttttggacccctctccaaaatcaccagacagaggacaaatgctctaattagttcttttgaacaccctcttactgagacaagtcagttacctatgccatgtattctccctcactgcagtgagaaataaagccatttgtttacaccctgtgtgtgttcctggtggtctttgactggagggcattaacaacagatgtaattagcaggtaatagtggtggtgttgacattatagwtacatttttccatctgataaccatcccaaatggaataacaaaagcaatttgcagggtgtagttccctcatagacagttaatttttttgtcatgagtgtgttgcaggttctttattgttttgcatagtactgcaaagagttaaaatgtggaaactttactgtattaatcgtgatattttattttctgatgttttgacatgttgaagccttgccggctctaaagggattgtccctggaagggttagcttattcctagaaatagcaaacaactccctgtgtgtgtgccattcattcaaaccaagcaagccagagtcca

SEQ ID NO: 736038 - DNA, 652 bp, Homo sapiens
tacttgctcttttctgccctctctattgatacgatttagtaagatatccagttataggatggctccactctctgacagcaccaaatccacatcaaactcttactttttttggacccctctccaaaatcaccagacagaggacaaatgctctaattagttcttttgaacaccctcttactgagacaagtcagttacctatgccatgtattctccctcactgcagtgagaaataaagccatttgtttacaccctgtgtgtgttcctggtggtctttgactggagggcattaacaacagatgtaattagcaggtaatagtggtggtgttgacattatagatacatttttccatctgataaccatcccaaatggaataacaaaagcaatttgcagggtgtagttccctcatagacagttaatttttttgtcaygagtgtgttgcaggttctttattgttttgcatagtactgcaaagagttaaaatgtggaaactttactgtattaatcgtgatattttattttctgatgttttgacatgttgaagccttgccggctctaaagggattgtccctggaagggttagcttattcctagaaatagcaaacaactccctgtgtgtgtgccattcattcaaaccaagcaagccagagtcca

SEQ ID NO: 736039 - DNA, 653 bp, Homo sapiens
attacatgtaaaatcttacctacaatgaacagttatcaatctcaaaaggagaagaattagaagaatgtaggtgtataatctttacagaaaagttgaggtttttggctaaaatgtattagacaacatataatgggaaaagttttgaggagaaagtaaacctggagttttgtttttttttttttttcagtcattcagcaggtacgtgtaaaatgcctcctaagtgccagaaacacttgtaggttctaagattacatacagcagtgaagatactccttttctccwgtgaattttatttcattaggatggaaacattcaacagacaaacaaataaggcaataacaaaattctgataaatgcaataaaatgggaagaggaaggagcaagtttggagtggggaggtacattgcaaacagaatatttgagcagagatctgaaaggcatgagaaactgagtagaaagcttatctgcaggttagcatttcaggcaaagggaagagacgctacaaataagttagctgaaactttgctggaatgtttgatcaccccgagtgttcttggagtgtgtgatgaaatggagtatgagagagaagggagtgacaacacacgagtattcaggaggtagctggggaggctagaacatggagagtcttataa

SEQ ID NO: 736040 - DNA, 653 bp, Homo sapiens
attacatgtaaaatcttacctacaatgaacagttatcaatctcaaaaggagaagaattagaagaatgtaggtgtataatctttacagaaaagttgaggtttttggctaaaatgtattagacaacatataatgggaaaagttttgaggagaaagtaaacctggagttttgtttttttttttttttcagtcattcagcaggtacgtgtaaaatgcctcctaagtgccagaaacacttgtaggttctaagattacatacagcagtgaagatactccttttctccagtgaattttatttcattaggatggaaacattcaacagacaaacaaataaggcaataacaaaattctgataaatgcaataaaatgggwagaggaaggagcaagtttggagtggggaggtacattgcaaacagaatatttgagcagagatctgaaaggcatgagaaactgagtagaaagcttatctgcaggttagcatttcaggcaaagggaagagacgctacaaataagttagctgaaactttgctggaatgtttgatcaccccgagtgttcttggagtgtgtgatgaaatggagtatgagagagaagggagtgacaacacacgagtattcaggaggtagctggggaggctagaacatggagagtcttataa

SEQ ID NO: 736041 - DNA, 659 bp, Homo sapiens
tgagtgtttatccaaatgaaaataaatgaatatatcaaagagatacatatactcctatgtttactgcagcactattcacaatagccaagatatggaatcaagctaagtgcccatcaaccgataaatcgataaagaaaatgttgtgtgtctctgtgtgtgtatatacacaatggaatattagtcaaccatcaaaaatgatgaaatcgtgtcatttgcagtgacatggatgcaactggaagtcattattttcagtaaaataagccaggcrtagaaaggcaaacattgcatgttgttattcatatgtgggagtttaaaaagtagatcacatggaggtagagaatggaatgatggatactggaggtttagaagggtatatgaactagggatgggggcgatgaagacagacaggttgatgggtacaaacatacagttaaataaaaggaatgcatcctaaggtttgatagcagagtggagtaattattattaacaaaaaggtattgtgttcttccagatagctagaagaggtgaccagaagtatacccaatgcatagaaatgatagtcaggtgatgggtaccctaaatatgctgatttgatcattgtccattctatgcatgtaacaaaatttcacatgtaccctataaatatgtacaaatataat

SEQ ID NO: 736042 - DNA, 659 bp, Homo sapiens
tgagtgtttatccaaatgaaaataaatgaatatatcaaagagatacatatactcctatgtttactgcagcactattcacaatagccaagatatggaatcaagctaagtgcccatcaaccgataaatcgataaagaaaatgttgtgtgtctctgtgtgtgtatatacacaatggaatattagtcaaccatcaaaaatgatgaaatcgtgtcatttgcagtgacatggatgcaactggaagtcattattttcagtaaaataagccaggcatagaaaggcaaacattgcatgttgttattcatatgtgggagtttaaaaagtagatcacatggaggtagagaatggaatgatggatactggaggtttagaagggtatatgaastagggatgggggcgatgaagacagacaggttgatgggtacaaacatacagttaaataaaaggaatgcatcctaaggtttgatagcagagtggagtaattattattaacaaaaaggtattgtgttcttccagatagctagaagaggtgaccagaagtatacccaatgcatagaaatgatagtcaggtgatgggtaccctaaatatgctgatttgatcattgtccattctatgcatgtaacaaaatttcacatgtaccctataaatatgtacaaatataat

SEQ ID NO: 736043 - DNA, 539 bp, Homo sapiens
atcgttcatatgcattattccgaatcctctcaaccaacaccccttcatggtagattaatatcatcattatagataagaaacatgaagttcagagactggagtgacttccagagctggggtctgaacctggtgtcaatccatctgggctataggccacgtagtgtggctttctcccccatggatttatttgtgagtatcctatgaaatgggataggaactaagtgacaggtaaattgtgaggtgctggcaagtttctattttaaattttattggaaaaaaatcaaaagattaatcattgatgactaagtgatttttwaaaaaaaaaatctggcattttttaatagttctgttgcattatcatgcaccttccatacgttcacgtatttagaatgtacggttcactggtttttagtctattcagagttgtccattcattaccacaatccattttagaacattttcatctctccttagcagtcactacctggctcccccagcctaagcaacccccgacctactttctgtcttcttggtttcgc

SEQ ID NO: 736044 - DNA, 581 bp, Homo sapiens
ggctctacccgtcagcttcaactgcctaaatttgatccagggctggtgatctggagcgggaggacattctctcatgctaggcagggggtgaggagaagcagtagcttcagcagtttgagctcctgggccaggagtggccacttaacaggtgacaatggccaagtccagagtccagtatccaaggctgggcacaccagtggagccagtaaaagcatctagtgttcaatggcagaggcattcatrttctccctgtccagtcttgccatttgatatttgtcccaggcctagttcttagccctcctggactccttgagctacccttttaattcacctcctgtattagtctgctctcacactgctaataaagacatacttgagaatgggtaatttataaaggaaagaggtttaattgactgacaattcagcatggttggggaagcctcaggaaagttacaatcatggagtaaggcaaaggaggtgcaaaggcatgtcttacatggtggcaggcaagaaagcgtgtgcagggaaactgccctttataaaaccatcagatctcatgagacttatttactatcatgaaa

SEQ ID NO: 736045 - DNA, 549 bp, Homo sapiens
ggaaaagatgaagaaagatcttttggattttgaagccctggcttgtaccagggagagggagaggccagcctcaagagatacactgggctcgtttggagacacagggcccggccccaccccatctctagaaccctcaccatgataagttcccatctgtaaagtggaggtgatgataatgccagtctcactatgatkcaacaccagtgggggctgcagatgctggaagtttcaaatcgtattgggaatgacatcacacagatggctcctggaaccaggccacgtggataagccgcccaaatggacaggcagtagtgatcttcctctggcataatgagaaaggggctcagtgatgggaaggtaatttagtccctggaccagctgagctgggctggtagaaaccttccttcctctttggaaactggaagtgagaggcaggcagctggtaggtctcccaagaggcgtgaaacctagtagagtgggttatttatgcaaattacagagaaaccccatgttataagattacgtctcctgagctgtttcttttctgtc

SEQ ID NO: 736046 - DNA, 457 bp, Homo sapiens
accacctgccagctgctcagccccaggaacgttacttcacaccatgggacttggtgggacctggagacctccctttccaaaccctctctctctttcattgaccatcccctcagatgggcttgctgatggccctccttggtggtctctttgttctctgactgtgggagccacttgctcagcacctggtcacctcacytgctccccagagcccttccacatgtcactgtgtcacccttcaggggacacagccttgagggcagggcaaggacttctcccggcccatttcagagctctgcttcctcttggccttccctcaaagaccctgactttatctgggggtacatttagctctcagtccctcggtcactgagccttggggaagcgtgggtcctcagctctctacggactcctccagggctccagggagctgctgctctagaaccaattatccataagc

SEQ ID NO: 736047 - DNA, 553 bp, Homo sapiens
gaattacaaaagaaacctactgaagaggaatgcaaataaagtaatttagctagttgactttccttcaaattttgtgtttgaaccaatattaaagtgaacattactgctgaattatttattatgtaagtagaaagaaatcaatacccttgagatacacccattatggaatcagatatttaagaccaaaagaaaacatttctggaagattttaaattgcaagacaatgaagtcactctatgtattgtcagaaagcaatagaggtgtcagaaatttttgcaatactaaaggaaaatamagaataaagtgacactggcattttttgctgacagggtaaagacaattcacatcaaagaaatgatgtgtataggcattttaaactcaactcagcattccattgccttggcaaatggctccagtcagaaacctaggagtcatacctgattgtttttcttctctgaacccccatatccatccaattagtggatcttatagacactatctccaaaatacatcatgaacccaaacactttcttgcaacttggctgctaccatc

SEQ ID NO: 736048 - DNA, 553 bp, Homo sapiens
gaattacaaaagaaacctactgaagaggaatgcaaataaagtaatttagctagttgactttccttcaaattttgtgtttgaaccaatattaaagtgaacattactgctgaattatttattatgtaagtagaaagaaatcaatacccttgagatacacccattatggaatcagatatttaagaccaaaagaaaacatttctggaagattttaaattgcaagacaatgaagtcactctatgtattgtcagaaagcaatagaggtgtcagaaatttttgcaatactaaaggaaaatacagaataaagtgacactggcattttttgctgacagggtaaagacaattcacatcaaagaaatgatgtgtataggcattttaaactcaactcagcattccattgccttggcaaatggytccagtcagaaacctaggagtcatacctgattgtttttcttctctgaacccccatatccatccaattagtggatcttatagacactatctccaaaatacatcatgaacccaaacactttcttgcaacttggctgctaccatc

SEQ ID NO: 736049 - DNA, 594 bp, Homo sapiens
agccagtgaaataaacacttggatctctttccttcactttctctgatgtgcttctggggcatccaagcggctgattccaacaggaggccagagggcaggttgacacagacctgtctctaagatgcagggcagggggcagggtaccagagtggagaatggatctgcagcacatgtgttgatctcagcttgctttttacatttaacaatagatcattgttgtattgtcatttaaaagaatactccatagtattcagttgtactgttcatctcatcacttaccaaaaatmatttaggttatttcagggtttttgctattaccaaaaaggcactatgaacatttttgtagaaataattttgtgtggttgtccagttcaccaatacaataaattgcttaaagtagaattgccgatttgaagagtgtgtgcattttaatgtagatagtttctgtcaaattacattctaccagtagctttctgatatcccctcaaccaacactgggtattgttcatcatgaaatccttgccattctgacaagtgagaaaggatttattgggattttttcactctgagttcagttgagcatctttacatggt

SEQ ID NO: 736050 - DNA, 594 bp, Homo sapiens
agccagtgaaataaacacttggatctctttccttcactttctctgatgtgcttctggggcatccaagcggctgattccaacaggaggccagagggcaggttgacacagacctgtctctaagatgcagggcagggggcagggtaccagagtggagaatggatctgcagcacatgtgttgatctcagcttgctttttacatttaacaatagatcattgttgtattgtcatttaaaagaatactccatagtattcagttgtactgttcatctcatcacttaccaaaaataatttaggttatttcagggtttttgctattaccaaaaaggcactatgaacatttttgtagaaataattttgtgtggttgtccagttcaccaatacaataaattgcttaaagtagaattgccgatttgaagagygtgtgcattttaatgtagatagtttctgtcaaattacattctaccagtagctttctgatatcccctcaaccaacactgggtattgttcatcatgaaatccttgccattctgacaagtgagaaaggatttattgggattttttcactctgagttcagttgagcatctttacatggt

SEQ ID NO: 736051 - DNA, 660 bp, Homo sapiens
tatggatcatgacagatgtttccccccacataaactcattaacgctcacaacagactacggtaggactaggtaagtagatgtttcaagtttgagaaaatgtattagagaactaaagtcagggaatgtaggggacctgcctgaggctatacagccagyaagtggcaaagctataatcaaatccaggtttcacttaatcccaaagttcctcaactttagatcattctttgttctaaatctatattcataattagaacaattctagaagtaattggagaaattatcaatgtgtttgttaaactctaaaacttagaggctaagcacacttccctttttcttttttctttttcctttgaccttgaaactcttttagttatgtattgttctcagttaatctcaattaattaatatgggtctcaagaatgttttatctttcttcattttacttttacttacatatttatatttttattgtggtaagaacacttgacatgaggtaaactctcttaacaaatttgtgattgcataacacagtatgttaactataggcgcagtgttggacagcagatctctaaacttactcatctggtttaactttatacccaatcaacagcaacttcacgtttccccctcccccacagcccctaaaagccaccattcta

SEQ ID NO: 736052 - DNA, 660 bp, Homo sapiens
tatggatcatgacagatgtttccccccacataaactcattaacgctcacaacagactacggtaggactaggtaagtagatgtttcaagtttgagaaaatgtattagagaactaaagtcagggaatgtaggggacctgcctgaggctatacagccagtaagtggcaaagctataatcaaatccaggtttcacttaatcccaaagttcctcaactttagatcattctttgttctaaatctatattcataattagaacaattctagragtaattggagaaattatcaatgtgtttgttaaactctaaaacttagaggctaagcacacttccctttttcttttttctttttcctttgaccttgaaactcttttagttatgtattgttctcagttaatctcaattaattaatatgggtctcaagaatgttttatctttcttcattttacttttacttacatatttatatttttattgtggtaagaacacttgacatgaggtaaactctcttaacaaatttgtgattgcataacacagtatgttaactataggcgcagtgttggacagcagatctctaaacttactcatctggtttaactttatacccaatcaacagcaacttcacgtttccccctcccccacagcccctaaaagccaccattcta

SEQ ID NO: 736053 - DNA, 660 bp, Homo sapiens
tatggatcatgacagatgtttccccccacataaactcattaacgctcacaacagactacggtaggactaggtaagtagatgtttcaagtttgagaaaatgtattagagaactaaagtcagggaatgtaggggacctgcctgaggctatacagccagtaagtggcaaagctataatcaaatccaggtttcacttaatcccaaagttcctcaactttagatcattctttgttctaaatctatattcataattagaacaattctagaagtaattggagaaattatcaatgtgtttgttaaactctaaaacttagaggctaagcmcacttccctttttcttttttctttttcctttgaccttgaaactcttttagttatgtattgttctcagttaatctcaattaattaatatgggtctcaagaatgttttatctttcttcattttacttttacttacatatttatatttttattgtggtaagaacacttgacatgaggtaaactctcttaacaaatttgtgattgcataacacagtatgttaactataggcgcagtgttggacagcagatctctaaacttactcatctggtttaactttatacccaatcaacagcaacttcacgtttccccctcccccacagcccctaaaagccaccattcta

SEQ ID NO: 736054 - DNA, 660 bp, Homo sapiens
tatggatcatgacagatgtttccccccacataaactcattaacgctcacaacagactacggtaggactaggtaagtagatgtttcaagtttgagaaaatgtattagagaactaaagtcagggaatgtaggggacctgcctgaggctatacagccagtaagtggcaaagctataatcaaatccaggtttcacttaatcccaaagttcctcaactttagatcattctttgttctaaatctatattcataattagaacaattctagaagtaattggagaaattatcaatgtgtttgttaaactctaaaacttagaggctaagcacacttccctttttcttttttctttttcctttgaccttgaaactcttttagttatgtattgttctcagttaatctcaattaattaatatgggtctcaagaatgttttatmtttcttcattttacttttacttacatatttatatttttattgtggtaagaacacttgacatgaggtaaactctcttaacaaatttgtgattgcataacacagtatgttaactataggcgcagtgttggacagcagatctctaaacttactcatctggtttaactttatacccaatcaacagcaacttcacgtttccccctcccccacagcccctaaaagccaccattcta

SEQ ID NO: 736055 - DNA, 621 bp, Homo sapiens
atacatgcaaacatctccacaaaatactaacatgtaaaatttaagaacacattaaaacaattatacaccgtgaccaagtagggatttactcctgggatacaagggtggtttaacatacacaaatcagttactgcgatgtactacattaacagaatgacggaccaaaaacatataatcatcatgatagggcagcagaagagcatctgacaaatttcaacactctttcatgacaagaaatgctcagcaatttgatttagaagtaacacacgtctacacaataaagggcatatatgaagagcccatagctaacatcatactctaaggtgaactgctgaaatttttcctttaaattcaggaacaagaccaagatgtccgctttggcaatttgtattcaatakgcttctggaagtcttagccagagcaattagacacgaaagataaataaaatgcaaccaaattgcaaaggaaaagtaaaattgtctctgtttgcagatgacattatattaaatattaaaaattctaatcgcaccaccaaaaacttattagaactaataaattcagtaaagttacaggatacaaaatcaacatacaaaaatatttttcattttatacactaaaaat

SEQ ID NO: 736056 - DNA, 716 bp, Homo sapiens
catctttgtggcataataaaacttggatccagatgtgggaaggcaagacaggaggctgtggcaagtagacccccactcactaaggcctggaccaccccagcagtgagggagactggcaggtgtgtgtgagacaccaaggtgtcgaactgcccctgggtagtttagtaaaagggcagaagagacaggaaggtaaagagaaaagcaggatgagaggccctgagatttttatgtgatattttagacttccttctgtgtttctctaatggttatacattgcttattcagttaagaaaacctcaactaactatggataaaggtttgcctttaatgtttaagttctatggaaagtcactcacaaggtaagtggtaaattgtatttgttgaaaaaaatacgggatgatgtgatgtgaaaccgtggctgggagaggccagcaccgacctgagtcggggaggcttctaggcagccccacctgtgccacaggtggacatgtctgtgcctcagcraagtgtctggccatacttcaaacaacttcagcctttgtgtcgggaccaccccttgttctccagaaaagtcaacctctttacatctgtctctgcatttataatggaaatagtatcctggtattcttacctcacatggtcttaagaaagaatcaatgagatatagcagataatcaaagctactaaaattctaaaaatatgcaaatataaagaat

SEQ ID NO: 736057 - DNA, 616 bp, Homo sapiens
ctcacacctgtaatcccagcactttgggaggccgaggcaggtgcattacctgaggtcagaagttcgagaccagcctgggcaacatggtgaaaccccatctctactaaaaataccaaaatcagccaggtgtggtggcacgtgcctgtaatcccagctactcaggaggctgaggaaggagaatcactttascccaggaggcagaggttgcagtgagctgaggttgcaccattgcactccagcctgggcaacagagcgagactccatctaaaaaaaaaagaaaaagaatagcttgtttttattgtaatattcgcctatccctaattggcttatgtggttgtattttcaaattgtgtgtaagacacacatcatatccacatgtgaattcttcagggccctcttcaggccaaagaaactgaggaagaaaatgcagaacccaaaagcgagtgggtggctgggagtcctccaagggcattttgcagtcttaggaaaagtctctgtattgttgcctacatctgcggtaacattggccatacactctgtggtttcaacatcacagatgattggcttacagctttggaggtcagtatctgaagtgggtctgcagggctgtgttcct

SEQ ID NO: 736058 - DNA, 616 bp, Homo sapiens
gatttatgcacgtgatgacggaaacctgaaaagcccagactgaagcagcagttgagctgcatttcaaagatctcttcgactccttgcgttgtttatgaagatcctgggtctggccacctgtagcattgactcattggccaactcttgattcattcatccactcatccattcatttgtttgacaatcattattgggtacctcttatatttcagaatgggtatatcacagtaaactaaaatcatggctcctgcttttaaaaaagtattatctcctgagagaagcagatattaaacacctgaaaagtcaataactatctaattacaaagtgtggcaaatatcatgaaggaaaggaaggtgttcatgacagagctgcaggaagcctatcttaaactgggcgatyataaggggactctctgaggaggttgctttttatctaaagccagaaggtaggaaagacaaaaatgttcaaggtctttcatttgtcaacataggacggactccccagaacaaacgaacagaaagacacagacttcatggtaaccttgggacttgtttttcctacacgagggagctaagagggtgctataagtaaaatacttgcactgaaaatcaaaat

SEQ ID NO: 736059 - DNA, 648 bp, Homo sapiens
ttctgtaacacccacaggaatatttgtttgcttaatggtgtcccataaatcctataggctttttccttctttttttcctttttctttgttttcctttctttctttccccccaccccttggtctgcctatgttacttcaaamgacctgtcttcagaaattctttcttccccttggtctagtctgtctttttgatctagtcttgtattttttactttattcattgaattatttagctctagaacttctgtttggttcttttttatatctgtctctgttgattttctcattcaaatcatgaattgttttccagattttgtctaattgtctttatgtattctcctatttcttctgtcaaaccatatatttgtacccattagtcaatttctcttactctcactctctccctacccttctcagcctctggtaaccaccaatctactctctacattctagagtagagtagcttttttagttctcacatatgagtgagaatatataataatttgtctttctgtatctggcttatttcacccaggataatgtcctccagtccatccattttgctgcaaataacaggatttcattcttctttatgactgaataatattccatcctataaatatactgcattttctttatccattcatc

SEQ ID NO: 736060 - DNA, 648 bp, Homo sapiens
ttctgtaacacccacaggaatatttgtttgcttaatggtgtcccataaatcctataggctttttccttctttttttcctttttctttgttttcctttctttctttccccccaccccttggtctgcctatgttacttcaaacgacctgtcttcagaaattctttcttccccttggtctagtctgtctttttgatctagtcttgtattttttactttattcattgaattatttagctctagaacttctgtttggttcttttttatatctgtctctgttgattttctcattcaaatcatgaattgttttccagattttgtctaattgtctttatgtaytctcctatttcttctgtcaaaccatatatttgtacccattagtcaatttctcttactctcactctctccctacccttctcagcctctggtaaccaccaatctactctctacattctagagtagagtagcttttttagttctcacatatgagtgagaatatataataatttgtctttctgtatctggcttatttcacccaggataatgtcctccagtccatccattttgctgcaaataacaggatttcattcttctttatgactgaataatattccatcctataaatatactgcattttctttatccattcatc

SEQ ID NO: 736061 - DNA, 648 bp, Homo sapiens
ttctgtaacacccacaggaatatttgtttgcttaatggtgtcccataaatcctataggctttttccttctttttttcctttttctttgttttcctttctttctttccccccaccccttggtctgcctatgttacttcaaacgacctgtcttcagaaattctttcttccccttggtctagtctgtctttttgatctagtcttgtattttttactttattcattgaattatttagctctagaacttctgtttggttcttttttatatctgtctctgttgattttctcattcaaatcatgaattgttttccagattttgtctaattgtctttatgtattctcctatttcttctgtcaaaccatatatttgtacccattagtcawtttctcttactctcactctctccctacccttctcagcctctggtaaccaccaatctactctctacattctagagtagagtagcttttttagttctcacatatgagtgagaatatataataatttgtctttctgtatctggcttatttcacccaggataatgtcctccagtccatccattttgctgcaaataacaggatttcattcttctttatgactgaataatattccatcctataaatatactgcattttctttatccattcatc

SEQ ID NO: 736062 - DNA, 630 bp, Homo sapiens
tgacgataatacagtgttgtgacttaaatgccactgaactgtccaccttaatatggttaattttatgtgaatttcttaacctcagtaaaaataagcaagtaattcctaggaaaatggatgaggttacataagggctgacttaactctgtgagcacattacrcatagagaaatatttctttcattatcgcacagaagaagcgagtgaaaggtcatacaagatatttcaccaaagaaatagaattccactttgacaagatctcacagcgtcagtgcctcatagggtatttctctttttttaatttttattttaatttttgcaggtacacagtaggtgtatatatttatggactacatgagatacaggcatgcaatgcataataatcacatcatggaaaattgggtattcatcacctcaagcatttatcctttgtgttacagataatccacttctactcttttacttattttaaagtgtacaattaaactatgattgactatagtctccttgttgtgctgtcacatactaggtcttattcattccttctatttttttgtacccattaactatccccacctccccactgcagttcccagcctctggtaaccatccttctactctgtttccatga

SEQ ID NO: 736063 - DNA, 482 bp, Homo sapiens
ataatgattgagatgcaggttaacctcacatataagatctaacttaagttagttttttattgtatagatattttgtatgtaaaatatctatataataaatagacacttcagttgcctattcagcagcagtcttgtctatcttcactccttcctttagatgctggttggccatatgattccaggggtgaatctttgttagtaagccaaccatagtaattccattcctcttgcaagtgattgcttaatgaaggcatgtgatagaattctaggtagtgacgagagcaagtctgctgggagactyctggagaagtgtcctgtggagaacttgtgtcccaaagagacatattctcttgtctttggagatggttgtcagaggccatgatgcttggagcttctgcagccattatataactatgcagagagaaaataaaagtaactgaggaaaggggtgaggacgggagggggaaagaaaggacttgggt

SEQ ID NO: 736064 - DNA, 573 bp, Homo sapiens
gcgcggcacgtgacccgcaccgcccgtgggcaccttgaaggcggatcccgcgcgcccccgctcctgcaggtgagagcggccgcgcccacgggccggctcagcggcggtggcggcaggtggggaagcgcggctgggcctgctcgcgcggggcgtctgagccctccatttcccggttctaaccgcgcagcagggcccaaccgggaccttgagtgcggcgaggcgtggttcgtgcacccttggcccggggctagggcgggcgtgtcggcgtcgggtggaaggaagccccttgcgggtgagctccctgcctcccaggcctccctcttgcctggggtcgctcagtccacagaggcccggccgctcatagaggggggcacattyctggtctttcgtgcatggggggtgtaagtggcggactttattttgggagcgctggacacctttcgggtttgctttgaatgagatgggattcatgtgtttacgctggccaactgacctggtgtgcccgggaatttactgttcgcgtgacagccgaggcccgagggaacgcccacaccgccccccctaccccaaggc

SEQ ID NO: 736065 - DNA, 571 bp, Homo sapiens
caagtagaaatgtaaactttaaaaattggaaatagaagctgtgttttccatttactaatttaatcttcgaaaagctaaatttataaaatgtttgccaacacaattagttttttagaaataaacagaactcctgaatgtagtctcttggttttaaataggtacagtgatttggaaagttctttctttagagttttcattttccgtgttagtggatgggagttctgtagcttttgtccccctgcagtcttgttaccagaccagtgctatccataacaacgtaatgcaagccacttaggaaaatttaaaatgtagtagtagatgaaattaattaataatatatcctgatatatctacaatgtagtttcaataattgataataraaattattaataagattttatctttcgtactaagtctttgaaatctggtatgtatattacagatagtacatttcaatttggactagctgcatttcaagtctttgatacccacatatggccagtcactgccctattggacaaaacaggtccaaagagtagacagaaaggttttggtatttccccccttttca

SEQ ID NO: 736066 - DNA, 622 bp, Homo sapiens
atatttacattatccaaaattgtttaggaactttagtagatatataatgatacactaaaattaagtaagtgtaatgtagtagctcttctgggacaccatataactgattactttccctaaataatataatattttcaaccaaatggrgtgaattgatgttatttttgatttctataattccagcctttggcttgattaaatcagatggaaaaaaattcccattattattccatgtgaactatagatcaggcttttaagaaattgatatgactttaggccagtgcagtggctcacgcctgtaatcccagcactttgggaggctgaggcaggcggattgcaaggtcaggagttcaagaccagcctggccaatatggggaaaccccgtctctactaaaaacacagaaattagccgggtgtggtggcacatgcctgtaatctcagctacttgggaggctgaggcaggagaattgcttgaacctgggaggtggaggttgcggtgagctgccaagatcgcaccactgcactccagcctgggcatcagagcgagactccatctcaaaaaaaaaaaaaggaagaaattgctatgaccttaaaaaaaggttaggaatgattaaacatttaa

SEQ ID NO: 736067 - DNA, 629 bp, Homo sapiens
tatacttttctcagatatcaagttctaattcaaataaatacttcaaatatggatcaatcttttctaagatttggaaattacacaaaagatacactttggggttttgggttttgttttttgttttgttttgttttttgtttgtttgttttttagacagagtctccctctgttgcycaggctggaattcagtggcacgatctctgctcactgcagcctccgcctcctgggttccagcaattctcctgcctcagcctcccaggtagctgggattataggcatgcaccaccacacccagctaattttttgcatttttagtagagatggggtttcaccacctagcactgtttgtttctcgaactcctgacctcaggtgatctgcccgcctcggcctcccagagtgctaggattacaggtgtgagccacagtacttggcccactttggggtttttatttttgacagcctacaattaatattcagtaccatgataagatcaccaaaatcaaagaatgtgatcagtcttgtaaaatcaaaacagtaattcctaaaatttcatcatcctgcagtagaatcctgcagggaatcaataacatcagtgtacattaaaaaaattaaaatgcatattaatgta

SEQ ID NO: 736068 - DNA, 606 bp, Homo sapiens
acagtcatcctaaaaaatataataatattcacgtcttacaattttatgaaagaataatttcatttaagcatgagcatgataacaaatagtaatgctaagtggcacttattcaaaacacatacacccaaattcaatgtaaatggtacactatggtttttgccttagaagggaaaaagcayccctatttgactttactggtaaagtaaaacagaatggtaaagaatatcataatattcttagttactgtttggttgtttatatatatacacttagtgtatatgcatatgtatgtatgtgcacttatgtaaatatccatgtgtgttctggtatcctgctttgattttggaaattatcacatcttaaaatacctgcaacaaaacttggaatattgtctttctaaggcaattgatgcatagtttctttcttggtttaagatagaaaccacagtgaattttctaatactaatgttgtatccattgaagaagttatcacttttcaacatctgtgtatacatatataaacacatacatatatgaacgtgtatatgcatgaggtcagttgtatcatttttacttattcaaaaatgcattaatttacgtatcaagt

SEQ ID NO: 736069 - DNA, 606 bp, Homo sapiens
acagtcatcctaaaaaatataataatattcacgtcttacaattttatgaaagaataatttcatttaagcatgagcatgataacaaatagtaatgctaagtggcacttattcaaaacacatacacccaaattcaatgtaaatggtacactatggtttttgccttagaagggaaaaagcatccctatttgactttactggtaaagtaaaacagaatggtaragaatatcataatattcttagttactgtttggttgtttatatatatacacttagtgtatatgcatatgtatgtatgtgcacttatgtaaatatccatgtgtgttctggtatcctgctttgattttggaaattatcacatcttaaaatacctgcaacaaaacttggaatattgtctttctaaggcaattgatgcatagtttctttcttggtttaagatagaaaccacagtgaattttctaatactaatgttgtatccattgaagaagttatcacttttcaacatctgtgtatacatatataaacacatacatatatgaacgtgtatatgcatgaggtcagttgtatcatttttacttattcaaaaatgcattaatttacgtatcaagt

SEQ ID NO: 736070 - DNA, 624 bp, Homo sapiens
ctcagcctcccaaagtgctgggattgcaggcatgaaccaccacatgtggctgggacttctttttctggttctagtgttttcttctttttcttacgctgtggctgccaatgggtggcttgcttgctggctgacagcttctctactggtggtatccaggagatccagtggtggtcaggagacccagtagtatacactgtctagtgagtttcattggcatctcagcaggcagtttactagcaagttttgraaagtaggtggctttcaaactaattttactgccactgtagctgacaggttcccagccatgtttttctggtatcttagcaagcagtgttttgtgtgtgtcagccttgactgtgatacctcattgagtttctctgccatccagtgggcaatagccacatcctctcccacaaagtctgaaacttagccttgggtgaatgaaggggttgggggaaaaagtcccttttcaaaggttatctttatttcattactctaccttagccctacaaaaagtacatattccctacatctccttttcctgtattatttagaggtcactttattcctcttagtagttaatcttctgttattaatcaataattctttatgttaaatttttcc

SEQ ID NO: 736071 - DNA, 513 bp, Homo sapiens
tttacaattgtgaatccttcctctgtccctttgagatgtacacctttctccaacaactcagcagtgaaagccattcctttgaaatgtaatcataaggaatgacagtacctgtctctagtctctgggagaatacaaccctaactttaattaattgattaattgcagctgacttaatgggcatttacactgaccaatcttcctaatttttcacttctctgactctgctcaagctctagcagtccccccaccacctcccaagttgagtttagttcatgctggacattyttccctattgcaatagtatattactgattaaaatctgtccttaccactttaacattcatctctttaacagatcaagaagtaggaaataaaatgacatctaagaataaagccatgaaatccaaatgaccatgttggtgaaccttaaaacaataatattctaaaataagctttccacatgtgtcatccaaggaaacccacctgcattagaatcacccacctagggaattt

SEQ ID NO: 736072 - DNA, 496 bp, Homo sapiens
aagctatggagtcttttttgggcactctagtccattacttttagctctttcatctaaaggaatttattctgcactttgttgcttattctctactgctgtttcttgattatttgctgaaaggtacctatcctgttgaggrtggctgttgatattgcgtatttagtatttgtcctacggtttttatcctaatataaaaagcctgttctttcttctgtgctctccccgtctctctacctccgctgagcttcagattgcttttaaagggtgacctggcacacttctgtgtgcatgcactggtattacaaaacacaccttcccatttacttgtgagattaaatatatatatatatttatttatttatttatttatttaaagggattatgcttatatttaagaaaagaatttatgtctatataaaggaatatccatatcaagtattaggtcatatttatctcaagatgggaaataggacatattttaactacatgggtgagt

SEQ ID NO: 736073 - DNA, 579 bp, Homo sapiens
cgtttgtttatgtagtccctgatttctttcagcagtgttttgtagttttccttgtagaggtctttcatctccatggttaggtatattcctaagtttttttgttttgttttgttttgcagctgttgtaaaatgggttgaattattgatttgattstcagcttggttgctgttgctgtatagcagtactactggtttgtgtacactgatttttgtattctgaagctttactgaattcacttatcagttctagaggctttttggatgagtctttacagttttctaggtatatgatcatatcgtcaggaaacagcgacagtttgatttcctttttaccaattggatgcccttgatttctttctcttgtatgattgtgctggctaggacttccagtactatgttgaatagaagtggtgaaagagggcatccttgttttgttccagttttcaggggtaatgctttcaacttttccccactcagtataatgttggctgtgggtttgtcatatatggcttttattaccttaagatatgtcccttctatgccaattttgtaagggttttaatcataaagggatgctgg

SEQ ID NO: 736074 - DNA, 624 bp, Homo sapiens
ctgccatgtgagaatcagcaagaaggtcctcaaaagacactgaagggccgggcgcggaggctcacgcctgtaatctcagcactttgggaggccgagatgggtggatcatgaggtcaggagatggagaccatcctggctaacacggtgaaaccccatctctactaaaaatacaaaaaattagccgggcgtggtggcrggcgcctgtagtcccagctactcgggaggctgaggcaggagaatggcgtgaacccaggaggcggagcttgcagtgagccgagatcgtgccactgcactccagcctgagcgacacagcaagaccccaactcaaaaaaaaaaaaaaaaaagacactgaaggcaggtgccttgaccttgacttctcagccttcaggactgtgagacataaatttctattgtttataaatgacccagtctgtggtgtttttaaatagcagcacaaacagactaagacagagatctattagaaccttcatttctagaacactcacttatataaaactcttctttgggtaatgatgcatagtcaaatgtcactgaaataactgcaccctcattagggtgtgatgaaaatccaaacaaagacacgtgagcacattgcttccagtt

SEQ ID NO: 736075 - DNA, 624 bp, Homo sapiens
ctgccatgtgagaatcagcaagaaggtcctcaaaagacactgaagggccgggcgcggaggctcacgcctgtaatctcagcactttgggaggccgagatgggtggatcatgaggtcaggagatggagaccatcctggctaacacggtgaaaccccatctctactaaaaatacaaaaaattagccgggcgtggtggcgggcgcctgtagtcccagctactcgggaggctgaggcaggagaatggcgtgaacccaggaggcggagcttgcagtgagccgagatcgtgccacygcactccagcctgagcgacacagcaagaccccaactcaaaaaaaaaaaaaaaaaagacactgaaggcaggtgccttgaccttgacttctcagccttcaggactgtgagacataaatttctattgtttataaatgacccagtctgtggtgtttttaaatagcagcacaaacagactaagacagagatctattagaaccttcatttctagaacactcacttatataaaactcttctttgggtaatgatgcatagtcaaatgtcactgaaataactgcaccctcattagggtgtgatgaaaatccaaacaaagacacgtgagcacattgcttccagtt

SEQ ID NO: 736076 - DNA, 624 bp, Homo sapiens
ctgccatgtgagaatcagcaagaaggtcctcaaaagacactgaagggccgggcgcggaggctcacgcctgtaatctcagcactttgggaggccgagatgggtggatcatgaggtcaggagatggagaccatcctggctaacacggtgaaaccccatctctactaaaaatacaaaaaattagccgggcgtggtggcgggcgcctgtagtcccagctactcgggaggctgaggcaggagaatggcgtgaacccaggaggcggagcttgcagtgagccgagatcgtgccactgcactccagcctgagcgacacagcaagaccccaactcaaaaaaaaaaaaaaaaaagacactgaagrcaggtgccttgaccttgacttctcagccttcaggactgtgagacataaatttctattgtttataaatgacccagtctgtggtgtttttaaatagcagcacaaacagactaagacagagatctattagaaccttcatttctagaacactcacttatataaaactcttctttgggtaatgatgcatagtcaaatgtcactgaaataactgcaccctcattagggtgtgatgaaaatccaaacaaagacacgtgagcacattgcttccagtt

SEQ ID NO: 736077 - DNA, 573 bp, Homo sapiens
tattgcatgttctcacgtagaagtgggagctaaattatgagaatacatggacacagagaggggaacaacagacactggggcctacctgagggtggagagtgggaggagggagaggagtagaaaaaaataacttttgggtactaggcttwgtacctgggtcatgaaatactctgtataataaacccccatgacacgagtttacctatataacaaacctatatgagtaccgctgaacctaaaataatttttttttaaaaaagaaagaaaattaaactagcaagaacactaacataaacatgctggtttgcagagtttttataagactaaaagattctgatgttttctgttggctctggacttggcacagaaatgttataattgtctatgggtagatttatctctcctattattattaatagtcttttaaaattgcctttttctagctccaaattcagttatgctatgtaagtagcaacattttgattttgaattattttaactacatcatactaaaatttctattgatccagtctactagaactctttttttttcttctgagatggaatttcact

SEQ ID NO: 736078 - DNA, 636 bp, Homo sapiens
cagtgtccgcgtacctcattcctcttggtcatgggacaagagcgaatggcaggtgcaaaaagagctgtaacatatgctcatgctcgccgagctataggagtgaaaaaaccattgtgtgccaacatgcccccatttgctgagctgcaggcagcaggacccaatgagttgtgacacgctcccattcactgaagctgcagacagcagaaatgaacgacagtgtaacactttctggaggctcagrcctcaggactccccaagcaaaagctgtaacacaccttggggctctgtggttgctggcatctccaagttattgggcactgccacatccccctcatccagacaccagcatccaaggtagaagttggtcacggcacccctggaccagctgcgggctgaccacagagccaaggcaagcgcaggatccagaccagtagcacagcctgagcgcagtctgctgggccaagtgggcagagtaagcccagtgggcccaagcaaagcctgggcagaggtgccactagccgtggagatttctggctggcaaagtggcactgaaagaattctgtgtcatcagtagtcaaataagctactcttattctaaaaaaactcagtcaaaaaaaaattctaagcacatgtata

SEQ ID NO: 736079 - DNA, 612 bp, Homo sapiens
aaaggtctcctgttatcctaagtgaagtaactcatgaatggaaaactaaacattctatgttctcacttctaagtgggagctaagctataaggatgcaaaggcataaaagaatgatacaatggattctggggagtcaggggggaaagggtaggacggggtgagggacaaaaggctacacattgggtacagtgtaaactgcttgggtgatggatgcaccaaaatctcagaaatcaccagtaatgaacttattcatgtaatcaaacaccacctgttctccaaagacctataggaaataaaaatwaaattaaattaaaaaaagatctctttacaaaaggcacacttttacccattcttaatcttaccctggtacactgcaccaaagtgtaaaaacctctagagtaccaaatacaaggataattcaactcttccaccaaccgaggttccataaacacccccagtcttctcattaataaatttctggctgagtgcagtggctcacgcctgtaatcccatcactttgggaggcgaagtgcaggaggatcccttgaagccaggatttcgagacttgcctgggcaacagagaccctttctctacaaaaaaattttaaaaat

SEQ ID NO: 736080 - DNA, 607 bp, Homo sapiens
aaatcgaagaggatgtaatacttttgaactctttttatgaggttagcattaccttgataccaaagccagacaagaacattatgagaaaagaaaattacaggccaatatccctgatgaacatagatgcaaaaatcctcaacaaaatacgaataagccaaattcaacagcacattaaaaggatcattcaccatgatcaagtggaatttatcccagggatacaaagatgattcaacacatgcaaatctataaatggagaacaccatattaacagaatgaaggacaaatactatatgatcaccacattagatgcagaaaaggcatctgataaaattcaacatsctttcactaataaattagtatagaagaaatgtatatcaacataataaaggccatatatgaaaagcccacagcaaacattacacacaatggtgaaaaatggaaaactttttctctaagatcaggaacaagaccaggatgcccactctcatcatttctatttaatgtagtactggatgtccttgtggagcaattatgtaagagaaagaagtaaaaggcattcaaataggaaaggaaaaacttaaaattgtcactgtttgctgatgacaaa

SEQ ID NO: 736081 - DNA, 607 bp, Homo sapiens
agaagcacgcagcaaagaaagtggtcttctctaggtccttaggggtttaagtttcaaaagcttctaagatttcagtggagagttctgccctgggtggttctcagctgaaacaaaagtggcacatgagtgggaaacctgcctgggaagcaggtttctgagtcaagtgagattccccagcaaaaagacagtgacagccactggacacttaactgagaggaacacggggcttcagtggggaaatggaaatcaggaagkcagagtgaccacgggcagggatatgtgaaacatatcagtctctgccagaggaggcagtatggatggacggatacattgtctttcctccatggtagacatatgcctcagttaacatcctgatgggagactatttaaaaatttttattttattgattgattgattgagacagggttgcctatttgaattgtgagctgaagttgctgctttttgcatgccgggctacttttgcttacattttcttccaagtgaacaaagcgagactgtgacttcaagaaaaacaacacagaatttgttgtcatgataaaattggaactttcaagcaaaaattcaaattttggaaaacttggatcc

SEQ ID NO: 736082 - DNA, 542 bp, Homo sapiens
acgtggacaatctgacttcctcctttcccatttagatgccttttacttccttctcttgtcttattgctctgaatagaacttctagtgtgatgtgttgaataaaagtggtgaaaatgggcatccttgtcttgttccaaaccttggaggaaaaactcaattttttctcattaagtatgatgctatgggtttgacacagatggcctttactgtattatgttccttccatatttagcttgttgagttttatcaygaaggaatattgaattttatggaatgctttttcagcatctattaatgaatttggtcaagctgcagatataaaatcaacatacaaaaatcagtagcatttctatatgccaatagcaaacaatctgaagaagaaagaaagcaatttcatttacaagtcagctgtgaaaaaaatacctaataatatacttaaccaaggaggtaaaagacctctacaatgaaaactataaaacactgatgaaaaaatggaagaggacacaaataaatggaacgatattccatgttcatggattaga

SEQ ID NO: 736083 - DNA, 633 bp, Homo sapiens
tgcccagcctcctgcaacctttagaaccatgggatatggtagagtgttttggagaaaaagggactcaaatttctggcctgtggatattggttggaggggcagagtaaggggctaaggtcgggtgacaactctataactattccactgcacttgagaaagacatcttgggcatcagcaagctcaagcctctaatgtacacatgtggaagtagagttctgtaaaggtgatgtgatggcttttttttttttttgagacggagtctcactgtatcacccaggctggagtgcagtggcatgatctcggcttactgcagcctctaccttccgggttcaagcaattcttctgcctcagcttcctgagtagctgggactactggcgcatgccaccatgcctggctaatttttgtatttttagtagagacaggatttcaccrtattggccaggctggtctcgaactcctgacctcatatgatccgcccgccttggctgtaatccccaaagtgctgggattataggcgtgagccaccgcacctggccagtgatgtgatttcttacatccccagcaggtgtgtagcacatcatgaacttgatcttgatgttcagatactgcccaatctcatgttctttgcactt

SEQ ID NO: 736084 - DNA, 614 bp, Homo sapiens
tatttgttagatgggaatggaacagtatttgttttgggatatatgccattactgacgcaaggcccttctgggtgttgccacaaatgtcccatgaactatgagatttttttcatcttggctggtggaaataggtcctgtgtgaatgctgggtactgttaaccctaagctttttgggttattcttttcctggactcagacaatttttggatatgcacgtgctgattggtactcagctgtatatgcggtggggtctctgcagatctttagtgttctttttttgyacagctctctcctcactgctctgtcccttgaactctttctggactctcagctgtatctcctcaattgaggagtcttctggtcactgcctggcttcccctccctgccacttcagcctggaaactcccaatgcagtgaactggggcattcatcatgttcaccttgtcaccttgtttctttctcatctttcaggaatcactcttcttccttgcctaatgtcaagtgtcttgaacaccattgttttatatatgctgtccagttttttcagatgggaaggtaattttagctcctgttttggaagaaatgtcaaggttgacatcatgatttatggcctg

SEQ ID NO: 736085 - DNA, 522 bp, Homo sapiens
ccagtgacacaaaaccaaatgtcacagccactctcagtgctgaaatcaaagaggttagaaggaatctcagtggccctcagtgaaacataccagttcaaccatatgaaatagttcatatgagactgttattgacctgaaacctatatatcattcatatggttcaacctaataataaatgtcacttactgaaggtttaaggccttattgaagctttatcctcagtagggctttgaagccccatcccatctggtttcaacctacctgtctgtaagttggtggggcagagtgacactgtggtttagactctagagccaagagcttggaccttgcacaaatgattgatcttggcacctcactttccttatctatagcccaccacataargttgctgtgcagattacacgggataatgaatagaaggtgcttagtatagtacctgatgtagagcaagtgctcaacaaatattagctattatttgtatagtaatggtgttctatactattgtggttgttgtttccctac

SEQ ID NO: 736086 - DNA, 601 bp, Homo sapiens
agctgaattattctgttagatacctaatttctcttaagttttgagattaagataagagaaaatcaagcctatcatttgagtaataatgcaattttgaaaagtacactgctcagaagtttaaaaatttctggtacagtcccaaactgaagacccacttttttcttatctcctgttgcttcagcttactaaggcagagattactctccatttctacactatatctgatgtatctaaattttgtttatatgtacctactttatatgcagtaggaaaaagattttctaaaataagatayattttgttcaccaagcaaaattcaattcagtaatgagaatgtcatacctttttccacatgagttttgatcccagctcttctctccctggctttctgggccatttctctaagtttctcttcatgtttttccttttctttctgagccatttttctctctacttgggcacgcatttccacagcttcacgagcctgttggtaaagtcacatgttaaacaggacactatcatgggataaatatttatggctatcatccaactccctaacatctggctggtaagagcaattatacagaattcagatttgtta

SEQ ID NO: 736087 - DNA, 642 bp, Homo sapiens
gatatgtaagtgtagatgtcctggcttatgatacagtgctcataagcatgcaagtatttagaattgtaccatttggctgggcatggtggctcatgcctataatcccagcactttgggtggctgaggtgggtggatcacgaggtcaggagttcaagaccagcctggccagtatggtgaaaccccatctctactaaaaatacaaaaattagccaggcatggtggcgcgtgactttgctgtggaagcaaggtctattataaaaatacaaaaattrgccaggcatggtggtgcccgcctgacacctccccagctactctggaggctgaggcaggagactcgcttgaacccgggaggtggaggttgcagtgagctgagattgtgccactgcacccaagcctgggtgacagagcaagaccttgtctcaaaaaataaaaataagaaacagaattgcaccattctttgtgtttttcaggggtgttgaaatctgtgtatttaaaaagcggcgcatgctctcatctgtcatgaggtgctgcttggtcatcaggttaacttctgcagcattcctagcctactctcaagatcagagatggtctgtttcagcattacaggatgcccagggccctgctgccacagctgcagggctc

SEQ ID NO: 736088 - DNA, 593 bp, Homo sapiens
cttcttaaatattttcataacaatttacatggcatattttaaagtaaaaaagagatacagaggggccgggcgcggtggctcacgcctgtaatcccagcactttgggaggctgaggtggctggatcatgtggtcaggagatcgaaaccatactagctaacatggtgaaaccccgtctctactaaaaawacaaaaaattagccagttgtggtggcaggcgcctgtagtcccagctactcgggaggctgaggcaggagaatggctttaacccgggaggaagagcttgcagtaagccaagattgcgtcactgcactccagcctgggtgacagagcaagacactgtatattaaaaaaaaaaaaaaaaaaaaaaagagagagatacagaaaattcaataaataataggcattctacctttaatgctttagtcagaaattctttgaggtacataaaaagaaaggacaacttataaatatcaaagaaaatcaaattcctaggcacttgagatctccagaatttttttttgtagaactgtttaccactacaagccaaagtcttatattaataagtctatcatacatcattcattaaaaaagt

SEQ ID NO: 736089 - DNA, 593 bp, Homo sapiens
cttcttaaatattttcataacaatttacatggcatattttaaagtaaaaaagagatacagaggggccgggcgcggtggctcacgcctgtaatcccagcactttgggaggctgaggtggctggatcatgtggtcaggagatcgaaaccatactagctaacatggtgaaaccccgtctctactaaaaatacaaaaaattagccagttgtggtggcaggcgcctgtagtcccagctactcgggaggctgaggcaggagaatggctttaacccgggaggaagagcttgcagtaagccaagattgcgtcactgcactccagcctgggtgacagagcaagacactgtatattaaaaaaaaaaaaaaaaaaaaaaaragagagatacagaaaattcaataaataataggcattctacctttaatgctttagtcagaaattctttgaggtacataaaaagaaaggacaacttataaatatcaaagaaaatcaaattcctaggcacttgagatctccagaatttttttttgtagaactgtttaccactacaagccaaagtcttatattaataagtctatcatacatcattcattaaaaaagt

SEQ ID NO: 736090 - DNA, 622 bp, Homo sapiens
aagactggccatttaaagatcgcattctgccactgcaattttaagcacgcaatacccatgacaggccagatgatgtggtggctcacgccagtaatgccagcactgtgggaggctgagatgggtagatcagatcagttaagcccagttcaagaccaggctgggcaacatggcaaaaccccatctctactaaaaaaaacaaaaattaactgggcatcatggcaagcgtctagagtcccagctactctagggcgctraggcaggaggatcacctgagccttgggaggttgaggctgcagtgggctgtgattgggccactgcactccagcctgggcaagagtgagaccctatatcaaaaaataaaataaataaaaaatacccatgacatctctagaaatttttcctgtgtgtccatttcaaattccaccttttccacaaagtctcccctcataactttactagtctatgacacagtgtctcacacctggggagcactcaaatgtttgctgcctgtaacatttactaaacaaactcttggctgggcatggtagctcatgcctgcaatcccagcactttgggaggcctaggtgagaagattgatggaggccaagagttggagaccact

SEQ ID NO: 736091 - DNA, 612 bp, Homo sapiens
catttccatccccagatctggaatgactcatttctgtaagaggccctggtttcttttagtggggcaatttgcatgctataaggtggtaagtgaatgatttttaaaagtaagaaataacagatactaggtaatgaataacagtacaaaactgatagaactatgaaggtattgcagcccaagaccccattagtgagggggagatagtctcacaacttaacaggccctgaaggaatgaatgcatcttaatatcatatcacaccatcacayggatgcgagccttagtccccaagaaaaccttaaactctatttagcaaacttattttagaggtatgtgtaaaacattttttaaagtttcatatatggaagccttagctgtctggaaaattagtgtaaatagaatgcttcatttgctcaggtttatggtgcagaaaagaatcatttagggagcacgttaaaatataggtgtctggaccaggcaatggtggctcacgcctgtaatcccagcactttgggaggccaaggcaggaggatcacctgaggtcaggagttcgagaccagcctggacaacacagggagaccccatctttacaaaaaataaacaaaattagctag

SEQ ID NO: 736092 - DNA, 662 bp, Homo sapiens
cagcggtcctagtcagcagggggcactcgtccatgcagtgattaagggatccagactccttccatctcctggttcctcacatcccctagagcctaattatcaactgcttccttccagcagacagaaaaacatcttgaggaaagtacactagtaacttcaaagtcttggcttgaaagtgacctgtttacacatcattggtcacatgtagatgcagtgggtgagaggtagggactgcaaaatctatccccagactaattatggaaaaargaacaagacgtttggtgaacagtaaagtgagccttctctgccacagggggatattcttctcctttatatgtatctttattttctaaatgttctgtaatgaacaagcactgctttaataatgaggaaaaaatcatacatttatatatacatatatatacacatatatatgtctgcaaaaagaaaaaagttaataatctttgatccagtaaattcattctttacatttataataaataaataattagattgtgggggttggctggcaaaatggccaaataggaatagcttcagtccacagctcccagcaagatcagtgcagcagggaggtgatttctgcatttccaattgaggtacccagttcatctcattgggacgggttagacagtgggtgcagc

SEQ ID NO: 736093 - DNA, 542 bp, Homo sapiens
ggaaatagccttgaaagggcaaatctaagagttattgaccataaagtggaggtagagtgagataggagtagaaagttcatccaaagggataataaaagagaacttcccaaacctaaagaaggatatcaacattcaagtacaagaaggttttagaacaccaagcagatttaacctaaaraagacctacctcggccaggtgcactggctcacacctgtaatcccagcattttgggaggccgaggcaggcacatcacgaggtcaggcgatcgagaccatcctggctaacacggtgaaaccccatctctactaaaaatacgaaaaattaccgggcgttgtggcaggtgcctgtagtcccagttacttgggaagctgaggcaggagaatggcgtgaacccaggaggtggagcttgcagtgagctgagattgtgccactgcactccagcctgggtgacagagcgagactccgtctcgggaaaaaaaaaaaaaagacctacctcaaggtatttaataatcaaacttccaaaagtcaaggataaagaaag

SEQ ID NO: 736094 - DNA, 624 bp, Homo sapiens
cctggtgaaataattagaaaggttacaaagcaagttggagatataaatcaaatgtatagtggggtgctatcacccactcctttgtaatctgtcttttcttatcacacattcctggagattgttctctcacaaattatcaataactctatgtcaatcacctttgctcagatttccttctgaagaacttctttccttaccaagtgacatggttcaaccccttcagactctccatcttagccccacggcatcaygcagaccaagttttcccccattgactctgattctctgagtctttattctttcctgccattctcttcttgcctaaacacaggcattgtcaaatcttttgcctttgggcaatatttcttttctgttttcccttccactggaagctcttccactgtgatcaaactctcatctttatgtagatgaccccaaatattcatgtttcccaaaatctccactgaccaacaattctctttcaaccacctgcttaacaaattcatcagtctgttctattgacattttaaaatgtagttcatcatcttcaagccaactgcttgctcccctttccttctttcttttactagttctgctattttccctgtcatctgaagttgaatg

SEQ ID NO: 736095 - DNA, 635 bp, Homo sapiens
cacatagttacactttttgtgtgtgtgtggcaagagcacctaaaaatctactctcatcaaaaatctcaaatacaatacaatgtcattaactatagtcctcatgttgtacattggatctctagacttattcattctacatgtctgaaactttgtatcctttgacctgcatctccccattttctccctgacagtccctggtaactaccattctgtatgctatttctgtactttttttttttttttacattctacatataagtgagatcatgcagtatttctcttcgtctcccttatttcacrtagcataacgtcctccagtttcatgtctgttttgtcaaatggcaggatctctttcttttcaatggtgaataatattcatttatatatatcacaatttcttcatctgttcatccatcagtgggcacataggttattttcatgtcttggctattgtgaataatactgctttgaacatgtgagtgcacatatcttcatgaggtagtgatctatttgtaatttagagtgggccctaagaagctgtatgctatatattttgtatgttgattgttagacttttatgggtacttagttccctccacttcttaagtttttctggggttctgcagcataaaccg

SEQ ID NO: 736096 - DNA, 567 bp, Homo sapiens
tgttcttacactgctataaagatactacccaagaccgggtaatttataaataaaagaggtttaatggactcacagttcttcatggctagggtggcctcgggaaacccacagtcatgggagaaagtgaaggggaagcaggcactttcttcacaagaaagagaaagcaaagagggaagagtcccttataaaaccattagatctcatgagaactcgccatcatgaaaacaacatgggggaaacagcccccatgatcctgtcacttccctccctcaacacgtgggaattacaattcaagatgacacttgggtggggacacagccaaactctatcaatgcctaactctaaaatcaatcagtattgaagtcaagaaatcaaaggagatgtacacacatmaatatattatttactttataaatgatctctgtcagagatcattccaccgatccttaacatatttctcctggagctcctgaacgttatctctattgccttagcccaataatagaaaaggccatctaagaggtagaaagcttgctgctggtagtatgtgacatggttttaggtgtt

SEQ ID NO: 736097 - DNA, 531 bp, Homo sapiens
aggaaagaatatatttaagtttaggaaaccacggattaataatacatagattttattccattattttaaataagagggttttaattatatggctatcagaaaactggcttctgaaatggaaatctagccatgtgtaatttaggattttatttattcaaaaaaatttaaactgagggtgttcgtttgtttgtttgttttttgagacagagtttcactcttgttgtycaggctggaatgtaatggcgtgatctcagctcactgcaacctccacctcctgggttcaagcgattctcctgcctcaacctcccaagtagctgggattatgggcacccgccaccacgcctggctaatttttgtatttttagtagagacagggcttcaccattttgtccaggctggtctcaaactcctgacctcaggtgatcctcccgccttggcctcccaaagtgctgggattccaagtgtgagccgccacagctggcctgaggaattttcttaagcttcctttccaccccctccccccacccagag

SEQ ID NO: 736098 - DNA, 551 bp, Homo sapiens
acatttactattggcaaaaggaccaaataagttgaaaagcataaggctctaaatctctatatggtcaacatcatagcacacactgatagaaataaagggaaaaacagaaaaatccacaattatattaagagactaaagcaactctctaartacttaagacaagcaaaaataaaatcaataaagttataaaaaacctgaaaaaccaatgagcaaaattgacttttttgacatacatagaaaactgtatcaataagaacagaagaaaattccttttcaaacaaaaatattacatttacaaaagagtctgaggcaggagaatggtgtgaacccgggaggtggagcttgcactccagcttgggggacagagtgagactctgtctcaaaaaaaccaaaaagttgaccacttgaccatatggtgagtcaaagcaaatatcaacaaatttcaaaatactgaaagaattagaaatatgtaattttattttggtggaaataacctagatatcagtacaaaaaaataaactagaaaatcccaaactgcttgaaatttaagc

SEQ ID NO: 736099 - DNA, 551 bp, Homo sapiens
acatttactattggcaaaaggaccaaataagttgaaaagcataaggctctaaatctctatatggtcaacatcatagcacacactgatagaaataaagggaaaaacagaaaaatccacaattatattaagagactaaagcaactctctaaatacttaagacaagcaaaaataaaatcaataaagttataaaaaacctgaaaaaccaatgagcaaaattgacttttttgacatacatagaaaactgtatcaataagaacagaagaaaattccttttcaaacaaaaatattacatttacaaaagagtctgaggcaggagaatggtgtgaacycgggaggtggagcttgcactccagcttgggggacagagtgagactctgtctcaaaaaaaccaaaaagttgaccacttgaccatatggtgagtcaaagcaaatatcaacaaatttcaaaatactgaaagaattagaaatatgtaattttattttggtggaaataacctagatatcagtacaaaaaaataaactagaaaatcccaaactgcttgaaatttaagc

SEQ ID NO: 736100 - DNA, 612 bp, Homo sapiens
cagactaatagattcattccattctatgctaaataacacatttaatgtacacatactatgtgccagggattggttgcttaatactgaatgaggtagtccttgccattagaaaaattacagtttggtggaagaggtagtcaagaacaccatcacagagcagagtgycatggtaggagagttataggaacacagtgggagaccttaggggagaagtagcttatttcatctggttattggccacaggaggcttctgtttttttttttttggttgagatggagtctcgctctgttgcccaggctggaatgcagtggctcacttggctcaccgaaagctctgcctcccgggcccacgccattcttggccacaggaggattcgaaaagaagctgttttagctgagatttagaggctaaaagtgatttctccaggaagtaagcaagtgatcagaatgtaggtcaaaaaatgagaatgtgctaagacagtctttttcaaactgatatctgtcctgcctatcttccagggatcctctgaagcactatacaaggttatggtgtaattattattgtgatccagactattcggtttatatgtacatgcataattatcatagcta

SEQ ID NO: 736101 - DNA, 664 bp, Homo sapiens
gttgaaaaggctccgggatcctgcggagactcagccccgccccactgcccttcggcatgaaggtctgcacaaggtcagggaggatcttgcattcctccctccgtccctgttccctggggcagctcacgtgaatgggcacccatcctccaacctgatagcgctcctcggcagccctcggttcatcccccatagggccgcgggtgagcgttgtcaggcacagccctgctcacccttttcgttcttttttttttttctttttcttttttgaggctctgcctcaaaaaagtggcgcgatctcggctcactgcaacctccccctccggggcttaggcgattctcgtgccttagccacctgagtagctgggactacaggcctgcgccaccacgcccggctaatttttgtatttttagcagagacggggtttcaccatttgttggccaggctggtcttgaacatctgacctcaggcgatccacccgcctccgccgcccaaagtgctgggaatacaggcrtgagccaccgctcccagccctgctggtccctttcgaaggaaaccttcgctggctccctagtgccctggaataacactgaaaccccttagaacggtggagaaggcctatctccatctgccccaacatcattccccagtttcgcgttcttccct

SEQ ID NO: 736102 - DNA, 631 bp, Homo sapiens
ggccataaagctattctcaacaaattcaaaaaaagaaaaatcataccaactacactctcaaaccacaacattatacaaatagaaatcaatatcaagaagatgtatcaaaaccatacaattaaatgaaacttaaacaatctgctcctgaatgacatttgggtacagagtgaaattaaggcacaaataaaaagttctatgaaacaaatgaagacaaagaaagagcataccagaatctctaggacaaagctaaggcagtgttaactggaaatttcatagtgctaatcacctacatcaagttaaaaggatctcagattaacaacctaacatcatacctagaggactagaaaaacaagagcaaaccaaccccaaagctagcaggagaaatgagtaaccaaaaccagagctgaaatgaacaaatttgagacaygaaaatccatacagaagatgaacgaaacaaaaagttggttcttcaagagagtaaacaagattgatagagtgctacccagattaagttaaaaagagagatttaaatcaacacaattagaaatgacaaaagggacattatcactgaccccacagaaatacagaagaacctcacagactgctgtaagcatttctatggataaaaatt

SEQ ID NO: 736103 - DNA, 631 bp, Homo sapiens
ggccataaagctattctcaacaaattcaaaaaaagaaaaatcataccaactacactctcaaaccacaacattatacaaatagaaatcaatatcaagaagatgtatcaaaaccatacaattaaatgaaacttaaacaatctgctcctgaatgacatttgggtacagagtgaaattaaggcacaaataaaaagttctatgaaacaaatgaagacaaagaaagagcataccagaatctctaggacaaagctaaggcagtgttaactggaaatttcatagtgctaatcacctacatcaagttaaaaggatctcagattaacaacctaacatcatacctagaggactagaaaaacaagagcaaaccaaccccaaagctagcaggagaaatgagtaaccaaaaccagagctgaaatgaacaaatttgagacacgaaaatccatacagaagatgaaygaaacaaaaagttggttcttcaagagagtaaacaagattgatagagtgctacccagattaagttaaaaagagagatttaaatcaacacaattagaaatgacaaaagggacattatcactgaccccacagaaatacagaagaacctcacagactgctgtaagcatttctatggataaaaatt

SEQ ID NO: 736104 - DNA, 567 bp, Homo sapiens
tagaaatggaatcaaatgctgtgtggttcttggtgtctggcttcttttactgagtataatatctttgaggttcatccatgttgtagcatgtatcagcacttcattccttttcatggctgaataatattccattgtatggatataccacwttgtgtttctccatgtgtcttgttgatgcactcttgagttgttcccacatgttggttattatgaataatgttgctgtaaacagtgtacaagtttttgtgtgcacatatgttttcaattctcttggctatataggactggaattgcgtgtcatatggtcactctatgtttaactttttgagacgctggcagactgttttctaaagtggctgtaccattttacattcttccaagcagtgtttgaggattccaatttctccacattatcaccaacacttcttcttatctatccttttatgatagccatatgagtaggtagagagtggtatttcattgcagctataattcacatttctctgatggctagtgatgcggagcatcatttcacgtgcttttacactattagtttatcatatttct

SEQ ID NO: 736105 - DNA, 527 bp, Homo sapiens
tgccagggccatgggctgagctgcccgccagtcccgcaccaggcgcctgcactcctcagcccttgggcggtagataggaccgggtaccgcagagcagggcgcggtgcccgttggggaggctcggccgcgtgggagcccaccacgggaggctcaggcatggtgggctgcaggtcccgagccctgccccgggcgggaggccactgaggcctggcgagaattcgagcgcagcacgggtgcgctggcagtgctgggggacctggctcactctctgcagctgctggcctgggtgctaagcccctcactgctgggggctggcggtgctggctggccgctccaagtgtggggccactgagtccrtgcccacccggaactcgtgcagccctggttcccactggcgcctctccctccacacctctctgcaagcaaagggagccaaccagcccagagaggggctcccacagtgtggtggcgggctgaagggctcctcaagcacggccagagtgggcgccaaggctgagaaggccctg

SEQ ID NO: 736106 - DNA, 527 bp, Homo sapiens
tgccagggccatgggctgagctgcccgccagtcccgcaccaggcgcctgcactcctcagcccttgggcggtagataggaccgggtaccgcagagcagggcgcggtgcccgttggggaggctcggccgcgtgggagcccaccacgggaggctcaggcatggtgggctgcaggtcccgagccctgccccgggcgggaggccactgaggcctggcgagaattcgagcgcagcacgggtgcgctggcagtgctgggggacctggctcactctctgcagctgctggcctgggtgctaagcccctcactgctgggggctggcggtgctggctggccgctccaagtgtggggccactgagtccgtgcccacccggaactcgtgcagccctgsttcccactggcgcctctccctccacacctctctgcaagcaaagggagccaaccagcccagagaggggctcccacagtgtggtggcgggctgaagggctcctcaagcacggccagagtgggcgccaaggctgagaaggccctg

SEQ ID NO: 736107 - DNA, 633 bp, Homo sapiens
tatgctttttctgttccaggatcccatccaggataccacattacattgagtagtcctgtctccttaggcacctcttgattgtgatagttctcagacattccttgtttttgatgctcttgaaagttttgagggttactgctcaggtgttttgtagaatgtcagttgagatttgtctcatgtttttctcgttattatattggggtaatgtgtttcggagagaaagacaacagagataaagtacaattttcatcaatacatactgtcagtgtgacttgccacttttcttttttttttgagatggagtctccctctrtcacccaggctggagtgcagtggtgcgatctcagctcactgcaacctctgcctaccgggttcaagcgattctcctgcctcagcctcttgagtagctgggattacaggcacgtgccaccacacccggctaatttttgtatttttagtagagacggggtttcgccatgttgattaggctggtctccaactcttgaccttgtgatctgcccgcctcagcctcccaaagtgctgggattacaggcgagagccaccacgcccggccaacttgccacttttaatgttaaccttgatcacttgacttgaggtagtgtttgttaggtt

SEQ ID NO: 736108 - DNA, 609 bp, Homo sapiens
ccaaaatgtctctctccgacctcaaacttctcccgacctaaatacctaattggtgacttgccatttccattaaatttataataggcatctctaatgtaacgaagccaagaaacttgggttttcctcaccaaatgtcctcttcctaacaatttcctacttcacctcagtaatgcgatcatcatctacccagtggctcaggccagaaaccgagcctgtctcattcccacatcccacttctaatccttgctcaaatccagttctacctctgaaatatacccaaagccaatgatgtcccactgtactcactcctacagccatagcctaaattaaggtaccacgctgtctcctcctgggactacagcaacagcagattgccaggattcgagctccatcaggaaaggatttttgttcactgcygaagcctagaacactgcttgcccctaagaggcaaatatccacttaggttttcctcaccaactgcttcatgaccaactcgaactgctttcctcacctccactctagcccgttacagtccagtcttcacgacatcccaattatcttctaagtgcaaatcaaaccacagctcgcccctgctcagaatcctcccac

SEQ ID NO: 736109 - DNA, 625 bp, Homo sapiens
tggctcaggcctataatcccagcacatttggaggccgaggtgggcagatcacctgaggtcaggagttcgagaccagcctggccaacatggtgaaaccctgtctctactaaaaacataaaaattggccaggcatgtggcacatgccagctacttgcaaggctgaggcaggagaattgcttgaaccctggagggggtgttgcagtaagccaagatagcgccactgcattctaycctgggtggcagagtgagactccatctcaaaaaaaaaaatttttaaataaataaataaacaaataactgatgttgggaaaactgtatgtcacatgcaaaaaaaaaagaaattggacccttacattatatataaaaattaactgaaaatgacttaaatgtaagacttgaaatataaaactcccagaagaaaacataggaaaagacttcttgatattaggggaaaagtttcttgacattggtctttataattattttttggctgtgacaccaaagctcaggcaataaaagtaaaaataaacaaatggaactacatcaaactaaactgcttctgcgtagcaaaggaaacaaccaacaaaatgaaaaggtaacctatggaatgagggcaaatatatgt

SEQ ID NO: 736110 - DNA, 625 bp, Homo sapiens
tggctcaggcctataatcccagcacatttggaggccgaggtgggcagatcacctgaggtcaggagttcgagaccagcctggccaacatggtgaaaccctgtctctactaaaaacataaaaattggccaggcatgtggcacatgccagctacttgcaaggctgaggcaggagaattgcttgaaccctggagggggtgttgcagtaagccaagatagcgccactgcattctatcctgggtggcagagtgagactccatctcaaaaaaaaawatttttaaataaataaataaacaaataactgatgttgggaaaactgtatgtcacatgcaaaaaaaaaagaaattggacccttacattatatataaaaattaactgaaaatgacttaaatgtaagacttgaaatataaaactcccagaagaaaacataggaaaagacttcttgatattaggggaaaagtttcttgacattggtctttataattattttttggctgtgacaccaaagctcaggcaataaaagtaaaaataaacaaatggaactacatcaaactaaactgcttctgcgtagcaaaggaaacaaccaacaaaatgaaaaggtaacctatggaatgagggcaaatatatgt

SEQ ID NO: 736111 - DNA, 625 bp, Homo sapiens
tggctcaggcctataatcccagcacatttggaggccgaggtgggcagatcacctgaggtcaggagttcgagaccagcctggccaacatggtgaaaccctgtctctactaaaaacataaaaattggccaggcatgtggcacatgccagctacttgcaaggctgaggcaggagaattgcttgaaccctggagggggtgttgcagtaagccaagatagcgccactgcattctatcctgggtggcagagtgagactccatctcaaaaaaaaaawtttttaaataaataaataaacaaataactgatgttgggaaaactgtatgtcacatgcaaaaaaaaaagaaattggacccttacattatatataaaaattaactgaaaatgacttaaatgtaagacttgaaatataaaactcccagaagaaaacataggaaaagacttcttgatattaggggaaaagtttcttgacattggtctttataattattttttggctgtgacaccaaagctcaggcaataaaagtaaaaataaacaaatggaactacatcaaactaaactgcttctgcgtagcaaaggaaacaaccaacaaaatgaaaaggtaacctatggaatgagggcaaatatatgt

SEQ ID NO: 736112 - DNA, 606 bp, Homo sapiens
gtattacccttcatccagcctcttcttttgttaatattttgtacaaccagaggacttagtaaaactgagaagttaaatctcagtataatacattagctaaagtatacaacttaacttgattttcacaaatgtttccgctaatattctctttctgttagaaagtcctgtcaatttttcccacattgcatttaatcctcacgtctccttagtctctcctcccatctgtgaaagtcccccagtattttcttatctctcaggaccttgacacttctgaagactattggttagttattttttccaatgtcttccaatctgggtttttctgatgtcttcttaagattatattgagattatgaattattgaacaagataccagggaggcggtttgctcttctcagtkcttcataccaggggtacttgatgacaatgtatggttttgaaacatccttcaatgctcttagattgtttaggctggtgaggagatacaagaagtatatctctgaagtgagcaaggatgggatcgagacaccaggactgaagagggaggtggcaagctctcctccctgtattatatctttcatgcttggaagctactacaatgtagaa

SEQ ID NO: 736113 - DNA, 388 bp, Homo sapiens
aagggaatacaaagggacaggaagagacttttatggatgatgggtatgttatcggtcttgattatggtgatggttttgcatgtgcatacatatgccaaaacttatcaaattttacgttttatatatgtgctgtctatcgtatatcagttatgcctcactaaagctgtcagttgcaggaataaacatctaagacaatagctaggacaaagaggaaaaaagtatrttaaatgatgcaggagagagctcaagtattcaaatcttaaccttatagcaatggcaagtggtaagctgaggtataagcaagagataacatcagatctgaatttttaaaaattaataattatagtttcagagtagaccatggtctcaggaaatggggtagcaagaa

SEQ ID NO: 736114 - DNA, 627 bp, Homo sapiens
agccggcgacacacacagcgaaccgaacgtcgcgcgaagatgacgtaccagagcacgctcatgagactcacgcagcccggcggcgcagaggcgggtcaggtgggcggggcgatctggagtaggaggtgtgaccggagggcgaaattggggcttcctctrctctggtgacccagaaccgtcaactgaaatgaccctgtctgtgtagtactccggcaggatgggcctcggagcgtaaaggcggcaaaaacaaaaatattaaaaaaaaggagagagggacaaaaaaaagaaaacccgaaagtttcagctgcattgctgcggaacgttttttagccagaaggcgaaagaagaaatcggaagtgacgtcgcggccaaaacaagcccgggcttggaggcctgtactgaagctggcctcagatgggaaggcccgactcgctgtctgctgtcgtcggtggtcgcgagaccttgcactctcaccgggtcggcctccagcccctgtgcccgggatccgctcgccgcggatgagcgagagtttcttcctgggacttttcgggcacagctggccggtggcgacagaacggactttctttcctgcaagagtctcccctccagcgggagacagcgggctcc

SEQ ID NO: 736115 - DNA, 627 bp, Homo sapiens
agccggcgacacacacagcgaaccgaacgtcgcgcgaagatgacgtaccagagcacgctcatgagactcacgcagcccggcggcgcagaggcgggtcaggtgggcggggcgatctggagtaggaggtgtgaccggagggcgaaattggggcttcctctgctctggtgacccagaaccgtcaactgaaatgaccctgtctgtgtagtactccggcaggatgggcctcggagcgtaaaggcggcaaaaayaaaaatattaaaaaaaaggagagagggacaaaaaaaagaaaacccgaaagtttcagctgcattgctgcggaacgttttttagccagaaggcgaaagaagaaatcggaagtgacgtcgcggccaaaacaagcccgggcttggaggcctgtactgaagctggcctcagatgggaaggcccgactcgctgtctgctgtcgtcggtggtcgcgagaccttgcactctcaccgggtcggcctccagcccctgtgcccgggatccgctcgccgcggatgagcgagagtttcttcctgggacttttcgggcacagctggccggtggcgacagaacggactttctttcctgcaagagtctcccctccagcgggagacagcgggctcc

SEQ ID NO: 736116 - DNA, 600 bp, Homo sapiens
taagacactgtattttcatcttcttagagttcaaggcttcacattttacttataaaccagatcactgatcaataaatgattttgtagtaaaagctgagtgatttgcactgtaattttgaatttgaatataatatgaatatgaaatcacctattttaacaccttgaatccacaatttttttaaagtagaatcattgtagaggaagtttttctatttaaaatacaaaaatattctatatagtataagtatgttaaaaaaaagaaaaacagcaactgtatttgtgttagtatttaactgtatttctgttagtcactgtatttgagaatgtaagataaatatatctatattctaaagcatgacaaaatctgttttttctttggaaacactaaatccctcctgatttctgagtcacatactgtaccaactgagctaggaagaatcttcctgtaggactctcaycccacctgtaggccatttctggtttacttatataaatttgcataggacaccaattgcttttccttctgtagtaaggccatccaatcgtatcattgaagtcaatgatcaaatgctactaatttttaaggagaactctccctat

SEQ ID NO: 736117 - DNA, 639 bp, Homo sapiens
aagggagatggaaattcatagtgagtaatttcttattactctaaactatcagagtatggtattttctcagaacttacatactcattttggctattttttaggaaacaatctgagaagaaatttcatcatttctgaattttgaaaaatgccagtgattggaaaccctaacaacctaattatgtaaatactttttaaaaatatgaccctgagaagccagatacagtacacgtctgcagtcccagctactagaaagacagaggtggaaggattgcttaagctcaggagtatgagaccagcctaggcaaatagtaagaccatatctctaaaaacaaacaaacaaacaaacaaacaacttaataatttgatttttttaaatgaccctaaccaagttgcttaaattctctgaactccaatttccagatatttaaaaygatcaaatctgacctaccttcctacctcccagaattgttgaggattgaatgaaatgttaataggagccctctaaaaactataaaaagatatacaaattttattttcttacacagaagaaactccgcaaaactactaaaatctctttcttgtacagagaagcaaactaatggatagaaggaaagcaatagcaataattaaccatgattt

SEQ ID NO: 736118 - DNA, 652 bp, Homo sapiens
ataagaagttacccccaagccccttccccactaaaaagaaaccagcaaaactagtaattgtgaaactctcaccacccaaggacatacaatgctagctgcagttttcttgcctgctctcaagccctgagcttgatcaatatttaaatacgtacttggctttcaacttctctaggttcaaatattaagcaaagtgtttgcttcagcaaccttaaaagaagccgtgactatctgaggcaggaagctatcagttgtgtaaataaccctttgcayctgattgatttcactgctccagatataggtcactcaggacattgctggcactaagcttggctgggacagcatttgttttgaattcaaagactatatattctctacagacaagggacattcagccagcaagaaaccaggctggccattcagttagggaaattctaactgcctagtgagtattatgccaatgtcctagctcagctctgtcttttctagagattcaatccccattcatccttacatacttcactccagatagacctcctccataaatccttacattgtcctggtttctgctaccctctgaattttggcaaagcataatggccttactacacagtgtagcacctgattatattaactgtcacatgttggacaactg

SEQ ID NO: 736119 - DNA, 645 bp, Homo sapiens
gaataaagaggctttgggagagaattgccctctttaataaactagtggcagttcagcatcatttaaatgtattgtttcaattaatcacagcaattgcaaagtgatccttaagcattgagagaaaattgtgctttcaaacagagtgcctcaagtctgccaaccttgctgagctgttctgcagcattttagaaatgcatatgatagcaggaagcactggagaaaatcatgcttactcatatttgagctggcaattaattttctaagctgtgaagttcttcaacttcttttgcaaagctaggtcacctgttttcttaatctaatcatctaaccttcccctaaagcatagaagtttacttttctttgcattaagttctacccagataagcagtgcaaggaaatatcctacatctttaattctaacgctccataaattgtaaggcaaacaatcattttagtaatagttttccagggggaacatgaagaaagaaatgctatcatrcaacgcacgtggattagtgttttactgaaagtttattgccaaacaattcatgctttgtggtagtttgggtgagccttgtctagaagcagtctagccagagagaaaattctaaaactgccagcgcaagcataacaataatatctgtt

SEQ ID NO: 736120 - DNA, 631 bp, Homo sapiens
tttatgtatgtgtgtgtgatgtgggatgctagtgtttgcatctaacctagcccagtgatgagcgaagtagcgtttcaactcttcaactacctccttccaaaacacacacaacaaaatatttatacatttttttaaaacaagcttaccagatrtcaaatattagttaacaccgaatgccccaaattgtgtttataggacaccaattcacaaaaatccttttctaatgttatttaccctatattaaatatcacaagaaagtacttctctggggaaaaaattaagatgtgtttttctaacttactgatgtttactcatatcgaaactgaaaaaagtttcaaaatgtgtctttaggagaaaaaagatatatttacaagtatataatggtattaaattgaaatttacaatttagaacatgaaattatataaaagtaccatatattatatatcaaatacaatttatatgatagaatatttgtaaattgttactctcttattaatacacaaaaaaggttaatactaagtattcaaaaatgttaaatattaaaccataaaggatgtttaaggacacgtatttttcctcttacattttctgggtacataattcattataaaaaatggaaaagaaaaatat

SEQ ID NO: 736121 - DNA, 505 bp, Homo sapiens
gggtgtgcttgtctggtaaacaaccaagagtgtcagcccagattcaatctcgatcataccgccggtccactcaggctttttatcaacaaatattaatccaggctctactttcagaggaaaagagccagttaataaagaaggagactttaagagactcagactgtattattattaatcaatgccttttcagaatttacagggcgagttgaactacctcactgcagtgyaattttcttttaaagaaaattgtcttgaattgtttttatgatgttaaagatcttacccaaacttgcttctcgatttaaaggggaaacaatacaaactttactctgagctatacttaatccatgtacatgtgggagtacctgacatttgactgatatcagatatttaagatttgagctagtagactttacaatgcaactttttattccattctagattcaataggtggatatagatgcaggaacccaaactgatgccaaatttcaattttcccagtatg

SEQ ID NO: 736122 - DNA, 505 bp, Homo sapiens
gggtgtgcttgtctggtaaacaaccaagagtgtcagcccagattcaatctcgatcataccgccggtccactcaggctttttatcaacaaatattaatccaggctctactttcagaggaaaagagccagttaataaagaaggagactttaagagactcagactgtattattattaatcaatgccttttcagaatttacagggcgagttgaactacctcactgcagtgtaattttcttttaaagaaaattgtcttgaattgtttttatgatgttaaagatcttacccaaayttgcttctcgatttaaaggggaaacaatacaaactttactctgagctatacttaatccatgtacatgtgggagtacctgacatttgactgatatcagatatttaagatttgagctagtagactttacaatgcaactttttattccattctagattcaataggtggatatagatgcaggaacccaaactgatgccaaatttcaattttcccagtatg

SEQ ID NO: 736123 - DNA, 610 bp, Homo sapiens
gaggcagagattgcagtgagcggagattgtgccactgcactgcagcctggcggcagagcgagactccgtctcaaaaaaaaagggaataagtttagttatagcaatgttttgttttttttgagacagtttcgctcttgttgcccaggctggagtgcagtggcgtgatcttggctcaccgcaacctctggcctcccagggttcaagtgattctcccacctcagcctccygagtagctgggattacaggcatacgccaccacacccggctaattttgtatttttagtagagacaggggttttctccacgttggtcaggctggtcttgaactcccgacctcaggtaattggtccacctcggcctcccaaagtgctgggattacaggcgtgagccaccacacctagccagcaatgttactcaatattttgaaacctgaattgtgtgccaaaaaatcacagttacatataatcaaaaattaacttatcagttgacaacttggttagtcttttaatttcattgaaaactaagaattagaaaccatccgacttgcaaaaggatttatctagtcattagtcgtcactctcagtgagaaatataacaaaaagcctttagc

SEQ ID NO: 736124 - DNA, 607 bp, Homo sapiens
cccagcctgggcaacagagcaagactctgtctcgaaaaaaaaaaggaaaggaaaacctggagcaggcatggggtatacgtcatgggtcactactcttggatacagattgacgaaaaccgacaatcaattggcttaagccgttttataacccaacattaggccagcctggtatccatgggtcaaatactgaggatcaagcttkgatctgctcaggattccagcctcgctcaaggctcctgcttccagatgaccccaggtgtgcatttcgtccgtccagcgatgggtcacatgtccatcacctgatccaggggtgctacagtgctctgtgttgggcaagctttggccatgggggtttacctcaccctacttttacgcaagagtatgtggtggcctaaacacacgtgcgtgggaccctgcttcaataccagcctttatccacagatgaccccacgccttctgctccagagcatcagggttataaacacatgggacacacggggcacacatacactcccacgcaacatccacacaccccacaaaactacctgagcccacatagtcagggcagggacaggcacagaacaaagtgggtgcacagggactcgca

SEQ ID NO: 736125 - DNA, 592 bp, Homo sapiens
atgaaccatgaattgctttaaaacacaaacagctttaccatgtaataccaaccctccttttcacattgtgatttagttattaactaaatcctgttctttagaaaggtaccacacattattttagagcacaacatccacgttttaaccacagaagagcactaacatggaactctctggaagatgaatattcccaaaygttcaacacatggcctgtgaaacccagtcccatatttatttttcatgttacatttgctgatggaagttatatctggagttaaaagtatttggcagattcataaggatcctttttaaactaaaatttgacaatgtcattttagcatataatgtcattctcactgtgtggagatgtgggaatggaaaatatatctggggaaaacactgacacctggaaggcttctgtcaactttcaacaaaagcctgcaaaaaactgcagatcagatgatatgcaaatgtgtttcaatttcatgtacaccaagtacatcgtatcctgttattttgacacacattggaaaatcatttgattacttatcttagaatatttctttctacatgaatcttctcattaaaattt

SEQ ID NO: 736126 - DNA, 592 bp, Homo sapiens
atgaaccatgaattgctttaaaacacaaacagctttaccatgtaataccaaccctccttttcacattgtgatttagttattaactaaatcctgttctttagaaaggtaccacacattattttagagcacaacatccacgttttaaccacagaagagcactaacatggaactctctggaagatgaatattcccaaacgttcaacacatggcctgtraaacccagtcccatatttatttttcatgttacatttgctgatggaagttatatctggagttaaaagtatttggcagattcataaggatcctttttaaactaaaatttgacaatgtcattttagcatataatgtcattctcactgtgtggagatgtgggaatggaaaatatatctggggaaaacactgacacctggaaggcttctgtcaactttcaacaaaagcctgcaaaaaactgcagatcagatgatatgcaaatgtgtttcaatttcatgtacaccaagtacatcgtatcctgttattttgacacacattggaaaatcatttgattacttatcttagaatatttctttctacatgaatcttctcattaaaattt

SEQ ID NO: 736127 - DNA, 450 bp, Homo sapiens
tcttaccagcaactactttatattaaaatacgggataacagaactgagatacaaaaaagaaaaataaatctcaataatctgacagtaagtacaattcagtgtaattcaacaaattgaattgctagcagataataataactgagttaacatgtttcctcttccattttatattggcatcttacactagactccaatgtgttaaaatacaacaaactttatgaatcttaagaatcacatgatgtctttgttaaaaatacrgagtcctgagctacattcctacagattttgattcattagtttgagtgaatttgggaatctttatttgttataagggcttttggagattctaatgccggtggtctgaataccaccactacatgagaaacatggactttgaggaataagtaatgtggggatattaattttttgtataaacaaatcagctgggca

SEQ ID NO: 736128 - DNA, 612 bp, Homo sapiens
ctttctaagggattgaaagaggaaattagaaagaacctcaaaatatcagtgactggcaatccagtaatcaaaggacatattactatacatatcatttacatttcagaaataatattaattgggtatttgccagtagtccttatttaggcagggaagaaaaaaattctcctaatagcaattatactgtmcttaataagctcctgctatgggccagtcaatgtgctaagtgattcacaaatagtatcttaatcctaaaaataactagatgaggcagataataatatttcctccatttcacagatgaaaacagagagcaactacataaatttcttgtctttaaagtaatgagtagagaagccaggatttgaactcaggcactttccaaacataaacattgtgatacactctacaatactaaaaaagttaatttgtgtattccagtggagaccacattgttactagctattgtcaaacctgaaatattagtactgaagctctactctatgttttgcagaactcatcacctttattgattaactatgtgctcattcctttcactttgtagaattctatttctgtgctggtttgcacaatagcttaaatgttttcttt

SEQ ID NO: 736129 - DNA, 612 bp, Homo sapiens
ctttctaagggattgaaagaggaaattagaaagaacctcaaaatatcagtgactggcaatccagtaatcaaaggacatattactatacatatcatttacatttcagaaataatattaattgggtatttgccagtagtccttatttaggcagggaagaaaaaaattctcctaatagcaattatactgtccttaataagctcctgctatgggccagtcaatgtgctaagtgattcacaaatagtatcttaatcctaaaaataactagatgaggcagataataatatttcctccatttcacagatgaaaacagagagcaaytacataaatttcttgtctttaaagtaatgagtagagaagccaggatttgaactcaggcactttccaaacataaacattgtgatacactctacaatactaaaaaagttaatttgtgtattccagtggagaccacattgttactagctattgtcaaacctgaaatattagtactgaagctctactctatgttttgcagaactcatcacctttattgattaactatgtgctcattcctttcactttgtagaattctatttctgtgctggtttgcacaatagcttaaatgttttcttt

SEQ ID NO: 736130 - DNA, 625 bp, Homo sapiens
tgagataataaaagatgggaaaaatgttcactataaatttactttgaaaaatataccaatataacatgtggacatttttgtatgatatatgtgtgtgtgtgtgtgtgtgtgtgtgtgtgtgcgcgcgcgtgtatgtgtgtgtgtgtagaaagagacagagagagaatattaaatatgttacgtatattgcattacctcacacaaatgcacacaattaaattcctactgcaaaatgtagagactaggccgggcaccctggctcatgactgtaatctcaacactttgggaggccaaggagggtggattactagatcaggagttcaagaccagcctggccaagatggtgaaaccccgtctctactaaaaatacaaaaattakctgggcgtggtcattggcgcctgtaatcccagctactcgggaggctgaggcagagaattgcttgaactcgcgaggcggagtttgcagtgagccaagatcacaccactgcactccagtctgggcgacagagtgagaaatatgtctcaaaaaaaataataaaaataaaaaattatagagactagcctggcctgtatagtattaagaaaagatcaacagaatttattcagagccctctatcacaatgat

SEQ ID NO: 736131 - DNA, 516 bp, Homo sapiens
atgcatgatgcttggcaatgtcaatgtttaaaaaatgttcgttgtaataattcatgtaagtaacagtaagctataagtatagcctgtattatttgtagatgttggctgtaataattatcattgttcaaatcaaagccaattcctagttcttagccttatggtaggacatttttctctgctactgtaatagtgtyggaaccataaaccttccttttaattatatgttatgcaagtggaacaattagtaatggctttataaagattacaaatctacttataaaataaatcaaccacataggaataccttcattatccattttcttacactgggacctaattacttttaaggctcctaatataatttcagctctatgaaaaccaactaacaacttctaataatgcatttgattcacagttgttgatttgcattaccatgaatagttaataaatagaacagaaagctttctcttcttaggacttattagtctccttgattcataattattaatggtccat

SEQ ID NO: 736132 - DNA, 602 bp, Homo sapiens
taatatctttctttaaaaagaaaaaaatgatttgtagtttccttatttcttataatttatattttcagtttactgttttgttattccagcaatattagttactgaagaaaagcacatgtcacctcttaagcatgtgattgtgtatatgctaagaaaaaggggtatttagtcaaagtttttatgcatgtttttattgagtaaatgtctaacttacataatggtatttttttttttataagtagtaaccattacagcatcctaagtagtccagaaactttrggaacattgttcacagtataaaatgataactgaaatgttttaagctaaatcacttctatataattgaaataagacttaaactgcaccaggtgctgtctctaatatacccatccccttgagagtttggtgttgaatacttccttggtaatggaaaggcacgccaactatgcccactacttgtatcgacacatactctttatctttttataaaaaaaaaaaaaaaaaaaaatactatattgtttcccctatctaaatgatggtcacagaatctgtttttttttttttttaagcaagtggagtaaataataaattttaggaaaatc

SEQ ID NO: 736133 - DNA, 581 bp, Homo sapiens
aaagtaaggaagctgtctgaacaggatccaagtgcttaatatatgctgaggtcccacttaacatttattatctgttatcgaaggtaggagaaaagcatgtaaattatatggatgtctctgattcaaggaaagggaaagataaatacttatgcagatgctcagtcattttcatcagccattttctaaaacatagccyatctttttttagacttatcagtaactttgtaagaagctctttccattgcttgtaagttaacctatttttacttaaccattgcttacattagcaaagaaatccaacaaaacttgacgctcaaggttgttgtgcaatagatgtaatttgcagaaaaaatcagaaccttaagaaatctggaggactttaaaatgattctcttcatgagtacttttttccaaacagatgtaaaagaataaaagaaagaagagaatcattagcaaatataccataagattttgggtgggtataaaagtgaggcaataattttctgtgtctgctgaacaggtatgcttttgaggtacagaatttacaaagaatctaccactaagtacacaaacttttttat

SEQ ID NO: 736134 - DNA, 632 bp, Homo sapiens
attagttactattgcactgtcaaaagtatttcccttaaaactgatagagcacaaggggccattggtaatttaaaattatttttaataaaagaattaaaccaatcttatatcttctttcacttttattatagcccccctgcctctgtgttccaggggtatatagaaattacatttytacaatctgtatttatttttaaaatgtaattcttcagtatacacctgtctttagtaaaatgtgggaaatgctttgcctgaatcccttcataattattgttgtattgtcattccttttatatcttgatgggataggatgatttctaaggtgactttcaatgtggcaaatttgaaactcgtggaatctatattgtaatatttaatttaataacgccatttaattctatggcatctttcctttttatgttacaatatttaagattgagcatattgtaaataaaaaagatttgactttttgaggggaagcagctttattgagacataattcacatactacacaattcatccatttaaagtgcacagatagatgttcttagtatattcatagagttacacaatctaaatcacgataaattgtagaacatttttatctcttgcccccagaatcctacatgata

SEQ ID NO: 736135 - DNA, 601 bp, Homo sapiens
aagtgttgccaagaatgtgaagttggtttaacattgaaaaatcaatgtaattttaactaaaaaaaaaaaaaaaaattctatatgacctaagctaaaataaaaatcgtaaaaaagtaagtaatttcctggaaaataagtagcaagccaagaatgtctgttttcacttcttatattagcatttctttatttagtctatcctattaaatagggcactaaaagacacccagactagaaaggaagaatcaattgtcttttactgaagatgacttggtcatctatgccagtaaattctacagaatataagaagaagaacyacctatcacaagtttggtaaaattgtagaaaataagatagtgatacataaatcaatgaaatgtatatgtactggacacaaacaattggaaaataaaatttaaaatagcatttaaaatagaatcaaatatatcaaatagggatgaattgaaaaaaacagatgggtaaaacctgtacattaaaaactcaaaaatgaaaagttaaaaaattaaaagtgagatgctccataatgcattggaagactcagttattaggatatcaaccacctccacattcatctatagattca

SEQ ID NO: 736136 - DNA, 625 bp, Homo sapiens
aacgggatggagggacggggtcccgggaccctgcagatgggagcgtgcccgaggccctgcctgctcacccgctccccggagagccagacaaaaagaaacagcatgtttctgaagacttgtgtgtcaggctttgtgcacatttcagacaggagccttcacggggctgagtggacacaaagccgggtgtctgaattcctgggccccagacactgatctacatctaaatagaagaaaaatcaattaaacamtctttggaaatccctccgagcttcggggcttctcggatggtgaaggatggcagctttttatcttgtggccagagaggaaatagcccttctccttggttctcctctctccagacctgcagtttccactttttgctttcttttttttctggagacacagtttcgttcttgttgcccagactggagtgcaatgtcacggtatcagctcacttcaacttccgcctcctgggttcaagcgattctcctgcctcagcctcccttagtagctgggattacagctgcgcaccaccaggcccggctaatttttgtatttttagtacagacgaggttttgccatgttgaccaggctggtcttgaactcctgacctcaggggatccgc

SEQ ID NO: 736137 - DNA, 651 bp, Homo sapiens
atagcatcagattcataaaacattgcctgggtggctggctggctgtctcactgtcttgaggctgaagcaaggcacaggggaccaggaaggagacattagttgccaagtctctgctgacaagaatacttgcctccgcccttttagagcatttaacataagcaaaagaaacaggggaaaaagacttggcttgccagcaaaccattacacaaatctaaagatgtggtattaagttttgttcctgtaagtgttctttccatgactagccctattaattggtgcttcagcttcaaaactatttcagtttttatgtcacagaagagacttgagaatccaattagctacgtttattagaaacacttgaacatttttctacacattgttttcatgttaaataacayagtgataaggggaaaagttagaggaagtttgaagcgattgcattaggctttaattttccaccaagtgtttgcatgtatcctggacaaaccaactctgcaaatgcaaaaggaaactggttttttcactctttgggagaaagcacaaatgaaacagcccaattatagggaaataacaaagaacggtgggtaacctacttgacagacaacttaatttaactctattttcaatatctagaatacacattaagtagcc

SEQ ID NO: 736138 - DNA, 651 bp, Homo sapiens
atagcatcagattcataaaacattgcctgggtggctggctggctgtctcactgtcttgaggctgaagcaaggcacaggggaccaggaaggagacattagttgccaagtctctgctgacaagaatacttgcctccgcccttttagagcatttaacataagcaaaagaaacaggggaaaaagacttggcttgccagcaaaccattacacaaatctaaagatgtggtattaagttttgttcctgtaagtgttctttccatgactagccctattaattggtgcttcagcttcaaaactatttcagtttttatgtcacagaagagacttgagaatccaattagctacgtttattagaaacacttgaacatttttctacacattgttttcatgttaaataacatagtgataaggggaaaagttagaggaagtttgaagcgattgcattaggctttaattttccaccaagtgtttgcatgtatcctggacaaaccaactctgcaaaygcaaaaggaaactggttttttcactctttgggagaaagcacaaatgaaacagcccaattatagggaaataacaaagaacggtgggtaacctacttgacagacaacttaatttaactctattttcaatatctagaatacacattaagtagcc

SEQ ID NO: 736139 - DNA, 573 bp, Homo sapiens
caccaaaaaataagactgacaattaaattaatgcaagaatataataagaatttccactgattacacaatcagtggaaacgaacagagaattacaattagtggctgatgtggacatacccttaaaaaaaaaatggcagataccggtctaacttatgtacatactgatatagggagccatgccagggtccagcgttgtaatcatgctttctactgaatgttttgtcttatcaagcacagacttcaccataggattcccagccacaccctgcataaaacaaatcaatatgtaagtattcactctaagtgaggaacaccatgatcttcatgattgtgaagaaaacttttttaaaagtttccaatgcatcctaaaccagtacttttgtaagatatataaggtcatgacaatatcaaatkgctattaagtttctaaatgatactctcaattttttttcctgactcagcagtgtgtagaccagcagcaatctacagatcacgcttgagtagcatgggtatggaaaggatgctatactatatatacatatatatgtgtgtgtatatacatatatacaattt

SEQ ID NO: 736140 - DNA, 594 bp, Homo sapiens
ccaccccagctctcctcattccctgtctctttccacctgtcaaagctctgtccgtccttcaagcccacctccaatgccacttccttcccagccctgtgctcggttcccatgctctgccagcaacactctcccatcttccccatcctgcctttaccctctcatgtccctctccaaaagcaccaggcaagtgtaggtaaatgcttgctgaaataaagtgtaccctgattgaattgatctgcaaacataggaatgtttcagcccttgagtaagccatctccctgttttgttatctttgaactccacaaggycgtgtttttgaaatttaaatgtctcaaacgttttcttacactctacccaaagacagaagcttcctgttgtccttgctcacttaattctttcaaagaccatcaacctcagtgttgctaatgttcacaactgggtaatgttcacagctcgttcacagtttataaaaccattctctctactttttgtatatccttgaaaaatgtcaataataataagaattttttaaggcacagtatttgagatatttgggaccctcttaggaagtccttgtttggttaggactatttc

SEQ ID NO: 736141 - DNA, 642 bp, Homo sapiens
gagaagctaaagaagcagaaatattcttgtttccagaactctaaatcaaagcgataagaaacaagagataatggacagaagtccaatgataaccataactgttacagacatgacacagattttacagcactgtctccttaaaagctcagcatacgttgccccattatggttttcaataataaacacactggtatgtaaaaagagaaacacagtacccctggcgtgtaaatgattttcagaacctaggggttattgggcaygtctcctgagatttcattcacaaacagggccctgaaaatgactgacaaagaacagttgctgttacttgtcagctaagatgtggactagttccaaaggaaaagaaaaggcttttctcacactcatctttcaaaataaagtaactgaatagctttaaaaataacagcaacaaacaatatatcaccaaaaaccaggtatcaactgaaacaataaacttctttactctctcagtgggtgggagtcaaaaccaactgtcagacttgtatatctgcttcttttccatttttcattagattttcctttcaaatgaatcttggtagctctgagtagcagagaagaaagtcagaaaaagtgactgctgcatgcagatatcagtccaaggaa

SEQ ID NO: 736142 - DNA, 625 bp, Homo sapiens
atcctaaatatatatgcacctaacactggaggtcccaaatttataaaacaagtactactagacctgcctaagaaatgagatagacagcaacacaataatagtggaggatttcagtactccactgacagcactagacaggccatcaagacagaaagtcaaaaaagaaatacagacttaaactatatcctaaaacaaaatggacttaacagatatttatagaacattctacccaacaactgcagaatatacattctattcatcagcacatggaacattctccaagaaagaccatataataggccacaaaacaagtctcaataaatttagaaaatcaaaactagatcaagtattccctcagactctagtggaataaaattggaaatcaactccaaaaggaaccctcacaaccatgcaaatacatggaaattaaataayctactcctgaatgatcactgggtcaacaatgaaatcaagatggaaattttaaaatcctttgagctgaatgatagcagtgacataacctatcaaaacacctgggatacaccaaaagcagtgctaagaggaaacttcatagcactgaatgccaacatcgaaaagtctgaaagagcacaaataggcaatctaa

SEQ ID NO: 736143 - DNA, 644 bp, Homo sapiens
tggaacttctgcaggctatcacaggtcatttaatctaaaacatatggctctagccattactatgttttctgaaatactcgaacagaccttgttcttaacaaggtcttcatgttattagtttcactcatggatttttccagcctcctgcttattctacaactgcctttcattctcgtttagactggggtggaaggagcatgaaagagttcccttctttctgactttctcttcttaaatctttgcaggcttaagaatctatgagaaatgagaaagaggaccacagataatcacagctctggataaagtctattaagacaaatgttcaaagcagaatgagatttttaatttttatattaaaaattaatttatagagtaaatttgaaatactgctatattgttttaattagggtaccaaaaccacttcttgagccttattcattaagaaatatacayatttgcatttgtaaataacaggttcaatttgtatattttaacatactttaaatatatttaaataaagtatattctttcacagctaaaagcccctccaccccactatccacatacccagctctacttaaactggaactgtcatgctacagaatccagcttgcaaataaaattttggttttgcaccagattat

SEQ ID NO: 736144 - DNA, 563 bp, Homo sapiens
accatcatttcgtcaccactcctttggcacttatggcctgtgctatttagtttacatttccctcatgtggctctgtactaagtgttacagcttcaatgtggtgttttgtccacacctaagttgtaagttccaggagggcagagctgtaccttgtacttttctgtaacccccaggtaactcccacaggracacacacctagcagtgcacaatcagacatttttggattgccaatggttgatttttcttcctcgcatgaagggggtaagattctgcccactgtcaggtgttctcctttacgatgaaataaactgtgccaagacccttttaagccatttatcttctgactccattatcacaggctaattacatgcagggttaagttgatagccagatgatacagaagacagcatcaagaaagtcggggctctaaagacaaacacaccctctcggctagagctctgccttgggttggccctatcacactctctcagaatcattccatatgccatgttggcacaatggcttaaattgcccatccttacattcatccattagatctacc

SEQ ID NO: 736145 - DNA, 601 bp, Homo sapiens
attttattaaaattgcatcttgtcagaattattttacatgttcatcactttcaaaattatttaggcttttaattcactgtcctattgtccaatggtgggcacatgcagagctcactaaataaatactgatttgaacttctttgaatgatctcttctggtctctgtttatattacattataaatataaaatagtaaactccttgagagcaaggacattatgttccatgtatcctccttatactacatgccatcrtacatatagcaattgcttcatattatttgaatggttgtttaggtagaaggataatatttttgtttgttttctttaccaaagcaaagctgtatttctgttaatattcagggggtacctgtggttgaaagctagtatttctttgcagatgacctgtttgtgctcctagaattaataaacctatgaatagaaaacctatattttctagatttgcaagatcagatcactgcagttagcaataagtgttacagtaagctgtataaaaaacaattcagttaaattttctgtctcagaaaatgtctcaatttttaatcaagacagagaacttgaaaatttctcttctatcataca

SEQ ID NO: 736146 - DNA, 602 bp, Homo sapiens
attttattaaaattgcatcttgtcagaattattttacatgttcatcactttcaaaattatttaggcttttaattcactgtcctattgtccaatggtgggcacatgcagagctcactaaataaatactgatttgaacttctttgaatgatctcttctggtctctgtttatattacattataaatataaaatagtaaactccttgagagcaaggacattatgttccatgtatcctccttatactacatgccatcgtacatatagcaattgcttcatattatttgaatggttgtttaggtagaaggataatatttttgtttgttttcttyaccaaagcaaagctgtatttctgttaatattcagggggtacctgtggttgaaagctagtatttctttgcagatgacctgtttgtgctcctagaattaataaacctatgaatagaaaacctatattttctagatttgcaagatcagatcactgcagttagcaataagtgttacagtaagctgtataaaaaacaattcagttaaattttctgtctcagaaaatgtctcaatttttaatcaagacagagaacttgaaaatttctcttctatcatacac

SEQ ID NO: 736147 - DNA, 602 bp, Homo sapiens
attttattaaaattgcatcttgtcagaattattttacatgttcatcactttcaaaattatttaggcttttaattcactgtcctattgtccaatggtgggcacatgcagagctcactaaataaatactgatttgaacttctttgaatgatctcttctggtctctgtttatattacattataaatataaaatagtaaactccttgagagcaaggacattatgttccatgtatcctccttatactacatgccatcgtacatatagcaattgcttcatattatttgaatggttgtttaggtagaaggataatatttttgtttgttttctttaccaaagcaaagctgtatttctgttaatattcagggggtacctgtggttgaaagctagtatttctttgcagatgacctgtttgtgctcctagaattaataaacctatgaataraaaacctatattttctagatttgcaagatcagatcactgcagttagcaataagtgttacagtaagctgtataaaaaacaattcagttaaattttctgtctcagaaaatgtctcaatttttaatcaagacagagaacttgaaaatttctcttctatcatacac

SEQ ID NO: 736148 - DNA, 417 bp, Homo sapiens
aggagcaatgcagaatcaaatggaggaggaggaagcaggcgatgtggtagtttcagaaagggagacactcccagcacctgactacatggtaaagcttttcatgtgaatttgatattcattttcaatttcgtatagtgctttcccaggattcaaatgccatgtaacattgtgaacttgaaacagttttttctttcaatraaacaacataaaggcagtttgtaaatttgcttttaccaccatgaaacctaaaagaataaaatccgtcacagaatattatccatttaaaagtccttattctgaggcattagccagattttccactggtttcattagaagaaactgacaatgattgtagagcacattggagaaagttccccagctcgcttacgagaagctttcaacttttcaattgcgttt

SEQ ID NO: 736149 - DNA, 590 bp, Homo sapiens
cccgagttcagagccagcctccaagagtatcttacatcccagcgtctcctggaaggccgtatgatccagcactggggagaggagggaaatccccaggactcgaatgcccatcccacccttggtgtagtgaggactcatcctgctggaaaggcccctgaagaacttcaagttccaatrtcccgtttttacagatggggaaactgacatgaagaggagtccaaagtgacacagtaagttggggcagcattgggatttagagcaaagcttctggggtccttgaaaaggacctcattccaattagctagcactccatctctaagcctgttgtagggaccaagggaaaaaatagatagatatctgtatttatattacatatatataatatacatatgtataatatctttaagaaacagacacacggctgggcatggtggctcacacccgtaatcccagcactttgggagaccgaggcaggtggatcatctgaggtcgggagttcaagaccaacctcgccaacatggcgaaaccccgtctctactaaaaatacaaaaattagccaggcatagtggctcatgcctgtaatcccagcg

SEQ ID NO: 736150 - DNA, 618 bp, Homo sapiens
cctctctctgatcccagctgccacagcgtgcccctgcaacccaagacaggccttctccccctgcatgaaactgtgtactgcttcccattgctcccagcaagagccaagccccatgcagaggctggaggccagcaggtctgacctcgttcccacccgtctccgccactgctctcccttgcgttctcaccttgcctctgcacactggcctcttgcctgaaactggcacaccaggcacactcctgtcctgggcttgacaccggctgtcccctctgcctggactgctctgccccagatatctctaggctcacccctcacccccttcaagtttctgctcgaatgcagtcttctccatgagggcccactctgaccacaccagcagcagccagctgccttccctgcaccacgcaccccagcacttgtygctctgctctttcctgttttccgtaacgtgatctaacattacttccaggcaacctacttattgcgcttattgcttacagtctgcctctcccctcttcttccagccaaaatgtaaggcccagaagggcaggaagcatcaactgttttgttagctgatctatccccacagtgcctggccctttgtgggtgagtcgactg

SEQ ID NO: 736151 - DNA, 683 bp, Homo sapiens
ccttcgaccctctcccactcctgtatttcccatctctcccggaggcagggtctggcagagcctgctcagcccctgcagtctcaggctgacacccgcactccattccactccccatacctgggtgggatcctccaccctgactcccttcccaagtctcccaggtctgcctgggctgtccgaggcaggggcagaggctgcattctccacccactgttggtccttggcagctgcctggcagccaggggtccccaccttgccaaacttgacatgctgctggtagaggatgccatccttgataggggtctccagagggtccatggtcacggccaggagcagggccgccgcttcaagacctggggagactgaygacaggctggacgggaactcctcacacttccccttctggccacttcccgtccctccgtccagagacagctgcaggccggggggaggggagcctgtcttcagctcaggggctgggggcagcatgtatttcctccctggggttctggctgcccaaggtgcccacacctacctggagggagcccccggccacctgaaggcagccttctcacgcacctggttcagctgggcacgcgcgtctgatcgcagtctggctccccgagtcatgagttcccgcccctcccccgtcccgccccgggcagctgcgcaccctgggcctg

SEQ ID NO: 736152 - DNA, 566 bp, Homo sapiens
cgaggatcctgtgcccgaggcgcaaagctgccctacccctcagatcaagccgtcggtccctcgtttgtctgggggccgcgccctggtgtactgaagctcactcctcagactgccctcctccccacggaggccgaggccacgcccgccccmtgcgaccccgcggtcacggccccatccctccccggacgcgtgcccctcaccagtagctgccggcgctgccgtaacggcacatagggcacgtagtcctcgtcgtcctcatcttccgcctcggagcggcttcctccggcaggcacctcgtcggtgcgagcccgctgcaagcacacgccagtcaggcacggcctgctcccctcttcacgcccgctcccacacgcgcggggtctcgcctctctcctaccttccgttcgggttccgactcctccattctttgctgcacgcatgcgcgccacggcgaaaccccgcctcatccttgcgtgagacccaatccgatgtgaagaggcgaacgacggcgcgtaggaacgacctcggagttccggatcgcgcagagggacaaatttgttccggagata

SEQ ID NO: 736153 - DNA, 644 bp, Homo sapiens
ccacagtaactcagagatagagtcccattcttccgtgccatgatgatgaccacaaggcgagcaccaagaacaatagtaatgtttactataagcgggttctcatttaattagcatgtctaggcttcgaagagtcagtacaatacaattacaatcttgtatagttattctcgaaattcttttttttttcttcttttgagacggagtctcgctctgtcgcccaggctggagtgcagtggtacgatctcggctcactgcaagctccgcctcccaggttcacgccattctcctgcctcagcctcccgagtagccgggactacaggtgcccgccaccacgcccggctaatttttttgtatttttagtggagacggggtttcacggtgttagccaggatggtctcaatctcctgacytcgtgatccgcccgcctcggcctcccaaagtactaggattacaggcgtgagccactgtgcccagcctgaaattctttatgtggcctataaagcacaatatacagtcatcccttagtactcatgggggatcagttccaggacaccccccagataccaaaatctgcagatgctccaatctctgatataaaatggtgtcatatttgtatataaccaatgcacaccctcccacaatct

SEQ ID NO: 736154 - DNA, 580 bp, Homo sapiens
ctagaaggccctagtgtgtgttgttcccctcaatgtgaccatgtgttctcattatttagctaccacttataaatgagaacatgtagcatttgattttctgttcttgcattagtttgctaaggataatggcctccagctccatccatgtccctgcaaaggatgtaacgtttttcttttttatagctgcatagtattccagagtatatatgtaccacttttttaaaaaatttagggccaggcgcggtggctcaagcctgtaatcccagcactttgggaggccgagatgggcagatcacgaggtcaggagatsgagaccatcctggctaacacggtgaaaccccgtctctactaaaaatacaaaaaaattagttgggcatagtggcgggcgcctgtagtcctagctactcaggaggctgaggcaggagaatggcatgaacctgggaggcggagcttgcagtgagccgagatcacgccactgcactccagcctgagcaacagagcgagactccatctcaaaaaaaaaaaaaaaatttagtctatcactgatgggcatttaggttgatttcatgtctttgctatt

SEQ ID NO: 736155 - DNA, 672 bp, Homo sapiens
cagaagcaaaagatttattttaaaaggcagaaagatagaaaataaattacaaaatagcagttaagttcatccatagcaatggttaaatttcaattatctaaacatttcaattaaaagatagtgatggttagattggatttaatagaagacccagttataagataagctgtgtacaagaaatctggccgggcatggtggctcatgcctgtaatcccagcactttggatgccgaggcgggtgaatcacctgaggccaggagttcgagaccagcctggccaacatggtgaaaccccatctctactaaaaatacaaaaattagccaggcctggtggygggcatctgtaatcccagctactcaggaggctgaggcaggagaatcgcttgaaccccagagatggaggttgccatgagccgagatggcaccactgcactccagcctgggtgacaagagcaagactccatctcaaaagaaaaaaaaaaagaaatctactttaagtataacaacatatataagttaaaactaagaggataaatgtcatgcaaacagtaggcataaaaagctgcaaggctatattaacatcagaaaaaaatgacttaaagacaaaaagcattatcagagataaagaggaacattttataataatggacagaaaattcttcagaagaatataa

SEQ ID NO: 736156 - DNA, 672 bp, Homo sapiens
cagaagcaaaagatttattttaaaaggcagaaagatagaaaataaattacaaaatagcagttaagttcatccatagcaatggttaaatttcaattatctaaacatttcaattaaaagatagtgatggttagattggatttaatagaagacccagttataagataagctgtgtacaagaaatctggccgggcatggtggctcatgcctgtaatcccagcactttggatgccgaggcgggtgaatcacctgaggccaggagttcgagaccagcctggccaacatggtgaaaccccatctctactaaaaatacaaaaattagccaggcctggtggtgggcatctgtaatcccagctactcaggaggctgaggcaggagaatygcttgaaccccagagatggaggttgccatgagccgagatggcaccactgcactccagcctgggtgacaagagcaagactccatctcaaaagaaaaaaaaaaagaaatctactttaagtataacaacatatataagttaaaactaagaggataaatgtcatgcaaacagtaggcataaaaagctgcaaggctatattaacatcagaaaaaaatgacttaaagacaaaaagcattatcagagataaagaggaacattttataataatggacagaaaattcttcagaagaatataa

SEQ ID NO: 736157 - DNA, 629 bp, Homo sapiens
tactgggcactcattctattccttatcatgttgtgtttgaattcagttattctttcttgtgctctttgacattgtgctgggattttggccttccccatatatcactttgaattttagcaaatacaatgccttatattttaaaaattgctttwaagaaccatatttagacctaagtagatagagttctctttaaaaaaaaagaaaaaaaatacccttgggtcattcagcctagcagaaagagaaaaacagttatacctgttaacttgttttcattcttgtactagcaagaaagaatgagagtaagattggtgtcccttccaactttcttccctagagatgattttctggggggccctactgaagaactgaaaaagtctgaaagctgaaccagaagtgatgcaaaattagccttgaataagtcttatacttaagcccacctattattgaaaatatgaaacttaaagcaaaatattaaaatacaaattaatttcaaaatttcaaattaattgtattcagttccttagtctaaaaccaacataaaaccataattacatattaatgaggtgaatggattttaaactacaacaaagaatattatatttacaagcagataaacctatttgagatga

SEQ ID NO: 736158 - DNA, 629 bp, Homo sapiens
tactgggcactcattctattccttatcatgttgtgtttgaattcagttattctttcttgtgctctttgacattgtgctgggattttggccttccccatatatcactttgaattttagcaaatacaatgccttatattttaaaaattgcttttaagaaccatatttagacctaagtagatagagttctctttaaaaaaaaagaaaaaaaatacccttgggtcattcagcctagcagaaagagaaaaacagttatacctgttaacttgttttcattcttgtactagcaagaaagaatgagagtaagattggtgtcccttccaactttcttccctagagatgattttctggggggccctaytgaagaactgaaaaagtctgaaagctgaaccagaagtgatgcaaaattagccttgaataagtcttatacttaagcccacctattattgaaaatatgaaacttaaagcaaaatattaaaatacaaattaatttcaaaatttcaaattaattgtattcagttccttagtctaaaaccaacataaaaccataattacatattaatgaggtgaatggattttaaactacaacaaagaatattatatttacaagcagataaacctatttgagatga

SEQ ID NO: 736159 - DNA, 583 bp, Homo sapiens
cagacaaactcctattcaaccctcaagacccaaatgtcttttggtctgacatgccctcatcagcatgacctcctaggtcatcccatctctactgatgatgatgttttatatctcgtattcttggagtgttttgtctgcttttcccactgggccttggtaactttcctctgggctcctggcgcaaggcataattttctctaaatagctgttgggtgtcrtcatacggagaagagtcattagtgaatgccgacaaagcaagtgaaaggatctattccctggagttgtaaggacatgggataatgatagtaaatagtgtcagtttacacttaccaagcacgtaccatgtgccaggcactgtaccaggtgctttccatgcattaacacatctagtcctcctcgacccaagagatcggtgtggttaccccctcatgttacagacaaggaaactgaggcacaggcaagttaagacacttgttcaggcttatgtagccagtaagcagatgagctgggatttgaacctatgcagccaggctctcaaacttgcacaatatttcttctttcctactaggcacagcagagatat

SEQ ID NO: 736160 - DNA, 626 bp, Homo sapiens
tgcttccacaaccagcaggatgcagaaaatgcttttcaagagttcattgaatcctgaagcacggatttctatactacagtaatgaaaaaatgtatttctcattggcaaaaatgtgtggattgtaatggttcctattctgattaataaagatgtgtttaagcctcgttataatgatttaaaattcaattacttttgcaccaaactaagacaggaactttgagatctctaatcttattacacttttccgtattattctcttacaatgtttaaaatcaaaacatatttggtcatttgacctagagaaagagaattcatcatgtcttcttgcgaataactccctgagaggacacagcccataccttgtctcctgcagcgccgcatagtgcctggagcatgttaggagcttgttgggtgtgttcaatgagtggagcagacctacatctaggccttccaggtcctatctttcattacccattyatttctctttggagttctcttacctacaactctcaccttacaatttttcaatgtcaagacctatgaaatgttcattattataggcatttgcataatttatctcttattttagcatcttattcagttctttgttcatatttctaaaagta

SEQ ID NO: 736161 - DNA, 561 bp, Homo sapiens
caaagagatgactatttgagtacccttggtgatgccacaaaaccctgcctaggctggccaaccccaccacaggtcacagggtgctgagagcagcactgattttgtgcagaaagggctcagctgtcacagtttcaactccacaggtgggtcccagccaaggaagtctgagaaagagcgaggtggcaagaagcccacacttataccctccgggctcaggttagacatttctgggttctatactcagcatcccaaccaccagcacattggagtgacacacacagtaggcgttcaacaatactttagttgtccctggacacayacttctcttcctagaaagggggcaggaatgttaacaacagggaattgactgagtcccaagtataagctgggtgtttgttttatttttccattttcctcactcactactttcatacgtagtaaagagagtacactgatgtatgaaggctttcagctgtatgtgcgaggaggtgagcttgtcttgccatcagctgttcaatgtaccaccatggccaagatttaggaggtttttctgaagccctt

SEQ ID NO: 736162 - DNA, 633 bp, Homo sapiens
acctataagaaactcattttgtgggatgtttcacattccagaccatggtttattcccccatatatcccttccagtaatatcaaccagatgtggcaaagaagtctgtgcagaattgtaaaaattacaagcatattctgtaattccaaagcattgtaaagtcacagcttggttttctttccttcttaaaaaaaattyaaaaacaatttccaagctggcagaatgtacttctcagtacaagtattgcccgatcactttagaaaactcttctgctggcccacagggctgaagagactaaaatgtaaaacccaactctacctttgataaattgtagggaatttagaaaggtctacttgctagcatgtatttaggtctataaatctttttctttcaatgtttcaagtattaatatcctagatctcagataagagcacgtgcttatatatactcatatgcgcttataagttcaaaatactgaaccatgaaagcttcataaatttatgattgttatccctctcccattcaagatgtgtttctgcatagaaagcacatcataaggtagggaaaaaactcacaggagtaagagggtgagaaagtcagagagacctgggttcatttctggtgagtgagtgaaac

SEQ ID NO: 736163 - DNA, 436 bp, Homo sapiens
caactttcttagcagctgcgagtaacatctgttaaatggggttaatcattgttcagtggagttaccttttaaagagagacctgtttgtagagttagcatggaggataaaaatagaatattattcaaaatgatttgacaggtattagctcctagaaacaagacatgtagggcccatgtatactgagaagtaccattgattacygaaattacactccatgaaatgcttatacagtgagcagcagatgaggactgtgagaccgaaggaagagcagattcacatccctcgtctcagggtcatttgcgggcacaggttcattgagaagaatggctgtaggatcttcggcacctcgaatttctcaccttctcttactccttcccccttaatttttgctgggtgcctatgctcaggttcacttacaagttaaatgcatgtacg

SEQ ID NO: 736164 - DNA, 543 bp, Homo sapiens
tacaaaataaagtttatttcccagtacaactccatcaaggtcaagatacttttgtaagcaatgatacctgccattcagtctattcctaaagaactgagggtcctgggaatttaaccatatcaatgccatcttttttacattaactgaagaaaaaarggggccctttacagattttaagactaggaagtaaaaagaagtcagaaggagccaaatcaggactgttaagtggatgcctaatgatttccgtctgaaacccttgaaaaattgcccttgcttgatgagaggaatgagcaggagcatggttgtggtggagaagggctctctggcgaagctttcctgggtgtatttcagctaaaactttggctaactttctcataacactgccatattaagcacactttatggttttttggccccctagaacatcagcaagcaaattgcctggaacatcccaaaacactgtcaccatgacttttgctgttgaccagtctgcctttgctctgactggaccccttccacctcttggtagccattgctttgatt

SEQ ID NO: 736165 - DNA, 471 bp, Homo sapiens
tgggtgcagcaaaccaacatggcacatgtatacccatgtaacaaacctgcacgttgtgcacatgtaccctagaacttaaagtataatactaataataaaaaaagtaggccctgacccttcatgccccagctggtccactagagctcttggctaggcccctcygtggcatttattgcagcttggactagaattttatatgtaggtttttgttatgttttattttcataaggcctacctcctccacaagactaagcatcttcagggcagagcacagctgtcttgctcaccactatatatccagtgtccaaacagtttctgacatatagtagctgctctataaatatacatggactatgtgttgtgacactgggtaaatcacttcccttcaccacgcatctgttttcccctctaacaaatgagagggtggacttgatcagtgtgttttgtttgtttgttttttggagacggagt

SEQ ID NO: 736166 - DNA, 471 bp, Homo sapiens
tgggtgcagcaaaccaacatggcacatgtatacccatgtaacaaacctgcacgttgtgcacatgtaccctagaacttaaagtataatactaataataaaaaaagtaggccctgacccttcatgccccagctggtccactagagctcttggctaggcccctccgtggcatttattgcagcttggactagaattttatatrtaggtttttgttatgttttattttcataaggcctacctcctccacaagactaagcatcttcagggcagagcacagctgtcttgctcaccactatatatccagtgtccaaacagtttctgacatatagtagctgctctataaatatacatggactatgtgttgtgacactgggtaaatcacttcccttcaccacgcatctgttttcccctctaacaaatgagagggtggacttgatcagtgtgttttgtttgtttgttttttggagacggagt

SEQ ID NO: 736167 - DNA, 471 bp, Homo sapiens
tgggtgcagcaaaccaacatggcacatgtatacccatgtaacaaacctgcacgttgtgcacatgtaccctagaacttaaagtataatactaataataaaaaaagtaggccctgacccttcatgccccagctggtccactagagctcttggctaggcccctccgtggcatttattgcagcttggactagaattttatatgtaggtttttgttatgttttattttcataaggcctacctcctccacaagactaagcatcttcagggcagagcacagctgtyttgctcaccactatatatccagtgtccaaacagtttctgacatatagtagctgctctataaatatacatggactatgtgttgtgacactgggtaaatcacttcccttcaccacgcatctgttttcccctctaacaaatgagagggtggacttgatcagtgtgttttgtttgtttgttttttggagacggagt

SEQ ID NO: 736168 - DNA, 651 bp, Homo sapiens
tgtgctcagtgtacatctactattcacagaagtcctttaaagcagtatcgttattcccattttatagaggagaaaacagagacagaaagcctgcatgacccgccaaaagctacagagctattaagtggaggaaactgagatttgaaagccagatctccttaactctaaattccatggccacaagctagtccgatctcctaaaacagaagaaacacagcctgggaaattctaatcacacactaattgcatgacaaattaagaggaaatgacgctaacagattttatttgattgcttatagaaaggcattttgtagtcaatgattgtttggsggtaaaattattgtaaatggtcttgttagaaaaaaagatacagcctaaacttatgagagaatacaacatgggcttttttttttttttcaacttgtggtaattctccttgattaattccagctctaaaattctgttcctgcatctgcactgcagtctggctcttcacctctgagggctctgcaatgattgacttttgacttttcaaatccatctgtaagagacccagactccagagacccctggtacaccctctagtggctatcagcacaagtccacagaatcaaagaaactgggaggggaaaaggggccaccgtttaccta

SEQ ID NO: 736169 - DNA, 555 bp, Homo sapiens
taactggtaaagagaaaacgaacaactttcttcctatctcattcccttctgacaaagagtgagaaatcaatacagtggagtaaagggaagcctctgaaaataccttttcctctaagataaatgcctcccagaaagccacagtgtacatgcacacgtgtacagggccaagtaacatcctctttaatgccctttatcaccctaatgaagcattccctaattgatctctcacccccaatggctaatttgacaagtgaactctcagcctgtcaatagtcctcgtgttcgagaagcctggttctaggatctgcagamgtattccctggctgtggagatgggaaggcacatctgtgcccatttcctgccctgtctgggctgttttttccccttggtggagagcatcttctacaacattactgatgggcaccaggcagtatcactaaaaatactcactaagagattgaaaggtaatcatacatgagcaaacgatggtgcaaaccaccaggtggctcaagtcgctctgtcagaaccattgaggtacctgatgatatacataaa

SEQ ID NO: 736170 - DNA, 603 bp, Homo sapiens
acttgaacctgattccaacacagagtaaatatctcaataacagacaggagggagaagaaaatggctctgatgatcattaaaaaaggggctgggcacggtggctcacgcttgtaatcccagcactttgggaggtcgaggtgggtggatcatgaggtcaggtgttcgagaccagcccggccaacatagtgaaaccccgcctctactaaaaatacaaaaattagctgggcatggtggtgtgtgcctgtaatcccagctactcaggaggctgaggcaggagaatcgcttgaacctgggaggcggaggttgcagtgagccaagattgtgccattgcattccagcccaggccaccgtgcraggaaaaaaaaggaaatgaaaaggtgtgccaggctgatagtcaaattcatctgatttacatgactttcactttgaacgtgcagactccaatgcatgaagcccaggttgaactgggaaatccaagttgcacttaagatacatgagtaccttaatcccgacacaggctttctgagccaggctctgtttaatcaatgggtgtttggaatgagggctgtggacatcatagcggctcccttttccctagtgtct

SEQ ID NO: 736171 - DNA, 654 bp, Homo sapiens
atagaaattgcaacaggagctgaggcagagaaagcaagcagtcccgctgctaatgttaagtcagtatcactctttagactgcagtggcccgcaacaaccagcctgctaaccttcccagcacctaggtgtcctggtcattccagctgccggccctccagtttaygcacaagctgtccaagactctgaaaccaaagcaagaagtctccttgatcctgagcttcatacctccagctccaaatcccttagccttctttttaaaaatgccttttagctccatttcatttcatctcattctaaaatctactacatcgtttggggaaatgggactcttttgatctgcgattgcctgatcattcataattgataaactgccttgggaaaaaaaaaagtcaccattagctgttccatttgatatgccccaagcctcaattatggaagccccactagttgaatggatcttgattccaatgaggcaaatccataagtgaagggggcagggaagaacatgggaaagagatcaaagagaaagtgacagacagagactcaagagtccaaccaatagaaacagatacccacttgagagcatgtttgtttatctcagcgacttgctcatagtaaatgttcaataaatatctgttgagtggatggataatt

SEQ ID NO: 736172 - DNA, 596 bp, Homo sapiens
cagtttataaaatcaaagagagaattctaaaacaagaaacattgttaatgaggcagaagagcctggaggaaacacccagcagaatgcctcctcatcccttgaggacccacttcctggtcctcatcagctcctgatgtttcttctcacctaaaataaaatacagtgtacagtaatcttttaatcaaaacacagcattgcaggtggggactgcaagcctggcgttgtttgttgttgcatttgttgaacagctgatgcaggcattctggtggtgccactgtgctgcttagttaccctgaacatattaatttttcactgyatgaatgtatgtcatattttttgctgttaagttcttatgtgtgaatcagtgtataaaaatgactgcttataagtagcatataaattcagagtcaggaatgatgatgccaaatgaccaaagattgtccccgtaggtggctgagagagtaacacctttgctttctgatggttcaatgtacacaaactttgtttcatgcacataattattaaacaatactgtataaaattaccttcaagctatgtgtataaggtatatatgaaacataaatgaatttcatgtt

SEQ ID NO: 736173 - DNA, 596 bp, Homo sapiens
cagtttataaaatcaaagagagaattctaaaacaagaaacattgttaatgaggcagaagagcctggaggaaacacccagcagaatgcctcctcatcccttgaggacccacttcctggtcctcatcagctcctgatgtttcttctcacctaaaataaaatacagtgtacagtaatcttttaatcaaaacacagcattgcaggtggggactgcaagcctggcgttgtttgttgttgcatttgttgaacagctgatgcaggcattctggtggtgccactgtgctgcttagttaccctgaacatattaatttttcactgtatgaatgtatgtcatattttttgctgttaagttcttatgtgtgaatcagtgtataaaaatgactgcttatmagtagcatataaattcagagtcaggaatgatgatgccaaatgaccaaagattgtccccgtaggtggctgagagagtaacacctttgctttctgatggttcaatgtacacaaactttgtttcatgcacataattattaaacaatactgtataaaattaccttcaagctatgtgtataaggtatatatgaaacataaatgaatttcatgtt

SEQ ID NO: 736174 - DNA, 610 bp, Homo sapiens
ataaaattaccttcaagctatgtgtataaggtatatatgaaacataaatgaatttcatgttcagatgtggttcccatccccaagatatctcattatatatatgcaaatattcagaaaatctgaacaaaatcccaaattcgaaacacttttcatcccaaacattttggataagggatgctcaacctgtaatggaggcttaggagagcatttgatctacctgcaaagytgtctctgttaatataatttattttcattcacagtctgcaaatatttattagtgcctactagtgccaatccctgttctgatagtaaactgttatgagcatttatatgtcacctgggcactgtgcctcactgatttaatagtctcattgatttaacctaatgaccttgtgagatagaaactgctaacatccctatcttagagaagagaaaactaaagcatataaaagttaagtaattggctcaacatgctcagctagttagatacgaagccagaaattaacccggatctgctgattgctgaaccctaaactcttaatcattgtaccagagtgtctcaaagtgagggcctgaatttgtgacctgctgcattagaatcacttaggtt

SEQ ID NO: 736175 - DNA, 610 bp, Homo sapiens
ataaaattaccttcaagctatgtgtataaggtatatatgaaacataaatgaatttcatgttcagatgtggttcccatccccaagatatctcattatatatatgcaaatattcagaaaatctgaacaaaatcccaaattcgaaacacttttcatcccaaacattttggataagggatgctcaacctgtaatggaggcttaggagagcatttgatctacctgcaaagttgtctctgttaatataatttattttcattcacagtctgcaaatatttattagtgcctactagtgccaatccctgttctgatagtaaactgttatgagcatttatatgtcacctgggcactgtgcctcactgatttaatagtctcattgatttaacctaatgaccttgtgagatagaaactgctaacrtccctatcttagagaagagaaaactaaagcatataaaagttaagtaattggctcaacatgctcagctagttagatacgaagccagaaattaacccggatctgctgattgctgaaccctaaactcttaatcattgtaccagagtgtctcaaagtgagggcctgaatttgtgacctgctgcattagaatcacttaggtt

SEQ ID NO: 736176 - DNA, 577 bp, Homo sapiens
tgcatccatgccagcatctactgtgctttgattttttgattatagccattcttgcagagtaagatggtattgcactgtggttttgatttgcatttccttgatcattagtgatgctcagtgttttttcatatgtttgttggccatttgtatatcttcttctgagaattgtctattcatgtccttagcccactttttgatgggatttttttcttccttgctgatttgtttgagtttgttgtagattctggatattagtccttagtcctttgtcacatgtatagattgtgaagatttttttctcactctgtcagtcatctgtttactctgctgtttcttttgctgcgtaaaagctctttagtttaattaagtcccagctatttatctttgtttttattgcmtttgcttttgggttcttggccatgaaatccttgcctaagccaatgtctagaagggttttcccaatgttctcttctagaatttttatagtttcaggtcttagatttgagtccttaatccatcttgagttgatttttgtatatggtgagagatggggatccagtttcattctcctacacgt

SEQ ID NO: 736177 - DNA, 568 bp, Homo sapiens
aaacagagcctcccactgtcgcccaggctggagtgcacctgacggtgaaaccccgtctctactaaaaaaaatacaaaaattagctgggcgtggtggtgggcgcctgtagtcccagctacttgggaggctgaggcaggagaatggcacgaacacgggagacgcagtttgcagtgagtcgagatggcgccactgcactccagtcttgggtgacagagcgagactccgtctaaaaaaaaaaaaatccctagccggtcacagtggctcacacctgtaatcctagcactttgggaggtcgaggtaggtagattgtttgcggtcagaagttcgagaccagcctggccaacatgatgaaacctcacctctactaaaaatacaaaattagccaggcgcggtggcgggtgcctgtagtcctggctacttgggaggctraggcagcagaatcgcttgaacctgggaggtggaggttgcagtgagccaagatcgcattgctgcactccagcctgggcaacagagtgagactccatcaaaaaaaaaaaaaaaaaaaatccccatatctcaagaaactttt

SEQ ID NO: 736178 - DNA, 526 bp, Homo sapiens
ctttttgaagtctcctaattccttgctgtcttttttctttttgtgtgtgtgcacatgtgtacccatgtgattattaatatttaacacaattggtgtcaccatatattgtgttgcatcccaatttataaaattagaaatatttcctggtatccttgattattttaagtaaactcgaatgttcaagactgcctaagattttatcctattggtctgtcttaatgtatttaagcatgggaatttattcaagattagaaattgggtagaactttgagatttccaatggcctaagccaaggacttctgctttcytattcaaggagaaaaaattgaggatttgttagaaggctattgtctaagtgataataaatttggatcagagaggttcctagaagatttcaaacatgagtaatttaattggctctgttatcaacttatttctcctgagatgatgaaattagtggctatcttcttttatcttgaatttttaaaaaagttgcaaactttgtagtttttcttttcaaagggaa

SEQ ID NO: 736179 - DNA, 598 bp, Homo sapiens
ttgtatttttagtagagacggggtttcaccatattgaccaggctggtcttgcaactcctgacctcatgatccacctgcctcggcctcccaaagtgctgggattacaggtgtgaaccaccgtgcccgggctttaatcatttatttttcattaaaatttttcattacatttttttgtttcaaacagaaatcatattgtttataagaaaggaaatagtccagatgtgtaaagaaatgccttttccaactctaccttccccaacaactaatgttaacagttatctatctatctrtctgtctgtctgtctgtctgtctgtctgtctatctatcatctatcatctatgtgtctacagagatgcataggatattcaccaacttgccatgctgctctcagaaagaattgtattatacacattattcttcagctttattttttcgctcaacaacaagtcacagtttgtagatgttaatctaacttgtttttagtgactacatatgtttcataatatagatgttctgtaatatatctattccttttttaatggtttttagttgtttgctatttctagcaatgctgcagtaaatatccttgtgagtgta

SEQ ID NO: 736180 - DNA, 546 bp, Homo sapiens
gctgcagtccgtggcactcacaaagagaaacaaaaggggcaagtgaatacagcaccatcaactgaaatattcaggtagtcacattgggactgatcagggaaacaactcaactcatgaagaacaacccatgggtgatggcccacctggaagccayatggagccaaggaaacccccaccccagccaagggaagtggtgaatgaatgtgtgaccccaggaaaccatgcttttcccatgaatctttgcaacccatggatcaggagatcccctcatgagcccatgccaccagggtcttggggccaacacacagagctgtgtagagtcttggcagagcagctgcttgggcatacacagagaccgaggagctttacatactctggccccaggatccctaacaaacgtgtttgcaactcaggcagggcaggaggtccacacaaacccctaggaagagggtggaatccagaaagccaagcaatgtcattctgtgggtcctccttccatggcacctcacaagataagacctactgacttggaattccacccagcca

SEQ ID NO: 736181 - DNA, 555 bp, Homo sapiens
ttctagtacatggtcaggactcccacgtattaactgtgatcatttaaaaaaactttgtttttgctttcctcatggcaaaacctaagtagctcaggtacagaaatcatgcaaaacactaaaaagaataaagaagaaaacagaaattaccctcaaccccaaagatacagaaaaaaacatttaggcttagtattccatacacgtgtgtactgtttacactattatacgtatttggttacatattacacatagcacacagttgtggttcctggcttttttttttgagacaaagtctcattcttgtcccccagactggagtgtagtggcacaatcttggcccactgcaaccccccctyctgggttcaagcgattctcctgcctcagcctcccaagtagccgggatcacaggcacccgccaccacacctggctaatttttttgtatttttagtagagatggggttttgccatgttggccaggctggtcccgaactcctgatcttgtgatccgcctgcctcagcctcccaaagtgctgggatcacgggcatgagccaccgcg

SEQ ID NO: 736182 - DNA, 555 bp, Homo sapiens
ttctagtacatggtcaggactcccacgtattaactgtgatcatttaaaaaaactttgtttttgctttcctcatggcaaaacctaagtagctcaggtacagaaatcatgcaaaacactaaaaagaataaagaagaaaacagaaattaccctcaaccccaaagatacagaaaaaaacatttaggcttagtattccatacacgtgtgtactgtttacactattatacgtatttggttacatattacacatagcacacagttgtggttcctggcttttttttttgagacaaagtctcattcttgtcccccagactggagtgtagtggcacaatcttggcccactgcaaccccccctcctgggttcaagcgattctcctgcctcagcctcccragtagccgggatcacaggcacccgccaccacacctggctaatttttttgtatttttagtagagatggggttttgccatgttggccaggctggtcccgaactcctgatcttgtgatccgcctgcctcagcctcccaaagtgctgggatcacgggcatgagccaccgcg

SEQ ID NO: 736183 - DNA, 555 bp, Homo sapiens
ttctagtacatggtcaggactcccacgtattaactgtgatcatttaaaaaaactttgtttttgctttcctcatggcaaaacctaagtagctcaggtacagaaatcatgcaaaacactaaaaagaataaagaagaaaacagaaattaccctcaaccccaaagatacagaaaaaaacatttaggcttagtattccatacacgtgtgtactgtttacactattatacgtatttggttacatattacacatagcacacagttgtggttcctggcttttttttttgagacaaagtctcattcttgtcccccagactggagtgtagtggcacaatcttggcccactgcaaccccccctcctgggttcaagcgattctcctgcctcagcctcccaagtagccrggatcacaggcacccgccaccacacctggctaatttttttgtatttttagtagagatggggttttgccatgttggccaggctggtcccgaactcctgatcttgtgatccgcctgcctcagcctcccaaagtgctgggatcacgggcatgagccaccgcg

SEQ ID NO: 736184 - DNA, 555 bp, Homo sapiens
ttctagtacatggtcaggactcccacgtattaactgtgatcatttaaaaaaactttgtttttgctttcctcatggcaaaacctaagtagctcaggtacagaaatcatgcaaaacactaaaaagaataaagaagaaaacagaaattaccctcaaccccaaagatacagaaaaaaacatttaggcttagtattccatacacgtgtgtactgtttacactattatacgtatttggttacatattacacatagcacacagttgtggttcctggcttttttttttgagacaaagtctcattcttgtcccccagactggagtgtagtggcacaatcttggcccactgcaaccccccctcctgggttcaagcgattctcctgcctcagcctcccaagtagccgggatyacaggcacccgccaccacacctggctaatttttttgtatttttagtagagatggggttttgccatgttggccaggctggtcccgaactcctgatcttgtgatccgcctgcctcagcctcccaaagtgctgggatcacgggcatgagccaccgcg

SEQ ID NO: 736185 - DNA, 634 bp, Homo sapiens
gagtagagtttagatgaggaattaagaggaagaatgactttcagtgccctgtaaatagtggggtctcgctgtaagccacacatgtaattttacattttctagtagccacatcacaagcaaaaacaaaaggtgaaatttaatcttttatttaaccccacatatccaaaatataatcaacatataatcaatataaaaattattaagcagatagtcttcatttctctcttgttttatgctcataacacatctcaatttatagcagccacctttcagtggctctgtgtggctttgaccatgtggctggtggctcctrcactgagcagcatggctttagaggatggccttcaatttttctttagtgtgaacttggttacttagagaatgtgttagctttgaatacacagctaagtataaagaaaaaaagtatcatattccttagatgctaagagggtcaaataagagggtctgtgtccttttactgttagcatgtattagataaaaacagcttaactctattggaaggcatttagtcgaagttgagctgggggcactgatagtgtttgttatgtactaagaacctgctgcaatactaggaacttggcatcctggcgtttgtcacaatgcagggtgtgga

SEQ ID NO: 736186 - DNA, 575 bp, Homo sapiens
cttgtgaattaccagtctttgaaaaggacagacatggcagacaatagcccacttttattagcacctgttatgctagttcatccatacattaactttgtgatgtatgtcctagtaactttaactcaccagaaaagaaagctgaccctcaggtaaataatttctttcacatttttcagtgccttagtggctaatttttctgactccaaaagtccttgatttttttctcttttttaattttgccctaaaatgaattgtttctttgtctcrtgcaagttttaatgattcagattttcacctgacagtttttggtttcatttaacctaattcaggctttcttagccttggtactattgacattttaggctggataattctttgctggaagagtgggagcttgtcccgtgcattgtgggaagcttagccacatccctaacctctacccatgaggtgccagcagcattctcccccagttgtgacaatcagaaatgtctccagacattgccagatggctcatggcagagggcaggatcccactcccactgggaaccactaacctagggagagacctaaggaag

SEQ ID NO: 736187 - DNA, 496 bp, Homo sapiens
tgctttgtttttgcttagtcaaagagcacaggccatcatttgttgtagtgtcacccgtaaagcttaataagtttaaagttcagggtgttaatcattacaagcataaagtatgaatatgctttaaaggtttatttaagaaaagaattgggattagatttgcccaccagaatatacatttttcacytgaagtcctgagagagattcagacagaaacagcttttgactcagcagcagttagcaaacaaacatcttgatataatactgatccacactttgcatatacactttcttttctttgtattacatttttagaggtaagtggcagttttcacacacttccaaacgcttcatcagtaatgaaatattggcttgggcagctctggagtcccaggtttcagcttaaactttccagtgggccctgccaggcactaacttcaaaatatctttttttatggtgaatgcctccagaaggtgcaactgtgtggtggtttcattt

SEQ ID NO: 736188 - DNA, 496 bp, Homo sapiens
tgctttgtttttgcttagtcaaagagcacaggccatcatttgttgtagtgtcacccgtaaagcttaataagtttaaagttcagggtgttaatcattacaagcataaagtatgaatatgctttaaaggtttatttaagaaaagaattgggattagatttgcccaccagaatatacatttttcacttgaagtcctgagagagattcagacagaaacagcttttgactcagcagcagttagcaracaaacatcttgatataatactgatccacactttgcatatacactttcttttctttgtattacatttttagaggtaagtggcagttttcacacacttccaaacgcttcatcagtaatgaaatattggcttgggcagctctggagtcccaggtttcagcttaaactttccagtgggccctgccaggcactaacttcaaaatatctttttttatggtgaatgcctccagaaggtgcaactgtgtggtggtttcattt

SEQ ID NO: 736189 - DNA, 566 bp, Homo sapiens
agtgggatcctgccctctgccatgagccatctggcaatgtctggagacatttctgatgtcacaactgggggagaatgctgctggcacctcatgggtagaggttagggatgtggctaagcttcccacaatgcacgggacaagctcccactcttccagcaaagaattatccagcctaaaatgtcaatagtaccaaggctaagaaagcctgaattaggttaaatgaaaccaaaaactgtcaggtgaaaatctgaatcattaaaacttgcaygagacaaagaaacaattcattttagggcaaaattaaaaaagagaaaaaaatcaaggactttggagtcagaaaaattagccactaaggcactgaaaaatgtgaaagaaattatttacctgagggtcagctttcttttctggtgagttaaagttactaggacatacatcacaaagttaatgtatggatgaactagcataacaggtgctaataaaagtgggctatgtctgccatgtctgtccttttcaaagacggtaattcacaaggttagttaaaagccataatttttttttttaggtgt

SEQ ID NO: 736190 - DNA, 598 bp, Homo sapiens
gcatataggttaattccatgtctttgctatgtgaatagtgctgcagtgaacatatgcatacatgtctttataacagaacaatttatattgggttagggttagtaatgggattactgggtcaaatgatatttctgtctttaggactttgaggaattgccacactgtcttccacaatggttgaactaatttacactcccaccaacagtgtaaaagtgttcttttttctccacaacctcaccagcatctgttattttttggctttttattaatagccattctaactggtgtgagatggtatctcattatggcttttgatttgcatttctctaatgatcagtaatgttgaggctttttttcatatgattgttggctgcatgtatgtcttcttytgaaaagtgtctgttcatgttctttgtcaactttttaatgggatcgtttgtttttttgtttcctgtaaatttaagttcctatagatgctggatattagacctttgtcagatgcatagtttgcaaaaaatttctcccattctgtagttgtcttgttactctgaaatataactaaaagtttacttttaatttattttattattattttttt

SEQ ID NO: 736191 - DNA, 546 bp, Homo sapiens
aaggagggattaaggtcgcagatggaattaggtttgctaatcagctcaccctaaaattagattatttggggttatctgatgggcccaatgtaatcataagggaaaaaagaggcagaaaaattattgtcagatagatatgatttaagaaagtgctgggtttgaagacagaaaagagcagtgagcgaaggaatggtgagyagccatagaagctgggaagggcaaaaaaacattttctcctagactttccagaaagaaatgccgctctgccaacatcttgattttagcccactgatacctgtatcagatttctgacttgcagtctataagatagtacatttctgttgttttcagccactgagggtgtggcaatttgttaacagtagcaataacaaacgaatacagcccacctttcttgttccaagagagtgaatgcaggaagcccacaccattggaacatagttgtagcaaaacacctagatgggatttaaaaataaaggaggtggaattagagcagagaggatccttttttttttttttttttttttt

SEQ ID NO: 736192 - DNA, 595 bp, Homo sapiens
gtggagtgagcagaggagggaggagaaagcaagctctttggtgtcccctatggggctactaatctcctcaagaaggccccactctcacaaccttgtcaaaactgcgtctccaaatgacattgcatgggcagttaggacttataaacatataaatatgggggatgtgtatcaacccatagcaacttttctattataaacagcatgaggatttcctagtcttaccaccagaagttcctcaaacccatctcaaatttatgtcacacaaatatatgcaatacagtagtttccccttgcccacagttttcccttatgtggttttagttaccccggttcaaccacgttctgaaaacattaaatggaaaatcccagaaataagcaattcagacgttttaaattgtgcaccattctgagtatagccatgaaatcttgcactgtcctgctccccacccsagacacaaatcatctctttgtccaacatatccatgccatacccacccattagacatttagtagccatcttgcctatcagagcaattgtcgtggtatcattccattttagtattagttaatgttgtcaatatcttactatgcctat

SEQ ID NO: 736193 - DNA, 590 bp, Homo sapiens
tgaaaaagaagtgaggtacaaatgcaggaaagaagagtcacaagtatcatcacttacagattatatgattgcatacccagaaaatccactggaaaccctatggaattcatagaatcatttgataaggtggccacacaagggttatgagttaaatagaattagtagcttttatatatactagcaatatttgtttttctttctttcttttattaagagaaggggtcacactgcattacccaagctggtctcactcaagtgatcctccagccccagccttccaaagtgcttggattacaggcatgagccaccacacctggccattagcagtattcgatgtggggtggtggtggtcattcacagcaactcaaatagccaaaagcctagggataaatttgatgtgaaagatacagaggcataggacctttttcttgaggggggraaacccctggaaaatttgattgcagaggctaaattattcatgagatatagtaagacttagtatggaaatgtgagcctctctcaaattaatataaatatagttacagttctaagtatgagaattgagctataagaaatacgtttccattcag

SEQ ID NO: 736194 - DNA, 626 bp, Homo sapiens
ggcattcagcagctataaattcagtgaaaaacatttgtttaaaatcaatggttatcttacagtgaaacacactagctcatgtagatatgatgtctatagccataaatcattctcatagaagttaaatggccaactatatcacagaagggatttccgcaatcaaaacaaagaagatgacccaaatatttctttaatctaaagaataatttgggatagatatggtagcatttatcagggaacatgaaagccaattagtttagattttagtaactgatgaatacaattagttcttcttacattcctgctcagtgccagatactgtctagtgaaatggtgaatgatataattcactataataaccaattcactagaggaaaccgggaaagaaaaaacaaactctagacttagaagatgctccacgaaaaaacaagtccarggtgaaatagtgttaagaaagtctacatctacttacctttttaataatcattattatttacagaatatgaaacagtttcatggctctgctatgtccttaagtaaatatacttgcttaacctctgaatcatcgagcaccttccaaatttgtctcaaaaaatcatttttttaatccccagaaaacgattata

SEQ ID NO: 736195 - DNA, 633 bp, Homo sapiens
atttcatctatggtcatcataaaaatgtgtaattccattgttcttgcattagcaaagaggatgagaagcttaatgaaaaaagacattgaaatataattttttgtacattatttgaaagaatttttatcacttaatataaattacctgtatgttcatcttttctataaatatttcaaagtatgtgaaatatgtagggttttagaatactattaagatgttagtaaggcaactggggcattataactagttgttttgcttggctttaattagaaaccccttgatatttaactttttataagtccttaatctgttcctsctaaacttgaatttgaatggtcttctggtttcaggatgagtccatggagtgttaagtaaaattaaaaaattactgttcatttttataggatttgaaacaaaaatcacaagattctctgccacaaaaaaatataataaggctgagtgcggagccaaggtaaattcataatttcttacaaatgtttaccactttctggcttaatagtttttggttttatggttctggtttttagttagcgtatattttgaggcaatcaatttattaattaaaaaactcctaaaaaatggattttctttcatgactgtgttatgctcagt

SEQ ID NO: 736196 - DNA, 653 bp, Homo sapiens
caaaagttttagaatacttggaatatttattcttttatttgactttactattttctgttgtgtactggaaatagttgtaaaatttttcaatcttttctttacaaaaattgtaagtccacatatttattctgcttcggttacatttatggtcttagaaatgctttttgcattgtgaaaagttcctgaaatttgtagttctacttttgagggttaacattttcatttgtagttttaagttgcatttgcaactacaaattctgtggacattgataccaactctgttctttccatgcctttgagctctaggcagatctcactgtcagatgcctggaatttccggagcacagtgttgtgaagggacccttgcatgagagtcagaggactgattctagccccatctctgtcactaaccagctcatatttttggaacttcagtttcatttgctctctatatttggcgggtattaataggtaatccccgaggtcacatccagttaacatttggttttcttgtctaagtattaatcatttataaagcaatcatttggataaacaccaggaaaggaagttttgaggaagaractactgtggacaataaccaagtgtttccagtaactgggacataagataatctgtcttccaaaatatctcca

SEQ ID NO: 736197 - DNA, 602 bp, Homo sapiens
cagctgttactaccatccatctctagaactttgtcatcaccccaaatgcaaactttgtacctgttgaacagtaattcccgttcctcttgctcctggcaaccactgttctgttttctgtctctacaagtttgactactctattaggtgcyttatgtacgtagaatcatataatttttgtccttttctgtctgccttacttcattcagcatagtatcttcaaggctcattcatgttgtagcatgtatcagaatttctttcctttttaaggctacatgatattcccctgtatgtattgaaagtagtgacaaaaaccacaattacttttgcaccaacctaatacataccacagcttatttatccattcatcctttgatggacatttgggtggtttctacgttttggccactgtgaataatgctgctgtgaatatgagtgtgcagatatctgtccaggtcccttctttccatctccagaaatggaactgctggatcacataataattctatgtttaatttttttttaatcactgtcatttaggtgtatttttttggcagagtaaaacatttaaatattttacatagacataaatatgagcatgataa

SEQ ID NO: 736198 - DNA, 602 bp, Homo sapiens
cagctgttactaccatccatctctagaactttgtcatcaccccaaatgcaaactttgtacctgttgaacagtaattcccgttcctcttgctcctggcaaccactgttctgttttctgtctctacaagtttgactactctattaggtgccttatgtacgtagaatcatataatttttgtcyttttctgtctgccttacttcattcagcatagtatcttcaaggctcattcatgttgtagcatgtatcagaatttctttcctttttaaggctacatgatattcccctgtatgtattgaaagtagtgacaaaaaccacaattacttttgcaccaacctaatacataccacagcttatttatccattcatcctttgatggacatttgggtggtttctacgttttggccactgtgaataatgctgctgtgaatatgagtgtgcagatatctgtccaggtcccttctttccatctccagaaatggaactgctggatcacataataattctatgtttaatttttttttaatcactgtcatttaggtgtatttttttggcagagtaaaacatttaaatattttacatagacataaatatgagcatgataa

SEQ ID NO: 736199 - DNA, 629 bp, Homo sapiens
tccttcataaatgaaagaggaaaaaaagagtcttttccagacaaacaaatgccgatggaattcattctcactagaccaaccctaaaagaaatattcaaggaagtattcaaggaagtcctatatctggaaagtaaaggatgacatttcccatcatgaaamcacataaaaatataaaactcattggtaaagcagtcacaaaaggaggaatagaaagaactcaaatggtgccattacagaaatcgtctaaaccacaacaatcaataagagaaaaagaaaggaacaaagactatataaaacaaccaaaaaacaattaacaatatgacaagaacaaagactcacatatcaataatcttcaacataattgaattaaattatccactgacaagatatagaatggttacattgattgaaaaaaacataattcaaatatatactgcttacaagaaattcaccttactagtaaagacacatatagactgaaagtaaggaatggaaaaagatactccctacaaatggaaaccaaaagcaagcaagagtagatatatttatatcacataaaacgactttaagtcaagaacagtagaaaaaaagacaaagaagctcattatataacaataaagggatcaata

SEQ ID NO: 736200 - DNA, 510 bp, Homo sapiens
cccaaccttactttattatagtattactagttttctacacattctacttcatctttactatagtattactagttttctgtgcttcaagccatttacaagtctgattatcaaaatgtggtcagaatcctgtatttcaaatcttgtttcccttgcaggtaaaatggtattgctccctcaaagtagctctccttcccatcgtgatcttaaccacaaacaaatttctcaacctattatgtatagcctaaaatgccatawacctagagtgccttttcgtgccacccatggtcaagctccagccctgatctgggaccttttaatcctcagttcatttaattatatttctctttggcactttcctcattctttccttactatattatattttattctaaatttgcttacccccaggctctgtttcttctctgggcagaaagcaaattcctcacagaaatcctttaatatcatgcagtcatttgacatgcagtaggattttaaatacatttttgttct

SEQ ID NO: 736201 - DNA, 593 bp, Homo sapiens
atcacagttggcatagatatcaaaaaggagaagaaatatcttaacaggaaaggtgtagaagagctcttgcttaaaaacagtaacaattgctttgggaggaattaatatacctaactgccttatagggcttcaataattaaaatctacaataaaaaggatatcagccttaattgggtattaaatgtgaatgtaaatcaatttaaatagtgataaatagcaccttatattcttgggaacttattccaagagtgtcaaactatattttcattcatctattttatttggcaactgtaactcgactttgattgcatatatccctacctcaaatcctaaataatatattttaattaatcatccatayttataggttggtttctgactttcccaaggtgagcttagctgcagtttttttagtcctattcatatactgagtcttgataaatatatcctagaatcattataagataattggtattaaaaggacatcctgaaccattttcatgacatttgttaattttagataaaaatatatttttaaaaattgattagggtagagaggagagcaatatagtaggaagcatagtacatttaaa

SEQ ID NO: 736202 - DNA, 601 bp, Homo sapiens
acctcacaacatacagaaatgagtcctttcattcattctttcattcactaagccttaaaggattatatctgttccagatactaagcttagaggccttaagcaaaggggacagatcaacaagtcaacacaaaaccataatccaggatgattattgctaagagatttggaacagagtgcttttaaaacattttcaacaaacctgtcctcaactaaattatggcttcatctyagtgagtttgccttcttagactctttactatgctcaaatagaaatatctctcctttagcttagttctttcccgaagaaggcattattctctattctttctaattgatcggcctagaaagtctaagtatgttttacataatgctatcaattatttattctattatagccatactatagttcccatatcataaagatcatcgggaaatttcttcaaaattccaagccattccatccaaatagtagctacgagctactattttttgccatgagattcattcaagaggaatatggcttcctcctgaagaattgtatgcagaatactaaagatgtgaacccagtcattggtctcttaaacagagggttcttaaaaaa

SEQ ID NO: 736203 - DNA, 647 bp, Homo sapiens
atggcttgagaaagtcttcatgctgatgaattttaataagtgaactgtagcggtgtaatttcattctcagttcactttttttttttaagtttgaggtctatcttctctttgataattttacagaagccagccagctacagagggaagtcagagaatcacagagtcatggcctatgggagatgccaggtgccctcggaaagctctgatcaaatycccttcttactttgaggacccaaagagcattcattgctctcctcagtcttcccgcattctgttcttattgtacaagggttgtgccctgcaagctacttgttcctggggttcctaagacaggcctcgtttaaattgtgaagcaccagccaccgggcatcacccatccccttctcgtcctcctccttccatcccatcctcaaaatcctaacccaggaccaccacgttgatgttgatcacccaaagcactgactgtgtgccccagcaccatatcctgtatagcccttccccttccttccttcttgacatgccctctgagctgcccccgctacaatccaggataggaagaaagattacgtggtggagaacaatgaacttgagttactttcgtcctcgcaggtttaatggtagaaggaaatagacgggccctgaataca

SEQ ID NO: 736204 - DNA, 693 bp, Homo sapiens
acagtttgttataatttctgttcttttacattttctgaggaatgctttacttccaactatgtggtcaattttggaataggtgtggtgtggtgctgagaagaatgcatattctgttgatttggggtggagagttctgtagatgtctattaggtccgcttggtgcagagctgagttcaagtcctggatatccttgttaactttctgtctcgttgatctgtctaatgttgacagtggggtgttaaagtttcccattattattgtgtgggagtctaagtctctttgtagatctctaaggacttgctttatgaatctgggtgttcctgtattgagtgcatatatatttaagataattagctcttcttgttgaattgatccctttaccattatgtaatggccttttttttctcttttgatctttgttggtttaaagtctgttttatcagagactaggattgcaacccctgcctttttttgtttttcatttgcttgccagatcttcctccatccytttattttgagcgtatgtgtgtctctgcacatgagatgggtctcctgaatacagcacactgatgggtcttgactctttatccaatttgccagtctgtgtcttttaattggagtattcagcccatttacatttaaagttagtatagttatgtgtgaatttgattctgtcattattatgttagctgg

SEQ ID NO: 736205 - DNA, 562 bp, Homo sapiens
caaaatttctaaaagaaatttatattttataaacaggctaatttatactttagcctatttattttctttttttctgttttagagacggagtctcgctctgtcacccaggctggagtgcagtggtgcaatctccgctcactgcaagctccgcctcctgggttcacaccattctcctgcctcagcctctggagtagctgggactacaggcacctgccaccaagcccggctaattttttgtacttttagtagagatggggtttcacagtgttagccaggatggtctcgatctcctgacctcgtgatctgcccrcgtcggcctcccaaagtgctggcagccactgtgcccggcctactttagcctatatctaaaagaaatagaataagcagttctggcaaaatgcctaacaatagctctagggcaatacccaccactctctggctattacatggcttttgtactgttagtctgaatattcagcttataataaccaggatataataatttaatagaattagcaatttcatggtgatatagaactatttaagttttatttgattaaaa

SEQ ID NO: 736206 - DNA, 672 bp, Homo sapiens
actatgttaaaagattactacgggagaaatagaaactatacaatggctggtttgtgtcaacacttgcaacatttctatccaaagaaatcctaaaagatttaaatgaaagtatctttaaaacatttagctgattaaaagaacaaaagaaaaagtacaagaaaacgttcattattaatgaggagaaaaatggcaaaatggacaagtgttttcatgtgaaaagccaatattctaggtgtttggccaacagcataggttctagaatcagactgcctgcctggatttgaatcctaactctgccatttactagctacataatcttgagcaagctacttaacctctctctaattttcctcttctgtaaaataaataaaamgataattagagggaaataaaataacctatttcaagaaaccattttatagtgcttggcacatggtaacttctcagtaaatgttagcttttattatcttctatttaaagttgtaggtatgtcctgtttaattacaatgtatagttcaaaaagcacttttcactcattatttcatttagtctaactctatgagttgagggatgaaacattttacatataaactgaaaatcagagaaatcaagtgacttgtctaagaccagaggtttgcaagagacaaagttggaattcaaagaacagagaag

SEQ ID NO: 736207 - DNA, 672 bp, Homo sapiens
actatgttaaaagattactacgggagaaatagaaactatacaatggctggtttgtgtcaacacttgcaacatttctatccaaagaaatcctaaaagatttaaatgaaagtatctttaaaacatttagctgattaaaagaacaaaagaaaaagtacaagaaaacgttcattattaatgaggagaaaaatggcaaaatggacaagtgttttcatgtgaaaagccaatattctaggtgtttggccaacagcataggttctagaatcagactgcctgcctggatttgaatcctaactctgccatttactagctacataatcttgagcaagctacttaacctctctctaattttcctcttctgtaaaataaataaaaagataattagagggaaataaartaacctatttcaagaaaccattttatagtgcttggcacatggtaacttctcagtaaatgttagcttttattatcttctatttaaagttgtaggtatgtcctgtttaattacaatgtatagttcaaaaagcacttttcactcattatttcatttagtctaactctatgagttgagggatgaaacattttacatataaactgaaaatcagagaaatcaagtgacttgtctaagaccagaggtttgcaagagacaaagttggaattcaaagaacagagaag

SEQ ID NO: 736208 - DNA, 503 bp, Homo sapiens
ccacagagtgagaccctgtctcaaaaaacaataaaaggaaagggaaaaaaaaaaagcacgtagtcatgttacctttggctcatcagttatgattataggaatttaactgtgctcacacattcctttctgtatcttttcaactttgtactgttttgtttgtgttacataatcaaacaattgatgyttcagaatgtgtagatgaagcagatgatccataatggcagctgaattggtatctaaatgttctgctgaatgcattgacgaaaacaaggctttttcaacccaaatgtactgggtattgtttttactttttcttcaactgtttttttaaccaccatcttttattttttcagctggctaccatgtgtggctatgggctgtggaagcttttgccaaacagctgtgttttcaggatcagtatgtcaaggctgcttctcacctactttccatccacaaagtgtatgaagcggtggagctgctcaagtcaaaccatttttacaggt

SEQ ID NO: 736209 - DNA, 613 bp, Homo sapiens
ggtgtggttaacatactgccagaatccaaccattcacttaccttcacggccaccctaatccaagccaccatgatctcatacctgaaatagccaacagtctctgcttccatccttgctccccatccccaccccagtctattctcaacacagcagccagaaagaaccactcataaacataagtcagatcatataactccatgctcaaaaccttacaacagtttcccatcttgctcagaataaaagccaaagtatttacaaaaaataataaggctctatatgatttatgactsccccttcctctctgacctcatctcctatcactatccctctcctttttgtcattgttcctgacaccagatatggttccttggagctgttgcacttactattctatctgcacagaatgctgtttgttcagatgttagcacagcatgcttcctcatttccttcaaatctttactcaaagattatcttttagtgaggccttccctatctaaaactacaagttcctctctcaaacacacatacttcttattctcaatctctgctttattttctcataagcagatgtcactatctaatatactctatattttacttattttgcttattt

SEQ ID NO: 736210 - DNA, 521 bp, Homo sapiens
tgggtagggggatgtatggaaagacaggtgtgggtgagtgatagtgaaaatggaaggggactggatcggcagtctcttgaagtgggagcagtgttgtagtagggttgatagagaggatgaacagaaaggtggtaggcaggagtcaggggaggatcttcagaatagtattattcccagaaagcttgattcagatttctaaatagcttgatctgttggygattaggttgcataacttggcagttttcaaagtccgggtcttcaaaggttgacatactctagtgtttcttttaaaaaaaaaaaataaataaagctgtgctggtgttcttccctgtcgaatgctgtaatgtgtaggaagtgtgaataggtacagccactttgtataatgcagttttgtactttctaataaaaatgcatatatcttaacatcctggcagttccattactagtcatcaaacctgaaattgtcttagatgtgtacatgaacattaatagcatttttttgttgtaaaaaagtggaagcc

SEQ ID NO: 736211 - DNA, 573 bp, Homo sapiens
cacttggaatgtcatccaggcttcatcagtggtaggtaactaatagtataatttgggaagacagaacttttttaaggtttacaggctacttcttggcatactgcagctaaaactccaagtgggaacataaggctgaggatccctccaggagggtaacctctagacttagaggtgtctggtaaaatggccttcaattgtggttgtgcagcagaatcagctggagagtctttggaaaaatgtaggttcttgtaccccacctcagatctactgagtccgaatctctaggagttaggccctggcgtatgtattttttaaagttccacctgtggttccgatgcacaatacagcttaaaaaacggtgattagaagcatgtcgggtggaggtactccccacccacagcaygttcactgccaaatttttctttgttggatttcttgccgactagaaatagtaatcccaacctctgtccttttcactttggagttatgtcactgcaatacttttgggtacacaactcagctgtgttactagctgggttctcagttttacttgggaactcattttcccagacg

SEQ ID NO: 736212 - DNA, 613 bp, Homo sapiens
gttggtgggagtggggggcgttgtcagttgcctctgggatccccacatcagggaaacatagagccactaccagtgggtatgctcagtaagaagtgaggtgactgttctgtggtcccaagctggggaccctgtctggtgaagggtggggtgtagaggctcacagggaggagagactggacccctctctatgtattgtctgtgttatgctggaggtgccagcatagaagccagcccctttgttcctttccytacccaaaggtggttagggtggtactactgtagctgcaatggcagatgggttgtgggttttccctggaatttcttcctcatagaaatgcagagctgccttctgactgaagtgttcaggtggaggcagggtagttgtctggaatcctaggttgggagggcccacccaatggagagaagcagggacagggaccaatgtggagagcagtctggtcacttttctgtgggatggctgccctgtgcaggggaccatactattccttaatcacagtgtactcttcagagcctgaaggctatagcaacaggggctgtgagacagcaaaatggtggccagcctctccctctgggagctctgtcccagtgaagt

SEQ ID NO: 736213 - DNA, 637 bp, Homo sapiens
cccttgagcttcccgggtgaggtgacaccccaccctgctttggctggcactccatgggctgcacccactgtccaattggtcccaatgagatgaaccaggtacctcagttggaaatgcaaacatcacccaccttctgcgtcgatctcactaggagatgcagactggagctgttcctatttggccaacttgctagtaacccatagcctgtctttttaagctataaattcttttttctgcttgatcaattcggccactaagagactctgatgcattctttggtatgttagttgcatttttacctccmagatttctacttgattcttttaattattttcatttctttgttaaattgatctaatgagattatgaatttcttttctgtgtgttatcttgaatttctttgcgttttctataacagctattttgaattttctatctgaaaggtctctttctctccaggattggcccttcatgtcttatgtaatttgcttggtgagttcatgttttcctggatgatcttggtgcttgtggatgtttgttggtttctaggcattaatgagttaggtatttattgcagctttcaaagtctggcctgtttgtacccatccttcttgggaaaacttgtcaggtatttgaa

SEQ ID NO: 736214 - DNA, 637 bp, Homo sapiens
cccttgagcttcccgggtgaggtgacaccccaccctgctttggctggcactccatgggctgcacccactgtccaattggtcccaatgagatgaaccaggtacctcagttggaaatgcaaacatcacccaccttctgcgtcgatctcactaggagatgcagactggagctgttcctatttggccaacttgctagtaacccatagcctgtctttttaagctataaattcttttttctgcttgatcaattcggccactaagagactctgatgcattctttggtatgttagttgcatttttacctcccagatttctacttgattcttttaattattttcatttctttgttaaattgatctaatgagattatgaatttcttttctgtgtgttatcttgaatttctttgcgttttctataacagctattttgaattttctatctgaaaggtctctttctctccargattggcccttcatgtcttatgtaatttgcttggtgagttcatgttttcctggatgatcttggtgcttgtggatgtttgttggtttctaggcattaatgagttaggtatttattgcagctttcaaagtctggcctgtttgtacccatccttcttgggaaaacttgtcaggtatttgaa

SEQ ID NO: 736215 - DNA, 596 bp, Homo sapiens
tctaaacctactttgaatgatagagtaatttttattataacaaagtgggggatgagaaaagagaagaaggttagtaataagaattagtatatagggacaaatatatttctttaattttaattttaacttatttactttccactcaaacttatgtatttgtttatttcaaattgacagataaaatttcatgtaattattgtgtacttgaaatatttattcatgagacaaagccaagatggctgatgcagccaggagaaacatgttccactgcgagactgtgacttcaggaacactagcatactctgagmagatcttcagagggaaagcgttgagagtgaatggaggaaggatgcagacacttaactgaaggggaagaaatcttggaactctgcatggggctgctgagcatcaggagctgctcctggcccccagtgactcctggggaagaagtgagttgaacaggcaagaagtgtcccactctcaccatggacctccagaatcttaaattctccagaatcaggagaatccacacccctaggcacttggaatgaaagtgggagcttcttaaagaggtggcaggggcaagaatccagcct

SEQ ID NO: 736216 - DNA, 618 bp, Homo sapiens
ctttccatgcctttaactctgttctctctagcatctagaacttgttcttttcctgggaaaaacactcacctcattaaactgtagggctaactcattctcaggtatgagcttaaacattatttttccaaggagatgctccatgacagctacattgaaacatactcttaaatcgctactatatgctagggactcagcatttagtcatacactggtaaatattgagtatacattgttactatcagtttaatgtctgtctttcttattaagctccttctgtattattcatycttatatcatcagtacccagcatggtgcctgttcataaacctgttgagaatgggtgcaacatacagtctatagttggtcctcattattcagattccatatttgtgaatttgcacactcactatatttgtaatcctaaaacaaatagtcatggtgctttgatggtcacactcagatgtgttctgagtggcataaaatttgagctgcctaacaggcatattcccagctgaggtttcacaaggcaatgctttgccttcttgttttagctttaaacaagtgtcctttggggatctatttagtgctacatttttcacattttttgagcattttgct

SEQ ID NO: 736217 - DNA, 607 bp, Homo sapiens
cctactcatttacctactttcatgtgagtataacttaatttgtttatgatggaaaaaatgacaacctctttcaaaataagtagagaatcattcctggctgtcaaaatatctcacaattccatggaaaattgattaactctccatatgataattcaagggagaagtgtcactgtatagctaatcatgtgccatttactaatagatctgaacttacgggtagctttagcatttgtgattgaaaattttgtgtacaaacagaaaaagaacaaattaatatattttctggaatataaaaatgctacatctataataacaagaatgtaaattggaaracatctcagccctagttccttgtttgtttttcatttcacccatgttttacattttgaaaaaaacaataatccaagaaggccggatgtgttaggccatttttatgttgctataaagagataactgaggctgggtaatttataaataaaagggatttaattggttcatggttctgcaggctgtataagaatcatggcaccagcatctgcttggcttctggggaggcgtcagcaagcttacaatcatgacaaaaggcaaagtgggacaggctctcaca

SEQ ID NO: 736218 - DNA, 574 bp, Homo sapiens
tttatttatttataatttcaacttttattatacattaaagaatgcatgggcaggtttgttacatgggtatattgtgtgacactgaggtttggggtacaaacgatcctcacgcaggtagtgagcatagcactcagtatgtggttttctggcccacactctcctccgtctccccttgtgtagtccccagtatctattgttgmcatctttgtgtccatgtatatgtaatgtttatctcacacctgtaagtgagaatatgcagtatttggttttccattcttgtgttaatttgcttaagataatggcctccaacaccatccctgttgctgcaaaggctatgattttgttcttttttatggctgtgtagtattccatggcacgtatggaacacattttctttatctaatccaccgttgatgagcacctaggttgattccatgttttgctattgtgaatagtgctgtgatgaacatgttagggcatgtgtctttttggtagaactctttgttttcttttggatacacacccagtaatgagatgttgggtcgaatggtaattctacttgaagttctttgag

SEQ ID NO: 736219 - DNA, 544 bp, Homo sapiens
aaatctcaaatgctaaaaaaatactgcaattttgacatcagtgagtcagatcaatacatcctctggggctgattttgcttcacagttaggatgagccatctcttaagctgcaggctcaaatgggattaactgaactctatacctgggatgggccatggactgagctgtccatgcagaaggaccaggctgtccatgccttccctgcccttttactcaccactgcacagcagccccagtgggcctactgcacatgtctaggagaaatcactctaagaaaaccaacaggaacaggctttaggcaacaagagacgtctcactgcatctcctcycgcgtcagaacttgagtactgggtctttgcagctcagagcattcctcccttccttctcctgcccgcaaagccctgcctctctcctgagtacatatgacactccatgctgcaagatttcaaggcagatgcaggtatcttatgggtgctttttgactcaaagcagctttttggttgagggggcaagttgtgacggagcagggggtgggggccttagc

SEQ ID NO: 736220 - DNA, 590 bp, Homo sapiens
tttctccaatccacatgtattccacaatcctcattattgagagcccactcactctgagccaggcactgtgatggtgggtggggaaggatgacattaaacaaataatcacacaaacaaaacatgtaattctaaatcatgactctccagagaagagcagaacacttctgaacctgaytgggaatctgaagatgagagggacacaggtgcttcctcaatctctgggtcccccaggtaccgctctccccacaagcccaactgtcatgccccccaactacaaatcaccagcactcagtggctgcccctgctgcgggaactcaggtggattctctcagctgcctcttgggagcttctttctccttcgtgcccaagcagactgtggggatgcagccgtggtcctgttctacatggataattggtttgtttcctgttttgggccatttctagtaagtctgcaatacttgcatacaagtcttgtttggacatatgtctttacttctcttgggtaaatacctacgagtgaaactgttgggccatatggtaagcatgtgtgtaagtttataaaacagaaaactgttttccacaatgagaga

SEQ ID NO: 736221 - DNA, 486 bp, Homo sapiens
ctcagacaccgatgtagcgctgtcttttgagtctccttgaatctgggactgttcctcagtctgtctttgttttccacggtgctgacatttttgaagggtacaaatcaaatcttttgcagaaatgtcctttcatttgggcttgtctgatatttcttcataattagatgcaggtcacacatttccggcaggagcagcacagaggtgatgtgtttttctttgtgctttacatgcggaggcacaatggcagtctgtcccattactggaagtgtaaacactgatcacttggttaaacacttggctctttcttmcaggatccactgttccctgagattctcctggtggttctgacaaagacttctttgatcaccttgggcaaatcactccccctctctggatgttggtttttaaaggcagtaatgcagttctccacatagccctctgcccaggccaactcctactcatccttcagaaaaagtcacccttcct

SEQ ID NO: 736222 - DNA, 623 bp, Homo sapiens
gagttagtttggggtcatgaaacatgatgagaaggtaggtctgaagtgacgacacagcaaagagaacagctgagtggtaggcatgaaggagaaatggggccatgacatagagatgcaccctgcagggaggatggctggttggctgtgattttaaatgggatgggaacctcctgaccacttccccatctccctagattctggcagccgtctttatctctttcttcttgcacttatcaaagtcaaaattaaaacgcagagacgaatctctatatttaatgttttggggcaaaggaagacttgcaatttggggcatacatgcagactaagtagtcttcagtatgtccaaagaaaaaagagaaggtagacggttttataaaaaagagaaatgaggccgggcatggtggctcatgcctgtcatcccagtgctttgggaagccaaggcargaggatcacgtgagcccaggaattcgaggctacagtgagccatgactgtgccactgcactccagcctgggtgacacagcaagaccctgtgtttaaaagaaaaaagagaaatattacatgttgctctctgagaaagttcattgacaccagtaagggtctggggagctggcaagttttgac

SEQ ID NO: 736223 - DNA, 650 bp, Homo sapiens
aaataattttggctgtaataacatcctaaaacattttataaattttatttgttaaattatttgactctaagtaatatattatacttcatttatacaagcaatcatcccaaatacttagaaatgcttacaaggaaagaaaatctaaaaaagattttaaattgaatasaattcttatgactaatatattaaagaatcattaaaattgacaaaatatgttttatgagtatttgatttaatattcatccttttttgtgtgtttttcttgtatctttgagccagtttaaacaattttttttttcaggtctcaaacacaattcctacaaagtttctaaaaccctaatctgtctgccagtagtgcctaagcagaaaaatcagccttacacttgactaattcctgcaaaagtcagagttagaactgatcactttcaataatcattctctatatgaaaactgctggtggattatcctgaaaatgtgtagtaaagtaaaataaataaagtaaaataaataactttcatcaagtagagaaatgaataggctcttaatctctttcagaaatattttgacagccataaatacgaggtctataaaatagtaagccctcaaatatttttactcatatgagtttcattagaatggctcagaaatat

SEQ ID NO: 736224 - DNA, 650 bp, Homo sapiens
aaataattttggctgtaataacatcctaaaacattttataaattttatttgttaaattatttgactctaagtaatatattatacttcatttatacaagcaatcatcccaaatacttagaaatgcttacaaggaaagaaaatctaaaaaagattttaaattgaatacaattcttatgactaatatattaaagaatcattaaaattgacaaaatatgttttatgagtatttgatttaatattcatccttttttgtgtgtttttcttgtatctttgagccaktttaaacaattttttttttcaggtctcaaacacaattcctacaaagtttctaaaaccctaatctgtctgccagtagtgcctaagcagaaaaatcagccttacacttgactaattcctgcaaaagtcagagttagaactgatcactttcaataatcattctctatatgaaaactgctggtggattatcctgaaaatgtgtagtaaagtaaaataaataaagtaaaataaataactttcatcaagtagagaaatgaataggctcttaatctctttcagaaatattttgacagccataaatacgaggtctataaaatagtaagccctcaaatatttttactcatatgagtttcattagaatggctcagaaatat

SEQ ID NO: 736225 - DNA, 650 bp, Homo sapiens
aaataattttggctgtaataacatcctaaaacattttataaattttatttgttaaattatttgactctaagtaatatattatacttcatttatacaagcaatcatcccaaatacttagaaatgcttacaaggaaagaaaatctaaaaaagattttaaattgaatacaattcttatgactaatatattaaagaatcattaaaattgacaaaatatgttttatgagtatttgatttaatattcatccttttttgtgtgtttttcttgtatctttgagccagttwaaacaattttttttttcaggtctcaaacacaattcctacaaagtttctaaaaccctaatctgtctgccagtagtgcctaagcagaaaaatcagccttacacttgactaattcctgcaaaagtcagagttagaactgatcactttcaataatcattctctatatgaaaactgctggtggattatcctgaaaatgtgtagtaaagtaaaataaataaagtaaaataaataactttcatcaagtagagaaatgaataggctcttaatctctttcagaaatattttgacagccataaatacgaggtctataaaatagtaagccctcaaatatttttactcatatgagtttcattagaatggctcagaaatat

SEQ ID NO: 736226 - DNA, 646 bp, Homo sapiens
aatagtaagccctcaaatatttttactcatatgagtttcattagaatggctcagaaatatcatcagttttccccctaaatcaaatacccacacatcttcacctggtggtagaagcgattatattaaaatattttaccctgaacttgtatttctttgtgtttaactgtttagaaacttctgacatgctggaatctctctgcaaaagttgtcgtaatcagtttcaaagagatagtttacatacaaaacattctttcccatatcacgaaaagaacttctagtcaccaatattttttaagaaagtgtatgtggggtgcaaatgagaagataaaataatccagagcatgacatattcatattcttattccctaaccattcagttttagcatttggtgtaatttgaagcaamctttcaaattgcattgttgattaggtaattttcctctgcagctatccaatttttctgaagctcttcttgaattgagtgcattaatattaaagtttgcaaaatagcaaccttggaaaaaacgtgcactctgacttttccccttacagaagtgacttcatcagtggctccagctctctgatgcccaatcagctccataatgatggtgataattattatttattgagcacttgcaatacgcca

SEQ ID NO: 736227 - DNA, 630 bp, Homo sapiens
tcagaagaaataggatctcttaggcattttcctcacggtgaacaattattataggcatctcaactttattgaccttggcttttccacttgcccaaacataacaaatttactaccctaaaagaattagctttgaccatgcctgtccccaagtatctaatgaaaatattggtgtaggtacaaaataaatgctcttgttctttcctctcttccacctcctctctctcactctgtctctctctctctctctccctctctctgtctcatacacatacacacacacacacacacacagtgtcttagtgcaagtagaaccatcaatgagattaaaatgtttcactagatggaaacaagagaaaaaatacaaactctaaagaaagatgctgcattgctatctttctaatgatagaagaatacctcataatgacaaaytgttaagctaattattttaatttttaaaaattgaaaaatcatgatattaacgtcttgtaaaggtttctcctctaatttcatgcctaatgtgaaaaaagccacatcatacataaggcttttttaaaaataagaagtccagaagttattagtaagatattcgttactgaactaatataaaggaaacgttattcatctcctgca

SEQ ID NO: 736228 - DNA, 623 bp, Homo sapiens
tttctcctctaatttcatgcctaatgtgaaaaaagccacatcatacataaggcttttttaaaaataagaagtccagaagttattagtaagatattcgttactgaactaatataaaggaaacgttattcatctcctgcaatatcttatcaagaccattctttaggagaaaagtcctaaactatgtaaacaattcaatttttccctacatcacggctcatccaattaatgcaggatcctttctctcagtcayattgcaagcccgggaccccctagacagcaataccccatctgggtctcactcagccacactggcatgcccagctcacctgtgttatagcttgtacccatgctcagcagttcctgagttcttgtaccatgcccaagaagaatgaggatacatgggacattgaagggagaagagagaagaattttattgagtaatgaaaatggctttcagcagagagggaatggaagggtgcggggtatggtttccctgtgtggctgggtctgagtcttatagactcagaatctggagtgcatgctgattggtctgtgagtatgcaaaaatggttaaagcaaagacaccatgcaaaggtgagcacaacagtgtagaaaaccattta

SEQ ID NO: 736229 - DNA, 623 bp, Homo sapiens
tttctcctctaatttcatgcctaatgtgaaaaaagccacatcatacataaggcttttttaaaaataagaagtccagaagttattagtaagatattcgttactgaactaatataaaggaaacgttattcatctcctgcaatatcttatcaagaccattctttaggagaaaagtcctaaactatgtaaacaattcaatttttccctacatcacggctcatccaattaatgcaggatcctttctctcagtcacrttgcaagcccgggaccccctagacagcaataccccatctgggtctcactcagccacactggcatgcccagctcacctgtgttatagcttgtacccatgctcagcagttcctgagttcttgtaccatgcccaagaagaatgaggatacatgggacattgaagggagaagagagaagaattttattgagtaatgaaaatggctttcagcagagagggaatggaagggtgcggggtatggtttccctgtgtggctgggtctgagtcttatagactcagaatctggagtgcatgctgattggtctgtgagtatgcaaaaatggttaaagcaaagacaccatgcaaaggtgagcacaacagtgtagaaaaccattta

SEQ ID NO: 736230 - DNA, 625 bp, Homo sapiens
aatcacagaaacagtaaaaaaaaaaaaaaaaaaaataccttcagtcagtggtctccaaaacagatgttgctctcacacatcagcaataaagaaattttgagcaagcagtcacaaagtcacatacatcacaccattttactaatattaccaaatacaaaaattaaaattaaaacatgacatttaaaatatacagaaaatcaaatttctagtattttttcccayatccaatgggtttctgttccaaataactcattaagaagaaactatcatgctctctcttacacaattataaaagttacacccctaaaatattacaacttcatctactcaaccagcaaaatcttttgagacaacttttactgctaaaatgcctccttagagagcgtagcgaaacaaaactaatttgaggaaatttattattattctttcaatttggagggggtagatactattatgagtgctctgtaggtgccaagcattgtcaagagccttaaaacatttgacttttaatttttccaaccactctggatagtaaaccttattcccatctttcagttacagaaactgaggattaaagcagcccaagattaactagttagaaactggtaagatatcacatcagaat

SEQ ID NO: 736231 - DNA, 641 bp, Homo sapiens
accagcctaagaaggagaatcagaacttgtggtctgaacctacctagccaattgcctgcttaaacaataaagaaataaataacattctgcagaggatttaataggacctagaatctatcaacatgatattaaaaatattctggatacaaaccaaaagcattcaacatacaaagaaacaaaattatctaaccaatatctaagaaaatagatactcagcagataccaagcctgagataacccagatgttgggattatcaaagaccttaaagtagctattataagaataatccattagataaagataaacacattgaaatgaatgggtatataaaagttttcagagcaaaattaaaactataaaaaagaatcaaatggaaatttgagaactgaaaaatcagaaaaatttactggatgggcaaaatagcataatggagatgaaagagaaaagagccagtgaaattgaagacggagcaatygaaattacgcaatttaaagaacagagaggaaaagactgcaaaaactaaaaaagcctccaacctgtgcaaccatatctaaggatctaacatgttactggagttgaagaaaggagaaataaattggtgtagaaaaatgttgaggaagagcatcaggataaatagcta

SEQ ID NO: 736232 - DNA, 641 bp, Homo sapiens
accagcctaagaaggagaatcagaacttgtggtctgaacctacctagccaattgcctgcttaaacaataaagaaataaataacattctgcagaggatttaataggacctagaatctatcaacatgatattaaaaatattctggatacaaaccaaaagcattcaacatacaaagaaacaaaattatctaaccaatatctaagaaaatagatactcagcagataccaagcctgagataacccagatgttgggattatcaaagaccttaaagtagctattataagaataatccattagataaagataaacacattgaaatgaatgggtatataaaagttttcagagcaaaattaaaactataaaaaagaatcaaatggaaatttgagaactgaaaaatcagaaaaatttactggatgggcaaaatagcataatggagatgaaagagaaaagagccagtgaaattgaagacggagcaattgaaattaygcaatttaaagaacagagaggaaaagactgcaaaaactaaaaaagcctccaacctgtgcaaccatatctaaggatctaacatgttactggagttgaagaaaggagaaataaattggtgtagaaaaatgttgaggaagagcatcaggataaatagcta

SEQ ID NO: 736233 - DNA, 575 bp, Homo sapiens
ctaaatatttcagtcactctgtgctcagtaccagaccccctactactgttctttctctgtaccccttctcagatgattccatcaattcccgtggccttaattaacttttctttgcaacttacttccagattacacctgtaacctaacttttctggacttctgacaggtattctacagctgattgcttggcatctcctattagaagactcacaagcacctcaaaattactatatccgacacagaactctttaatttttgtgccctatctcctttctctttccttgtcattgacatctaactatggcaccctcattcatctaccaagtttttcaaagcagaaatctaaragtcacctttgatttttctctttccttcatgttcctccaaatttacccacttcaagttttatcgattatccttctaacttatgtcttccttagatcatcttttcttcagctctgcagccattacccaagtccaggccatcattgtctcttgcatgggctatggcaataaccttcaaactggcctcttccttttgcccttgccctcattcaattcctttttcctatatc

SEQ ID NO: 736234 - DNA, 614 bp, Homo sapiens
gggggcgtctcaaacatcacccctctcctagagcgcccagctggtggttttcatgtgaaagaccctcaaggttactttcagaaaaatggatcagtaagcgtatgtgacacggcatgttctgtgccgagatggtccagggcacaagggctcgcttggcagctgagagggcccagagcacttgcctgaaatgggagccggcaggtggggtgtgtggggtgcgagagacccgtggtagactgaggaaggtggagactgaaggtctggttggtgactcagagcacccatctgcaatgaggaagatggacccaggaggcaagactataggcagggaggtgagggaagggcccagaccgaggcaggtggaggggagaggagcagcggtctcgcattgccaygtgcaggggcaaaacagaaggacacagaaactacagtcccaagtttagtcattagtggggtggaaatctgatttttttaaaaaaatgtacagaacttagcttagggcccatccatccattcattttctgtccatccatctagtcaacaaatatttacaaagtacctaccgtgtccaggccttgcataccttggtgaggacaaacatggtccctgcccac

SEQ ID NO: 736235 - DNA, 614 bp, Homo sapiens
gggggcgtctcaaacatcacccctctcctagagcgcccagctggtggttttcatgtgaaagaccctcaaggttactttcagaaaaatggatcagtaagcgtatgtgacacggcatgttctgtgccgagatggtccagggcacaagggctcgcttggcagctgagagggcccagagcacttgcctgaaatgggagccggcaggtggggtgtgtggggtgcgagagacccgtggtagactgaggaaggtggagactgaaggtctggttggtgactcagagcacccatctgcaatgaggaagatggacccaggaggcaagactataggcagggaggtgagggaagggcccagaccgaggcaggtggaggggagaggagcagcggtctcgcattgccacgtgcaggggcaaaacagaaggacacagaaactacagtcccaagtttagtcattagtggggtggaaatctgatttttttwaaaaaatgtacagaacttagcttagggcccatccatccattcattttctgtccatccatctagtcaacaaatatttacaaagtacctaccgtgtccaggccttgcataccttggtgaggacaaacatggtccctgcccac

SEQ ID NO: 736236 - DNA, 590 bp, Homo sapiens
cggttcttctgtctcactgggattccaggcaccgctagggtacaaaaaaggacctcctgcagctagctcagtgtctgcccaaacagccgctcagttgtgtgcttgacacccagggctctggtggtgtaggctcatgaggraatctcctgatctgcggattgcaaaaatccgtgggaaaagcgtagtacccaggatgggtagcacagtccttcacggcttcccttgttttgggggagggcaggtcccccggctccttgcgctttctgggagaagcgacgtcccaccctgcttctgctcgctctctgtgggttgcacccactgcctaaccaatccagtgagatgaactgggtaccttagttggaaatgcagaaatcaactaccttctgtgttggtctcgctgggagctgcagaccagagctgtttctattcggccatcttggcccctccaaaaagggcttccttttttacacttaagaaattgttaagggactagcactatcatattctgccttgaatctagtcgtgaacatggtattttgctgactcatattaggtatgagacagttcagttgtgagtgacagaaaaccca

SEQ ID NO: 736237 - DNA, 650 bp, Homo sapiens
ttcaggctcaaagctgctgacattttaaacataatttgaaaaaaatcagatgtgacatcaacaggaaatagatgtataattccttttttatatattataagtgtttaaggatcctgaattccaaagatatttttaatgaagttgaaacactgttttaaacaaaagaggaatcttgtaaaaattattagaatgacactaaaagtataatatcagaaaattaacttacagtggaaacaatcaacatggaggcatcagaacaaaaacaaataaaaaaactatcctcataaacaactcaccagatacgtctcaagcttctggcttattgtattaaaagaggttattttgacatgcctttccaattatgaataaatctgttacatttcaagaaatgctaaaatatctattacyttaggaattagaatataagctatgacataaaatttatgttaaacagaatcactataggcccaacacaaatgactcctgaaagtcttcctaagacactaagaacagaggtcacacacatacatatttatactgccagattaatactctgtattttgaaaaacatggccttgtgttgggatgcattgcttccaactcttttgtagagtagcattttctttaaaaagtaacagacaatgacataa

SEQ ID NO: 736238 - DNA, 421 bp, Homo sapiens
cctacaaatactgcccaagcccatctagccttgcctataaaagtggtttgcagtgattatggagtaaagtatgggtcactaggatttacaggaagtatggttcctctgctctctggattggtgaggcactccccgtataaatataaatgcaccacatgtggtaccaatggatcatgcttagccaattaaaatgtgaatctataacagccgaacatagtaaactgagtcgccagggcattcttagtatcacacagtgcaraataattgccatgtgaaaacaaatactatctttctccttttttttttttgttcagtattccctattcttctattagtcaattactgacatctatttaacatagttttatttaaaggtgccatgggaatagacttaaactaactctgattcctactctcaagt

SEQ ID NO: 736239 - DNA, 509 bp, Homo sapiens
atgatctttcaatttctctttaaagattgaatttctatttaagatgaatttctaggaatttgattctcccactcagatgctgaacttaattatgtcacaatcagaattatctagataatttatttcccagtcacttctgtgaccagtttagtatatatttgaatcttctgttcttgaactcccttttgatgtggctttctgctatattactagtaattcattttaaagtggctaattaaaatcagcattattcagtcagaacrtatcacacacaaaccttttataataatttattgataaccttcacttacaagaacagtagcataacaaaagccccaaatccaagagatatttatccattgtctccatctaacaaagatcatattctctgtccatctctatcctgacatcctagtatttattttaagatctttatttagatgcaaatgcctttgatactagtacgcaggcaatattcatcccaattatctgggttgtttatattaatt

SEQ ID NO: 736240 - DNA, 509 bp, Homo sapiens
atgatctttcaatttctctttaaagattgaatttctatttaagatgaatttctaggaatttgattctcccactcagatgctgaacttaattatgtcacaatcagaattatctagataatttatttcccagtcacttctgtgaccagtttagtatatatttgaatcttctgttcttgaactcccttttgatgtggctttctgctatattactagtaattcattttaaagtggctaattaaaatcagcattattcagtcagaacatatcacacacaaaccttttataataatttattgataaccttcacttacaagaacagtagcataacaaaagccccaaatccaagagatatttatccattgtctccatctaayaaagatcatattctctgtccatctctatcctgacatcctagtatttattttaagatctttatttagatgcaaatgcctttgatactagtacgcaggcaatattcatcccaattatctgggttgtttatattaatt

SEQ ID NO: 736241 - DNA, 638 bp, Homo sapiens
ataagactttggactgtggactttggggttaatgctgaaatgagttaagactttggggaactgttgggaatgcatgattcattttgagatgtgaggacatgagatttggaggggccagggtgggatgatatcgtttggctctatgtccccacccaaatctcatcttgaattgtactcccataattcccacatgttgtgggagggatccaatgggagataatttgaatcatcggggcagtttctaccatactgttctttttatagtgagtaagtctcatgagatctgatgggtttatcaggagtttccgcttttgcttcttcctcattttctcttgctgccaccaatgtaagaagtgcctttcaactcctgccatggttctgaggcctccccagtcatgtggaactgtaagtccaattaaaccyctttttcttctcagtcccaggtaagtctttatcagaagtatgaaaattcactaatacattacctcatataaacttaattacttccaaaagtccctatcccctaatactattccaataggggtcagggtttcagcatataaattctggggggacacatttagtccatagcaatatccttaatacatattaatcaattataaatttaaaaagttcac

SEQ ID NO: 736242 - DNA, 611 bp, Homo sapiens
aattctaaaggcagagttttccaagttgtcctagaccaatctccaactattgagttgtttggagggctttattcaaatatatctgaggacgttaaaataaatcacaacactgtagcaaggtcctcgtcccaggaatcctgacttatctgcttacagttctttacttacctaggaaaggaaaggttctggagtttctgcagaggctgtatcataggttrccttcaggtttcaaaaactatctacaactctgagtagcagatatcccactgacacccctatttgttttaggatacgaaggatgatctctcttgagaagtcatttggatcccaaaatatccgattaagaggcagaagtacagggcaaaatttctcactaagaaatagaatatcacaacttgctagaagtcttcattgttatttctctgcaggatttctaagattagggtttgtggcaagagaaggataaaataaggagtgggaggaatttgggaatgtcatcagatcgtattccttttctcctgattgaagactcctaaacatctgcaacagacttggttctccttgggccttgtagagagctgtctggctttctgacataatcttttccagtg

SEQ ID NO: 736243 - DNA, 522 bp, Homo sapiens
ggagctcgctttctagttgttagatataaacaaatttttaagaatatatgggctgtaataaaaaggtgatgtaagggaaacaattggtgcgtagtcgggggaggcatatgatattatgtagaccagtgtggtaaatgaaggatgatggcaaactcttcgacactccttacaytgacaggttgaatctgattcccttccccttgaatctggctgctcctagtgagttttaagttgaccgataggatgcagtgaaagtgatgttctgagacttctgaagctagaacataagaattcttgcaacttctgctaaaggaagttctcctggaatactctccccgggacccctgagagcaccaagctggagatgtcacgtgtagacagacacattggttgtgataggcagcatctaaaatggctcccaatgacccgccctctctgatattcatatactgtgtagcctcttccgcttgagtatgggctggacctagtgattttattctaatgcagagaataccacctatg

SEQ ID NO: 736244 - DNA, 568 bp, Homo sapiens
acaaacaaatggaaaaacattccatgctcgtggataggaagaatcaatatcatgaaaatggccatactgcccaaagtaatttatagattcaatactattcccatcaagctaccactgactttcttcatagaattagaaagaactactttaaatttcatatggaaccaaaaaggagcctgtatagccaagacaatgctaagcaaaaagaacaaagctggaggcatcacgtgaatatgttaaaataatacacatattgttttcatcagtggcttattcttaaaragcttttggattacgtatttccacttcttttgcaaggaaacattgaggtgagaagtctgtaggtactcttttgccaatagtacatgagtttaacagtatttttaagccagctaataaaaattttctttatctattttaaagtgtgttagatgtgtaaataaattcacatattcttccaatatgtagttacgtttaatttttatatagttctttaattgttctatgattaatgggctactgaaaaattaatcttttttaatggccttatagggaaggatttagatat

SEQ ID NO: 736245 - DNA, 499 bp, Homo sapiens
cgtgagatattttaacaaaatactagtaacagtttttgtctttttaaaaaacttttatttaagttcaggatatatgtgctgatttgttatacagctaaacttatgtcatgggtgtttgctgtacagattatttcagaacccaggtactcaagcctagtacccattagctgttttcctgatcttctccctcttcccaccctccgccttccaacaggcctctgtgtctgttgttcccctctatgtgttcatgtgttctcatcatttacctcccacttrtaagtgagaacatccagcatttggttttctgttcctatgttagtttgctaagattatattaacgtaaaccttctagtggacagtattgaaatagttaagtaaaagaggaatcttgtagtgaagaattacatttgaattactttcttaaatatagatacatgtctttggaaagagaatttgctgagataatttgccagtggcaattactggagaattaaactga

SEQ ID NO: 736246 - DNA, 574 bp, Homo sapiens
aaggattatgtccagaacaaccgagcagggctatgaggtgcattctgtgaacaacttaccattactcggcattgggcaggacaccccagcccccatgccttccaggggagtgaggacaaatcagtgcagttcaacagttcatggagtccactgctcccaaaacaagtcaagacacctccagagagccagtgaccatagacgctcccaaaatgcaaatggagaattgagcaatctagggctccaggtgctgaagaatgatctgtaccttcgagcctgctgagacctaaagatctggcaaaccatacctgaaggaccatcttrtaagagggtcaaagctccaactggaagaagatctgccagcccagcctcattgttttgacattgaaatgcccttgacccaaatactttttcttcttagaacattgagtcccaggcccaaaatatgtacagaggagatccatattttgtatctttgtattttggccacttcccaaggtcacaacatccactaagaggacaggattgacctgggtcattgggagcacaggatccctaagtctcaggtcctagggac

SEQ ID NO: 736247 - DNA, 566 bp, Homo sapiens
tgttcggatcttttaaaatcctcacaatcatctactgtaaagtagatattatccccatttcaggggtgaggaaactaaggctcagaagaatgacctcccagaggttgataacttggagagatccggagcccaggtccctgatacgcaccctgctgcctcatctgagcagtctttaatcccctttggggcagcacataggcagggactggggcaagggcgacgggctgaattttgagttcaaacccatttgttaagttcttccccaccatggccagatgatgaactttatgagaggaagcgtggatcctattyggaggtagagtgaaaggctcaaaagaaaataacttttccttcttttcttttcttttctttttttttttttttgagacggagtcttgcttttgtcacccgggctggagtgcagtggtgcaatctcggctcactgcaacctccgcctcccgagttcaagtgattctcctgcctcagcctcctgagtagctgggattacaggcacccgccacaatgcccggctaatttttgtatttgtagtagagatggagtttcac

SEQ ID NO: 736248 - DNA, 566 bp, Homo sapiens
tgttcggatcttttaaaatcctcacaatcatctactgtaaagtagatattatccccatttcaggggtgaggaaactaaggctcagaagaatgacctcccagaggttgataacttggagagatccggagcccaggtccctgatacgcaccctgctgcctcatctgagcagtctttaatcccctttggggcagcacataggcagggactggggcaagggcgacgggctgaattttgagttcaaacccatttgttaagttcttccccaccatggccagatgatgaactttatgagaggaagcgtggatcctatttggaggtagagtgaaaggctcaaaagaaaataacttttccttcttttcttttcttttctttttttttttttttgagacggagtcttgcttttgtcaccygggctggagtgcagtggtgcaatctcggctcactgcaacctccgcctcccgagttcaagtgattctcctgcctcagcctcctgagtagctgggattacaggcacccgccacaatgcccggctaatttttgtatttgtagtagagatggagtttcac

SEQ ID NO: 736249 - DNA, 457 bp, Homo sapiens
gcttggatccacttgggtatttcataaatgtgaatttacaggttattaagtgtatttcatttatcttatttatacattctcgaacgagtgaatatttgtgtcttttaaaaaactgttttcacaccaagtgatcctaatatggagttttgaaacctctattttgtccacaagtagtaccactattatatatttatagactctttaaggtatattcatgaataataagcacagttcaacatttagagatatggcatatgttagcttttccctctggtgmtatgcgatctttgatgtttatttaacccagacattattgtattttgattatgaatttgagaacattgagaccactagtctaaaagaacttctttttactttacctaaagaatctatctcattgacaacaaattatgtttttagtctggcagttgtagaaccatccatgatgctcttggaa

SEQ ID NO: 736250 - DNA, 560 bp, Homo sapiens
caggagttcaaggctacagtgagctgtgatcatgccactgtactccagcttgagtgacagagcaagaccctgtctaaaaaagcaaaagaaaaaaaattaatctctggattcaatgtaatcccaatcaaaaccccagcaaatccttgtgtgaaaattgacaagttgattctaaaatttatatggcactgcaaagcacgtagaataggcaaggcaatgtggaataagaacaaatatgggggacttatacaataagatttcaagatttgccataaagttagaataattgagatagtgtggtattagctccagggaagacaaaagatcaagggwacaaaacagagtccagaaatagatccaaacatatatagtcacttaacatatgacaaaagcaccactgcaatccaaaggaggaaaatatacccttttcaatagatggccctggagcaatgggatattgatatgagtattataatttggatgtttgtccccgaagcctcatgttgaaatctggtccccagtgttggaggtagggcctaatgggaggtgtttgggtcatggga

SEQ ID NO: 736251 - DNA, 629 bp, Homo sapiens
catcttttgccttttgacctttgcccttctggtctataatatggataagagcattttgtgatcgtaagatcaaagctacaattccaaagaggactgaatgggaaagaaggagccagctacattagccctggactctctgttatgtgaaaatattatatatatagtctcattaagttaaacactaaaatttgcctaaagctgttgtaactggtatttagatatagatcctggtcctgatcaccccaaagtccataggccaattggccccctttagaggtatctctactgtcctctctgtcactggacctgtcccatgtcaaagactcactctctgcatcaggccccaatgccatcttttcctgtcatgatgcacagcaatccagctcctcatggtcttgaacttccgcattccggagtaggattttggatctcgccatttacaygctgagggaagcagtcatgaaactgggtaagccaatttcactgctgcccctgtggttatatgtacaaagccatttacaaaggccaagaaaagaattagacacatctaaattttggaaaattgcaggcttttttttttgaaacagggtctctgtcacccatattggagtgcagtggtgctcgctgca

SEQ ID NO: 736252 - DNA, 489 bp, Homo sapiens
cctcccccttaccactctcacctccaaaccctcactgtacacacaggcttctgggagtgaccagagaggtgacgaggcctcagtcaagcagagagcagacattctggagtgggttccccagttgtattggtctgtttccacactgctatayagaactacttgagactgggtaatttatgaagacaagaggtttaactgactcacagttccacaggttgtacaggaatcagactgagaggcctcaggaaacttacagtcatggcagaagcaaaggggaagcaagcaagtctcatcacagtggagcaggagagagcgagagcgagggggaaagtgccacatttttaaaccatcagatctcgtgagaactcacgcactatcgtgagaacagcatggaggactggaaatctgcccccatgatccaatcacctctaccagatgcccccctgacatatggggattacaatttgacatgagatttgggtgaggaac

SEQ ID NO: 736253 - DNA, 489 bp, Homo sapiens
cctcccccttaccactctcacctccaaaccctcactgtacacacaggcttctgggagtgaccagagaggtgacgaggcctcagtcaagcagagagcagacattctggagtgggttccccagttgtattggtctgtttccacactgctatacagaactacttgagactgggtaatttatgaagacaagaggtttaaytgactcacagttccacaggttgtacaggaatcagactgagaggcctcaggaaacttacagtcatggcagaagcaaaggggaagcaagcaagtctcatcacagtggagcaggagagagcgagagcgagggggaaagtgccacatttttaaaccatcagatctcgtgagaactcacgcactatcgtgagaacagcatggaggactggaaatctgcccccatgatccaatcacctctaccagatgcccccctgacatatggggattacaatttgacatgagatttgggtgaggaac

SEQ ID NO: 736254 - DNA, 612 bp, Homo sapiens
ctgggttgctggcagcatgtaatagctcagatttggtggtctgacagacttggggtagatcttgcctctcttgcttgccaagtgacctttgctagttaaattctcaggctcagattccttatttctaaaaagagaaaatagtttataccttataggattgtgttaagatttaataagataattcatgtgtctaacatataatgaacactcagtacattttagctgctttgatattaatattaaatataaaaccacagcatttgtcatgattctagccaacatccctagatacaggactctatctttgagcttgagcctcagttcaggtggggacctctcagtccagtccaagggygaacagttcttcccacatggacattgcctgacttggttagaacactgctcatggacacacaagtccactgatgactcaacatcttttgtctggagctcctaaaggatgctcaaactcaaatgtccaacagtaagcttagcatcttcctctcccaagctgtcccctgccagctttcctttcttggagaagagtaccatggtttctatggttgcataaaacaaaaaaatctgaaagccatcctcgacaccactttggaa

SEQ ID NO: 736255 - DNA, 601 bp, Homo sapiens
tactcctagcactttgggaggccaaggtgggaggattgcttgaggccaagagttcaagaccaacctggccaacatagtgagactccatctctattatttttaaaaattaaaaaattaaaaaaggaaaagactggagggggtaaactaagaaatagggaggcagttaaaatgttgcaatactactagaaagaaatgaaaaagaagtaaggccattgtagtgggagtaagttgagatgttaaggagacagatcaatagggtttggttggtaaaggggtgaagatgttaaggatgyctgtgctgtacttggcttatatggttgtgccatccattatgataagaattcagaaagaagagtgtatttttgggggcaggggaaaagagtttagctttggatgttgaatttaagacattcaaattgcagtttgtcatacagtttgagaagtccaaagtggtgtactggagagagaccacccagcaaaatcaggtggggagttggccctagaagaaatgaatggcattggctgagtttcctgttttcatggcctctaagtcaagccttaatcaggaacagctaaaaccccaatagaaaacctgcaatct

SEQ ID NO: 736256 - DNA, 681 bp, Homo sapiens
aaggataaagctagggctcccctggatccagcagttcaagtgaggcctccaaaactctctctctccattgcttgcctctgagtattggcgctattctccccttctagagtctgccttcttccaagtaggtgtgcaaagtaccagacttacatcttacaacttaagaaccagatcagaaaaagaactctcctctgccaatttctctcattggtaatatcctcaaccactgctgtcaccaccagcacctgccccctcctccagccttaattstgccatcaacatattagagaggtgcacagagcccttgctcctggagggatagttccttccccagcctcaacactacccgcctcacccctacaaactgcctcagagaaggctctggccaacatcaccaatgacctccacttttccaaatccagtggtctatttacgctcctcacattatccaaactgactgtctaccttaccctaggaaagcaccacagctaatcccacagccagtgtccttatttcttatttcactaagaaactaaaagcaattaatacaaaattgcctcattttcttatcagcaactttatcaacctggcttcaactgtactgtatactgtgacacatcccaatgacaaaaaataagccatacttaatcctacctaagcccaaactctccacttgatact

SEQ ID NO: 736257 - DNA, 681 bp, Homo sapiens
tcaagatagcagggcaatataataaaattctggcctcaactattaaatgagttgccactcaggtcataataagtgacttttgagtatgacaaaattaaatatattactaaacccagcatccttatgtgtatgaagcattaagtcagtgagctcttgaagtggttgaaaagaatgagttcttgtagaaatcatcgcatccacaggraactgtgagccagcttgagacacatcaaggtactgagtatggagattccacgcatggcttcaccttggctggcctacaaatgttccatggaattaaatctggagcaagctcagttatgatgacatcaacccaagagttctggtctattatcaaagcaagtcattgaagtctctctattaatgggaaagagctcaccttctctgccaatggccctcccgcaatgagttcacatccgtgcagctctttgtaactctcaaaataaaataatttctttaacaatgcttggcatctccatgaactatgaattcaaaccttgaaatagttcccgtagatactgttttagattataaagagcagatactagatgaaggtacttggaagtctacactaacccaggccattattggtgggtgtgggatgtaatgctcttacaggcatcaacaacaatgcaatttcctcaccattctgttacttgg

SEQ ID NO: 736258 - DNA, 624 bp, Homo sapiens
ggtgcttcctttaggagttcttgtaagggaggtctggtggtgacaaaatccctcagcatttgcttgtctgtaaaggattttatttctccttcacttctgaagcttagtttggctggatatgaaattctgggttgaaaattcttttctttaagaatgttgaatattggcccccactctcttctggcttgtagggtttctgcagagagatctgctgttagtctgatgggtttccctttgtaggtaaactgacctttctccctagctgcccttaacattttttccttcatttcaaccttggtgaatctgacaattatgtgtcttggggttgctcttctcgaggattatctttgtggttttctctgtatttcctkaatttgaatgttggcctttcttgctaggttggggaagttctcctggataatatcctgaagagtgttttccaacttggttcctttcccaccgtcactttcaggtacaccaatcaaatgtagattttgtcttttcacataatcctatatttcttggaggctttgttcattcctttttattcttttttctctaatcttgtctttctttatttcattaacttgatcttcaatcactgatatcctttcttccacttga

SEQ ID NO: 736259 - DNA, 515 bp, Homo sapiens
aagaaagttgctgggatttttccacctgcatattagttaatttgggacatcgtttttgatgtccatccaaacgctttcatcttagacactgagtaaaatctaatgccaggcaaaatgtctgctcatgaatttgaattctctctttccctgttctcccagaatctggacactcttttgtgtgtgtgtgtgtgtgtgtgcatgtgatatgatgtgtgtgtgtgtgtgtgtgtgcgtgcatgcaagtggatgtgagtgttgagaaggggagggcaaaaggagtagttaaggaaggtgakcctaccacatattaactattggtaaactgatcttcaatttccttgaaactctaagaaccactttcattaactagaaagtgatattcatcttagtaaaaagtagttatatcaaatttagtaagttctacagttgtaaagcaatgtttggtctgtctgtgaatattgataaattctcaaacataatagagttatcagttttttcagataacttttgaaact

SEQ ID NO: 736260 - DNA, 502 bp, Homo sapiens
accaagcagaagaaagaatttaagagcttgaagacaagtcttttgaactaactcagtcagacaaaaataaagaaaaaataatttttaaaaagggacaaagcctttgagaaatatgggattatgtaaagtgacctttgactagtagccatccctgagaaagaagaagaaaaagtaagcaacttggaaaccatatttgaaagaataattcaggaaaatttctctgatcttgctagagaggtagacatccacatataagaaattcagagaatatctgtgagatactacaygaagcaaacgttaccaaggcatataatcatatgactatccaaggccaacataaaaagagaaaaaatcttaaaagcagatagagagaagggtcagatcactacaaaggaaatctcatcagactaacagctgaattcttaacagaaacaatagtctaaagaggttgggaactattttcagcttccaagaaaaaaaatttcagccaagaattttatat

SEQ ID NO: 736261 - DNA, 399 bp, Homo sapiens
cgactgggtccttactctcatagggctcacagcctagccaggaatttgaacaaggaaaaacacaacaggacatcgaatgaggttttgcctactgtttaggaattttggttgatgccagagaaaaataggagataattatcctgagagtctaaagaaaattgcttgggttttacacatgtaagtaagcacataatatatggtataygaaatcctgtacttcaaagtcaactaatagactcaaatgtctcagaatggcctaaatttttcagaatgtttatacagcttggctttcaaggaataaaatttttatcaagatatttctatctaaataagtcaaatattcaaactagctatacatgtctaggtacagcattatcggtttagctaagtttctgccaa

SEQ ID NO: 736262 - DNA, 639 bp, Homo sapiens
tgtttagccagtcttccagaaaaacatctgtatacaccacactgtattccagcccccgtagcttcatttctgctttactacatggcaaaatgagtcgactgcaacctctgctataatacccatttccctgctcattcctgatcatgctgcactcaggcttttgccctcattgttctatttaaatggcattttttaaaagaacamcaatgacccaatgacctctttgttgctaaagccagtagtcacttctcagtgctcatctcatttgaccgatgagtggcatttgtcacagaaaatggatatcacacactcatgtgtttccttctccttctgtcactgttcttttccctatcatttcttactcattgatctgaactctaaaaagtttaaatgccttggtctttgtccttggactttttttctccttatcttctactcactctcttggtgatcttatttagtctcgtggctttaaattccacctaagtggacaattcccaaatgtatattcccagaccagaagttgttccagaatttttgactcatgtaaccaaccacctaactgacataaagtgatgagggtattttaaaagtgaaacagagcgttaaaaaataaaggggaagatactgctcagaaag

SEQ ID NO: 736263 - DNA, 645 bp, Homo sapiens
tgtgtgtgtgtgtgtgtgtgtttgtgtgtactgtaaacttacaaattctttcccctggttaaaataaaacacacacacaaaacaatgatgacaactgtaattacatcctggcaacattgaaaaaaagagaaattgatcagtgttgcaagcttttctttcttcctaataatcatcgtttctgaatastagaaaatagaatgcctgatgtttatcactacacactaaaggacactttagggaaggctaatattttggcctttgggaccttgttatgcttgaagctttactggtggaacatcaacattctttgctttctctttgtaaaatatttgctgtaaagtgtaaataaagaaaggagagtatttcttcacattgctatgctaaaacatctggcatctggggttgtgtttatacccttctgcactgcaggcagtgcaggaagcctccttcaaagcagtctggatttttctttcacctccttgaatgtccaaaaagtaacttttatggtttttttttttcttttggaagacgatttttgtccagcatatggagcatcttaaatacttgggccaaaaaacaagtcactagaaagggaagttctccaatttatcttacagaacacctgcttatatcctaaagggctct

SEQ ID NO: 736264 - DNA, 645 bp, Homo sapiens
tgtgtgtgtgtgtgtgtgtgtttgtgtgtactgtaaacttacaaattctttcccctggttaaaataaaacacacacacaaaacaatgatgacaactgtaattacatcctggcaacattgaaaaaaagagaaattgatcagtgttgcaagcttttctttcttcctaataatcatcgtttctgaatactagaaaatagaatgcctgatgtttatcactacacactaaaggacactttagggaaggctaatattttggcctttgggaccttgttatgcttgaagctttactggtggaacatcaacattctttgctttctctttgtaaaatatttgctgtaaagtgtaaataaagaaaggagagtatttcttcacattgctatgctaaaacatctggcatctggggttgtgtttatacccttctgcactgcaggcagtgcaggaagsctccttcaaagcagtctggatttttctttcacctccttgaatgtccaaaaagtaacttttatggtttttttttttcttttggaagacgatttttgtccagcatatggagcatcttaaatacttgggccaaaaaacaagtcactagaaagggaagttctccaatttatcttacagaacacctgcttatatcctaaagggctct

SEQ ID NO: 736265 - DNA, 584 bp, Homo sapiens
ccgcctatgggtgggcatctgggtggctaccttttgcctggtgctggtggccacagaggccagtgtgctggtgcgctacttcacccgcttcactgaggaaggtttctgtgccctcatcagcctcatcttcatctacgatgctgtgggcaaaatgctgaacttgacccatacctatcctatccagaagcctgggtcctctgcctacgggtgcctctgccaatacccaggcccaggaggtgggtaagggaaacagggaccttggtcaggtgaagaaggatgtagggaaggggaggggctgcacccttactatcccccctggttaagttcagcaaaatgctgcatacttacccaataactggcagtactatttacactctggttctgaatcaattgagaaataagacaacagaaggccygatatcatcttcctttctgacaacactgataaaggaacatgggttatatctgtgggtgaatgggcttcctaatgatgaagccaaaattgaatagacttacccaccagtcgtggaagcactggtttgagactatcttaccccaggggagtagagctaaatacatacatc

SEQ ID NO: 736266 - DNA, 453 bp, Homo sapiens
ttctgtcacccatgctggagtgcaatggcgtgatctcggctcactgtaacctccatctcccagattccagcaattctcgtgccttggcttcccgagtagctaagattacaggcacacacctccacacccagctaattttttgtatttttagtagagacggggttttgccatgttgcccaggctggtcttgaactcctgagctcaggtaatctgccagcctcagcctcccaaagtgctaggattacaggcatgagccaccgcgcccrgccaaaatagtttctttaacataaccatgcttataccaatgcagtactaaaatataatttgtatatattttcatgaaggaagggacccacaaaggcaagtgcctaggacccacacaaatcacagtgtggctcttgctccaaccatgggagaagccacagaagagcattccaggcagagggcacggca

SEQ ID NO: 736267 - DNA, 564 bp, Homo sapiens
aaaggcatacaggggaaactgaggctccgggacattaagtcatccaaggtggttatctgtgcatggcattccagtaggagggtgccggggaggaggaccaagtagggaacttactaccagaatcactaggtctaagttctttctctttcatgctctaatggtcagactctaaccacctgtttcttcctggaacacctgagagggggctttagcacagaaagagcccctggcccaggagtaggtctgctcagctgctgtggcctgagttctcatccatgccaggacctytcagcaatatctccaactatttcatgccccagcctcactcccttctggaaggtccttttttgaggggtatggagcatttagtacctcatttaaatctaacaacattgctaagagattggtacaactattacctcattttacagaccaggcaactgaggcttggaaagggtaagctacctgcccaagtcacacagctggtaagtggcaaagccggagtacaaacccaggcctgtcatgttctaaagccactatcctctgcttcttactattctgcag

SEQ ID NO: 736268 - DNA, 549 bp, Homo sapiens
ctgcagaatagtaagaagcagaggatagtggctttagaacatgacaggcctgggtttgtactccggctttgccacttaccagctgtgtgacttgggcaggtagcttaccctttccaagcctcagttgcctggtctgtaaaatgaggtaatagttgtaccaatctcttagcaatgttgttagatttaaatgaggtactaaatgctccatacccctcaaaaaaggaccttccagaagggagtgaggctggggcatgaaatagttggagatattgctgaraggtcctggcatggatgagaactcaggccacagcagctgagcagacctactcctgggccaggggctctttctgtgctaaagccccctctcaggtgttccaggaagaaacaggtggttagagtctgaccattagagcatgaaagagaaagaacttagacctagtgattctggtagtaagttccctacttggtcctcctccctggcaccctcctactggaatgccatgcacagataaccaccttggatgacttaatgtcctggagcctcagttt

SEQ ID NO: 736269 - DNA, 620 bp, Homo sapiens
tccctctccctctcccttttcctcgctctccctctctctctctcacacacacacacaccctgatggcctacacacacacacacacacacacacacacaccctgatggcctacacacacacacacacacacacacacacacacaccccctgatggcctacatgaggaaaacagcacacccggggctcaggcagcacagaggaatacagggttgacaggcacaccgctggagcaggcacaatactcacaaagaacatggacagggtcctccggttgtgtagtcgccgctggacacaggtggggtggggacaaggggaaggaaagacataaagacacagtgaggactarcaacaggagacaggggtggggaatgggggtgaagaaggcagaagggagggggacagtgagcatagggtggcaccaggctagcaggcacaccactgcctactgcaatgtgacaagggctacacgacaggaatcgggttggggcagggtggggtgccttaccagggtctgattggcagagaggagggtggctccactgtcatccccacggataggcagcaaaggcatagtgccaaacttctgacgggcaaggtcagaggaggaatggcgtcgtaag

SEQ ID NO: 736270 - DNA, 623 bp, Homo sapiens
gaaggtcaagcagcctgtgtaatcatctgtgcataaatttgtttttatatcacagataaatatcatgtattatctgatccactaacattttatattgtgtaaattgtgtccaaatgtgcatcttttaaatttagtacaactttggaattcttctattctttgcttagatggtatgaaacttcatagtgagactggcttctaaagctcagcctcattttcttgcttgcacacctttaartgagctgttactggttacctttgccttatgctagtcaactgtgttcagcatggcacacagatgcattacatgtccactgagcggggtctaggtcagtttttcaaaagatttactcaatgaccaatctgaccagttatcaagtcactaaaaactgccagtcaaataccttagcccaggtttacaagagccacaggcgtttggcaaagccagccaaaggtcagtgtagtctatgttgtcctgttccttggggcctctgaattttcggaagaaaactccttttctattctaaattaaaggcagcgtgtatgttgttagtctaggttttataaatattagggtgggattctcttccaaaacttcttttgtgtgtagtttactgagtttc

SEQ ID NO: 736271 - DNA, 607 bp, Homo sapiens
ggcgaccatttagaatagaattgttcagaagtttgctaacaataagcagccaacatagacacattctccattaaatctaaaattcccttttcccccactagggtgcctgaggggcatgtagcaaaagtgatcccaaccacaccacgcaaactagccaggaaacctttttgccttcacacatctgagagtccctgagaagccggagacaacacagaggcagcaaaacaccaacaggagagtcccagcatcagttcctggccacagaaaccctcctgagcagcaggcagaacagaatccactacagcaatcagcctgccagagaagcctctgcccctgtggtgtgaggatccacttcccccaggtgacaccacaggcaggtgggctgaagaagtgggaaggtcaaatcgactggcccagccaggatgcctctttgatgatacaggtggtaccggtctaagcctcccctcttccrcaggggaaactaggtggcccaaagggtgcccagaggcaggggacctgccacagcagccaccctcctgggaggttccctttcttccccttcgtgaactccctctaacacacagcttgccagggaagcaccctttgt

SEQ ID NO: 736272 - DNA, 646 bp, Homo sapiens
gcacattttatatacagaattatatattacttagaattcttgtgcttagtaactttaaattttagtgaaaatctaggaagaaaaaacctgaactatcagatattagcgttttatagatgaaaacattccactatttgaaaaacaacctgtttccccatatcataatcctttcttacttagaatgacacagacatctaatgagcatccaaaataatttcaatattttaaattacataaagagtttacctataacatttatcctctttacatttcattcattttagcagtttatctaggttacttatgagarctgagatattagacaaagctagttatcatttccttgttaaccatttttataacctgtgagtatcaggtgttcatctcagtaagaagtttaaatacatggatattttcccaataacccagattcaactgtttttgaaaattacactaacaatattaaattagccttatttattaaaaaaaatcacacaaagatcattctgtccatgactgggtttatagtcttataaccttttgtgccaaaccatagtttaaataccaagcagagagaaatataaaacccatacaaaaaggtatgctgataattctgaagacatttctattttgattttaccagtaa

SEQ ID NO: 736273 - DNA, 625 bp, Homo sapiens
cttcatcatgcatgtgggtatctcagaatataaatgatttaatataacctgactgcaaagagtaggcagtaaaaatatttctggaattttggattcaatgcagccattcagtcaaagctgcagttcaatgcctccctcatcttttgattgttttgtgatctgatttgagaaatcagaatgttttctcttggcatagtatatgaagagttcaattaaaacccgcaaatgtttttgtcactttgtgtgtgtatgtgtgtgtctgtgggcataaatgtatatatatatacttacatatatttataattatatatacagttatcataatatatatagctatagctatttataaccatacattatctataactgtacatttaaatttacaactatagctctctctctmtatatataactgtatagtgttttataaatttaaaacatttcatgtgctttaaaaaagatttaaaagctaaacttataatttggaaaggccattattaagtgccagatgcctggtgattgaacccaggattttaatttttcccgattcagatgaggttctctgttcaagctcttgcagtttgcctctctgtcactctcaatattacatgtatatgtaaatata

SEQ ID NO: 736274 - DNA, 640 bp, Homo sapiens
aatcaactttattgagatacaattcacataccatacaattcgctcattgaaaatatacaattcagtggctttattatatttacaatgttgtacatccatcattgcaatcaataactgaacattttcattgccccagaaagaattctagcattccttatgcattattgcctaagtccctatcaccccatccctaagcaactgatacggtttggctctgtgtccccacctaaatctcaccttgaattgtaataatccccacatgtcaggggtgggaccaggtggaagtaatttgaatcatggaggcggtttctcttatgctgttctcataataatgagtgagtctcacgagatctgatggttttataygtgtctggcatttcccctgctttcactcattctctctcccgccaccctgtgaagaggtccctttccccacgcttgttaagttttctgacgcatccacagccatgcagaactgtgagtcaattaaacctcttttctttataaattacccagtctcgatgtattagtccattctcacgctgctatgaagaaatgcctgagaaggggtaatttataaagaaaagaggtttgtttcacagttctatgaatggggaggcctcaggaaacttataatcat

SEQ ID NO: 736275 - DNA, 577 bp, Homo sapiens
tcacattttaggaagacagccataggctgagaagcctgactgcagaatagcaatctgctctatggttcttaacttgttttttctacttataactagagagttttaccttatagctttagctatgatttctactgcatcatgcttttgctgacagtcttccttctctccttttttaatgcctctgattacacatcacttctatttattatcttcattttccttggttacaagtttcccaagagagatatcttatcatgtcaaatggagctcctgggccaggtrtcttgcaaatgactgctgttaggtgaagggctgattccaggtctaatcagtcatggagtccacagtggaatcatatggaacatctcagaaagaggatctaggtagagcaaaaacttagacttctcagaaaatttcagtgtatacagcaagtccactgaagggcttttccagtacaaacatgatgttttagatacgatagggtcccatctgttttatttgcatcgataagattattctactgtattccattcatattgaatccagggaaagaaatctaagaattgggaaagagcaa

SEQ ID NO: 736276 - DNA, 566 bp, Homo sapiens
tgtctttatattgtcacatactataaattataggattcttaacatgttattaacaccagaagtctaaagaactttgggattaactaaacaggcattttaacttttggctctaccactctctaaatgtaagatattgggtaaattatttacttttttgttaaaatcatttgtaaaataagattaataatagtgcccaacagtgttactatgagaattaggtgaggtaatttaacataaactactaataacaatgcctagcaaatatatttttaaaaaactcaaataggatttatttttactgttcatattaatattactgggaggattctgggacaatagtggaatcyggatctcctgaatctctatttaaaagaagacaaagctactaatggaaaatccaaaacacacagacaacatttacaaatatactaagccgtgaactacaagtgatagaaaaaccgcaagacaatctgcataacatcaaacagtgctaaagaaagcagaggaaaacaacgtggtgtcagagggacttgagaaggggagaaaccagaaataggcagtatttt

SEQ ID NO: 736277 - DNA, 546 bp, Homo sapiens
ttagtattttttttcaatttactgtctcagtgtaaactaaggcagagtttggttaatcaagttattgaattctaactggtttcagtaaatattaaaagtttcttaattttaagaacttatttaatttaaataatttctaggagatgtattttacatctttataatactcttcataattacattaccttaaatcttatttttaaaatataagctgaaagaggatcttatttaaaatcaattattctcacaagtaattggctggagttgtttggggtatcttcactgaaatttacaattttgatttcctataayattttcaagatatcaatatcattgttgttcattctttgattattctttgtgaatactttagggaaagtctatcatgtgctgggcacttggcttgatttcaggtgtacaaagatgaagagcatttttccctgttttaatggagctctgagctctgtggagtgaagggaacaacttgtaaatactatttactataacaaatataatggatgtgaacagggatagggatgtagaaga

SEQ ID NO: 736278 - DNA, 617 bp, Homo sapiens
tcttaattttgagttccaatttaattgcattgtagtctgagagactgttatgatttcagttcttttgcacttgctgaggagtggtttacttccaattatgtgatcaattttagagtaagtgacatgtggcacctagaagaatgtatattctgttgtttagggatgcagagttctgtaggtatctatcaggtccacttgattcagagctgagttcaagtcctgaatatctttgttaattttctatctcratgatttgtctaatattgacagtggggtgctaaagtcttccactattattgcataggaatctaagtccctttgaaggtctctaagcaattgttttataaatctaggtgctcctgtattgagtgcatatatacttaggatagttactcttcttgttgaattgaaccctttgccattatgtcatgcccttcatcttttttgatctttgttggcttaaagtctgttttgtcagaaactaggattacaacccctgcttttttctgctttccatttgcttgctaaattttcctccatccctttattttgagcctatgtgtgcctttgcacatgagatgagtctcttgaatacagcacactgatgggtcttgacc

SEQ ID NO: 736279 - DNA, 617 bp, Homo sapiens
tcttaattttgagttccaatttaattgcattgtagtctgagagactgttatgatttcagttcttttgcacttgctgaggagtggtttacttccaattatgtgatcaattttagagtaagtgacatgtggcacctagaagaatgtatattctgttgtttagggatgcagagttctgtaggtatctatcaggtccacttgattcagagctgagttcaagtcctgaatatctttgttaattttctatctcgatgatttgtctaatattgacagtggggtgctaaagtcttccactattattgcataggaatctaagtccctttgaaggtctctaagcaattgttttataaatctaggtgctcctgtattgagtgcatatatacttaggrtagttactcttcttgttgaattgaaccctttgccattatgtcatgcccttcatcttttttgatctttgttggcttaaagtctgttttgtcagaaactaggattacaacccctgcttttttctgctttccatttgcttgctaaattttcctccatccctttattttgagcctatgtgtgcctttgcacatgagatgagtctcttgaatacagcacactgatgggtcttgacc

SEQ ID NO: 736280 - DNA, 575 bp, Homo sapiens
gtccacagagagaagtactgaatatcataaaaagtattccaatcttctgtattaagtcaaagtaatttctactctcagttcgcgctaggtagaaggaagccagaagtcgttttaatcaattctactacataaataaggtaataaaagaggagtcatatttattggaaacctcaggctaagtgctttacataattattgcatataatcatcacaatgcagggtggtgtgacatcagcattctgatttcacagaggaaaataaatgtgctaaagagtaataaagttatgataaaggccatagcagactgcaggtaaattcgatccttcaaatcaagtatacagagggacattctcattgccaaaaaatttttattatagaactcaactctatgttacaggcacagcatgaacatagtcctckttacagttgatggccttggaggcacacctggtacaattatgctttaaaagacaatcaaaacatgaatacaatacctgagcacttcataaaacaagttagggaccttatgaaacttatgaataagagaataaaatagaaaaaaattaaaaaaatca

SEQ ID NO: 736281 - DNA, 657 bp, Homo sapiens
ctgctgaaagaactcatctgtttctttggactctgattctgtggtaagakcatgtacctggttagtgatagatgggatggcatctacaccaagctgcctctggcaacctgcatcagtagaaatacaatgagaatgcccataggtcattatattgataattaaataatccaataggggatgggaaggaaaataaataaaaatccagtaaaccagcaaatattttattcacaataaaggcttatatttctctgcaatataagctccctgagaataggaattttcatgtgttatgcttattgctgttcctgtcacacagtagaaactaaagaaatatttattgaaagaatgaacaatctagtatcatataaccactgatgtatatctgaaatacaaactctgcaaaccctttccttatgctggctctccttggagtggctctccttggagcatctctccttgaaatcagtagcagcagtgtccagatgttattaaaacgttattaaaacattaatccctacaggtggcctccagtggtcccccagtagctagagtacagaaggtctcccttctccacagaagcagcatgggtccatctaatcacagttttatgccccccaggagcattttccttgtactgtcttacgatgttttattttc

SEQ ID NO: 736282 - DNA, 605 bp, Homo sapiens
atttcctaggctgactaagaatccctaagcctagctgggaaggtgaccatgtccagctttaaacatggggcttgcaacttagttcacatctgaccaatcagagagctcactaaaacgctaattaggcaaaaacaggaggtaaagaaatagccaatcatctattgcctgagagcaccaaaggagggacaacgatcagatataaacccaggcattcaagccagcaacggcaacccctttgggtcccctccctttgtatgggagctctgttttcactctattaaatcttgcaactgcactcttctggtccatgtttgttacagcttgagctgagtttcacttgccatccaccactgctgttggccgctgttgcagacccgccactgacttccatccctccagatccaaaagggtgtctgctgtgcttctgatccagtgaggtgtccattgccactcccaatcgggcyaaaggcttgccattgttcctgcacggctaagtgcccgggttcatcctaatcaagcagaacactggtcactgggttccatggctctcttctgtgacccacagcttctaatagagctatagcactcaccacatggcccaagat

SEQ ID NO: 736283 - DNA, 666 bp, Homo sapiens
atttaaaataaatgatcaattccacaagcaatcaaagatcatagtgtccttaggaaaaggctgaaatattatggttaaagtcacccttgaccaccatattgaatccaaacccatcacttctatccaacataacccttgttactggtttataaatgtctttccatttttcatcttacatactcatatatctggcccctaaaatatcttttaaattagtttgtatttttttgagacaaagtcttgctctgtcgtccgggctggaatgcagtggtatgatcttggctcactgcaactgcctcccagattcaagcaatcctcctgcctcagcctcccgagtagctgggattactggtacctgccaccacrcatggttaatttttgtatttttagtagagacggggtttcaccatgctggtcaggctggtctcaaactcctgaactcaggtgatcctctcgcctcggcctcccaaagtgctgggattacaggcatgagccactgcacctggtctagtttgcatttttaaagtaacctaaacagtatcatattggacaatattctaaagattatttatttcccctcaggacatgtctagaagatttgtctatttcaccacatatggatccatctcagtcttttaactgtgagatgatgctctcagcatgaat

SEQ ID NO: 736284 - DNA, 666 bp, Homo sapiens
atttaaaataaatgatcaattccacaagcaatcaaagatcatagtgtccttaggaaaaggctgaaatattatggttaaagtcacccttgaccaccatattgaatccaaacccatcacttctatccaacataacccttgttactggtttataaatgtctttccatttttcatcttacatactcatatatctggcccctaaaatatcttttaaattagtttgtatttttttgagacaaagtcttgctctgtcgtccgggctggaatgcagtggtatgatcttggctcactgcaactgcctcccagattcaagcaatcctcctgcctcagcctcccgagtagctgggattactggtacctgccaccacacmtggttaatttttgtatttttagtagagacggggtttcaccatgctggtcaggctggtctcaaactcctgaactcaggtgatcctctcgcctcggcctcccaaagtgctgggattacaggcatgagccactgcacctggtctagtttgcatttttaaagtaacctaaacagtatcatattggacaatattctaaagattatttatttcccctcaggacatgtctagaagatttgtctatttcaccacatatggatccatctcagtcttttaactgtgagatgatgctctcagcatgaat

SEQ ID NO: 736285 - DNA, 503 bp, Homo sapiens
tcatatatctggcccctaaaatatcttttaaattagtttgtatttttttgagacaaagtcttgctctgtcgtccgggctggaatgcagtggtatgatcttggctcactgcaactgcctcccagattcaagcaatcctcctgcctcagcctcccgagtagctgggattactggtacctgccaccacacatggttaatttttgtatttttagtagagacggggtttcaccatgctggtcaggctggtctcaaacycctgaactcaggtgatcctctcgcctcggcctcccaaagtgctgggattacaggcatgagccactgcacctggtctagtttgcatttttaaagtaacctaaacagtatcatattggacaatattctaaagattatttatttcccctcaggacatgtctagaagatttgtctatttcaccacatatggatccatctcagtcttttaactgtgagatgatgctctcagcatgaatattctgtagttcatttg

SEQ ID NO: 736286 - DNA, 643 bp, Homo sapiens
cattaatcagtggatactttgggaagacactttgagattatgcaaatatcctgtttcctatcagatttttgtccatgacttttagtaaccatcgatggttcttccttgtaacaataaatctggtggtgtttgtcaaatcaaaaatcaacttttcctaatttttatgtcctacttaaggccaaaacctaccaggtgaaagacgacaatctccctgtcacagtgaccttccccacattttgggattggccatctagtttaagcatagcaaatccatggtacccaactcattgtccccacccctcacctactgcaggaaccaaggctgtctttctcactgccctgcaggagacctcgacattctcaatgctattaggaaagaagccacagcagrtcaatgagaactatcatgagaaatgaaacatatctcccctccttggtctatgttgggtgtttagtttttcttaaaaacactacatccctggagcatactggctttgccaagtcccttgagaacccttaaagggtggcagatttagggtccactaggggaagagaattgcacaggcatctcccttgggtctctggatttttcttgtttggggccattgttttgagtccctggcaggggtgtgctggtagatgt

SEQ ID NO: 736287 - DNA, 593 bp, Homo sapiens
atatttgcaaataacacaagaatcgcatgtgcttatatactttattgatttgcctcagctgttcaaaatgtcccaataaatctagttgccaccaagggaccagctataaaaataaaactgagcttaaattaaaggtgaagctattaacatttgtcctgcagcctgtaaggcattaatgaattcctttctggcattagtgaacttgaaccttaactgaaayggggctgcagaatacattgggctttcccttgctctgttgttcaatgaaagcttttcctggggatggcttgatctaaattgttccatcacagcttctagatgaaggcagagcaagagaggagataaagacaacacttcagtggagactgggaatattgtacaaaatgcaaaatgttttggcaagaagtgcctgcacaagagatgtttaccgacacggactggccaacggttcctgtgtgttgtaggatgtttagagcatccctgccctctacccactagatgccagtagcaccccctcccagttgtggcaaacaaaaatgtctccagacttttccaaatgtccctgtaaggttgcagagtgggggcaaagtcac

SEQ ID NO: 736288 - DNA, 526 bp, Homo sapiens
catatttactttgttcaacaccattgaccaagaggcaactccataaagatatcacaatccctcttgactttctcttcatatgccaaataagctactgattccaactgctcaatccaaccccttcactccaattcctctgccgcaggttcagaaaaggctctcatcatttgtcacttgaaygtgaattgacctttttgacacaggtctcttttcccttatctcaagtaatcctccatgcagattgctaacttgcacctgaaaaatagaatctgaccatgtcactcccccgctaaacaatcttgtcctgattcaggtagtctgtggctcctctccagccatggggaactaggtgctcagctggtggttctgtcattcctctgtgcctttacataagttcctttgctttcctgggacgtcttttctgccctgctttgtgtggatatttcttagtcttgcagcttaaatgtcagttatctggacaacctcacaatccaatccttccccagaaggacccccatgccatgag

SEQ ID NO: 736289 - DNA, 560 bp, Homo sapiens
cctgcctcccaagagtgccttgacaatgaactgagtgacagccaagaacacaatgtagggtacacattgggccaggtgctcaacaagcacatattcagtcatttgtggattgaagtaaattgggagagagaaaggaagatacctccgtgaagctgcagtggttttcagaaacaggtttttctcggggcaagggaagaacactttctgtgggcacgatggctcacacctgtaataccaacactttgggaagccaaggtaggaggattgcttgagctcaggagtttgagaccaacctgggcaaagtagtgagaccccgtcaaacaattaaaaaattagtcaagagtgtggctcrcacctctggtccccactaatcaggaggctgaggcaggaggatagcttaaacccaagagggctggagttagctgtgaccatgccactgcactccaacctaggtgacggagcaatagtctgtctcaaaaaaaaaaaagaaaaaaaaaaaaaaaaagaaggatccaccagaaaccacgacagttaatgttaagtaataaagtcgcccatga

SEQ ID NO: 736290 - DNA, 558 bp, Homo sapiens
ttttccccaggctgttctcatgctagtgagtgacttctcatgagatctgatggttttataaaggggctcttcccccttctctctctccctctctcctgccaccgtgtaaaacctccctgcttccccttccaccatgattgtaagtttcctaagctctccccagccatgagaaactgtgagtcaattaaatctctttcctttataaattactcaatcttgggcagttctttatagcmgtgtgaaaacagactaatacacatatgtactgagtcaagtgaaactttcatggcaacagcagcagcagcaacagcaatggcagcagtgacatcatcatcattatctaggagcactccctacccatagcaaaggtctgctccattggacacagcagggagaatgcagtagctatcttaacaaatcaaggaacctcatattccctcttaattctcatttctgcagcagctaatcatgggatggaagaaagatttggagaatgaagcatgctcttttatgctccagctgtcatattttagtttgcctgaaaaaattctgtcaccc

SEQ ID NO: 736291 - DNA, 511 bp, Homo sapiens
gcaatggcagcagtgacatcatcatcattatctaggagcactccctacccatagcaaaggtctgctccattggacacagcagggagaatgcagtagctatcttaacaaatcaaggaacctcatattccctcttaattctcatttctgcagcagctaatcatgggatggaagaaagatttggagaatgaagcatgctcttttatgctccagctgtcatattttagtttgcytgaaaaaattctgtcacccagagctagtaaggtatttgggaattttatattttaaaaaatctttacaggaaagattggcatgaaacaaaactttattcacattattttttaaattgaactttgtaaagcttgtcattaatttgttccttcaattagtttgttctttccattaatttactgccatagcttgaattgagtgcctgctacacaccacggatggaaggatgaatggaaagataaaaggaagtggtcccttcccacatgggtctcactttactgtg

SEQ ID NO: 736292 - DNA, 511 bp, Homo sapiens
gcaatggcagcagtgacatcatcatcattatctaggagcactccctacccatagcaaaggtctgctccattggacacagcagggagaatgcagtagctatcttaacaaatcaaggaacctcatattccctcttaattctcatttctgcagcagctaatcatgggatggaagaaagatttggagaatgaagcatgctcttttatgctccagctgtcatattttagtttgcctgaaaaaattctgtcacccagagmtagtaaggtatttgggaattttatattttaaaaaatctttacaggaaagattggcatgaaacaaaactttattcacattattttttaaattgaactttgtaaagcttgtcattaatttgttccttcaattagtttgttctttccattaatttactgccatagcttgaattgagtgcctgctacacaccacggatggaaggatgaatggaaagataaaaggaagtggtcccttcccacatgggtctcactttactgtg

SEQ ID NO: 736293 - DNA, 602 bp, Homo sapiens
acgatcagagatttctggtggctgcttggggggtttcatcatccaccttccatctgtcaagatggatagaccctgccttcaattggaccaacttctacctccttcagtgacttttgatcttttctctgccttttataaaatcttcaatgctatgtattccccctcccttatattttctgcattcctttgcaatttcatcaaatttatataatggttttcattttgatgctattttttttccaggattacatctcttcccttgtgaatagagatattaaaacccactttcttgacctcctgccccttgcttcttttaaatagccatttcttcttgttccaaagagcagcaattagactgctcaggaagtttggtatttaaaagtagaaaactgtcaaattcaattcatttcactctgaaagctcccagtattgggaggttgcatagcagagtgttttgagattagagatacttgagtttgaatcccaattctgctcatttgagctgggtgaycttgggcaaattgcttttcctctctgagtttctgtttctttgtttataaaatgtggcaaataatagtaacctcaaagttactggtttgagg

SEQ ID NO: 736294 - DNA, 535 bp, Homo sapiens
tgcccacctcagcctcccaaagtgctgggattacaggcatgaaccactgcaccaggcctttttgttttactttttctattactgatatagccactttggctttcttttttaaaaaccagtaacatggtcatttattattactattatcaagtattatgtactgtacataattgtwtgtgctatacttttatatgtctggcaatgcagtgggtttgtttaaaccagcatcactacaaacacataaataatgtgttgtgctatcatgttacaatggctacgatgtcactaagtgatagggatttttcagctccattataatctttatttttacttcagctttcctatggttgctgtttgcgttatatatatgtatatatatattttttatcctttcttttgctttcaatctatttatatctttgaatctaaagtgtgcctcctgaagacagaatataggttggatcttgttctttgcattttttaaaatccaatctgataatcactgccttttgataggactgttgaatccatttgc

SEQ ID NO: 736295 - DNA, 651 bp, Homo sapiens
gtcacagatcaacaggatcccaaggcagaagaatttttcttggtacagaacaaaatgaaaagtctcccatgtctacttctttctacacagacacggcaaccatccgatttctcaatcttttccccacctttccccccattctattccacaaagccgccattgtcatcctggcccgttctcaatgagctgttgggtacacctcccagacggggtggtggccgggcagaggggctcctcacttcccagtaggggcggccgggcagaggcgcccctcacctcccggayggggcggctggccgggcggggggctgacccccccacctccctcccggacggggcggctggccgggcggggggccgacccccccacctccttcccggacggggcggctggccgggcagggggctgaccccccccacctccctcccggacggggtagctgccgggcggagacgctcctcacttcccagacggggcggctgccgggcggagaggctcctcacttctcagacggggtggctgccgggcggagaggctcctcacttctcatacggggcagccgccgggcggagggtctcctcacttctcagacggggcggccgggcagagacgctcctcacctcccagacggggtggcggccgggcagagg

SEQ ID NO: 736296 - DNA, 504 bp, Homo sapiens
tagactgggtatattgtattaaacactaactcagttactattgtacaaaattagaagttacagttatcactattgatgtttcaagtccaaactatttgcataagaatgactatcaggccaggcacagtggctcacatstccaatcccagcactttgggaggctgaggcaagtggatcacctgaggtcaggagttcgagaccagtctaggaagaaggtgaaacctcatctctactaaaattacaaaatttaggtgggcgtagtggcatgtgcgtgtaatcccagctactcaggaggctgaggtagaagaatcgcttgaacccaggagactggaggttgcagtgaactgagatcacgccattgcactccagcctgggcaacagagcgagattccatcttaaaaaaaaaaaacaaaaaaccatcaaaagtataaaattagagtctcacttgtgactttcagtaaattctacccttgatcttagccaaaaggcggagaagcaatgact

SEQ ID NO: 736297 - DNA, 645 bp, Homo sapiens
aaaagttatctatgtaatgaaaggaagacgcacgtccttgagtcaaccagtgtggtcacagcatgattgatgtccaagagctagaggaacatgggccaaaactcatccaaaataggctgaaagtcagagactgaggagagacaggaagcattaagagactgctaagtgataaagagctgcataaatcagcttgctgcatgtcagagaacagcttgactttgacctgacatttgtttgtaggtcaattccttgctcacatctgtgtaggcctggagggtccctttcacttggccaagggttaatccaaggatcctagacaaaactgaaaaataagcaattytgtttcactactttgtaccttggaaaacactactcctttaatcctcaggtacttagtgacccctgactccaacaaaatatgctgtcagcatcttcatacaaattgtctaacacaaaataggtgctcagtatacattttcttttcctccttctttcccatagtcaaattgttgatgacaatgtgctcttatttttgccagagtattttgattttcacagataccaaatccttgaatcaaaagaataagagaagatagtataattttgggcataaactcttgttagtgtctacttcattgatgtatg

SEQ ID NO: 736298 - DNA, 455 bp, Homo sapiens
gaaaggtggagtcggagacagacgggacaagcagcatattcagggatcaggctggcctcccggaaagcgtgggcatcggaggaccccgccggggctgcccaggctgagggtcgcggggctggagggcagctgcggcgccgggcgctggcagctggaagggccagcgctgacgtatgtctgccccgcggcccggcgccctattcctgctgtcctgcgcggtgggcgcggacggcggggcccctgcgggcgggcgcgttgacggaggtacccggtcctacccgaccctccgtggagctccgcccggagagggcgccyctcgggtgggcgggggctgctactgcagcgtgtgcgggagtccgggcctctcgggacgctccccgctgagcgcagcttcccaggctggagcgctgcccagcaggccctgcgagaaggcggaagggggtgcctgggaccgt

SEQ ID NO: 736299 - DNA, 500 bp, Homo sapiens
gatgcaagcctgtggtgccagctactcaggaggctgaggcaggaggatcacttgggcccaggtaatcaaggctgcaagtgagctgtgccactctagcctgggttacaaagcaaaaccctatccccctaaaaaaaaaaaaaaatagaaaatggtaaaagaaggaaccatggggaatcatactttagaatgagctgcatatacagaagtccggaggtgggagcaacaaaagaagtgatctagaggggtgcaggaggagatgaggtggragaagttgcgaatggaggctggaagacgtatcacataatgccttataggccattgtaaaggtttggcttctactctatgtgagatgtggaggtactggggacttttaaccacagaagcaaaatgatctgtcctgtgttttaataagatgcctgtggccactgtattaggaacagactgaaggggtaaggcaggaagttgggagaacagttaaaaggttcttgcagtgatctggc

SEQ ID NO: 736300 - DNA, 484 bp, Homo sapiens
caagggagtccaggaaattaaaggaaacacatgggtatttgatgagcattgtatgtgtctaccacaggctgaaagcttggctgcaaagggctggttctgccacttcctcactgtgtaatttattcaatctctctgactcagattcttcaactgtaaaatagagatagaataatatctaacttatgaggttgctataaggattatgtgaraatatccaagtaaaacttttagaatagtgtctgtcagagagaaaattttatgactgttagctattgtgttaccgtcattacagtattacctaactcattatatacaccaaggattgactaatctttactgcctctgtgacttgaagtttaaatgcaactctaacaggaacatgttacatttgaatggtattttacagtttgaatgccgacaataaacctgtgatgatgcaggatgaacataattttcattttattatttaggaaacagttcagag

SEQ ID NO: 736301 - DNA, 484 bp, Homo sapiens
caagggagtccaggaaattaaaggaaacacatgggtatttgatgagcattgtatgtgtctaccacaggctgaaagcttggctgcaaagggctggttctgccacttcctcactgtgtaatttattcaatctctctgactcagattcttcaactgtaaaatagagatagaataatatctaacttatgaggttgctataaggattatgtgagaatatccaagtaaaacttttaraatagtgtctgtcagagagaaaattttatgactgttagctattgtgttaccgtcattacagtattacctaactcattatatacaccaaggattgactaatctttactgcctctgtgacttgaagtttaaatgcaactctaacaggaacatgttacatttgaatggtattttacagtttgaatgccgacaataaacctgtgatgatgcaggatgaacataattttcattttattatttaggaaacagttcagag

SEQ ID NO: 736302 - DNA, 534 bp, Homo sapiens
ggaaatccatgttataatagggattttgagtcttctgcattgtccagtggcagagttctggccaccgcagtccgtaccactgtgacaggagctgagcttgtggtggcagcaggagaaagcctcatagtgttactgtgcattagtactgctgtaaggctttagatttcttctgctgtactctcctggatttctctaccagctaccccgttccttaagaaattcctttttggcttagtcagagtgggttctaattggaactaacaactttaaccagtacatcttcttaatagcatggtcttctacagagacattcctaatgcaatttgaacctcggtttcctcacctgaacagtcaggttggtgaaataraagttgtctgacaagtcttccagaaataaaattgcatgactggttatggatcacaactattttcatataggctttagtaagagtccgtataatttccgcagcctcatcttcactactgatttaccaaaaattaaattttaagaactaaatattttacactaattat

SEQ ID NO: 736303 - DNA, 606 bp, Homo sapiens
agtcacttgttccacatttctaatttgttttaattaaaggaaaagtttaatcatatttctaacattttcaaaattgttggtgagtttttattattcaaagaaaatttatatataaagtcaagaccaaacattttctcaaaacacacacacatccyaacatgtactcattcagaaagaaaaaatcaacaatgtgtgatcactgctgagccaagaaatatatttttccataattttttaacactgtaccacagcaaggaattacctacttttaaccactgggtgtcccctgaactatatggttaacatgcaggcagatagcaccatatcacgtttaacaaatgtctaacctttcttattggcgctggtagtaagaaccctcattatcttttaaattcgccagtcattcagctttcaatttcactagtgaaataagtatattgtatcagattttactgagtctacttgctgtattaagaaagtacacaggaaaaaaagtgacaaaattatattcagagaagcaatttttatcttaagtactaagtgaaaccaaaaatgggatgttattataagattgttttagctctcagtttcctataaatagttttc

SEQ ID NO: 736304 - DNA, 564 bp, Homo sapiens
ccctcttctccatgtacaaatcaagaataatcacagtgcccacctcactgggtggttgtgaggatgaaacaatataagagcttagaacagagcctgacagtggcagtgcccagtatacagtaggtattactgcagtgagggggttgagactgtgtaagttgttggggcagaggggagcaggttgaaccagaagtagctacagaaacacgccatcccagcatctgtcctccagcttggagcttcttctgctgtgtgtctgtgtgcgtgtctgtgtctatgtctgtctgtgtgtatatgtattcattgtgtatgtttgtatgtgaatcttgtgtttatgtggatatstgcatgatatctgcatgatatccacgtgtgtgtatgtgtgcacatgtacgtgtctgggcgtgtatctgtgtgtctgtacgtgtttctatgtggcattttgtatatatgtgtctgtgtgtaatctgtgtaattgtgtttctttgtgtgtatctttgtaacagtgtgtaagtgtgatgtatatgtgtctctgggtacgtatgtatgcatctgtgtgtgtct

SEQ ID NO: 736305 - DNA, 596 bp, Homo sapiens
cgtcccgagttcagaattttttttttttttgagatgcatatcaaggcacctaaagttcgagaaaagatgttcttcctgtgttaaggaagctgcactggggttaatttaaaaagatgtcagaagtcgcagagaagcggttctcaagcttttatggaacactgtcctgtttgagaatctgctgatattatggaccttcttctttctacaaaaatgtgtaattgtgcataaaatttccaatagtttatagtcacctacttaagacctttgctttagagtagattattactccccgctgtaaggtagggaagaaaaatattccattcctttcctctggttgatatctttttttcttctccttgcacagtccaacagacacactcrgcctcccagaaagcagctggccccctggccaagaggccagtttgcagcatcgtgatcattccaccatctttgctgccatttgaatcttgaatcagctttgtgtacctgtaataaattccacttagccatggcatgtagttttttaaaaatacattgttgaatttgatttgctaatgttttgctgaagatttttgtatttatgttcttgaaagatg

SEQ ID NO: 736306 - DNA, 645 bp, Homo sapiens
attttagcaggggcctgaagttcttctagcacctggtgtccacctgaggcctgggtgtcagcctgggaccagatgtccagctggggcctgagtgtttctcggtgcctgaggacttcctgggcccggatgtccacgtgggacctagatgtgtacctggggtctaatgttcaccaggagccaaggtatctacctggggcctatgtccacccagagcctgatatccatttggagtcaagtgtccacctggggcccaggtgtccttcaggagcctggttttgacctggggcctcagtggacacttggggcctgatgtccacccggttcctaggtatcctcctgaggcctggtgtgctgctgaggcctggtttcggcctggtttctacctggggtatgggtatccacctggttactgttgcttacctaagacctgttgtccaccttggacctcttgatcctctggggccttgtgtccacctgtgcccgggtgtcagcttggtacctgatayccacttggggcctccacagccacctggggccttgtggtcccttgaagcctgaagccctgggtataggtatccacctgggtcctgggtgtccacttggggccacatgtccagctctggtctgagtgtccccatggggcct

SEQ ID NO: 736307 - DNA, 645 bp, Homo sapiens
attttagcaggggcctgaagttcttctagcacctggtgtccacctgaggcctgggtgtcagcctgggaccagatgtccagctggggcctgagtgtttctcggtgcctgaggacttcctgggcccggatgtccacgtgggacctagatgtgtacctggggtctaatgttcaccaggagccaaggtatctacctggggcctatgtccacccagagcctgatatccatttggagtcaagtgtccacctggggcccaggtgtccttcaggagcctggttttgacctggggcctcagtggacacttggggcctgatgtccacccggttcctaggtatcctcctgaggcctggtgtgctgctgaggcctggtttcggcctggtttctacctggggtatgggtatccacctggttactgttgcttacctaagacctgttgtccaccttggacctcttgatcctctggggccttgtgtccacctgtgcccgggtgtcagcttggtacctgatatcyacttggggcctccacagccacctggggccttgtggtcccttgaagcctgaagccctgggtataggtatccacctgggtcctgggtgtccacttggggccacatgtccagctctggtctgagtgtccccatggggcct

SEQ ID NO: 736308 - DNA, 543 bp, Homo sapiens
ctgaacaactcccttacttcctcctcccccccagtatcactcccaagtaagggattggttttagtcccagaactgaagtaccctgagctccattcgaagcagtactctacagagacccacattttctttatattttgaatttaacaagtttagtgagtagttatttttgctgaatttatggaccctttgttttagatttgcaagacaagaaaaacttttacagacttcttacttaatgttttattataatgcagacctgtacagtgttgtatgctgaagatactggaatgcctgtgtgctcttctaccggagagtgtctgatcagaactcttcagtatgaccaaagaaactcaagttagcattgtcctgcaggaagctgaggatctctctctctctaagtttttcttstgtataatttcttctgtgtgctttgagtagatatagtgtgatctttaaaaagatcaggcaaggctaggtgccgtggctcatgcctgtaatcccagaactttaggaggccaaggtgggcagatcatcaggtcagga

SEQ ID NO: 736309 - DNA, 618 bp, Homo sapiens
ttgtgaattttaccttgtgttgctagctattttagtattcctaaaaatgttcctgagctttgttttaaaaagcagttaaatcatttgaaaacagtttatttttttgtcttgctttgaagatgagttgtacaagaccatagctgtatgtggtgttgggctggttatccctcactatgaaggcaagcctctgagtactctactgaatgccctgtggagcttggggctttacaatctggctggtaggaaygggcgctattcctggccctcagaacctgaagctgttccctcagatgcccttgaatgtttttttcccctggccttggatagtgcatgtactgctcagtgctttgctacatactctgggggactcatcaggtagctccagagttctctgtgtagctgtatactctttagaatctgccctgcacactgcagacacctaagtatctacagacttctgtctcccaactcaaattttgcagacctctgccttgcttctctccctccctgccctacagcctggacactccaggcagcgaggcagtgcagctgtaggctcactttgtttgttttctgtctcacagggattattgtcatttgttgcctgatgaccactgg

SEQ ID NO: 736310 - DNA, 638 bp, Homo sapiens
attttagtattcctaaaaatgttcctgagctttgttttaaaaagcagttaaatcatttgaaaacagtttatttttttgtcttgctttgaagatgagttgtacaagaccatagctgtatgtggtgttgggctggttatccctcactatgaaggcaagcctctgagtactctactgaatgccctgtggagcttggggctttacaatctggctggtaggaacgggcgctattcctggccctcagaacctgaagctgttccctcagrtgcccttgaatgtttttttcccctggccttggatagtgcatgtactgctcagtgctttgctacatactctgggggactcatcaggtagctccagagttctctgtgtagctgtatactctttagaatctgccctgcacactgcagacacctaagtatctacagacttctgtctcccaactcaaattttgcagacctctgccttgcttctctccctccctgccctacagcctggacactccaggcagcgaggcagtgcagctgtaggctcactttgtttgttttctgtctcacagggattattgtcatttgttgcctgatgaccactggcctgaaaactgttgtctcgtgtatttttttttctggctttttggttgt

SEQ ID NO: 736311 - DNA, 638 bp, Homo sapiens
attttagtattcctaaaaatgttcctgagctttgttttaaaaagcagttaaatcatttgaaaacagtttatttttttgtcttgctttgaagatgagttgtacaagaccatagctgtatgtggtgttgggctggttatccctcactatgaaggcaagcctctgagtactctactgaatgccctgtggagcttggggctttacaatctggctggtaggaacgggcgctattcctggccctcagaacctgaagctgttccctcagatgcccttgaatgtttttttcccctggccttggatagtgcatgtactgctcagtgctttgctacatactctgggggactcrtcaggtagctccagagttctctgtgtagctgtatactctttagaatctgccctgcacactgcagacacctaagtatctacagacttctgtctcccaactcaaattttgcagacctctgccttgcttctctccctccctgccctacagcctggacactccaggcagcgaggcagtgcagctgtaggctcactttgtttgttttctgtctcacagggattattgtcatttgttgcctgatgaccactggcctgaaaactgttgtctcgtgtatttttttttctggctttttggttgt

SEQ ID NO: 736312 - DNA, 638 bp, Homo sapiens
attttagtattcctaaaaatgttcctgagctttgttttaaaaagcagttaaatcatttgaaaacagtttatttttttgtcttgctttgaagatgagttgtacaagaccatagctgtatgtggtgttgggctggttatccctcactatgaaggcaagcctctgagtactctactgaatgccctgtggagcttggggctttacaatctggctggtaggaacgggcgctattcctggccctcagaacctgaagctgttccctcagatgcccttgaatgtttttttcccctggccttggatagtgcatgtactgctcagtgctttgctacatactctgggggactcatcaggtagctccagagttctctgtgtagctgtatactctttagaatctgcsctgcacactgcagacacctaagtatctacagacttctgtctcccaactcaaattttgcagacctctgccttgcttctctccctccctgccctacagcctggacactccaggcagcgaggcagtgcagctgtaggctcactttgtttgttttctgtctcacagggattattgtcatttgttgcctgatgaccactggcctgaaaactgttgtctcgtgtatttttttttctggctttttggttgt

SEQ ID NO: 736313 - DNA, 637 bp, Homo sapiens
cacttgggaaattttcaaaatccatgttaaatacagtaattacagcatacgattagaacaaataattgttatctcataatctactatatttcatctatgttaacttaaatctaatagtagaaaccacaattggagttatttttcagtagctgaacaataaataaaatttttccctgataggaaaatatcaaaataacatttattgccaatggaaagttctctctgttaaacatttaagaaaacactgtatctatgatttctttaagaattgtatttttagccctttcattgcaattctaaatgaaatttgatgttgctgacttatataatagattgtgaccataaatattagcataaagtaaatatgcttcttatttatggaattacataagaaaggcattcattggaagggtgagcattttctaactcataagcttccatttttgacttttaccactctctygtctttaggaagaaataaagtcaaaagggatgttcctgaggccttacctgtatataaatgatgtgctcggggcaactctgtgcttgatttactaccatattcttctgcaggcacctttcattgttttctttaaataaccccctggaggttactctggatgaaaatccatctgca

SEQ ID NO: 736314 - DNA, 554 bp, Homo sapiens
ataaaactctcaacccagtgtctaacaaatggtaagtacttagtagattttttttgtttttacgattagtatcattatacactactgaggggggcacacttcttgagaaatttaataaggcatagcaatttattatcccactttcatcttyttttttttttttgacacagagtctcgctctgttgcccaggctggagtgcagtggtgcaatcttggctcattgcaacctccacctcccgggttccagcaattctcctacctcagcctcctgttagctgggattacaggcacctgctacaatgcttggctaatttttgtatttttagtacagatggggtttcaccacattggccaggctggtctcaaactcctcacctccagtgatctgcccacctggcccccactttcatctctaacataaaaagtatatcctgagcaaatttatattcacatttctgaaaattgctgtctaatggttaggaggatgacacgttgctgcattttgctgacacacacgagaagcacaccacaaaagccaagaaaatattatcctt

SEQ ID NO: 736315 - DNA, 630 bp, Homo sapiens
atctgctactctactctgtctggaaaacttgcatgttccagttagagggcagttatttttcaggggtgaaaaataaatcatatttaaactagcccaagtcaaagaatagttaattgcaaggatatgaagaactttctgagaacccaaagacaggaattatagcccttgggtacttaaagtggagactgggaagataagaacctaattaactctctgcaacttttagggaattcatgacttgttggctttgcttctctgtgtgtacctgctctattgtcttctctgtaggctgacttcctccttaattactcatcatttccattgccctgtaacttcaacttgcaagtgcctttagttttccatggcttgtctccagttaggattctatagacttaattttaactcagtaaagaaagggtcttcttcagtttgatacactgtatgaccacaccagatgatttttctttttwtaaaatttcctgccaagaacacgaacttttgttctttaggtagttattattcttttctgaagccaagacctctccttttcagccattttgcaatttaacttttagtgcatcttgagtgacatgaactcctattttgtttgaagtaattttgttggtacca

SEQ ID NO: 736316 - DNA, 617 bp, Homo sapiens
tttgttgcttaataaaccaggttgtttgtcctgtatgatttctcttgttgttgtagttgttgttttgttttgtgttttttttttgagacagagtttcactcttgttgcccaggctggagtgcaatggcgcgatctcagctcaccacaacttctgcctcctaggttcaagcgattcccttgcctcagcctccagagtagctgggattacargcatgtgccaccatgcccagctaattttgtatttttagtagagatggggtttctccatgttggtcaggctggtcttaaactcccaacctcagttgatccgcccacctcagcctcccaaactgttgggattacaggcgtgagccactgcacccagcccctgtacgatttcttatagtctgtgagttgtcttcctgtggaaccatttaacatgtttttctgaccgctatacttttacaacatggtagtaggatctagtgcctaagtcggactggggttagatttggcatttgtgcatgtgcatgtcaatgttatgtcataggaactgcagtgtgctaccatctcaaggcacaaacatctatcttttttcactgttaatagtcattgatgatggttgtttagatctatga

SEQ ID NO: 736317 - DNA, 556 bp, Homo sapiens
acattttaatgatcactattctcactggtgtgagatgttatctcattgtggttttgatttgcatttctctaatgaccagtaatgatgagctttttttcatatgtttgttggctgcataaatgtcttcttttgagaagtgtctgttcatatccttcacccattttttgaagaaaacaaactcttaagagagaagtattcattcttttgagtgtgagggatggagaaagagaaagatggagagagtattataagcagctgtatcccctttgccatggtgatagcagaccattcacatgggagcttctggtctctttgtaataataataagagccacattaccagtacttagagtatgctagttattttaacacattgtatcattaaatcttcaaaacatccctatgagttagaamcctaaaaaaaaaaaaaaaaaaaaaacctctgaggaaataaagtgacaggttatgtcaaagctcaaagtcacataactagtaggtagtccactagagtttgaatctgtgggacttagttttacccttctttctccagtcttggt

SEQ ID NO: 736318 - DNA, 529 bp, Homo sapiens
tcacatttttcttttctttttttgtatgtctagcaattttttattgtatccttgacattgtgagcaatacactaaggatattctctattctgttattaggttggtgcaaacataattgcagttttgccattactttaaattacttttgcatcaatttaayatgttcattcaaagaatattgatgtttttaaagcaagcagaaccaaagtcttaaatataatttcagtgcttagccttaattgggttgcttggagtctgccccacacatgatgattcaagagtcagccagaaatgtgagtggtttataagcagatttggggactcttcctctctgactctgttctttctggaatttctcccctcactttcttttttttttttttctggagactgagtctcaccctgtcccccaggctgccaggctgaagtgcagtggtaggatctcggctcaccgcaacctctgcctcccagatgcaagcgattctcccacctcaggctcccaagtagctgggactacagttgtgcacca

SEQ ID NO: 736319 - DNA, 618 bp, Homo sapiens
gtagctatacttaaggacataaagaaaaacatattcctaatgaatgaaaagataagaaagctcaataaagaactaaaaactatttttttcttaaaagaaccaaataaaaattctagaattaaaaattacagtatctaaaataaaaaatttactgattggccttaacagtaaaatagaaataacagaaaagttagtaagctttaaaatcattcaatagaagttattcaatgtgcagaacagagagaagagacattgaaaaacaatgggcaggtcctctgggaacagtggacaatatcaataggtctaatacgtatgtaactggagtctgagaaggagaagagaaaaaaattggtcagaaaaaatatttgaaaaaaagtaaaaggtgaaaattattcaaatttagagaaaggcataaagttacaaatttaggaaggagagcaatccccaagcaraagaggattaaacacacacctacacatgcccacacacacacaggaacatcagagtcaaactgctaaaaaccagagaacacaaaggatcttattgtagactcattctacaccaaataaaatactacatccagagtttcatgaactgtttttattcaggaaattttca

SEQ ID NO: 736320 - DNA, 618 bp, Homo sapiens
gtagctatacttaaggacataaagaaaaacatattcctaatgaatgaaaagataagaaagctcaataaagaactaaaaactatttttttcttaaaagaaccaaataaaaattctagaattaaaaattacagtatctaaaataaaaaatttactgattggccttaacagtaaaatagaaataacagaaaagttagtaagctttaaaatcattcaatagaagttattcaatgtgcagaacagagagaagagacattgaaaaacaatgggcaggtcctctgggaacagtggacaatatcaataggtctaatacgtatgtaactggagtctgagaaggagaagagaaaaaaattggtcagaaaaaatatttgaaaaaaagtaaaaggtgaaaattattcaaatttagagaaaggcataaagttacaaatttaggaaggagagcaatccccaagcagaaraggattaaacacacacctacacatgcccacacacacacaggaacatcagagtcaaactgctaaaaaccagagaacacaaaggatcttattgtagactcattctacaccaaataaaatactacatccagagtttcatgaactgtttttattcaggaaattttca

SEQ ID NO: 736321 - DNA, 608 bp, Homo sapiens
actgatagcagactacttcattattattattatttattttttaagtcgggttcttgctgtgttgcccaggttagaatgcagtggcatgaccagggctcactgcagccttgaaatcccgagctcaagcaatcttcccacctcagcgtcctgagtagctgggaaggcaggcccataccaccatacctggctaagttttttgttgttgttattgttgctgttgttgtttgcagagacagtgatctcaaactcctggcctcaagcaatcctctggcctcagcctccctagttgctgggattacaggcrtgagccactgtgccaggctccagatgattttgcatttcaaggaatgttagggcaattatagaagattgttcactgaacatgcaatcaaggcaaaagactaccttgaaggataacttaatgcatcatccctgcccccacaatattcttgctgaatagactatacacacacaaaaatgctggtatctacgatatttaaaatctcccctttggaaagagcaggaattaagatcattaaattctcataaccctgttcccctctgtatatatcatatgaatatcattggacacattccacaaatatgaa

SEQ ID NO: 736322 - DNA, 608 bp, Homo sapiens
actgatagcagactacttcattattattattatttattttttaagtcgggttcttgctgtgttgcccaggttagaatgcagtggcatgaccagggctcactgcagccttgaaatcccgagctcaagcaatcttcccacctcagcgtcctgagtagctgggaaggcaggcccataccaccatacctggctaagttttttgttgttgttattgttgctgttgttgtttgcagagacagtgatctcaaactcctggcctcaagcaatcctctggcctcagcctccctagttgctgggattacaggcgtgagccactgtgccaggctccagatgattttgcatttcaaggaatgttagggcaattatagaagattgttyactgaacatgcaatcaaggcaaaagactaccttgaaggataacttaatgcatcatccctgcccccacaatattcttgctgaatagactatacacacacaaaaatgctggtatctacgatatttaaaatctcccctttggaaagagcaggaattaagatcattaaattctcataaccctgttcccctctgtatatatcatatgaatatcattggacacattccacaaatatgaa

SEQ ID NO: 736323 - DNA, 620 bp, Homo sapiens
catgtaggtattcttggaagacatggtcttccaagtcgtattccttccaagtccctgaccatccattcagaccattggccacagcccctgaattgttgtgtaatcacatgtctggccatttctccttccaaggaaagtttacaatcaaatgtactgcttgaagttctgtccacagggaggatttctcttcaccactttgcttcaaagatatcccagagagggacagtgtactgcagctgtgcacttccagttaatacctgtatatcatgtagaaccatcgtaaacctctgtcagaatgatcatagggaactctccatggggccataggtgcagactgggagagagaaggcagtgtagctggattagggactatggcatgtgggctacctcttcctgtaacttacttgtgcctttagggcctgcttgggttcatctcatatatactatttccatttgatgayggagtgctgctgatcatgcccaactttatagcttgatgggtcagataacacactgttcatgatggccagcttaggtcacatggtaacttggtggcccatggttaagcattcagtcactactaagacccagtagcagggtaagcgctgtttctcaaaagt

SEQ ID NO: 736324 - DNA, 528 bp, Homo sapiens
gagacaggaaacagtttttatttgagggaaaatgatatgaattattttgcttttaaagaacattataaaaaattgagatgaaactttctctaagattataatgacacagatgatatatatcatgctggattacacaataggatatagttcaaattcctaatatctttctttcacaacatcaaagaaattctttgaaaagtataaagccccactrtttacagctgtgggtgacaggattgtaatgaagtgataagatactatgtcaaatatagtgatggcctctctgtctggtcctattgagtgagaattttgaccaattcacgcaataattttcctgtttatagagtttcagttgatgttctgacattccatttttcttcatatatatatatatatatatatatatatatatatatatatatacacacacacacatttctttatacatttctttatatatatgtgtgtatatatatatatatatctcttggataaactaaagagtgtcttaaaggttcattttcttgt

SEQ ID NO: 736325 - DNA, 545 bp, Homo sapiens
ggaattaaaaccagttgtcaaagagacatctgcactaccatgttcattgcattattcacaacagccaagatatggaatcaacctaagttttcactagtggatgaataaacaaagaaaatgtgatacacacacacacacacacacacaaacacacacgctggaatactattctccattacaaaagaagaaaatcttkccatttgcaacaacactgatgaacttggaggacattatgttaagtgaaataaaccaggcacagaaagacaagtatcatagaatcttatgtgtggagtgttagaaaagtcaaactcatagaaacagagagtaaaatggagattactagaggctgagggatggaagtaaaaggacaccaaatttcagttagaagaaataagttcaagagatctattgtacatcatggctactagatttaattataatacattatatatttgaaaattgccaaaagagatttttgtgttctcactacaaggaaataagtatgtgaggtaatgcatatgttaaatagcttaatgtaactattc

SEQ ID NO: 736326 - DNA, 545 bp, Homo sapiens
ggaattaaaaccagttgtcaaagagacatctgcactaccatgttcattgcattattcacaacagccaagatatggaatcaacctaagttttcactagtggatgaataaacaaagaaaatgtgatacacacacacacacacacacacaaacacacacgctggaatactattctccattacaaaagaagaaaatcttgccatttgcaacaacaytgatgaacttggaggacattatgttaagtgaaataaaccaggcacagaaagacaagtatcatagaatcttatgtgtggagtgttagaaaagtcaaactcatagaaacagagagtaaaatggagattactagaggctgagggatggaagtaaaaggacaccaaatttcagttagaagaaataagttcaagagatctattgtacatcatggctactagatttaattataatacattatatatttgaaaattgccaaaagagatttttgtgttctcactacaaggaaataagtatgtgaggtaatgcatatgttaaatagcttaatgtaactattc

SEQ ID NO: 736327 - DNA, 600 bp, Homo sapiens
tcatgtttagggcttgattaaattatattattaatttaataagactttttatcctgagagagtcttggtggttttttattagaaagaggctaaaaatagaaacacattgactctgggctttaagtgttctctttaaataaaaccctcctagaggtcccatcttcattytgagtttcaaggctgattaaagcactgcttattaaaagcaggtcttctctataagggagggcaaacccttaattctaaaaaaaaaaaaaaaaaaaaaaacgtggagaagagccagggtatagtaagtgttttaatagttacacagttacttaccaagcacacccagaattatcaacaaaacagacaattttatgcgagtaaacaatatgaatcagttgctttaagagcccaatttccataagagaaagagaatgtgtgctttcacagtcataaaataatgaccaatggtgtcgtcaacacttttcattcctacatatcaatattcttgacgagtatcatctgatggaatgtatattattctatctagagaggcgaatgatttgacacaaataccttaactcagcatagctgagatggtgctgggtttaagac

SEQ ID NO: 736328 - DNA, 588 bp, Homo sapiens
gataagggggctccaggtttggatcataatcttggaagacacaatcctgaacaccataattctgaatgttaaaatcccagaagtttaaaatctctgacatccaaaatccccaaaatcacaatcacaggatagttgcatcatgttaggcagagctattacctttttattgtctttgaaattaagtacggttttaggagatgawtatgggtgccaagttgagaagaggtggacttgtggacttaattttaggcgtcaacttgactgaattaaggaatacctggaaacctagcaaagaaatttgctatgctatgtatatcatcttaacatcatttccaatactggaggtatcaagtatgtagagacttttggagagttctcattcgttttatgcattttttttttcacaaatttgactgcatgaaagtgtattatcacaacactttgtgtgaaagcaccttgtatatacataaaaatgttgaaacttccttaataaatgaagagatgttgttttgtacacatgcatttgtgaaagataaaatttctggagatgttggcttttggggcaactgcatatgtgttggtcaccca

SEQ ID NO: 736329 - DNA, 590 bp, Homo sapiens
cttgaggagagttcacacgtctggatcctttgcagacatttcccggcaccagtgtggattattgtggtcccactgggtggctagacccaaaggaacagcagaattgggcctcagggactcctattccagaagcgggagtataccacaccaagggagcactccatgggacaaaagaatccagatgactggaattgagtcccagaactttctgcttgtgggaagtttctttcagcggaggcacaggtgcggtactgggctcagtggggaaagtctgcagctctaccccaacagttaggcagccctggtgctaatgaagggtcttggagaagaaacttcttacccttgcccaccactgcgsacacagctggggcttctcccgtgggagcatggtgtgggtgcacttgtagacagactttctggagcacttaagggtgactgcatccgcacaggaggactgctcttcagttcaggcttccacaagtgatagagtcacgatccctctctacatggaacatcagcattcctacagatgtagagaggtgcctgtctgatctaaatagctggaacactgggtcaggagtgtgactggg

SEQ ID NO: 736330 - DNA, 590 bp, Homo sapiens
cttgaggagagttcacacgtctggatcctttgcagacatttcccggcaccagtgtggattattgtggtcccactgggtggctagacccaaaggaacagcagaattgggcctcagggactcctattccagaagcgggagtataccacaccaagggagcactccatgggacaaaagaatccagatgactggaattgagtcccagaactttctgcttgtgggaagtttctttcagcggaggcacaggtgcggtactgggctcagtggggaaagtctgcagctctaccccaacagttaggcagccctggtgctaatgaagggtcttggagaagaaacttcttacccttgcccaccactgcggacacagctggggcttctcccgtgggagcatggtgtgggtgcacttgtagacagactttctggagcacttmagggtgactgcatccgcacaggaggactgctcttcagttcaggcttccacaagtgatagagtcacgatccctctctacatggaacatcagcattcctacagatgtagagaggtgcctgtctgatctaaatagctggaacactgggtcaggagtgtgactggg

SEQ ID NO: 736331 - DNA, 611 bp, Homo sapiens
ccctgaatttattgagtttcttggacgtatagatgcgtatcttccaccaaatttcggaagtttgggccattatttctgcaaatattcttcctgccccttttatttctcctttccttctggaattagcaaaatgtgaatgtttttctgcttgatggatgtcccacccatctcttaggctctacttacttttcttcactcttttttctttctctttcttagactcaataaattcaattgtcctatcttctttcttccacctgctcacttcggctcttgaatccctctggtaaatgttttatttcagttattgtacttcttagctccagaatttctatttggttctttccataatttctagctcttcattgacattctcaatttgttcatacattattttcctaatttccttcatttctttggmcatggtttcctttatgtctttgagcatatttcagataatggatttaaaatctttagtaaaatctttagtaaatccaatgtccaggcttcctcaagaatgggttctatttattcttttttgttttaatgggtaatacttttttctttgcatgccttgtaatttattgttgaaaactaaatattaaaatatt

SEQ ID NO: 736332 - DNA, 675 bp, Homo sapiens
ttcccagaatttatcttaaagaaatgatagtacaagaatattcagatataaatgtaaagatatccattgaaacatctttctttttttttgcggtggcaatgtactaaaacaaatgaccattagtaggaaaatggttgaataaactatgatctgccactacaaaaaatattgaataactcttaaaactaatgaataataatcttcttattctgaccaaaaagaagcccatagtaaatggctatgagtaaaaggaaaattatagacaaatatgtattgcacgattctaggttttaaaaatctatgtgtgattagwacatatagttctatctttataaactcctgtgtatcttcatatacttcgtaatgttatgaagtatattggcgttaatatacttcatatcattaatagtggcacccactggcaaatgaggcaggggggcaggactggaaggacccaagtggaaatttcttttagcactctataattaatactttatattactttaaaatgctaaaagtgttttggatgattcctatatttcttgtggtgaaagactcaaggaaagcagaaaaaagatcatctaaaacattattttttatctttagagtcttatctgcaaactgagaccaaaattacttccaaaagacttttggccctttctaaaatcggatcct

SEQ ID NO: 736333 - DNA, 592 bp, Homo sapiens
ttctgtctcagtgtaagagaagtgagtcatcctgtgtttgttcatcccctcatacaagaggtgtctttggttgatacacagatgacagtttctccagtttcctggtacttggataataaacaaggaaaagatctggagacccaaatagataaactagttgcttccatttcatatagtcattaaaaaaaaatgaagaagtcatggttcctacaatccagaaacttttaatctagactagcaactgggtaaataattaaattaagcatcatatggttggtccaacaaagagatgtgtccaaaatcttgggctttatttaggccactttctttatattgctgtgacttctgttggctacacctgtagggatattcatgaacagaattgttattaaatatatatgtgtgtgtatgtatgtgtrtatatatatatatatatatatatatagagagagagagagagagagagagagagagagagagagagatagtctcactctatcacccaaactagagtgcagtagcagaaactcggctcactgcaatctctgtctcctgggttcaagtgattctcctgcctcagtctcccgagtag

SEQ ID NO: 736334 - DNA, 660 bp, Homo sapiens
aacaacgggttcttttttattcaacagattaatggcaagcagatattagaatgttctgtgtaggcaatgcataagtgatttatgtagcaatgagatgtcaggatatttgatgaagcaaagagacatgctcagataacagtaacaaaaaaagtactaggaataattgtattcaaaataataagttcaatgacctcattaycacacatatatatatatatatagatcttgctttatttcaagaactgagctaagtactaagtattctagtaatatatatattactatatatgtgtgtgtgtatatatatacatatatatacatatatacacatatatatacatatatatatacacacatatatatatatatatatatgtatacacattcttttaacattcagtacttttctctgaacttagtaagactgtcttccccatttacaggtaaggaaactgaggcttagttgaactgactttcctaacatcatgctgttagcagggagcacagctgggatttgaacccaagtcatctgactccaaagcccaagccttgagtatttcattttactatgttccacattagacaaaagtgctaacaaatgaataagatgtgaatcccaaactcatgagtccttttctggaatgcacaatagaagtcatc

SEQ ID NO: 736335 - DNA, 660 bp, Homo sapiens
aacaacgggttcttttttattcaacagattaatggcaagcagatattagaatgttctgtgtaggcaatgcataagtgatttatgtagcaatgagatgtcaggatatttgatgaagcaaagagacatgctcagataacagtaacaaaaaaagtactaggaataattgtattcaaaataataagttcaatgacctcattaccacacatatatatatatatatagatcttgctttatttcaagaactgagctaagtactaagtattctagtaatatatatattactatatatgtgtgtgtgtatatatatacatatatatacatatatacacatatatatacatatatatatacacacayatatatatatatatatatgtatacacattcttttaacattcagtacttttctctgaacttagtaagactgtcttccccatttacaggtaaggaaactgaggcttagttgaactgactttcctaacatcatgctgttagcagggagcacagctgggatttgaacccaagtcatctgactccaaagcccaagccttgagtatttcattttactatgttccacattagacaaaagtgctaacaaatgaataagatgtgaatcccaaactcatgagtccttttctggaatgcacaatagaagtcatc

SEQ ID NO: 736336 - DNA, 506 bp, Homo sapiens
tccgtgtgcttaattgaagactccaatttgccatgctctattatctagaattaaacacaaaagacagttgataaataccacattcagttgaaaacacaaatgaatcaaaatgttacagtttctctccataggtaataattaacattcttgtgaattgctctgtgtgccatgatgcatcctttaaatggtgtgcaagcaaaaaacctgcacattgagatgtgcatatrtgtagacccaacagaatagtgacttagccttgggagataaggctggggtgaggagaggggaaaggcgttgatgtagagtttaacaatatgcctctgtgaaacactttcaaagcagtgtgtcataatggcctctacaaaattttatacatgagctgaaacatgaaaacaacatacatggaaaagtaaagtattttggtggttaaaaaccacaagggaacaaaagagttaaggtgaagtctttgtggcttacccaaaaggtcagcataggacatgtctctt

SEQ ID NO: 736337 - DNA, 623 bp, Homo sapiens
ggagtaacccacctggaaaggtgacagaaggtttcctcgaggaagtggtaaatgaagcaagcaggagttagagagttgaggagggtgagggtaatcctgtaaacacagatgcaggctgaaataagacactgagaagagagacaccatggctggtgctgagaactccaggaaattgatagagtgaaaaatgtgggaccaaaggaacaagagattagtctggggaagcaagcagggtcaggttacacagggtttgctctgttatgctagaggacayggctagctttttatcacagtgacaacaggtggccattcaaagtttaccaacaagtgagtgacatgacgaggcttgttctttgtacagattattttcacaggtataaatgtgaagctctagggtagtggtatgtgagggggtacaggaggcagagagaagaaaacggagttattgtaccagtcagatgaaagttttaggctgaattgcagaatcttggcaggaattgcgaggcagaaataacacaatgaagtaacagtaaaccacccaaagaagagaataatctggacaaaaatatgccttgttaatgaggtattcattcaaggaatccatcgctactaaaacaacagag

SEQ ID NO: 736338 - DNA, 609 bp, Homo sapiens
ttaagcatctctctcctctaaagcttatcagcttcttcacattttagtgctctgatttaatttatttgaatttgattgagatgtttcactcctagaaaatcaatacagttgtcttcctgtcactcttcagaaatctgtttttctgtgttcagtatgcatttatttaatcattttttaaaatgaaacaaaaataatttatgattatttcttttatatttaacactaacactctttaaatgaaacaaaaacaaaacaaactgcttgtttttgtttgtttgtttctcaagcagccctataactttttggaagtagttgctttcatttctgttattttcccaatactagattggtcattgttttcaggtagtggcttttggtgaaaatactggcagtatgtatttgtctccttatatctgtgtctctaatttgagtgaggagagggtaaaaccttaaacrtctttaaccttttgaaacttttctacttttcaaaatggattttgaaaaaatccccttgcacatttatgttgacatctaaaatttttcagcataaatctaggtagtattagttattttatcatacttcttcgctagaaaaatgtttaaaatttt

SEQ ID NO: 736339 - DNA, 574 bp, Homo sapiens
gggagttaggtaataaatgaacaaaacaactatgaagtccaatcacttccctcttccctgatttcaaagaaagacaaaaacaattttttatatgtgaaaattaaagccaggcccttggccaccactacaacaatctctgctgccagacacagccacaccctatcctagagagacactgaagtcagacctgaggaagcagtctaaattgcagatgcatttgggggccgaaagttaatataraatctagtgccgtcggagcatctgacctgtaggcaggacttagccctcttcagcatggagaaacccatatagtttccagagattcctggaagggaatatttgtgtctgtcctcagtaacatagttgaagttagatgaccttcagtgacgaggtacttgtctttgtgtctaaacccaactcattttatcttgtgctgttctcaggaggaaatgagaccagctgctccctttctgtaaggaagcaaactttcatataattgtgggttaatagcacataatcccctaaatttcttcctagtttcatgcatctatattatgcaaaacataagattttg

SEQ ID NO: 736340 - DNA, 559 bp, Homo sapiens
tagagttcagtgctatgggtggttcccaatgctggttgcccatctgaattgcctggggagtttataaatgacatatatttagagctcccatcttggatattctgattatgaagtctgatgtggggcccagaaatcttcagttcatagaaattcaagtgattccgaagtacagccagcttcaagaaccattgctytgggccaatttcatcctccaatacagaagaacatctgcgacaccccacggaaacatcagtgccatggagttcccaaggtcattcgtcccactagtgggcaactccaggtacaaattgcatcctattataatgctaaaatcaatccctttgtacctctccactttaatactaactctgtgcccaggaacaatatgggatcagttttttccccctctttttaaaaatcgtttttgttttgcagctggggtgggcaggaggaaaggcccctcagctctttcctcattggcagtgtttctggacattgtccagaatggtaatgagtgtttgaaatatgctctatgaagccatgtttgtggggtaactta

SEQ ID NO: 736341 - DNA, 648 bp, Homo sapiens
ttttttgatatactgacttattttcctttggtagatagccagtagtgggactgctcgattgaatggcagatcttttagttctttaagaaatctccatattgtcttccataagacgttgaactaatttacattctcaccagcagtgtataagtattctgttttcaccacttccatgccaacatctattgtttttttgactttyagtaatggccattcttgtaggagtaaggtggtatctcattgtggttttaatttgcatttccctgatgattagtgacattgaacagtttttcatatgtttggtcatttgtatatctacttttgagaaatgtctgtttgtcatttgcccactttttgatgggattattttcttgctggtttgagttccttgtagattctgaatattagtcctttgtcagatggataatttgcaaatattttttcccaatctgtgggtttctgtttactctgattatttcttctgctgtacagaagctttttactttaattgggtcccattttttgtttttgttgcatttgcttttcgggtcttacaaattctttgcctaggccaaggtgcagaagaatttttcctaggttatcttctaaaatttctatggcttcaggtcttagatttaaatcttggat

SEQ ID NO: 736342 - DNA, 643 bp, Homo sapiens
  misc_feature 616, 617, 618, 619, 620, 621, 622, 623, 624, 625, 626, 627,628, 629, 630, 631, 632, 633, 634, 635, 636, 637, 638, 639,640, 641, 642, 643: n = A,T,C or G
ggaattgcattaaatctgtagattgatttaggcagtatggtcactttaaagatattgattttttttcccaattcatgagcatgggatgtatttccatttgtttgtgtcacctaggatttctttcagcaatgttttgtaattcttcttgtatagatctttcacctccttggttaaatatatctctaggtatttttagttttttgcagctgttaaagggattgcatttttttttttttatttttgagacagagtcttgttctgtcacccaggtgggagggcaatggcgcgatatcggctcrctgcaacctcttcctcctgggttcaagcgattcttctgcctcaggctcctgagtagctgggattacaggtatacaccaccacgcccggctaattttttatattttagtagagacggggttttgccatgttggtcatgctggtcttgaactcctgaccttctgatccgcccacctcggcctcccaaagtgctaggattacaggtgtgagccaccacacctgtccgggattgtattcctaatttgattctcagcttggttgttggtgtatagcagtgctactgatttgtgtagattgacttcataacctgaattttgtnnnnnnnnnnnnnnnnnnnnnnnnnnnn

SEQ ID NO: 736343 - DNA, 593 bp, Homo sapiens
ttccataagcatagaagaggaggaaatacttcccaactccttctatgaggctagtattacccagataccaaagccagaaaaaaaacacaagaaggaaaactaccaaccaatatctcctatgaatttagatataaaaatccttaacaaaagcctagtgaactgaatctagcaacatataaagggatgatatatcatgaccatatgggatttatcccaggaatgcatgcagtttgttcatcagatgaaaatcaatataatacaccctattaatagaataaaggacaaaacccacataatcatctcagtaacttcagataaagcatttgataaaattcaaaataaaaacaatgaataaactaggaataggagggaamcttcccaacccatgaaagggtatctctgaaaatccacagataatttcatgctttagggtaaaatattgagagttttctccctaaagtcaagaacaatacaaagatgttcactctcattatttctattaatattgtattggaatttctaaccagacaggctagaaaaagtattaaaaggcatccagataggaaaggtggaagtaaaactatgtttgcaga

SEQ ID NO: 736344 - DNA, 610 bp, Homo sapiens
agttggaccccagagtgtggcacgtgttcctgtgttcatttgaacattctctgatgacctgtcgctgaggtcctgtgatgatgcgtatcctgtcttccaccccaactgccactgtgtttcaactgtcgctggctgtgtttcaactgccgctgtgttggaactgccagctagactgctcaccaaaatgggaggcagcctctgctgctgtggtgaaggtgaaggtaggttcatttccatcttctcactgcagtttcttcagatgggccacttgtacttaaatgttttcctgatttatgtatttttcccccacctccagtttgtytagagatttacaaattggttttagagttttatgactcagtttgtatttttgattctgctatcaagctttctgccttaaatattttcctctgtttagaaaaatgtactgtttccaaggccaattttatacacacttgcatagaatagacccagaagaaacgcaacagcatttccttggtcatatcgggagatcttgataccgatgacagtgtgagacgttccatgaaaggcagatgacaggccaaagtcctctaaattgagatgtgaaaatcttaaatcaaatgttgaa

SEQ ID NO: 736345 - DNA, 602 bp, Homo sapiens
cagagcctgtggagtgggaatgtggggtcagtagcccagacattgctagtccaggtcacctgccgtgagccaccagcaggtcactaccctggctccaggcacagttctcggccttgggctactcgtccaggaagggagaggtgcccatccggctcagtggggggctgggccagccccgggaaagcctgggtcgggagaggggcagggcagtggtggctctctgggcaactggcctgcccrtgtcttccaaggtcttcccaggcagccacagggcctgtgttctctcacattgatgaaaatggccagaaagagggtctgggttcaagagggacctcctgacctggggcctgggctgtgtcctgcccatggaagtctcactcctcccttttctgtaccactgaggagtcccaccagggagagggaagaaagcgtggaaggccatgagaaagaacagtggggagcagcccagtgtcatggggacaggcccttgggcatagggccgggcccgggggctagcctggggagggagcaaccatggtagcgatggctgagttcagcctgcccagagctcagatcattgatcatcaaaagcaatcgcagct

SEQ ID NO: 736346 - DNA, 584 bp, Homo sapiens
tgtgtgtgcatgtgtgtgtgtgtgcatgtgtgtgtgcgccgaggggacacagaactgtggagctgggggtggcacaaggacccccgaaggtactggaaccccagcagctgctcagccctggccccacttactcctcttctctttcccagccctcaccctccgcctcgcacctccactgtctgtcttggtcttgcccacagccgggctgcaggtttgtgcctgaaacttcatgttcagtctgtcttgtctgagccaggctgcagggtgcaaggagagagcttctggccgagagtcggccatgctgggatgccatgggtctccccatctgtaaaacggaaatggccaygtccaccgagtggcctgctgtcagcactgggtgaggaagcgtgtgccgggatgagggcctggtaccaggctgcctcactgtccgagtggccgtgccgcctgcaggggccttgttctgcctccagggcctgtcctgggccaccctcacagggagggagtgcctgtccctgcctggaagaggcagcaggagagaggcgttgggggtgaaaagtgttgttctggaagactctttgtagaga

SEQ ID NO: 736347 - DNA, 631 bp, Homo sapiens
gtgggagctggtgtcaagtaattttacaaaacaccatacatgccttccttttgtctcattgtaacatgttttgtctgacaccaacaaaggatcctcagagaagaatctaaagcccaggaaagcaaaagtaatccagaagcgcaggcagtaatggggcccagaacaagcaacacacctgtgcctatggataaagattcctctgaatctaacaaggctaattgaaaagagaaaaattccatgtcaacaycccttaataaatgtgttcccccaaaatgaattggttggaatagatacaactataaaggaataaagagcaaagggaacgcttattatttgtgcattgttcccccttttattttaattcaccatgcatgcattttcagtaagataactgtgcctataaatacaaaggataacatcagtgcatattttggaagccacttcatttcattattttttgtcagcatttcagtgcaattttttcctagcaggggaaagaaaatcacaataccatatgatctagtagttttacattcctgtcttccccttttcctgctgaatgcagatcagttcatttttgatagtgggtagaaggactttgtaaatatgtttctgacttcagacaacccac

SEQ ID NO: 736348 - DNA, 644 bp, Homo sapiens
atacttaacttctttaaatttatatgtacatatagatattgattgcagaaaatcagaaaagtcagagaagaacactgaaaatcttaaaaccacctataattccatcacaaaaaggtaacaatttttactatttttgtgtaaatgctcccagactttatatgatcctctttccacaactgtgaagatgaatctatgatgtcatttttaataatttcaaggtggttccttgattgtaccaaaagtttatcatatattaaaccaagatgaattacttgctatctattgagacctaatgtgatataataaaagccattaggaggaagtggtttctcatttttcctaaggatggaagcattargaaaaagagatttgattaagagaatatggagacaagtcaaaatctttaatccagggcttagcctttggaatcatgatttaatctaaaacaggaaggttccttagagctgtcattttaaaaatatgcttgctcttgtctctaatgctgttttaatgcaactgctgataagaatccactcctcgcaataccagaaccaagccaagcatattttaaagtggcaggtctaatttccaacttcagcctcagtgttacgaatataaatcatcaaccagagaggtaaacatgc

SEQ ID NO: 736349 - DNA, 564 bp, Homo sapiens
aaaaatctcataaaattcaccaaagacattcactgtcatctcttcatttcacagcaattattaaaagctgctgtatacaagatactttgcttgatggtgaggattcaccaagaaacagaaacacacatcactctttttttttttttttgagataaggtcttgctttgtcccccagcctgggctagartacagtgacatgaacacggctcactgcagcctcaaacctctagactcaagcagtccttctgcctcagcctcccaagtagctgggactacaagcatgtgccaccacacctggctggtttttattttttgtagagatggggtctcactatgttgcccaggttgttcttgaactcctggcctcaagtgatcctcctgcttcagcctcccaaagtgctgggattacaggcatgagctgtcacgcctggccctagatcaccatctttaccctcatggagcttaaattctagtgcgaaagatggtcattcactgagcgagtgcatactaattacggtggtggtgagtgtcgcagaggaaaagtacgggacgcaaggtgggcat

SEQ ID NO: 736350 - DNA, 564 bp, Homo sapiens
aaaaatctcataaaattcaccaaagacattcactgtcatctcttcatttcacagcaattattaaaagctgctgtatacaagatactttgcttgatggtgaggattcaccaagaaacagaaacacacatcactctttttttttttttttgagataaggtcttgctttgtcccccagcctgggctagaatacagtgacatgaacacggctcactgcagcctcaaacctctagactcaagcagtccttctgcctcagcctcccaagtagctgggactacaagcatgtgccaccacacctggctggtttttattttttgtagagatggggtctcactatgttgcccaggttgttcttgaactcctggcctcaagtgatcctcctgcttcagcctcccaaagtgctgggatwacaggcatgagctgtcacgcctggccctagatcaccatctttaccctcatggagcttaaattctagtgcgaaagatggtcattcactgagcgagtgcatactaattacggtggtggtgagtgtcgcagaggaaaagtacgggacgcaaggtgggcat

SEQ ID NO: 736351 - DNA, 556 bp, Homo sapiens
gcacgaacgctcttcatggtccgtgactcgctcggcgctaccgccaacgtccacggagcccgcccgggaccctcgacgtgcgcctctgcggacggggcgcgcagagggagccccgttagcggtcccccgctccctcgtccatcctccccaggcgcactccgagtcacacgtcgtgtctctgcaccgccctggcctccacggtggctccctgcgaagctgagggtgcggtccccatcctccgtgggtgccaactccggggcaagcaggctgcagagccgcgcgctccgccttaggcgctgccaagggcggccgggtagggtttcctaggacccgcccaccccgctcrtcccggccggagctgccaccccctggatcagtggtaggcggggctccacgcggggaggtcacgtgtgggtggcccatccctccctccccttcgccccatccgagttctggaatgttagcgctcgggagatccaacccgttctattttacggatggggaaactgaggcccaggtaaaaagcgggccaggctcccgcggagtttttgcctgt

SEQ ID NO: 736352 - DNA, 555 bp, Homo sapiens
tttattattcaaattttcaagcattcatgaaagtagaaagagtataataaactctcatctgtaacccaccttcaacaataaccagtattttgccaatcttgtttcatttgtacctctctaccccttgactcttcttttgttaccatttttccccatagccttattgagatataatttatcattgtaagtgtacaattaaatgatttttagtaaatgtatacagttgcgtaaccattaccacaatccaatttttagaacatttcctcatccggaatraatagtgacaatatagtacacatacacaatggaatactgttcagccttaaaaaagaagaaatcctgtcatttatgacaacatggatgaacctggagaacattatattaagtgaaataagccaggcacagaaagacaaacaccacatgatctcactcgtatgtgtagtaaaaaagctgaactcagaaatgagtaaaatggaggtgactagaggttgaaggttgggggatggggagatgttgctcaaaagacataaaatttcaattagacaggaggaacaa

SEQ ID NO: 736353 - DNA, 598 bp, Homo sapiens
attggtggatatttgagctgtttccagtttttggctcttatgtataatcttctattaacacttgcttataagtatttgtatggacatgttttcattttttggggtagacatctggaagtagacttgctgggttttgtactgtcttttacccaacagaataacaaaataccatatgatataatgttttatttaataaataaggaaatgaaaagtccaaagacattaactaatttcctcatactcacagttcattggtgacagagaaagaattcaaacccagtacggcccattcttytttttttcttcttttctaatcagtttcattcctgctcctcccagaaacactcctcctggagccctcctccttcagctctattctagatgggctcttctccttgggccagagctgcaatagggaacttcccttctcaagtccttctggggctcccctttacctcctgcagactttcccacccctactcccatcctaaagcctctgcttcacctatgcctctggggaactggggaactctcatttctgagccttcctggcattctgtgagcaaatcaatcgcttccggtcctctcccggtgagcc

SEQ ID NO: 736354 - DNA, 605 bp, Homo sapiens
gacatagaaagaagtggagaaggccaggtgtgacggctcacgcctgtaatcctagcactttgggaggtcgagatgcgaggatcacttgaacccaggggttcgaaaagagcctaggcaacatggcgaaaccgtttcttacaaaaaatatgaaacttagctgggcatggtgacacatacctgtggttccagctactcrggagactgaggtgggaggatcgcttgagcccaggagttagaggctgcagtgagctatgatctcaccactgcacttcagcctgggtgacacaggaagatcctgtctcaaaaaaaaaaaaaaaaaagtggaagaactagaaaaaggtcaactgtagttctaatctgcaaagttctttacccttttaggtgaacaggaactagtgcataaaaatttatttcagctttaacattgcaactaaaaacactccagttttggagatttagaaaataagcctcacaggtaggaagacagaattacttcctcacatggtaaaatgccagctctacaatgaagaaactctggagctgccatctctttaatgggcaccattaaaccagcctcagagaaatgccaagttcatttaaaataa

SEQ ID NO: 736355 - DNA, 617 bp, Homo sapiens
tgaactttgttactaattattttggttatcctcaggtacaattcatataaaacaggtagggtagtagaagtgcttgatttttttatcaattgcagaataataggtttgttccttagcatctcaaagtgagttgtttgattttgatattattgtggtgggcttttaatgtgttttatatttttcagtcagttgtctttataatttttgtagtgctcaaattgttccattttggctaagtaacttcatattttttgttgtggttttgtttttttcaacccctttggtagttagttagttaattgctttctggtatacaatattccaggcccattttgtacatttcctgcctcagacctgaaatcaaccatatctctatggaagcctgtttccttgaatggragtagtattttaatcacagtctagggcctagggaccatactttttaagatgataaaattttggctgggtgcagtggctcatgcttgtaatcacagcacttggagaggctgaggcaggaggaccacttgaggccaggagtttgagatcagtctgcgcaacatagcaggaccctttctctgccaaaaaattaacaaaattaacaaaagaagtagttgggc

SEQ ID NO: 736356 - DNA, 632 bp, Homo sapiens
gaaatcctcctgcctcagactcccacactgggattagaggcgtgagctatggcacctggtccaaatcagacttttgaaaaggctgccactctttcaccactcccccatcctacgccaccccaaaattcagaaagggaattacagttcagatgtatcagcaagactgactcaggaagaagagagtgaatgcsgtacatgtctatttccataaacaatggaaatcttcattacaaccctgcaaagccaggatcacttttcctatttagcatataagaacactgcagttcagagatgaaagtgcctggtttaagatcccccagaaaggctcacagccagaaatcacagctttgttagtctgactccaaaacctatgtcattttcactgaagtctgtgctggttctgttgccttgaaaagccctctctccaatcctaggctaatttattagttgctgtgatgaagccctgaggctggggtggactccctgggaacaggaactgtttcctcactaggggaagacagaagcagctgggtactcaggagggaggggctctgcagcagctgaggcccatgacccagcccctcctcagagccagatgggctccataaaggagctcttgattgctccttaaa

SEQ ID NO: 736357 - DNA, 512 bp, Homo sapiens
ttacaccaaccatttttctattcttaactttcataatgacaaatgttaagcatctgttttctgatgctttagagtattataaaaatgtaatgaagccatttgaactatctaagtacccttaagacagctcaattcctaaagaaattgtcaatattgatgtgttgaccagaaatccttattcatagaacataaaaagatttcactcaagattgtattcacttccagacatgatggcacaagtctgtagtcccagmtctttcggaggctgagacaggaggattgcttgagcccagaaattcaaggctgcagtgagctatgatatcaggcaccactgtactccaacctggaccacagagtgagaccctatttctttaaaaataattatattcctaaaaattttatttttttactgagcaaatatgtatcccagtatattaattaaaatacactatagtagacagaataaatgagacaaattttctgccttcatgtggctttcaagataataatgt

SEQ ID NO: 736358 - DNA, 482 bp, Homo sapiens
ttttttattaccccaaaaagaaaccacatatctatcatccatttccctcaatccttccgtcttctacagctgtggaaaaccgctaatctactttactccgtatacatttgcctattccgaacatttcatacagatggatatattccataygtggtcctttgtaagtggtttcattcacttagcataattttttcaaggttcctcatgttggagtattcatcagtacttatttctttttgtcaataaataatattcaattgtgtgtttccaccattttctttatccattcattagttgatagagatctgtgctgtatccatttttttctattatgaataatgctgctatgaaaatgaatgtatacatttttaagtatttattgttgttatttgcctggggagtggaattgctgggtcaaatgataacttcatggttattattttatgtcactgccagacttttttccaaagtgactactagtt

SEQ ID NO: 736359 - DNA, 482 bp, Homo sapiens
ttttttattaccccaaaaagaaaccacatatctatcatccatttccctcaatccttccgtcttctacagctgtggaaaaccgctaatctactttactccgtatacatttgcctattccgaacatttcatacagatggatatattccatatgtggtcctttgtaagtggtttcattcacttagcataattttttcaaggttcmtcatgttggagtattcatcagtacttatttctttttgtcaataaataatattcaattgtgtgtttccaccattttctttatccattcattagttgatagagatctgtgctgtatccatttttttctattatgaataatgctgctatgaaaatgaatgtatacatttttaagtatttattgttgttatttgcctggggagtggaattgctgggtcaaatgataacttcatggttattattttatgtcactgccagacttttttccaaagtgactactagtt

SEQ ID NO: 736360 - DNA, 516 bp, Homo sapiens
ccatactaccatagctgaggctctcttgaaagtgcctcccagcaggaggccaatcagtacaaaaatagtgcattaaaaaaccaaagctaaggccctccagagagtccatttcacttccctgccattgccaccagaacaggtgctggtatccacggctgagagatccagatggctgacatcacaggactctgtgcagacaacccccagtaccagcccgagcctggtagaattgctgggtggctagatcaagaagagagataacaatcagctgaactacagctcagctctcaggaagccacayccctaggaaaagagggggagtactacatcaagggaacactctgtgggacaagagaatctgaacaacagccttaaaccctagaccttccctctgacagaccctaccctaatgagaagaaaccagaaaaccaactctggtgatatgacaaaacaaggttctttaacacccccagaaaatcacactagctcaccagcaacggatccaaaccaagaaga

SEQ ID NO: 736361 - DNA, 644 bp, Homo sapiens
tcccttcatctctttgggtctcaggatcctcatctgtaaaatgggtactatagtaactgtcttgtagggttattgtgaagatgaggaatgcttctgtctcagaccctgacacatagtagggacttaaaatggtacctatattagccacagttaacaatttgtgttcttttgtttgtatattgatttgtccatgaatttatgcactgaacaatgactcatgcaatgctaataactcacaatggcttcatttttcaagtttctgcatggtagtgtctgctgatgcctagatctgggaagataccctcatgggatagagaactagccctttggaaaggagctcagggtcccaggtaagctgcccgggacagtacactattttgacmcatccacagctgagttttaattgtccctgttggcttttgaccctagagatcccctggcttcctccagttataatcgttttgctcagaggttcacattttctttcctcaccggatagatcctgtcccttgctgctgtgcagccgtgggcaaacatgttagctcttaccttgtgtctgttttttgtcagtgccttttttttacagcattgttttattggctgaaattcagcaaactataccagccttgtctttgtggtgtcaa

SEQ ID NO: 736362 - DNA, 644 bp, Homo sapiens
tcccttcatctctttgggtctcaggatcctcatctgtaaaatgggtactatagtaactgtcttgtagggttattgtgaagatgaggaatgcttctgtctcagaccctgacacatagtagggacttaaaatggtacctatattagccacagttaacaatttgtgttcttttgtttgtatattgatttgtccatgaatttatgcactgaacaatgactcatgcaatgctaataactcacaatggcttcatttttcaagtttctgcatggtagtgtctgctgatgcctagatctgggaagataccctcatgggatagagaactagccctttggaaaggagctcagggtcccaggtaagctgcccgggacagtacactattttgacacatccacagctgagttttaattgtccctgttggcttttgaccctagagatcccctggcttcctccagttataatcgttttgctcagaggttcacattttctttcctcaccggatagatcctgtcmcttgctgctgtgcagccgtgggcaaacatgttagctcttaccttgtgtctgttttttgtcagtgccttttttttacagcattgttttattggctgaaattcagcaaactataccagccttgtctttgtggtgtcaa

SEQ ID NO: 736363 - DNA, 606 bp, Homo sapiens
tgccttggccttgttctaaacttagctagttaacctatatttgaataagataaatagatatctgttaaacaagatgccctctcctgtctagctcctccaacacttcacatggtgtacattactggaactcaggtagtttaacrgctcctgctgttcacaaagacaaaagaacagtccttccacaggctccacctcgcctaaggttacagagaacctggggctggggcccatggcgttccttgccagccttctcttaggtaggagatcaaagcctgggcagacagcccgccgaccctgatttgcatcatgaaagtcacctgtccagcactgccccagaggcaaagagatcaaagctgggagggcagctgggagcagggaggaaataaaatattgatttaatgagatgcatggtaattctcctccatccaccttctcagtaatgaaagtgaggctgtgaagtgaccattatccgtgctcctttcatgaacccacattatggctcccacttgccctgccatatgggtctcatgcagtctttcccagaaaaagaaaaacaggagggaaaagactgagagaggccatgcaatcagatggtttcccaagcac

SEQ ID NO: 736364 - DNA, 606 bp, Homo sapiens
tgccttggccttgttctaaacttagctagttaacctatatttgaataagataaatagatatctgttaaacaagatgccctctcctgtctagctcctccaacacttcacatggtgtacattactggaactcaggtagtttaacggctcctgctgttcacaaagacaaaagaacagtccttccacaggctccacctcgccyaaggttacagagaacctggggctggggcccatggcgttccttgccagccttctcttaggtaggagatcaaagcctgggcagacagcccgccgaccctgatttgcatcatgaaagtcacctgtccagcactgccccagaggcaaagagatcaaagctgggagggcagctgggagcagggaggaaataaaatattgatttaatgagatgcatggtaattctcctccatccaccttctcagtaatgaaagtgaggctgtgaagtgaccattatccgtgctcctttcatgaacccacattatggctcccacttgccctgccatatgggtctcatgcagtctttcccagaaaaagaaaaacaggagggaaaagactgagagaggccatgcaatcagatggtttcccaagcac

SEQ ID NO: 736365 - DNA, 537 bp, Homo sapiens
cttgctccagggagctgggagctggatttcctgtatcagtattggtgccgctctttcttcagaaagtttgaccctgaagttatccacagtgattggtccagttcaatatctatgaatataagcaactcccaagaattaaatggttctgagcagacacaaaggcatgggctcacaatgtcagctatttgcaggagatgttgactctcagccgtgtggaggcctttgtgtttttagctcatgggtccatgggaaaagtgtcagctgcctgtagcccaggtgaaaagatgactggtattccctatacctgagtcagacagctttgggggmccctttgttatttgtgttcagaatggcagacagatcaatgaaattcattttcaatccctaagccttgttaaactgtagctacggtccagcctagggctgaggcattgagtgaaatagcctaaagacaggaaaagggcagggaaggaaaccagcagttatgacatatctgccagagccggcatctgatttatttatttgtttataattttt

SEQ ID NO: 736366 - DNA, 571 bp, Homo sapiens
aactcttttagcaaatgtaaaggtttaggatcattatgttcatttacagacagaaagagagagacctcaaaaattacatgatttacagagctagaaagtgtaggatttggtattctaactcagatttatctgactcctaaagttgagggtcagccttgctgcattctcttgcctccacacgaagctgtcagtgactgccaagagtttatatttttactcatcccttctagagggcatttgcattttaataaagttcttcaacactttagctcaacggttatcaaagtacagtctaggggtctcctgggccctaaaaacctttcaggaagtctgcaaagtcgaaactatgttcttagtaatacttagatgttatttgccatcttcactgtgttaacgtttgcactaawggtgaaaaagcaatagtggatctaactgccagcctaacaaatcagggtagtggcactcagctgttattgcattcatcaacatcatcctcataggggggaaaaagtccattttcctaagaatatttatggtgaagcagtaaatattattaattttattgtatctc

SEQ ID NO: 736367 - DNA, 642 bp, Homo sapiens
attggactatattatgtcattttaaatcagtttagtctcataagttggactatatgtttgtcctccaaggtaaattataaacttcttgaaggcagggaccacatttagccagtcattcaaaagtatttaatgtgtttctgttcaactaatcttttttctatgttcttctgggtatccaaagggattcagtgttacataaaatataatccttgttatcaaaaaatttatagcccactcctaggttgtaagcttcgtgtacaattcgaagttatgttgtgaccaccaagtgatactgtgcttgccaggtttactgcaatatgacaaggtgaatgtcagccaccaatgacacgtgctaatactatgacatcagagcccaccatgttagccatgtasaaatagctatgctgatatgtctaactttgaaatagagccacgaaatggagaataactcaggagaaattagttgttaaaaatgtacacttatacacagtgtaacatttcagtcaacaacagaccacatatatgaaggactgcatatacacaggtggtcccacatgattgtaatgccatatttttactgtacctctatgtttagatcctgtcaacctgaaaggaaaagtccaaggcaaaattaagtagaga

SEQ ID NO: 736368 - DNA, 534 bp, Homo sapiens
gagtgtgatatcgtgtgtttgtgctgcgctgtgatgggtatgtggttctacgaccttcactgtaattctctgagactccctcctgaacgttgctgagaatgtgacagtggcctgtgtcaccctctggctggtttcatctctgaggctgtgcagcggggcggcactgcatggccttctgtctgtccctgggtgtttttgcctgtgtgacggtgttgcgcggtcagtcaggactgggcgctatggcagctgcccaaaatatctccagctgcctgccgcgggccaggccccatcccagggtggggtgtgggtggagtttggtccatccttgcccttgggaaacccatgtcatggagggatggaaaaggcctgtgaaaacctcctctgtgyctcagacggtgttggacctccaatatccacccaggatcttacccccaaatctaatccctcaacccaaatctgattcatcagcaagtaccctcacagctcctagccccatgggagagaaaaaaagaagagaaaactgtcaaatacatt

SEQ ID NO: 736369 - DNA, 613 bp, Homo sapiens
atatacaaaaaattagccaggtgtggtggcacatgcatgtagccccaggtacttgataggctgaggctggagaattacttgaaaccgggtggtagacgttgtagtaagccgagattgtgccactgtactccaggctgggtgatagagcaagaccctgtttcaaaaaaataaaaaaaaaaaaaaagaaagaaagaaakaaagaaaaggaaaaaaacattgttctttcgacatcctttgactaattgcttctgtttgttcaacagactctgcaatatcccatttaaggcaaacattcaaaatataacgagcctttgagaattcggacgttagattccataagtccactacatccctagtggcgttatcttacaggaatatagagtaaatatggatagattaaataatatccccttctggaaaaataaagattaaaataaaaaagaaagctcatatcctctattaaatatttactacaagttcctaaaagccccctagggaatctgagttccaagattcataatgcttatattaaaaacattgtgaacaccaacatgtttataatttaaatgtatgaaactgtattatcttagaatggcaaaataaattataaatc

SEQ ID NO: 736370 - DNA, 534 bp, Homo sapiens
caacctttaccaaattgttatttttgcttgaaagttcagttatatgaatgtcaacaaatagatgttcatttatttccatgaaaatgttttccaagtacctaagtgtgaataaccagcttgtcagtcaatagatcttgtaattaaaatggtgttccatgataaaatcagtgagtcagcctgcaactcattcccacaagtgcttagagaaaagcactgtttgagagttcttggtatgcagcagaagtgctttataaatgcttctttttttcatacagaatattttaaaagatgtgtattcacrggtgaaaacaatccaatttgcaattttcattgcttcattaagaacattcttaaataaaactggaagttttttaaaactgcaagtgaatggcagtgaagaatataaggactattaatttgtatcagtggtattcaactggaggtgactttgtcctcgggacatttggcaatgatatttttggctatcacgacttaagaggagagagttactactgacatctaaggagtagaaac

SEQ ID NO: 736371 - DNA, 598 bp, Homo sapiens
aaatattgcctaatcatggactgcagatgatagagcacacactgagctttttttgtctttttttttttttggcggcgggggatggtgaaaatggttcatgattcaactgtctgtgaacttctcaaagtatttttttttaaggtataattcttctttctatgaaatgctattaagaaaaratttgggattctaacaacatttctatcattctaagcaataagatttttaagctaaaaagacagaaaggttatagcccatagtttttgatagctgctgtctcctgggttctgaaagggcgatctggctgatgaattgcatagcaggaatagtatgaacaaaatttagggaaaacaaggagtaaagattaattgtctcattttggagctgttcacctttcctatttgtgtctttctgctacttataaataggttaaaactgctcacagtcatggaaacacttggatgaaacctaacagtggaaatctgtttagaaattaaattaccagaagtaatatctacatgacagaataatttttgatttattctagaatttacttcgctgttcctttcatattgaaatttctacatacgttaaaaat

SEQ ID NO: 736372 - DNA, 462 bp, Homo sapiens
ccctacagtggcccctaagtgttcaagtgaaaggaagacgcacacatctctcacacattttaaatcagaagctggaaattattaagcttagtaagaaaggcatgtcaaaagacaagacaggccaaaagcaaagccccttgcaccaaagagttagccaagttatraaggcaaaggaaaagttcttgaaggaaattaaaagtactactccagtgaacacatgaatggtaagaaagtgaaacagctttattgctgatatggagaaggttttagtggtctgggtggaagattaaaccaggcataatatttccttaagccaaagctttatccagagcaaagtcctaactctcttcagttgtatgaagaccgagagaagtgaggaaactgcagaagaaaagtcggcatctagcagaggttggttcatgaggtttaaggaaaaaagcctccttcatgacataaaagtgc

SEQ ID NO: 736373 - DNA, 592 bp, Homo sapiens
catatattactctatatatattaaataatataggccgggcgtggtggctcacgcctgtaatcctagcactttgggaggccgaggcgggtggatcacctgaggtcaggagttcgagaccagcctggccaacatggcaaaaccttgtctctactaaaaatacaaaaattagctgggtgtggtggcacatgcctgtaatcccagctactcaggaggctgaggcaggagaattgcttgaacccagaggtggaggttgcagtgagctgagatcgcaccacttcacttgagcctgggcataggagcaaamctccatctaaaaacaaaaaaaagaatatatatatatatataaaactatatacataaaaagattataaccttttgttatatagtaatatttattgttaagatacttgagtttatgggaatagtaggactgcagacataagaaaacctttatatgataaggttaatttctgttgcttatctctctttttactatgacccaacatgcttcacaggcgcttggtgagaggttcacagtttcacctcccttcccacagccatgaccccctctctgaaatcatcataggaggcc

SEQ ID NO: 736374 - DNA, 529 bp, Homo sapiens
gcttgaggagatggataccccattttacgtgtgattattacacatttcatacctgtttcaaaatatctcatgtaccccataaatatatacacctatatacccacaaaaaaattaaaaactaaagtacctgccatccttcgtcaagtttagccttgaattccatcagcacttgggaatgcacttcttccataaaatgcwattgttttgtattgtgaccccacagagcacaggacagtgcattccttgtgcatagtgagccatcagtaaatgaccatttgatggacttggacagggtaaaagggaagtgtggtcagaaagaagctgattcatttttcatctttggaatgtgagccagaccactctcctttcatcccttcctagctcatgaacacggtttgcatttccagctgaggttgcatgataaacttgtgatgtccagctgagtatcactaagtggttttaattttatcttcttaaccttgctcacacatttctttcttgctttcttcctctccctctgtccctcctc

SEQ ID NO: 736375 - DNA, 621 bp, Homo sapiens
aattagaagccagaattattttgcctttctttattgtctttctctgtttctgtctctctctctctttctctttctctctcttcattcttcctatttccatgcaaagtaatatttggaaaatacattttcatgataatttaaatagctgaatgaaatcaggaaattgctatcaagtatccttgcatgattagacccaaattctttccacatctgtttgtgatacaggaaccatttgagattataaaaatcagagctccattttgcaggcctttctgactttagtttacagctttcaagttatttacctggtgtaccttagtcagcattccccacagcctagatggattgatcaactgtgtccacacacataaatatgtcattcytaatgtcttttccagttattatgtaggaagtcagagatgagtgagattaacagagtgaaaaacaccagctgtaatgatgctcgataaagctgtcagattttaagtcatgggttagtagcatatcctgactctataaatgagataaaatttaaaccacacattaaacaatgctagccccagcagctcttagtgaattgcagtctctactgaaaagtttctgaagaaatacaacatgcct

SEQ ID NO: 736376 - DNA, 535 bp, Homo sapiens
tgaaaaactgggacccagaccatccgtgcttcctgaatctcactaatggtggcaaaccactaattaagtaagctctctctttgagcagacacacgtggtatagatgccttggcaatatggttaggctttgtcaaattccccacccaaatctcattttgaattgtaatccccagatgttgaaggagagacctggtggtaggtgattggatcatggcagaggggggcgctgttgtgggaagccaggraccccaaatggagggaccggctgaagccatggcagaagaacataaattgtgaagatttcatggacatttattagttccccaaaattaatacttttataatttcttatgcctgtctttactgcaatctctgaacataaattgtgaagatttcatggacacttttcacttccccaatcaatacccttgtgatttcttatgcctgtctttactttaatctcttaatcctgtcatttttgtaagctgaggaggatgtatgtcacctcaggaccctgtgatgattgcgttaactg

SEQ ID NO: 736377 - DNA, 580 bp, Homo sapiens
ttttagatttgtcgatgttttagatttttatttgacatctacaagagcaaagctggagatataaaatttggaagtcaatagcatatttgttctttaaggtcttgtgacttgatgagattacataggagcagactctaatagagagctaatgaggtcacaatactgaaccctcgtgtctttctgacatttggaggtyggtaaaagaggattcattaagtgggagaaaaaccagaagacaacttgactttagagctggataagtaaaaattaaaataatattgatagttatagtaataaggatgagtataacacaaggtggggaactgtcttcgtttgggaaactccttgatagttatgttaaatctgtctcttagagtacagatttgaacaaaataaaaaaaaagattgctaatctgctattcataaaagataagcaggaatttggaggacagggagaattttagtgagggtattgggaataagggcagagtgaatgactaaacaacacagtagggtggctgaagaacttctagattttaagttattttaatagctagaagtcaattcatctgtttcccca

SEQ ID NO: 736378 - DNA, 546 bp, Homo sapiens
gatctctcttgcttttccccacagaaaagaaaaggaagaaagaaataccagagactgagtaatttacttttttaaaaaagaggtttaattagctcacggctctgcaaacaatacagaaaacatgatgctggaatctgcttggcttctggggaagggtaggtagggtggtgggatggtagtgtgctaggagaagccttagtgaaggctaataggaatggtctttgcttttcccaaatgactgatccaggggttttgccattstcaggtggcgtcatgttaagggacaaaaatcaaatattattttcttccactgtcatcttcctcttggggcattatttttcctggcctcactttaaatcacttgttcattagattgagccatttagagatgttttaaaaatttttagccattttatatcaaaacatgccaaaatatcaatacagggcatgtctggatctagcatttggtaacacatcatatatttttaacatttttattacttagtaagaggtaaagatttggttttgctcattagtcatctttta

SEQ ID NO: 736379 - DNA, 546 bp, Homo sapiens
gatctctcttgcttttccccacagaaaagaaaaggaagaaagaaataccagagactgagtaatttacttttttaaaaaagaggtttaattagctcacggctctgcaaacaatacagaaaacatgatgctggaatctgcttggcttctggggaagggtaggtagggtggtgggatggtagtgtgctaggagaagccttagtgaaggctaataggaatggtctttgcttttcccaaatgactgatccaggggttttgccattctcaggtggcgtcatgttaagggacaaaaatcaaatattattttcttccactgtcatcttcctcttggggcattatttttcctggcctcactttaaatcacttgttcattagattgagccatttagagaygttttaaaaatttttagccattttatatcaaaacatgccaaaatatcaatacagggcatgtctggatctagcatttggtaacacatcatatatttttaacatttttattacttagtaagaggtaaagatttggttttgctcattagtcatctttta

SEQ ID NO: 736380 - DNA, 573 bp, Homo sapiens
ccggccaccatttgtttttttacgcagcattcactttctccatttattcatattctttcatttgtttacatatttgtttatttattccatcagtcattttaagaggagtttactgggagacttgtgtattctttcttctttgtagggtctgtggtaacccaaagtcacatggatgaagcctctgcwtcatgtgagtgtcctagggagacaggtttgtaatacattgtttttgtagtgagtacgtggagatagttgtagagacaaagtgctgtgggaccacgaaagagtgacagcagttttactaaggacagcagttggtgaggttcttataattggtccctgaccattcagcttgtcttgccatccaagatccccttggctaaattccaggtgagtctgttttctctttttctatctccacttgttttccttcttaccatcctttctctaggctttacatctcctttctcattcattgaagacttgagttaaccatttttttccttctaatttgtggggaaaggtgccattttccttggccttctgtgttgtgtgttgacctaaacatcaggg

SEQ ID NO: 736381 - DNA, 610 bp, Homo sapiens
cgccaggatgccaagttcctagtattgcagcaggttcttagtacataacaaacactatcagtgcccccagctcaacttcgactaaatgccttccaatagagttaagctgtttttatctaatacatgctaacagtaaaaggacacagaccctcttatttgaccctcttagcatctaaggaatatgatactttttttctttatacttagctgtgtattcaaagctaacacattctctaagtaaccaagttcacactaaagaaaaattgaaggccatcctctaaagccatgctgctcagtgyaggagccaccagccacatggtcaaagccacacagagccactgaaaggtggctgctataaattgagatgtgttatgagcataaaacaagagagaaatgaagactatctgcttaataatttttatattgattatatgttgattatattttggatatgtggggttaaataaaagattaaatttcaccttttgtttttgcttgtgatgtggctactagaaaatgtaaaattacatgtgtggcttacagcgagaccccactatttacagggcactgaaagtcattcttcctcttaattcctcatctaaactctact

SEQ ID NO: 736382 - DNA, 507 bp, Homo sapiens
gtttttgcttagtcaaagagcacaggccatcatttgttgtagtgtcacccgtaaagcttaataagtttaaagttcagggtgttaatcattacaagcataaagtatgaatatgctttaaaggtttatttaagaaaagaattgggattagatttgcccaccagaatatacatttttcacytgaagtcctgagagagattcagacagaaacagctttgactcagcagcagttagcaaacaaacatcttgatataatactgatccacactttgcatatacactttcttttctttgtattacatttttagaggtaagtggcagtttttcacacacttccaaactgcttccatcagtaatgaaatatttggcttgggcagcctctggagtcccagtgtttcagcttaaactttccagtgggccctgccaggcactaacttcaaaatatctttttttatggtgaatgcctccagaaggtgcaactgtgtggtggtttcattttgcacttcataa

SEQ ID NO: 736383 - DNA, 507 bp, Homo sapiens
gtttttgcttagtcaaagagcacaggccatcatttgttgtagtgtcacccgtaaagcttaataagtttaaagttcagggtgttaatcattacaagcataaagtatgaatatgctttaaaggtttatttaagaaaagaattgggattagatttgcccaccagaatatacatttttcacttgaagtcctgagagagattcagacagaaacagctttgactcagcagcagttagcaracaaacatcttgatataatactgatccacactttgcatatacactttcttttctttgtattacatttttagaggtaagtggcagtttttcacacacttccaaactgcttccatcagtaatgaaatatttggcttgggcagcctctggagtcccagtgtttcagcttaaactttccagtgggccctgccaggcactaacttcaaaatatctttttttatggtgaatgcctccagaaggtgcaactgtgtggtggtttcattttgcacttcataa

SEQ ID NO: 736384 - DNA, 575 bp, Homo sapiens; identical to SEQ ID NO: 736186

SEQ ID NO: 736385 - DNA, 643 bp, Homo sapiens
cccaattctggatagaaattctgctattgagttaaagaaatcaaactccaggctattttgggaaacttttaaatgaaagaaaactagaagtttgggaatcaagtaatgaaaagagataacctagcattttatttaggtttatcttataaaacagcatagcattctatctaggtttrtctttctctgcctagcatgtagagaaaaatagcaagcaaaaatagaaatcaaggtgagcggcattgaaagacacatactgatcagatgaatttattaagaaaaggtgaatgatgaacctttataaacccagtaacataaatgtatgttgtataaagcaaatttaatcaaaaagaagggagaaatggacaaattcataatccagtgtcttccaagttggaagacattgaaaatcccaaaaattttactcagaaatatatacctctagtagataaagtgaattagaatatacagttatgtccacaaatttagtctaataactagatatacaaacttgtaacctacagagtacagatatgcatgtcatattcacagaaaagtttggggaaaaaatctaaaatgtgaagttattaattaattagcattagaataactctgatggaaatttatactttttaatgcatttatt

SEQ ID NO: 736386 - DNA, 435 bp, Homo sapiens
actgatttgagagctatcctaaaatctagacttttgttttaaaaaatacactataatctaatgtctcaattttttaaattttgagaatggaatactagctattaaaaccatgaaactattttctatgatagggcggagcaacttttcttcattctgagttaatgcccttttcttattatagtccacacttttacgcttagattattgttaccaaattawtttattctaggtatctctcaatacctgtaatttattatcttccacatgttttactaagctgatagactaataaccatttgtgttaagtgctgtttataaaacggtatttgcaacatttattcaaggttgttttaaatttttattctcatttaatgtactttgatatctgtgtgtgtgcatgtgggtttaaggaagtatatattgaggtaatacttt

SEQ ID NO: 736387 - DNA, 614 bp, Homo sapiens
tatgccacattcactctgcctgtgctttataaatggaacaatgaagcctggttgatagcacatttatttacagcatggtttagtgaatattttaagcctgttgttgagacctgctcaggaaaaaaaaaaactcttaaaatattactgctaattgacaaatcacctgatcacccaagacctctgatgcaaatatacaaggasattaatgtatttttcatgcctgctaacacagtattcattctggagcccatgactcaaggagtaattttgacttttaagtcgtgctatgtaaggaatacattttttgaggctatagttggcatagtgattcctctgatgaatgtgagtaaagtaaattgaaaacatcctggaaaggaatcaccattctggatgccattaagacattcctgattcaggggaagaggtcaaaatagcaacattaacaggagtctggaagaagttgattctaaaccttatagatgttcaagacatcagtggaggaagtcactgcagatgtagtagaaatagcaagagaactagaattagaagtagagcctgaagatgtgactgaattgctacaatcgttgatgaaacttgaatggatgaagagttgc

SEQ ID NO: 736388 - DNA, 512 bp, Homo sapiens
ttattcaaataagtacataatctcacagctgaatactttccatgaatattctgacacatttatttaaatttttgaaattttactttatgcatgttataatggaaaatagaggatgaatctctttataattttatctcatttatgttaaatacaaagatattctagatcagaactaacaagatgaaagtaatttattaaaagtatgaaatttcattaaagtagtatttaattttttttatgttggcatgattggtctattaccaacaaccttcaaggagctaactcttttataatctttattcctggtgcttgattttcctctttatatcaatccactatgtgttccacaattctaatctcagatttaaaaaataaayggtcaaagggagtggcaaaatatttgaattgctttcagaggtttgatggtaggacccagaagacatagagattgccagaattaacataacagaggattcaatgtgctcctgtgagaagcattgattggggtggga

SEQ ID NO: 736389 - DNA, 522 bp, Homo sapiens
ttgtaagtttcctgaggccttcctagaagccaagcagatgccagcaccatgcttcttgtacaccctgcagaaccttgagccaattaaacttcttttctttataaattaccagtctcaggtatttctttatagcaatgcaagaacagcctaacacaacagatatttyctgtggagagcaggcctaggtaagtatctctaagagaaagtcctaggtagccccaacatcctcacatggctgaggaatgtattgtgcctgatccttcacaagtgttcagggcaaacgttgtgactaagctcctgcaacaagcattcattgttaaagactctgaagagaaggtggtttagtgaagggcttgagtgacttttccctaaagaagctttgcagccttagcagagctatgcttttcatgacccctttctggaaccaatttcatggttacaaattatgcacgaacatctccagttggtttcctacattaaaaatactgcctcagttttaaattttacctgaaggctggttac

SEQ ID NO: 736390 - DNA, 556 bp, Homo sapiens
tgcatacaatatacaggttgtgcagcttgcgtatattgcatcactgttaccagtattcaagcttcatattaccaaaaatcttttaaaataggattagatataacaatactcgcagccgtgtaaaatgccacttatggatcttttacttgcaatgaagaatgttgcctaaaatgttactctaggacgggttatgtaaaataatactccctcagggctctgccctaaagtctggaatacaaaggatttactgtgattaaaaaccatactagctttgcaaatacaataaatggtaaattacagataaggtataagggtaaagatagaccaagattgtttacagaaagtgactcatcamaatcaaaattgtgcttcttctcattaaatcatcttttaaaaattctcagattatcccttccctatcttgccaccactttataagaattcagtagtgggaacaagagatgactggcatccattttcaagtgattctgttctcttcatgttcttataaaactattgtcagaactgctataaatagccaaggcttctgctggta

SEQ ID NO: 736391 - DNA, 536 bp, Homo sapiens
gagttttcaggctcccttctgttacctccagtataaggtttctttttctgtagatagaaatgacataacctgggtctcacttacttttatgttggcagaaccagacttctacttacacaaacaagtaagaagagcaccagaagtttctttggcataaattatgtttgttctcccccttttttttcatgcttattatagaggacaagttcctattaatagctgcaaattcatacttggttctagtatttgttttttaattgaattgccttttggtgaccccatacactataattgatactgaatcactcttctggtgccctcctgccactaggctccaagtttctcttttctgtcttccttttkggggaggagagatttttatcgcaaaccatttagtaaacaatcccattctcctgtaaaactatagagagaaagagacagaaccttgtctggatgttatgaatttagaactgatatcttttcccaaggttcctagagagggagggaaagagagagagagagaatttaaagccccc

SEQ ID NO: 736392 - DNA, 680 bp, Homo sapiens
aagaaacaccttaggagaaaaatgccaagtttacatgtggcattttgacttggtttacatgtgggaaatagaaaattcaagccaataatttaaaccctaaagatttactacaaatatctgtatcaccaaagtaaaagcattttgcctaagaacacattaaaaatttctttaaaaattgtattcttggccrggcgcggtggctcaagcctgtaatcccagcactttgggaggctgaagctggcgggtcacttgaggtcaggagttagagactagcctggccagcatggtgaaactccgtctctactaaaaacacaaaaagtaggtgggcatgctggcatgtccctgtaatcccagctactctggagcctgaggcaggagaatcgcttgaacctggaaggcggaggttacagtgagctgagatcacgccattgcactccagcctgggtgacagagcgagacttcgtctcaaaaaaataaaaaaaaaaccaaacaaaacaaaaaataataataattgtattctgggagattgtatttattccatttctaaataataatgaaagacatgatattttagattatgtttgcaataatctaaacatagattatttttggatgttgtagcttatagtgaaagactttgagagtattagaaaaacaacgaagagaaaacacttccattc

SEQ ID NO: 736393 - DNA, 680 bp, Homo sapiens
aagaaacaccttaggagaaaaatgccaagtttacatgtggcattttgacttggtttacatgtgggaaatagaaaattcaagccaataatttaaaccctaaagatttactacaaatatctgtatcaccaaagtaaaagcattttgcctaagaacacattaaaaatttctttaaaaattgtattcttggccgggcgcggtggctcaagcctgtaatcccagcactttgggaggctgaagctggcgggtcacttgaggtcaggagttagagactagcctggccagcatggtgaaactccgtctctactaaaaacacaaaaagtaggtgggcatgctggcatgtccctgtaatcccagctactctggagcctgaggcaggagaatcgcttgaacctggaaggcggaggttacagtgagctgagatcacgccattgcactccagcctgggtgacagagcgagacttcgtctcaaaaaaataaaaaaaaaamcaaacaaaacaaaaaataataataattgtattctgggagattgtatttattccatttctaaataataatgaaagacatgatattttagattatgtttgcaataatctaaacatagattatttttggatgttgtagcttatagtgaaagactttgagagtattagaaaaacaacgaagagaaaacacttccattc

SEQ ID NO: 736394 - DNA, 631 bp, Homo sapiens
tgtggagaatgtggagagctgtgcctctacagtcattacacaggtgcctccttgtccccagtcggtatcccccttcaagttcctgggaaggcttcccaggttagcaagactctgtcaggcttactccattattttgtacactgccttacccttgtccttaattattttgcccttaagtattttgctttgtagtgattttcatatgcacacgttctccccatccgactgagactkcaggctccatattgcccctgtccttacagccagtggtctcagctgctctaggcagcctggaaatgatcgtgaatccattttttagcttttacttttagaatttttcccgagttcatcagcacacttctcaatcaacaacctcagcccccactagctatccacacctatctgtccaacccagtgaaaaccctggggagaaaagcagtgtgaagcaagaagccaacagcaagaacacacacgagcccgggatgggttggactttggtttgctttcacatttgtaggtgattgctgtgtttgatcttggacacacttcacctgctgacactgagtcttggtttccaggagattgcttttgtgctccctcccacctccccatcatcaaggggagtgggtaa

SEQ ID NO: 736395 - DNA, 631 bp, Homo sapiens
tgtggagaatgtggagagctgtgcctctacagtcattacacaggtgcctccttgtccccagtcggtatcccccttcaagttcctgggaaggcttcccaggttagcaagactctgtcaggcttactccattattttgtacactgccttacccttgtccttaattattttgcccttaagtattttgctttgtagtgattttcatatgcacacgttctccccatccgactgagacttcaggctccatattgcccctgtccttacagccagtggtctcagctgctctaggcagcctggaaatgatcktgaatccattttttagcttttacttttagaatttttcccgagttcatcagcacacttctcaatcaacaacctcagcccccactagctatccacacctatctgtccaacccagtgaaaaccctggggagaaaagcagtgtgaagcaagaagccaacagcaagaacacacacgagcccgggatgggttggactttggtttgctttcacatttgtaggtgattgctgtgtttgatcttggacacacttcacctgctgacactgagtcttggtttccaggagattgcttttgtgctccctcccacctccccatcatcaaggggagtgggtaa

SEQ ID NO: 736396 - DNA, 631 bp, Homo sapiens
tgtggagaatgtggagagctgtgcctctacagtcattacacaggtgcctccttgtccccagtcggtatcccccttcaagttcctgggaaggcttcccaggttagcaagactctgtcaggcttactccattattttgtacactgccttacccttgtccttaattattttgcccttaagtattttgctttgtagtgattttcatatgcacacgttctccccatccgactgagacttcaggctccatattgcccctgtccttacagccagtggtctcagctgctctaggcagcctggaaatgatcgtgaatccattttttagcttttacttttagaatttttcccgagttcatcagcacacttctcaatcaacaacctcagcccccactagctatccacacctatctgtccaaccsagtgaaaaccctggggagaaaagcagtgtgaagcaagaagccaacagcaagaacacacacgagcccgggatgggttggactttggtttgctttcacatttgtaggtgattgctgtgtttgatcttggacacacttcacctgctgacactgagtcttggtttccaggagattgcttttgtgctccctcccacctccccatcatcaaggggagtgggtaa

SEQ ID NO: 736397 - DNA, 599 bp, Homo sapiens
ttttatcatacatatttaagtgctcccacattcctctttactttttttttttttttttgctggtaattgctctaaaaggcttttttgtttttgctttttgcaattatttggctatgacagactcacctaatttatgattsactctgatttcttagaactctgtgtgcataattgggaatttgagggaggtgaaaaaatgcaacctacaaattgtttataaatatgaatattttatgaatattacatttaacaatcaatgaagtatgaatgtcaattaaatatttattcacttcaattttgtggttttcttttggtatcgtggaaccaataatttttttatgttttacattttaacggtttctttggcacataaaaagtctgtaggccctacacacggagcccatgatgcctagaggtaaatgctgtggactcctactacagggttcctgctttgagtttcttgtaaatttgtttctgctttaggtggcttctgatcttcccagggagggcacttctgaccattctgatctcagtttaaatgtcaccttatccaagaaggctttgttgatcagccattagaaagtagccaacaagtcatg

SEQ ID NO: 736398 - DNA, 630 bp, Homo sapiens
tttgagtcatttttcttaattcattcagccactctatatcctttaatttgaggttgagtccatttataatttagtattattattgataagtaaaaacatgctattttgttgcttgttttatggttgtaactcctttctcctttttttttttttcctttcttactgtcttcttttgtggttaagtgattttctctggtagtatgatataatattttgctttttattttgaataaaatctgttataggtttctgtgttgtggttaccatgaggcttaccagaaaacctcttatggataaaacaatatattttaaagatatgacaacttatctcagatcactaagaatagaaacaaacaaccaggcttggtggctcatgcctataatcccagcattttgggaggctgaggcaggaagattacttgagctcaggacttcaagaccagcctgagcaacatagtgagacccccatttytaaaaaaaaaaaaaaaaaaaaaaaaaaatagcagggcatggttattggtcccagttattcaggaggctgaggtgggagaatcacttgagcctgagagtctgaggctacagtgatccatgttgacactactgtactctagcctgggttaaagagtgata

SEQ ID NO: 736399 - DNA, 613 bp, Homo sapiens
gatgtgtgtgtatatagacgattaggaggagataacaaacaccaagaatgactgatgataacatttaaaacagtagacattctctaggagattgtattttaattaaaaagaagtctttaacttggatcaagaaataattatactaataattagtctgttcaaaacacaacaagaaatactttaagtgtcctcayatcgtggtaggtacttcgcctaaattaagtaacataagctttgtcgctaatcattattcactttaaaacaaaacagatgaagctcaaaaaaattgaatagctcattggggtcacagagataataagtagagaagaagggatttaaagatagattctgttgctgccactgtgtgtgtgtgtctgtgtgcgcgtgtgcgtgtatgtgtgtgtgtgtttacctttgaaacactgcattctacttgatacctggtaaataacatcatgtgaaaaaacaggttttagttgaaaactcaattagcaggagtttacaaatccacacagctaaaaaaccaaatgcatctgttctttgtattaattacagtatggtttcagagcaaagagagggctggtctgccctcctattccctgaaatattcaca

SEQ ID NO: 736400 - DNA, 625 bp, Homo sapiens
aatctactaatgcaaaagaaacaaagcaaaaatgaggacccagaaaactgtgaggagcatttttaaaatagcaaaagatagaagtaagagaaattgtatttacaattgcataaaaaattatataggaatcaacttaaccaagaaggtgaaggacttgtacaataaaaactacgagacatttatcgaggctggcggattttgtgaggccaggagttcaagaccagcctggccaacatggcaaaactctgtctctactaaaaatacaaaagttagctgggcatagtggcacatgtctatagttctagctatgtgggaggmtgagacacgagaatcgcttgaacccaggaggtggaggttgtggtgagccgagctcacgccattgctctccagcctgggcaacagagcaagactgtctcaaaaacaaaaacaaaaaacacaaaaactacaagacttttatgaaataacttaaggaagatataaataaatggaaagatatcccatgttcctgacttggaagacttaattttgttaagatgtccatactatctcaagcaatcaacagatttaatgtaaggagtgtcaaaatctgaatgatgctttttgcagaaatagaaaatccctttct

SEQ ID NO: 736401 - DNA, 551 bp, Homo sapiens
caagttaagacttctaaactatattgaatagaagtgaaaaaagcaggcatccttgtcttattcctgatattagaggaaaagcttttagtccttcaccattggttatgatgctcactgtgaattttttatatatggtattcattatcttgaggtagttttcttctgttcctagattcatgagtggttttatcatgaaagggtattaaatgttatcaaatgactttaaagcatcacttgacataatggttattcttccttattttctattaatgtggtgtattacattyttttatttttgtatgttgaaacacttttgcattccagaaattcctcttggtcatggtgtaaaatccttttaatacgctgctgaatttaatttgctaatattttgttggggacatttacatcaccattcataaggaatcttggtctataattttccctttttatactctctttaattggctttggtatcagagtaatgctgggttcatagaatgaattaaggagtgttctctctgctaattttttttttaataattgagaagtac

SEQ ID NO: 736402 - DNA, 618 bp, Homo sapiens
aatcatttacctatttaaaatgttgactttctgggctttttttttttaactgactttgaatttcttttttttttttaatttttttcgagtacctgtggttttcagttaacttttataaatatattccaacactgtggcttttctttcttaaagggatcttttgaggaacagaaggttttgtggctgtacctacttctgtagtgctgtattgttttaatatggttgctgtatattttttgtatggtattgtatcagttttgttagagaatctctttctctgaggtcataaagatatctacctatattttttgtaaagttttatagttttgacttctgacattttagaatttttatctatctaaagttgatgtgtctgyatagtaagaagttttgaataaatttcatttttttctagtatgggtgactaagaattcttatacaatttatttgaattgatcttcctctcctcagttacgtacaacactacctgaacggtaaagcaaattcaggatatcaatgggtcagtttctggagattatctttagttgcactagcagcatgatcacaatctcttaattactatagcttttataattttcttcatttctgataggccaa

SEQ ID NO: 736403 - DNA, 544 bp, Homo sapiens
gttaagaatttaaaccaagttttacctgtctccaattccttagttccgtttactaagttctattgaatttcacactatatttggccatctttcttttcctttttttttttttgagatggagtcttgctctgtcaccaggctggagtgcggtggtgcaaccttggccaatcttggctcactgcaatctccgcctcccaggttcaagcgattctcctgcctcagccttccaagtagctgggattacaggtgcacgccaccacactcagctaatttttgtatttttactagagacggggtttcactatgttggccagggtggtcttgatctcctgacctcgtgatgtatccgcctcagcctctcaaagtrctgggattacaggcgtgagccatcacgcccagtccatctttcttaatgttatgtaaatgggccaagtttgtttcccctctctctgctttttgatttgtcgttcttcctaccagaaacactccattctctttgccgttagttctttgagccacgacatggatcctaaataatggaaac

SEQ ID NO: 736404 - DNA, 594 bp, Homo sapiens
ctatgctaaataaccctacttgtatatgtagctataaaatgtctttattttagtgcattttaaaccaaaatagttaatgggaatagttgatcattttgaaaatggaaggttatagttgtttaggagaaaaacactaaaggaacatgtattacatacttagctgttgtgacatacttttcaggtgaatcttcagtgagaggttaagaagtcctcacatttcagaaatcattaacatttgaagttacagaatcctgaggtcagcagtaagtagactaaatggtacccatgaggaagtcagcacatgtccccaaaagtaaatttcttatccccttatcaygagaagcagcctattaagtagttatggtagtaaattttaaattcccctgaagaaaagattgacaaaattgaattatgaagaagagctaagaagattaaattaccagaagaagagcaaagtcttgggagtaacttctcagcagtcttcagacccagaaagttttattaagtagggagtaggaagggtacaataagacaacattgctgaatttgcaaatgtttgggctatctatatgtaaagtccaactggtgtaaaca

SEQ ID NO: 736405 - DNA, 576 bp, Homo sapiens
tttggccagagaagcaagttttttcctcagtgtgatgattgcttccctaccaattttgaagtgctctgataaaatgcataagaaataggcttgccaagataaacagtttattttttcatagaaggtcactcatttattttttttttttgcatccttgttcctgtcaattttgatataacctctcaaaatttaggcttctaaagtcatttttatttttgcttcagcctccatgagattcstaatcatagtaaataatgtaataattagtcccagaaatggtttagacaataacatttttagagcagactatgggggccctttgcagattttgaaaggaatctattttcaattacaaaaagacctttctttcataaaatagtaggaacacatttgcaactttatgttatttgtccacagacctgtttttgtacatgaatggggaagttgtaaatgttgttcatgtgaatgagcagagtgaagtttaaaaatagtttcagtattctttaaatatattggagagagatggaatggatgtgaatatggaaaagttttctggatttcttctccaaataatgc

SEQ ID NO: 736406 - DNA, 652 bp, Homo sapiens
gttaataaaatcatgtttaatctgaagtaaatatagtctgatttgaattggatgaaattgtattaggaacccaagggtttctggtgactttaaatggaaattttttgatgtttatagtagtattcagtgagtactgagattttttcttttatttttgcttttacttttagttgacacgatattttcttttgactctcaatggcatttttttcttctttttcttttttgctaaatgtatctttaggtgaattaaagaatagactamacctttttatcaaaaatattgtgctgtgaaagctttttaaagtcagtgagctttgtcatctgacccttcttttagaaaataggcctttagctgactcatgttatgtatgtgtgtgtatatatatatatatatatatagagagagagagagagagagagagagagagagacagagagacagagagataatcttatatagcatgagttgctccaagaattaatgatatatacacacatatataaataacctatgcctgatggtaaaaatataaactgtcaatttcttcttttagggtcttagctgtctagaatgttaataaaatcatgtttaatctgaagtaaatatagtctgatttgaattggatgaaatttttaggtttattacttt

SEQ ID NO: 736407 - DNA, 600 bp, Homo sapiens
tgagaattttttttttttttttttttttatgagacagagtgtcgctctgttgcccaggctggagtgcagcagcacgatcttggctcattgcaagcgccgcctcccgggttcacgccattttcctgcctcagcctcccgagtagctgggactacagatgcycaccaccacgcccggctaattttttgtatttttagtagagacggggtttgaccgtgttagccaggatggtctcgatctcctgacctcgtgatccacccgcctcggcctcccaaagtgctgggattataggcatgagccactgcacccggcatgaaaagtattttttttaatactgctttttgtggcaagttgacccaaaaagttgaaaggaggtgaaatcaaagcctttatttttatttatttattttcagacggggtctcactctgtggctcaggctggagtacagtggcatgatcatggctcactgcagccttcaccatctgagttcaagctacccttctttaagaaatcaaaacatttattaggaaaaaaactatgattcatagactgttgcagatagacaggaaaatcatctttgcagtatatgatagcccagatt

SEQ ID NO: 736408 - DNA, 624 bp, Homo sapiens
agaaattgtaaaaggacttcataaaaagaacattatctttcctcgtgatgccaccttttaatgatagctgtcagccttttcacttattataaaaaacaaattttctgtgcgaggtgaaaatgttcactgaaatgaatttacacaccctctcaaattccttttggaataggggaggatgcaaataagcaaatagtaataaaactaatttgcatactctaaattgttggtcttaatggtactgatggaaggtttccaatttgtcacaaagcagtgacttttaagaacataaattatattgaaatgcagtttatttaaaaatatagtgccaaaatgcaatattggacaaatttatccctgtttcttttgttgaccaaataatagactgggattcatgattttataagcagaccttgatgatcttatcagtttgatatrtttccagtgttgtagatgctaatacataaagagcaaaaacagttttgatttggaatcatagtacctaattgatctgtttctttttctgtattatctgtgggttctcaaatgggctttgtggaccacctgtctcaggagtcatctgtgatgctttttaaattaaaacatagatttctgggccccaccaca

SEQ ID NO: 736409 - DNA, 618 bp, Homo sapiens
atcttataggactgtcctcagagtttccctactaaggggtgggaaagctgagttatctatctaccaaatcccaaacctcactcgttgagcgttgctgtggggacattaaacaccagcttttataggctgcccatacaatggctaaacaagcttctagagaaagctgttaggtcaagaagcggaacagcatggacacaggtggaggccrtcagtgtagatgggtgaactcagaggcaggacatctacaatgtgttgctacaaaggcaaagagcaaaaggaggatgacagcagacctgccacatttaaaaaagctttcctatgagtcctccctacccaatgccccccttttaggtatcattgactataactgaatcacacagccacccctagctacaaagcatcctgaaaatatactttattggggttattatgaggatgagtgggttagttgctagcattgcctgccataccaacctgtctttttaattgttcttgtttcttggttcataaggttcataaaaataggcttgggtgcaagcctatttttcctctaagtctacatattattaaaatactatttgaaaatattttatagtcagttttactgcacattattat

SEQ ID NO: 736410 - DNA, 618 bp, Homo sapiens
atcttataggactgtcctcagagtttccctactaaggggtgggaaagctgagttatctatctaccaaatcccaaacctcactcgttgagcgttgctgtggggacattaaacaccagcttttataggctgcccatacaatggctaaacaagcttctagagaaagctgttaggtcaagaagcggaacagcatggacacaggtggaggccatcagtgtagatgggtgaactcagaggcaggacatctacaatgtgttgctacaaaggcaaagagcaaaaggaggatgacagcagacctgccacatttaaaaaagctttcctatgagtcctccctacccaatgcccyccttttaggtatcattgactataactgaatcacacagccacccctagctacaaagcatcctgaaaatatactttattggggttattatgaggatgagtgggttagttgctagcattgcctgccataccaacctgtctttttaattgttcttgtttcttggttcataaggttcataaaaataggcttgggtgcaagcctatttttcctctaagtctacatattattaaaatactatttgaaaatattttatagtcagttttactgcacattattat

SEQ ID NO: 736411 - DNA, 618 bp, Homo sapiens
atcttataggactgtcctcagagtttccctactaaggggtgggaaagctgagttatctatctaccaaatcccaaacctcactcgttgagcgttgctgtggggacattaaacaccagcttttataggctgcccatacaatggctaaacaagcttctagagaaagctgttaggtcaagaagcggaacagcatggacacaggtggaggccatcagtgtagatgggtgaactcagaggcaggacatctacaatgtgttgctacaaaggcaaagagcaaaaggaggatgacagcagacctgccacatttaaaaaagctttcctatgagtcctccctacccaatgcccccctyttaggtatcattgactataactgaatcacacagccacccctagctacaaagcatcctgaaaatatactttattggggttattatgaggatgagtgggttagttgctagcattgcctgccataccaacctgtctttttaattgttcttgtttcttggttcataaggttcataaaaataggcttgggtgcaagcctatttttcctctaagtctacatattattaaaatactatttgaaaatattttatagtcagttttactgcacattattat

SEQ ID NO: 736412 - DNA, 613 bp, Homo sapiens
gaattcaccagtataaatggacaaggcaggaataaattgtttttcactgactagtgaaatcacaatgcaagctaagcaatattacatatagggtgatagctcccgccacaattctctctctcaggtaaaaacaattgaatgtcttctatcaacttttcactatttccatataaaatattctattgtttaaacaatatttctggatatgaaaaagagacagttatttaaataattcccagtcatttagcttctattttacaattccttggtaatgttagagttccctaaccagacactctctaacagactatagttccccaaagatgggccttaaaagatggattctttaacaactgtaamagctgcagcaacaaccgtgaatcttcaagtgtagctgttaagataagatagtttgagggcaggtataataaaaggaaaaagtttaaatatttatttaaaaaataataattcctacttttgattgcctgttatgtgtcaaacattcttattaacactgataatctccttttggtgtaaataaattaactatgagagcgtagttaatacatttttttaagacaatatagctaaaatatagcagaaccaatcatca

SEQ ID NO: 736413 - DNA, 568 bp, Homo sapiens
tagcatccataaatgggttcttgcctactattagcaacacttgatggattaccagaaagagatattgctctaaaagtgaacattttttcacacccagaatggattctggcacctgattaaaaaccacagtgttagagctgaacagctaatcttatgtctgcattacaagcaggaaggaggaasgtagagacaagagcacacaagacatttgtttccccttaaaaagcttcccccagccccatccagtgacctccacttacacctttgtgagaaatgggtaatatgcatcccctagctccaaggaaggctggggaggtgattattttgttctgggaacattgccactctaaacaaaatcaaggatttgttagtaaggaagaagaggagacagatatcgggtagaaagttgttagtttctattaaccttgagtaagtccattcaactttcagagcttcagttttctcttctataaaatgactggtgttgactaaatggtctctaaccccttcctgttcttaaccctaaaatctctgatctgaggatccctttgccatctggccgcattag

SEQ ID NO: 736414 - DNA, 609 bp, Homo sapiens
ttatttacaaatgtgttaatttccaaattatttcaaatttccaaatagtttagattttctatttttctgtgtgttgatttctaatccaattctgttttgagcaaagatcatcctttgaatgattttaatgtttttaaatatattcaggctttttartagtctaatgtggaagtcagcaactttttcttaaagggtaagatattaatgaacattttagacttgaagccatataatttctgttactacttggcttagtacgtgttgctacaaaagattagcctgggactggataatttataaggaaaagaggtttatttggttcatggttctgcagactttacaggaagcatggtgccagcatatgcttccagtaaggcttcaagaagattccacttatggcagaaggtgaagggaagctggcatgtcacatggcaagagggagcaagaaagaaaggagggggggggtgtcatgctcattttaacaatccgttctcatgagaactaatagaacaagaacttaactcattaccacgaggacagcaccaagatactcatgaaggatccacctccattaccagaatagctcccactggaccccacctccaacat

SEQ ID NO: 736415 - DNA, 611 bp, Homo sapiens
gtgcagttggtttgcaattctattataaatactgcatgtgtatctgggtggtttgcaattttaaatcacgagcttgaaccaagatctgaaggatgtgaaagaaaaccaggtgtatgctgggggtggaggatgatggaggaagattctatgtacaatgaacagcatgtacaaaagccttgagatttaggaagaactattcagagwaaagaaagctgaactgaggtaaagaagtgacaggaagaaacaaagatggtgaaggaaccagaactaattcatgaggaagtaggacaagtggaatgtgacgttttaagaaagaagtggggaggttaatagctcaaatgcttcaataaatataagatgaggaatgagaaaaagatattggatttgaaatacagatcactcatgactttcaaagacaaacttcctaagttgctaaaggcttacacagagaattacagaacaagtcatttgtgaagaaaggtgaatagtacatttggaacacttttccaaagacagtaacaataaaaaagaaaaagagagaacacaatgacttgatgggttgccaaactgcaggactactttttagaaagaggtttcacttgctagtatag

SEQ ID NO: 736416 - DNA, 611 bp, Homo sapiens
gtgcagttggtttgcaattctattataaatactgcatgtgtatctgggtggtttgcaattttaaatcacgagcttgaaccaagatctgaaggatgtgaaagaaaaccaggtgtatgctgggggtggaggatgatggaggaagattctatgtacaatgaacagcatgtacaaaagccttgagatttaggaagaactattcagagaaaagaaagctgaactgaggtaaagaagtgacaggaagaaacaaagatggtgaaggaaccagaastaattcatgaggaagtaggacaagtggaatgtgacgttttaagaaagaagtggggaggttaatagctcaaatgcttcaataaatataagatgaggaatgagaaaaagatattggatttgaaatacagatcactcatgactttcaaagacaaacttcctaagttgctaaaggcttacacagagaattacagaacaagtcatttgtgaagaaaggtgaatagtacatttggaacacttttccaaagacagtaacaataaaaaagaaaaagagagaacacaatgacttgatgggttgccaaactgcaggactactttttagaaagaggtttcacttgctagtatag

SEQ ID NO: 736417 - DNA, 496 bp, Homo sapiens
gggtttaaatcatgccgagttcattccggggcctgagcggggccgaagctcatgggaggatgagtgggatgcttgccgcaggcttccgtgggagccaggtgggaagcctgaggcccaagggcagctctcttctccagcctgctcctcctccaagccaccctgagtcattctttaatggaatttgtggctgttttaattcttaccggcacaaactttgcatgtcctttataaatatttcattctcttccagcaggaaatttctcagtgcctaaatacttgtatggccatctccttccsgtgctgggcagcctgtcccagggaactgtgggctgggggagacagccatgggtacccctcacctgcatgacagccgctccagctcctggaatagccaggctccctgggagactggggttgcagtgacagaagagaaagaggcccagggagggaggtgaccatccacagtccctccgagggcacggtcagggctcaaacc

SEQ ID NO: 736418 - DNA, 496 bp, Homo sapiens
gggtttaaatcatgccgagttcattccggggcctgagcggggccgaagctcatgggaggatgagtgggatgcttgccgcaggcttccgtgggagccaggtgggaagcctgaggcccaagggcagctctcttctccagcctgctcctcctccaagccaccctgagtcattctttaatggaatttgtggctgttttaattcttaccggcacaaactttgcatgtcctttataaatatttcattctcttccagcaggaaatttctcagtgcctaaatacttgtatggccatctccttccggtgctgggcascctgtcccagggaactgtgggctgggggagacagccatgggtacccctcacctgcatgacagccgctccagctcctggaatagccaggctccctgggagactggggttgcagtgacagaagagaaagaggcccagggagggaggtgaccatccacagtccctccgagggcacggtcagggctcaaacc

SEQ ID NO: 736419 - DNA, 590 bp, Homo sapiens
ctgattctaggatggcatcatccaggccccccttggcttccctttggagttggtcagtgggcgacactggcaaaagatgggagcgtagacagaaagatatcaggatacctatcaaacctcaatcccttgctgccttgtcatggagtggtccatctctttctggggtctagcaagacctccacccccagacccagacccctgcagcttccartgtggaaagaggcttcccaaggttcctagaccccgggtgccccactctcccttcctggttcccttaactctgccttcatgtctattaatagtagcttcaggtactctctccagggaaatctttggacatccatctgcttcctgttagaggcttgatcaactgctaggcctggaggactgtcagttgggggactgcctagagtggtggggggtagcttacaggaattaaggcaggggtgagcagggccctgccagctgttgcaaaacaaaaacaaaaacaaaaacaaaaaaacatgcaaaaacctatcatacctcatgagcctttgaaaggctcagccaggcctggcaccattgcatgtgtatgggagaaaggctgatga

SEQ ID NO: 736420 - DNA, 590 bp, Homo sapiens
ctgattctaggatggcatcatccaggccccccttggcttccctttggagttggtcagtgggcgacactggcaaaagatgggagcgtagacagaaagatatcaggatacctatcaaacctcaatcccttgctgccttgtcatggagtggtccatctctttctggggtctagcaagacctccacccccagacccagacccctgcagcttccaatgtggaaagaggcttcccaaggttcctagaccccgggtgccccactctcccttcctggttcccttaactctgccttcatgtctattaatagtagcttcaggtactctctccagggaaatctttggacatccatctgcttcctgttagagscttgatcaactgctaggcctggaggactgtcagttgggggactgcctagagtggtggggggtagcttacaggaattaaggcaggggtgagcagggccctgccagctgttgcaaaacaaaaacaaaaacaaaaacaaaaaaacatgcaaaaacctatcatacctcatgagcctttgaaaggctcagccaggcctggcaccattgcatgtgtatgggagaaaggctgatga

SEQ ID NO: 736421 - DNA, 590 bp, Homo sapiens
ctgattctaggatggcatcatccaggccccccttggcttccctttggagttggtcagtgggcgacactggcaaaagatgggagcgtagacagaaagatatcaggatacctatcaaacctcaatcccttgctgccttgtcatggagtggtccatctctttctggggtctagcaagacctccacccccagacccagacccctgcagcttccaatgtggaaagaggcttcccaaggttcctagaccccgggtgccccactctcccttcctggttcccttaactctgccttcatgtctattaatagtagcttcaggtactctctccagggaaatctttggacatccatctgcttcctgttagaggcttgatcaactgctaggcctggaggactgtcagttgggggactgcctagagtgrtggggggtagcttacaggaattaaggcaggggtgagcagggccctgccagctgttgcaaaacaaaaacaaaaacaaaaacaaaaaaacatgcaaaaacctatcatacctcatgagcctttgaaaggctcagccaggcctggcaccattgcatgtgtatgggagaaaggctgatga

SEQ ID NO: 736422 - DNA, 556 bp, Homo sapiens
ctgctcacccacatggttggcagttgacgctgagtgctcagctgtcagctggggtaaacactagctgagttcacaagacctcttcctggagcttggacttctcacagcctggtttctggggtctcagagtgtcccaagagtgagccatccaagagccccatctctttaatccgaggacagaatcccccaggtcagcgtggcccatcctttttagtatttggtttgtgttaagctcttgaagtttttgctttcccctcaggtctgtatgcgggaatcccctggaggatactcaggtaaaaacagaatcgttctattcagaaatgtttctcagaactggacggarccaagggaaagcttagaagctgaaaatacagagtagcctcttccttcttgcaatcagctgaatgcaactttggggtttccttctttcccagaactcactcagcttgtccactctgtaccaaactgatccttgtaagcagaaggtcatgctggccttggacccaggagtccatttagtttatcttctcacaggtgtctttgtctgatagaggca

SEQ ID NO: 736423 - DNA, 623 bp, Homo sapiens
aagcagggactaaacatgttagggataaaaaccccttttccctcctttgttcagtgttctcccacagtggccagaagtgtgagtggcacccttctgcagaagtaaatttgccttgctgagaaaacctttgagtgatctttttccttgtgaccctgagctcttgtttctaacaataggcttctagcttcccaaccatggaacctcccatggttgtatgggaccataatcctcatgtccccacacgtatagtgacaaaacatggagacactaggaattacagagacagatattctggctaagagattaaccagaacttaatgtgtcaaattgagccataatggaccactaatacttaaatttcatgaacaagtcctcaaattctgtagttacttgtttaattttacagcagtactgtaatkctggtgcccagttagtactttgaagttgagttgcaagtttcccgaggacagtgaaggttcctaatggcctcctgtgttcctgctgaggccccatcatcaactctcatcccaggaatagctgacctggttttattactaaaggggatacctagaggcaacagtgtcacatttacttctcagattaaaaaccagcattagagaatt

SEQ ID NO: 736424 - DNA, 573 bp, Homo sapiens
ctaacagcccagatcaccaacagtctagtggcatttctagaaccgctgagaacctgggctcccagggctcatggaccggtccccctcattttctgagaagaagtaagcatctcagtttatattagcttttgatatcagtgttattagaaatccctagcataactaaaatatttgacattagagtttagagggggaaataaagtaaaaattaacctaaagaaagtcagaaaggaggatgactgtaacttagtatgtaagataactagaaagcacataatatgttagagttaattaccagtaattgtaaatacaattaatgtccagttgaaagcaagttgttgtctgaggttttttcttgagacaggttctcaactctgttgcccaggctggagtgcagtggcamaatttcggctcgctgcagcctcaacctcctggcttcaaggaattctcccacctctgcctcctaagtagctgggactacaggtgtgcgctgccacacctggctaattttttgtgtttttagtagagacagggtttcactatgttggccaggctggtctcaaactcctgacc

SEQ ID NO: 736425 - DNA, 573 bp, Homo sapiens
ctaacagcccagatcaccaacagtctagtggcatttctagaaccgctgagaacctgggctcccagggctcatggaccggtccccctcattttctgagaagaagtaagcatctcagtttatattagcttttgatatcagtgttattagaaatccctagcataactaaaatatttgacattagagtttagagggggaaataaagtaaaaattaacctaaagaaagtcagaaaggaggatgactgtaacttagtatgtaagataactagaaagcacataatatgttagagttaattaccagtaattgtaaatacaattaatgtccagttgaaagcaagttgttgtctgaggttttttcttgagacaggttctcaactctgttgcccaggctggagtgcagtggcacaatttcggctcgctgcagcctcaacctcctggsttcaaggaattctcccacctctgcctcctaagtagctgggactacaggtgtgcgctgccacacctggctaattttttgtgtttttagtagagacagggtttcactatgttggccaggctggtctcaaactcctgacc

SEQ ID NO: 736426 - DNA, 615 bp, Homo sapiens
accaatggaatctgagcagaagaaccttgtatcacttcaaacagaagttttaagagccaataagtggttcactgagctctccactgcccaccccccaccccttgcctactgccatcaccttgcaagagatagtgatgttctggacggagcctgctctatcagcctgggtcctagagtgaggatgacatgagacagagccacagccaacccacaatggacgtatggcaaaagtaagaaaacagcctttggtctgtgagctattgagttgtccagggctttgttgttgaagtataacctaccctatcctaactaaagaaacagggacttttttccccaacatactttaaatagaaccaattagctcttgttggcatcactgaaatcaaaagcagtgggactggaaatacagggtgggggtgtctcatgtcatgagaagatgctggacctgamtatgtcttggtccctccctgggcaagtgactagatataaccccatctagtcaggccacagtctagacaagtaatcattatcccacccaccaatgccgtgtccaggagctgagcatcgtctatgagatgtcttaccagaggagatgatagaagagtgcaggtctgt

SEQ ID NO: 736427 - DNA, 576 bp, Homo sapiens
cttctggttagattaaggttatgaattattagcaagaatactataagaggagaggggagcaagaggtccaaatagaagcctccattaatcatcctcactgcaggaacaccaaattgaaaaactattcacaccaaaaaagcaccttcataagaatcaaaaatcatcttaggcagcagttcagccacagtcaggtagagcatcaagcrgtctcctggggtccttgattctaggccttggctcttggaaagtaatgttggacctgccctgggccagaagaaagcccactgccctgaagggagagtcctaggcctggcagcatccaccacaaactgatggaagaaccctcttgggccttaaataaacatcagcagtagcctggcagtactcgccatgagcctggggtggtggtggccatggggagaactccttagcttgtggaaaggggagagaagagtgggaagaacttcctcttctggctccggtgccagctcagccacagtagaatagagcaacagatagattcctaaggttctagactccaggccctggctcctgcttggcatctctagatccacc

SEQ ID NO: 736428 - DNA, 651 bp, Homo sapiens
ctgtctacctcaaaattgcaaagatattccattgtttttttcttctagaagcacaatagtttggcttttatgtctagtctataatccatcttaaattaatatttgtgtatgacgtgaggtagggatcaatttttccccatatggatattaagttattccagaaccatttgctaaaaagactttccattcctaattgtgttgttttgatgtcattgttaaaaaccaactggttgtacagtatctactttttggacttttgttttttccattgatttatttaccyagtatcctaatgccagtatcatactgtctagataactatagttttaaagtaattcttaaagtcagacagtattagccctttaattttcatctcctttttcatggctgctttcagctattctaggtcttttacatttccaaatatattttcaaatcagcatgttgatttctatcaaaaaagtctgacatggttttaactggatattcattttattaaatctataaatcagtggttcacaaaatatgggctatgaaccatcagcatcagcatcatccagcaacatgttataaatgcaaatattcaggccctacctcaaaactaatggatcaaaaactctaagcttggggtccagcaatctgtgttttaac

SEQ ID NO: 736429 - DNA, 651 bp, Homo sapiens
ctgtctacctcaaaattgcaaagatattccattgtttttttcttctagaagcacaatagtttggcttttatgtctagtctataatccatcttaaattaatatttgtgtatgacgtgaggtagggatcaatttttccccatatggatattaagttattccagaaccatttgctaaaaagactttccattcctaattgtgttgttttgatgtcattgttaaaaaccaactggttgtacagtatctactttttggacttttgttttttccattgatttatttacccagtatcctaatgccagtatcatactgtctagataactatagttttaaagtaattcttaaagtcagacagtattagccctttaattttcatctcctttttcatggctgctttcagctattctaggtcttttacatttccaaatatattttcaaatcagcatgttgatttctatcaaaaaagtctgacatggttttaactggatattcattttrttaaatctataaatcagtggttcacaaaatatgggctatgaaccatcagcatcagcatcatccagcaacatgttataaatgcaaatattcaggccctacctcaaaactaatggatcaaaaactctaagcttggggtccagcaatctgtgttttaac

SEQ ID NO: 736430 - DNA, 623 bp, Homo sapiens
tgcttaccatgatgatgaatagtaaatgtggaacaagtaccagagttggaaaagcatcattttctaactatcatgactagttctgataaaaattattaatggaaagggattgtttttatttagaaagtttccctttcttctgcatatagtgttctcacacatttgaaagctgcgcaagatattatttaaaggatggttagaaataagatttctaatattactacttacaaatactgccttcctagggtttcagtgaccctgtaggtgagtatgactcttgaaggtacctgtggcaggagacaccaatggttcctaagaatgaaacagcagactcaggcatctctcctttcctgagccactattcctttcctaatccattcacacaggccaggagagatatttgggcagcctttaatctttacatttcagagtttcagcgctcataaaatatctaagacmgtggaggagggattttcttccactagtaccaaatcaaaggtagagggctatagagctgtaacccacaagcatatataattcttggtgatagttttcaaccagttgtctacttctagcccaatattttacattgatggggtagcatgaggagagataagtggaat

SEQ ID NO: 736431 - DNA, 593 bp, Homo sapiens
ctctccagaaataagaatcttcattcttttttctcctatatttgatcagttgggagagctcactattttaccctcattatttgtacccagttctatctatgagtggttcccaaatgatcatagagatccaaaatgtactaagcattcacagctacaggatccttctcaagggagtaatccaaagagggaaaaatatttaccctcattatttgtacccagttctatctatgagtggttcccaaatgatcataaagatccaaaatgtactaagcattcacagctacaggatccttctcaagggagtaatccaaagagggaaaaacaaatctaagcaaattcataaataacaatgactaagtcaaatgaaggatttaagtctaaaagaagttaggtttctayagtacataatctcacatttcttgtgcatactaaaaatgaactcaagattaatagaataggaaactattgtacattcagaaaatacaaggtaaataacttttcacttcttttatttgttaaaatagtcacatccatatacatgaaaagatttgaccataatgcattcattgattgtggctcttgccatctcgtgg

SEQ ID NO: 736432 - DNA, 593 bp, Homo sapiens
tatgctaaataaccctacttgtatatgtagctataaaatgtctttattttagtgcattttaaaccaaaatagttaatgggaatagttgatcattttgaaaatggaaggttatagttgtttaggagaaaaacactaaaggaacatgtattacatacttagctgttgtgacatacttttcaggtgaatcttcagtgagaggttaagaagtcctcacatttcagaaatcattaacatttgaagttacagaatcctgaggtcagcagtaagtagactaaatggtacccatgaggaagtcagcacatgtccccaaaagtaaatttcttatccccttatcaygagaagcagcctattaagtagttatggtagtaaattttaaattcccctgaagaaaagattgacaaaattgaattatgaagaagagctaagaagattaaattaccagaagaagagcaaagtcttgggagtaacttctcagcagtcttcagacccagaaagttttattaagtagggagtaggaagggtacaataagacaacattgctgaatttgcaaatgtttgggctatctatatgtaaagtccaactggtgtaaaca

SEQ ID NO: 736433 - DNA, 633 bp, Homo sapiens
tgaatctgatcctccatgcagatgatgccgtatttaccaagacatcgagcaatcataagcattaaatgtcaaagcaattcacttcttattgattttgtcataaccacgctggtagattagttcatttactgaattcagatttgggtacccccatgcaatgtatggctctacaatcctcagcatgttaattgaagccttgtcaagcttcacaaatgttctgttgaaaatttgacgaaggcgaaggagccgcaacacctttcagaactttgggctcacaccattgatacctctgatcctgatgacaaactccaatttgggttctgcaggtacatagaagttgccagcttttcttgccatccttgtcattcgaatttcagttctgtacatctgcctatattccttrgaatagtgcatggctttttcctaggtaagcttcctcctcacctttcaaagcatcttttgggcaaacttctttctcaggcacttgaccttcagctctgcaaaattctttcgctttttcttaagggtttctggcacagcaggaaacttcttcttctcttctataacctccatggttccagctgaaaaagaggcatgccccgttctttctaatgccatcaaattagacaatca

SEQ ID NO: 736434 - DNA, 565 bp, Homo sapiens
atagtgagagactaacagtaataactaataataaaatagcacaactctaacaagatacaatcgtctcttagtacctgtgggaatttggttccaggaccctccacagatatcaaaatctctgtatactcaagtcacttttataaaatgatgtggtatttacatataacctatgtacatcttaccatgtactttaaattagctctagattacttataatacctaatacaatgttaaggctatgtaaacagttatactgtattgttcagggaataataacacaaaatgtctataygtgttcggtgcggatgcaatcatcctttttttctgaatatttttgacctgaggctgattgaatccatgggtgcagaatccatagatctggagggccaaccgtactgcaataaaagttatgtcaatatggtctgtttctctcaaaatatcttattgtattgtacttacctattttcagaccactattgaccacaggtaactgaaactcgtgaaagagaaaccgaggataaaagggacggctgtatacacctgtgtgtgtatccaaagcatggta

SEQ ID NO: 736435 - DNA, 513 bp, Homo sapiens
cttaacagagctcaagcgctgtgttgagaggaccctccttttcaggatcctttgctgtcttcagagttggcaggcaggaatgtttaagtctgctgaagctgcgcctacagccaccccttcccccaggtgctctgtcccagggagttgggagttttatccataagcccctgactggtgcttctgcctttctttcagagattccctgcccagtgaagaggaatccagagargcagtctggccacagccgctttgccacactgtgttgagttccacccagtccttattactgttgggggaaaaccacctactcaagcctcagtaatggcggacacctctccccgcaccaagcttgatagttccaggttgacttcagactgcagtgctggcagctagaatttccagccagttgttcttagcttgctctgtgggagtgggacctactgagtgagaccacttggctccctggcttcagccccctttccaggggagtgcatggttttgtcttgcctgggt

SEQ ID NO: 736436 - DNA, 643 bp, Homo sapiens
caaactgacacaggaacagaaaaccaaacaccacatgttgtcactcataagtgggagttgaacagtcagaacatatgggcactggaggggaatatcacacagtggggcctgtcaggggttgggggtttgggaagggataacattagaagaaatacttaatatagatgacgggttgatgggtgcagccaaccaccatggcacatgtattcctatgtaacaaacctgcacgttctgcacatgtatcccagaacttaagtataattttttaaaaagaggctgggcacggtggctcatgcctgtaatcccaccactttgagaggccaaggtaggtggatcacgaaggcaggtggatcacaaagtcaggagttcgagaccagcctggccaacacgatgaaaccccatctctactaaaaatacaaaaattagctaggcgtggtggtgagcgcctgtagtcccagatactcaggaggmtgagccgggagaattgcttgaaaccagaaggcagaggttgcagtgagctgagattatgccactgcactccagtgtgggcaacaagagtgaaactccgtatccaaaaaaaagaaaagaaaagaaaattagaaacttagttcatttggataaggtcaataagcatcccggatcc

SEQ ID NO: 736437 - DNA, 615 bp, Homo sapiens
actgtgaatatttcagggaataggagggcagaccagccctctctttgctctgaaaccatactgtaattaatacaaagaacagatgcatttggttttttagctgtgtggatttgtaaactcctgctaattgagttttcaactaaaacctgttttttcacatgatgttatttaccaggtatcaagtagaatgcagtgtttcaaaggtaaacacacacacacatacacgcacacgcgcacacagacacacacacacagtggcagcaacagaatctatctttaaatcccttcttctctacttattatctctgtgaccccaatgagctattcaatttttttgagcttcatctgttttgttttaaagtgaataatgattagcgacaaagcttatgttacttaatttaggcgaagtacctaccacgatrtgaggacacttaaagtatttcttgttgtgttttgaacagactaattattagtataattatttcttgatccaagttaaagacttctttttaattaaaatacaatctcctagagaatgtctactgttttaaatgttatcatcagtcattcttggtgtttgttatctcctcctaatcgtctatatacacacacatc

SEQ ID NO: 736438 - DNA, 591 bp, Homo sapiens
aggagttcatgtttaaattatttattacaccctccaggaaccatccaataaatgatacaacttaacatccacctgtttaacatgatattccaatctgctacttttctttctgccaactgcaagcccaagatgaggtttagaataacctgtgcctagaaaattaaaagacaaaaaaggaagaaagtgtgccctccagtacagtcctcatgtctgagtctatttttcattctttgttttgcacagaattagggagtcacagatacagacggtctgacataaagatgcaaaatgtgccagagtcatggtggggccagcggtgattgatcaggctggagcctctgagaaggtgagcaagctgggaaagggccggctgggrgcaggactgggtgcaagtggcgtctgattgggataagctgaaaacacccaaagtggccagtgcttaaggtcaggcacaccctcttctccaaagggacacttgaagatcccttaatccaagacttccaaccagaaactgtcatctgacacagcaataggtcccctccccttggatcttcctgctagctagtgttccctctgtcctcctgagcatct

SEQ ID NO: 736439 - DNA, 630 bp, Homo sapiens
acacacactcttaactttaagcaatacttaactgatacttccaactcccatctgaaaacaaatgtaccattctagacttcccactttccatatctgtaaaaccctttcctaacagtgaaaaaccttgctcgcattatatactaaatacatttattatttgctactggtttwaaaaaaatggtgtttgaagttaaagaagttcccttctatttggttctcctagtgtaagaattttttcttacactaataaatgaatggatattagatttttaaaatacttttcttatatctattgagatgattatatgacttatccacttaaaattgttctgtggtgaaatacatcaagagacttctagtggcaaacaaatatagtttgagataaatccaaattgttatggtttatcttttattaatagactgctaaatatagtttgctaatttttgcttaggacttttgtatttatgtacaaactggcatttaaaaaaacattcttaccaggttttggtgtcaagtttatgttattctcatcaatatacccactttttctggattctggagtagttcatatgagatgaaaattgttgttgttggaaaatttgttagtacccactggtaaaatatctgga

SEQ ID NO: 736440 - DNA, 630 bp, Homo sapiens
acacacactcttaactttaagcaatacttaactgatacttccaactcccatctgaaaacaaatgtaccattctagacttcccactttccatatctgtaaaaccctttcctaacagtgaaaaaccttgctcgcattatatactaaatacatttattatttgctactggtttaaaaaaaatggtgtttgaagttaaagaagttcccttctatttggttctcctagtgtaagaattttttcttacactaataaatgaatggatattagatttttaaaatacttttcttatatctattgagatgattatatgacttatccacttaaaattgttctgtggtgaaatacatcaagagacttctagtggcaaacaaatatagtttgagataaatccaaattgttatggtttatcttttattaatagactgctaaatatagtttgctaatttttgcttaggacttttgtatytatgtacaaactggcatttaaaaaaacattcttaccaggttttggtgtcaagtttatgttattctcatcaatatacccactttttctggattctggagtagttcatatgagatgaaaattgttgttgttggaaaatttgttagtacccactggtaaaatatctgga

SEQ ID NO: 736441 - DNA, 459 bp, Homo sapiens
agggggcagtactgcatcccatgaaaaatcattgctctaaggcaggtttcttaacctcagcacctttttctttctttctctttctttctttctttctttctttctttctttctttctttctttctttctttctttctttctttctttctttctttctttctctgtctttctctctctctctytctttctttctttctcctttcatattttgggtcaggtaattctttgttgtgggggctgtcctgtgcattggaggctgtttagcagcatctctggcttctaccccctggatgtcagtgtactcctcaagttgtgataaccaaaaatgactccagatgttgccaaatgtctcctggagggtaaagttgccccaggtttaaaagcactactctgagatctctatcagctccaaaaatctgtcatgagaatgatacagtattgattaatatgcaaacattg

SEQ ID NO: 736442 - DNA, 572 bp, Homo sapiens
tatcatcctgggcttatcttctcttcccttttccttttagacttagtgcccaagatatgtgtaattaatattttacaggaatgcatgaaatcccctactgcttgggaaaaaacaatgaaacatcagattttaaagaaactcccaaagggctagaatccagttttgaacccagatggaattttccacatggcttagaaaatatataagtatatatattttatatacttgctgttttctgagcatttcttacttgacaatggttacaactgtagcwttctttttgtgagtttgcattaataacattgctttggttttaacttgcttactgtaacaagttattatatttaacttagtccttatcgactggagggttccacctcacctcaccatgtgatactgaagctgagctatttatattgttttaactagacatagtataaaataaaacaggttttcttgtaatttatatcattaaaacatataaattatctttcagcttttaggaaaagaaaaaatcagggcattcgattcaaatgggataattcacagcccgcagattataggggagtaat

SEQ ID NO: 736443 - DNA, 563 bp, Homo sapiens
cctattcctgatcgatttcaaataagcaatgtagtatattattgcttttatgtgcttttacagcacatgctgtgcaagataattgactccatgacagatgtctatatttcagaggaaaatttatttgttaaagaacaaacatgtattacyttaacatggggctattcattatattgcccacaaggtgctttttgatgacttctaaattgaaattaatattttctcttgtcgttctgaatatgcataagcaaatttgactgtttgatataaccattttgaagcttattctgctacttgaatgtaaccttctgtactcttagatcatgtttgaagtgctgggaaatgagaaagtgtgcatttgttttttttttaattttcaaagaagcctgtaggcctgaacagttgccaagttgttcagagtaagttctgtccatcagacccatctttacataaaatgactatgagaaaagtcttaaagggtacaggaaatattttccatgaatcctcctttactctctcacttctgcttgaaatgtcactctttttcaaggcaaacactagta

SEQ ID NO: 736444 - DNA, 632 bp, Homo sapiens
tgactctggaaatttgactttaaaagttacgagacttggtgagactgagtgtggtggctcatgcctgtaatcccaacactttgagaggctgaggcgggagtattgcttgagttcaggagtttgaaaccagcaacatagtgagaccttctctctacaaaaaatattaaaagaaaaaaaaagccaggtgtggtggtgcacgccggtagtcccagctactcaagaggctgaggagggaggatctcttgaaactgggaggttgaggctatagtgagctgtgatcatgccaccacactccaacttgggccacagagagaggccctgtctcaaaaaaaaaaaaaaaaaagacttagaattttktttttttttttttttttttttttttttttttttttcttggggcaaagaatgagcaagaattccacctggaaaagattgaccagggatcttgactttctgtctaggttgtattttgtgtgactcagtgacatctctgattcttttcctcctcctaggaagaatttatctatctgctatgtgcagaatttattaggctttacatactgggctttgaggctttgattggactctcacattaaggcatggcaggctgaggggcagcctgagggacataa

SEQ ID NO: 736445 - DNA, 632 bp, Homo sapiens
tagaaataaatttcctcttggtgtactctcaagtagatgttggaaaatgaggctcacagaggttaaagtagttggcccaaggtcatataggttgtaagtgctgggaccaggatttgaatccacagactctggcttggggacctgtgtcactctggcaagcttgtcgtgtgggaattaataagctcatcgatgtaatgcacttagagtggagaccagtgcacagcaagcactcagtctactactgtgatgacagtgacaaagamtactgctagttctataattactataatggtgttaactactgttattaccattaacattttccactctgattcatacctaaccatgtcttttaaaaatttttctaaatttttttaatttttaatttttgtggataactagtaggtatatatatttatggggcatatgagatattttgatacaggcataccatatgtaatcatcacatcagagtaaaatgggtatccattacctcacacattttttgtgtgttacgacctaattgtacatttttagttattttaaaatgtataattatattctcattgactacagtcaccttgttgtgctatcacgtactagatcttacttatcctttccattttttatgc

SEQ ID NO: 736446 - DNA, 632 bp, Homo sapiens
tagaaataaatttcctcttggtgtactctcaagtagatgttggaaaatgaggctcacagaggttaaagtagttggcccaaggtcatataggttgtaagtgctgggaccaggatttgaatccacagactctggcttggggacctgtgtcactctggcaagcttgtcgtgtgggaattaataagctcatcgatgtaatgcacttagagtggagaccagtgcacagcaagcactcagtctactactgtgatgacagtgacaaagaatactgctagttctataattactataatggtgttaactactgttattaccattaacattttccactctgattcatacctaaccatgtcttttaaaaatttttctaaatttttttaatttttartttttgtggataactagtaggtatatatatttatggggcatatgagatattttgatacaggcataccatatgtaatcatcacatcagagtaaaatgggtatccattacctcacacattttttgtgtgttacgacctaattgtacatttttagttattttaaaatgtataattatattctcattgactacagtcaccttgttgtgctatcacgtactagatcttacttatcctttccattttttatgc

SEQ ID NO: 736447 - DNA, 590 bp, Homo sapiens
cccaacacgttcatgcatagccaaccactgcacaattactcctctttaaagggtcttggtttcttcatatggaaaattagaagttgaagctgggtgacttttcagatttgtctttgcatttggtttggcataaacttagagcacaaaacagcctcttcccagggtgctttcattgcctttcccttgccatcagcgagcccttcctgagcccggctctgaccgtgcctgtggctcctgctggtgcctccaactgctgcccatgcttgagtttttgcctttaatttcctagttcttagagaaacagctgagctttttgtttttgcttgttatctcagrgcttccttccaccacaggtgaaaatgcttccctcagggcttgcagattagccagcatatccagcgtctccagcatctcctggctttccacagaggagtcctccagctgatattcttgttcattctggacacctccagtttcccagaactatcctctcagcatggtaattgcatcctgagttccctttctagctctgaaatttcctctcttctgcttttcctcaaatgctttctaacaggatgattagcctgtca

SEQ ID NO: 736448 - DNA, 575 bp, Homo sapiens
cttctcacagctccactaggcagtgccccagtggggactctgtgtgggggctccaaccccacatttcccctctacactgtcttaggtagatgttctccatgagggctccacccttgcagcaggcttctacttgcccatccaggcatttccatacatcttctgaaatttaggtggaggctcccaagcctcaactcttgcactttgtgcacccacaggcttaatatcatgtggaagctgccaaggcttatggcttgcaccctctgtagcagcagcccaagctttactagggctcatttgagtcacagctagagctggagcagctgggatgcagggagcagtgtcccaatgccatgcaaggcagtggggccttgggcctggcccacaaaacattcattcctcttaggcctctggggctgtgatgatagggrttgttgtgaaggtctctgaaatgccttcaagacctttttccccagtgttttggttatcagcacttggctcctttttacttatgcaaatgtctccagcctgcttgaattcctccccagaaaatgggcttttcttttctactacatggt

SEQ ID NO: 736449 - DNA, 620 bp, Homo sapiens
gtgttgaaggcctaacccccagtgtggctgtatttaaaaatgagacctctaaggatgtaaattaaggctaaatgtggtcataaaggtgggctctgatttgacaggattagtgtctttataagaggaacgatcagagagtggtatctccccccactctccaycatacacgcatagtaaaaaaaaaaaaaagccatatgatgacatatgaagccatggagacaagaaagacttctacaagccaggaagcgaatcatctagaaccttgaacatagccgcctaacctccagaactgtgagaaaataaatttctgttgttgaagccatccaggctgttgtattttgttatggctcccttagcaaactaataaagtgattaaagccacacttcattcaagcagcttgttttcctgtggagtgaccggagaatagccctggagttataggtgagttgaatgtatactcttgtgctttgtccttttagaattaaatatcagggttatcattccattggggtgaaaataccctcaaagtcaaaacagcaaagttaatgttgttcaaaacactctatactttatagaattgcatatagtagtacctgagtctgcatggtcctggggtaaa

SEQ ID NO: 736450 - DNA, 557 bp, Homo sapiens
ttagagctgaataagtagattcagagattctcttaacccagagagccccttttcaacatcaagtctaataaggaggccccagacataactatagtgtcccagactgcccttttatactagacgaaaggtaaaacgagccgatcaagtaacaaattacaaattgatgcaggcagtgagaacagaagcctggttttctgccctgtaatgtctgcataaaagtggagaatatggttaaaaacattggcgacagccagttaccggaatagctagcacttccaggaacaaatgcattcctaatgaatttgtggacactgcatttaccgcaacaacagcaggttttctcacacatgcactccacagcacccgcctgcrcagggtttattgaccttcagcaaacactgatgggagagcgggctgccagagagtgagaggcagagagccatccaaaacatcttggaaaggcctctgagagaaatttttagtgtttagaagacatactcttcttccttctgccaaaagtcatttttctgttaaaggattcagagagtgaaaaaata

SEQ ID NO: 736451 - DNA, 483 bp, Homo sapiens
caatgagaccgtttaagcagtcttgggaaatgaatgagaattgtgataggtaacactgagggtggtagttggaaagaagacattctagactgaatgaacaccttatgtaaaaacacacagtgagagtggtgaacagcaaaactgttatatgactagaacatakaatgttaaggtaggatgtggttgaacatgccaaaaagtgtgcataaacacatggacattaaatatcaaaaagattttatatagaagtaacaaatcatatataaatcttagtaattttactctggcattgacttagagggtacaaattgaaggtaggtatgcccttatttgagaaattatgtgagtctgaacttaacagttgaaccaagattgtactacaaacattatgatgtaaacattagaaaacaggatttttttttgctttgatcaaaattgtatattcagcacccagaagagtacttggcacataaattgaatgac

SEQ ID NO: 736452 - DNA, 644 bp, Homo sapiens
ctcttcctttcacaaaggatttctctagaatatgagtttcttctttcaaaattggagtcagttctctgaaaacctgccattgctttatcaactaagtttatgtaatattctaaatccctagttgtcacttggacaatgttcatagcatctctccattaagagattccatctcaagaaaccactttgtttcctcatccctaagaagcaagttcttatacattcaatttttatcatgagatttcagcaattcagccacatcttcaggctccacttctaattctacttctcttgctatttctaccccagctgcagttactttctctaacgaagtcttgaacccatcaaagtcatccacaaagtttggaatctacttcttgcaagctcctgttaatgttgatattttcacctcctaacatgaatcacaaatattcgtaatggcgtttataatggtaaatcctttccagaaggttttcartttactttgttcagatccaacagaggaatcactatctgtggtacttatagccttataatatgtatttctgaaataataagaattgaaagtcaaaattacttattgatccatgggttgcagaatggatgtttttctagcaggaacaaaaacattaatctccttgtacatc

SEQ ID NO: 736453 - DNA, 601 bp, Homo sapiens
gtaactttgaacttgagagacatgatttagggtacctagcagaaaaagaaatttctttcttttttttttttttttctgagacagagtcttgctctctcaccagactggagtgcaatggcacaatctcaactcactgcaacctccacctcctgggttcaagtgattcccctgcctcagcttcccaagtagctgggactacaggcacacgccaccacacccggctgattttttgtatttgtagagatggggtttcaccatattggccaggatggtctcaatatcctgatctcgtgatccactcaccttggcctcccaaagtgctgggattacrggcgtgagccaccacgcctggcccaagaaatttctaagcagcaaagcattgaagaggtgacttgggttctgttaaaagcattccattttaaaagggaaacagagcataaatgttcagaaaatttgcagcccgatgctgcagtagaaagaaaaacccatttctgaggagaaattaaagctggctgcagaaatttgtataagtaacaaggagccaaatgttaatccccaagacaatgtgaaaaatgtctccagggcatgtcagagatctccg

SEQ ID NO: 736454 - DNA, 639 bp, Homo sapiens
cagactggggaatattgaggctcagacaatgataccccaaaataaaggcctaagaagcggcctcagaagcaaagtctctccctgacgttctcttgctctcctgttttttgtccttcatttttccctgagacaaactatagaaactagaattcctctttcccaaccaaggcaagtcatagaaaccagaacccatttttctcaaagtcatccataatgcttaaacatattactttaactgtcccttctcccaacctttctgtgtaacatctgggcataaagaaattaagactctccttctagaggggtcctatactrtacctggaaggaggaatgctgtacagagaggctgagaaaattctgaatagacaggtcttgctgagtttctccacttagtcacaccattagatcatacccttttttttctttcatatttctatggggctgcccattcttcactggacctaagcataaaaatagtttaccttgcatctttatgtcttcattttgaaggctccaatgtcacataaaactataatcaagtacatttattatgcttttctcttgttaacctgtcattgttatatgggtgtcggctgtgacctttatgatggggatgaaagggatcctccctttccaccc

SEQ ID NO: 736455 - DNA, 608 bp, Homo sapiens
tggtgaaatattgaattccaaatgcattcttgttgattagaaacttgcttttttaaatctgaattttctctgggtatttgaattcatctatagtaaataatctccaactttggatagctcagttatcctaaaatatggagtctagtcactagccaaaattcagcctgaatttacatctcctggcttytttgcatttatttgacagacttatatataatccttagacttctggtaataagtgacactaaagatgactggcatcttattttctttcttttttcttttatttcttttctttttttccgacagagtttcgctcttgtcacccaggctggagtgcaatgatgcaatctcggctcactgcaatcttcaactcccgggttcaagcgattctcccacctcagcctcctgggtagctgcaattacaggtgcttgccaccacgcctggctaatttttgtatttttagtagagacggggtttcaccatgttggccaggctggtctgaaactcctgacctcagatgatccacccgccttggcctcacaatgtgctgggattacaggagtgagccactgcgcccggcctggcatcttattttcatacttaa

SEQ ID NO: 736456 - DNA, 639 bp, Homo sapiens
tcttcataaacatactctatgcaacagaaaggagaagagacaaagaagcagggttaaaggcttatgctagctattgtatgagaaagattcacacagtaatcacgtttgtataccaatgtttgatggtttgtcactcagtcatgtcttagctgtcaatgaggctaggaaatgtagattttactttggggagtaatgttccctgtgagtatttcagagcactgttaatatggaagaaagaaagatggttgttggggttccactgtgaacctgatagtaccaatatgaggaataaatgggaaaaagcttattaatatattttgcatgtgacctatcacaacagcaacaattcagtatagtatgttttaattcattatctctatcatcataatcatcagcagcattattatttgctcttaattattaaaaggttttattcatgtaattctgtctaaataagctagcatatttatcagtgtstgtattttcttctgttctgtccctccatcaagattctttcaaatatatctatcactgtggaaaccatgattttactggtttttacattaccattgcagataatgaactgaattatactgaaatgggataatcacattaatttaagagtcttgttacctatga

SEQ ID NO: 736457 - DNA, 596 bp, Homo sapiens
gaaattgtttgatcagtcaatatagtgacttacattaatgaatttcagatgtcaaatcaaacctgctatcttggaataagctatgttttgttgtaacatatcatttattttatatattgctgattataatttgctaatatttttaaaggattcgtgtcactatatccatgacaacagttgtctgtaatgtttttgttggtttatttttcttaataatacctttggtggtttttattatcaggataatacttacctcataaaatgagctggaaactgtgttctccttttttactttctggaagattttataaataatagatattcctttttcctttaacattaggtagaattcaccatggaagctgtctgggtcaatggyttgctatattagatggatttttgtttgattgtttaactataaattgaatttcattagtaaatgcagatatatttaagttatctgttttggggtgaattttgctaatctgcatctttcaaagaatatttatatttcttctaagtttgtcaactatatcaacataaaattgtattactaatttaattcccatagaatacaacatggagccttgtccact

SEQ ID NO: 736458 - DNA, 617 bp, Homo sapiens
aattaaaataaaagagatgataaagagaagtttcttgcatgcgagcctaccctaaagatttcagctctttctttcctccaaatcatatgagtcagttcctaaagtaaatctgttttgttttttttttatatttcccctattggctctgtttctctggagaacactttctgataaacactacatgctatacattaaaayctctgttttcaactatataaattctaagtatgaagcattcttttttattattttttattttttcaagatgaggccttgctctgtcacttgggctggagtgcagtggcacaatcacagctcactgcagcctcaacttcctgggctcaagcaatcctcccacctcagcctcctgagtagctaggatgaccggcatgcaccactgtgcctggatattgaaatattcttgatgaaaagtgagctgaatagattaagtaatggtcaagagactagggagaaggacttgttaaaaatactttactctctgagacttaatattggtacatcagttgtctctggcctcttgtgttgggcagttcttaaagctagggagacctctatgttggagttttggtttgataatcagacaacaactgctattt

SEQ ID NO: 736459 - DNA, 504 bp, Homo sapiens
cactggtgttggccatatcgcggattttctgtttccccctctgtaaactggggatgccaatgccagcccccactcccggatgaggtacctggtgtacagatggctcggccactctgctgaccgtgcccccgacatcattgttccccggggttttccctctaagctccmagaggttagttaattctctgccagtgtgcagagactcccacagctgcccccaaaccttgaggtctcccccccatatcctcctgccttataggcaaggcctgtttcctgagccaagggaaggcgggtgtctttcctgggaaccccctccgcacgatcacagactagagagtccaaaccacagatcatgttttctttccaaaaaaaggagccccactgaggcagaaacttcattcttttaataagatgatggtatgtttaaggaaaataaatatttcttttaaaaaagaaaaggcgatttggatccactcacatgccaagcactgtcccggagaccca

SEQ ID NO: 736460 - DNA, 582 bp, Homo sapiens
tccataaggtcaccgaggcttggttcatttttgtgtagtcctttttctttctgtgtttaattatggttaatttttattgatatatcttcatgttcactaaatttttatttttatttttttgtaatgtctgatttactcttgcacacatccagtaaattttttgtttcagatattatatttgaacatgcctacaggaatatacctgtatacctctaggatttccattttttaaataagatttttaatttctctttattatgttaatgattttctttaaattttgaagcatatttataatagctgttttaaagtcctcatctgctcattctatcatttctgtcatttttgtgtctattcctacctggctgtgggtcataatttggatcctattttcatgtttagtaatttttaatttgatgccagaattttkgttaatctttttattttggaataaacctagatttacggaaaagtttaaagataatgcagagagttctcatacgttcctcacccagttttagtgtcctctaatgtgaacacactacattaccaaggtacatgtgtcagaactaagaaattagc

SEQ ID NO: 736461 - DNA, 619 bp, Homo sapiens
cccatcacccaaaacacaaactaagaacttgacgataatctatggctccccccttctctatgtccccacctctcttacccaaggtaaccatcttctcaattctctgttcattcttttgcttttctttttacatatttctcttgtttctacatggtatttcccaaagcatgtgttttcatttagttgtttttaactttaaaaggtaccatcttgtatataaattttgtgacttacttttggaattaatatgataatgctgagactctttcatattgttacatctcaacattgttcactcaatgtagtgttccactgggcgaaaatacaagctagctatcttgtatcttgtagctcctgttcaagggtgtttgrgtgtttctaggatcttgatatcatgaacggtgctggcacagcattcctgcatgtctctccttttgcacatgtgcaagatttcatcttgggtatatacacataggagtggagttgctgtgaatattcaactttaggagataatttcaagctgtttttctaatgtggtgagcctctccaacaacgcataagaaattctgtggatccatatcctctccaacacttagtgttattagactattagtattta

SEQ ID NO: 736462 - DNA, 418 bp, Homo sapiens
tccccagagtggtgaggtatctaagggatgccccggggtgctcttagtagaaagcggggggtctgccctggtcgggagtgggaaggctcctagatgtggtgtctgtaccaggctcacaggagcctggagtgctcctggcaggcacagcacctggaacaagcccagtgccttcggggagctgcgaggggggcctctggctggagcrggtcagggcaggcgaggaacagggagccaattgtggtcaagagggtggggggtgaggctgggacggtttctaaaggggctggggccctgagtttttccgggcagcaggagccaatgtgacagggctccatccctctgctatccccacctagccacccccttgctgccaccatgggcctatcctctccgggatcccttcagaccatccctgccc

SEQ ID NO: 736463 - DNA, 642 bp, Homo sapiens
aattccaggataatggcacacacagcaccagtcaggccctggcctgtgttgcaggcacacctccgatacattttgacctgcatgccaactgcagaacctaaacccaggcaggggtcactccccagcagggtgctgaggttcaaagagctcgaaggaaatacctgcctgggaagacaggtgacaggtgactgagttcctctccagaactttccagacaataatcaggctgtgtgtcaaattcaccaagatttagctccagacccagctgatctgcagccaggatgctattgggagcatcactgcttccgtctttgacccatctttccacgtggccccccagacagagagcacttccaacctatgcataawaatacagggggaaggccaggtgcagtggctcatgcctgtaatcccagtactttgggagaccgaggccattggatcacttgaggtcaggagttcgagaccagcctggccaacgtggcgaaaccccgcctctactaaaaatataaaagttagctgggcatggtggtgggcacctgtaatcccaactactcaggaagccaaggcaggagaatcacttgaacccaggaggtggaggctgcagtgagccaagatcatgccagttatacaacagcctgg

SEQ ID NO: 736464 - DNA, 478 bp, Homo sapiens
attttggttatttggggtctcttgaaattccatacaaattttaggaccagtttgcctacttctgcaaaaaaaatgccattgggattggataggaattgcactgaatctgtggatggctttggagaacattgttgtattagtctgcttgaactgctataacaaaataccatgacaggtggcttaaacaatagaaatttatattcctcacagctctggaaactaaggrtccatgatgaaggtgttggaaaagccagtttctcatgaagtttctcttcctggcttgtccatgaccaccttcttactatgtccttggatggtctttccttgcatgcagagcaagagaaagctctctggtatctctgccaggatagggacactaatcctattgaaccaaggccccaccttcatttaacattaattacttccataaaggccctatcttcagaaacagtcccattggtggttagggcactgacat

SEQ ID NO: 736465 - DNA, 550 bp, Homo sapiens
acatcgatttatttttatatggtgaatcaccattgtgtctctggaataaattccacttgttcatggtatataatcttacaaatacgctgccaaattcgttagtattttgttgagaatttttgtgtttatgttcataaggagcagtggtctgcagttttcttttctctcagtgtctttgtcttgctggcctcatagaatgtgttctttcctcttcaatctttagaagagtttgagaaggatttgtgttacttctttaaatgtttagtagaattcatcttgaaacaatctgttyctgcgcttttttgttggaaactttttgattactgattcaatatccttacttgttatagatccaatcagattttctatttcttcttgagttagttttggtagtttgtgtttttctaaaaatttgtacatttcatctaaggttttctgattttttggagtacaattgtttatagtattatccaatttatttctgcaaaacagtactgtctcactttcatttctgattttagtaatttgactcttttctctttttttctta

SEQ ID NO: 736466 - DNA, 550 bp, Homo sapiens
acatcgatttatttttatatggtgaatcaccattgtgtctctggaataaattccacttgttcatggtatataatcttacaaatacgctgccaaattcgttagtattttgttgagaatttttgtgtttatgttcataaggagcagtggtctgcagttttcttttctctcagtgtctttgtcttgctggcctcatagaatgtgttctttcctcttcaatctttagaagagtttgagaaggatttgtgttacttctttaaatgtttagtagaattcatcttgaaacaatctgttcctgcgcttttttgttggaaactttttgattactgattcaatatccttacttgttatagatccaatcagattttctatttcttcttgagttagttttggtagtttgtgtttttctaaaaatttgtacatttcatctaaggttttcygattttttggagtacaattgtttatagtattatccaatttatttctgcaaaacagtactgtctcactttcatttctgattttagtaatttgactcttttctctttttttctta

SEQ ID NO: 736467 - DNA, 586 bp, Homo sapiens
ataggtgaaaaacaaagtattatgaacaaaacctacaataatactggcttttatatttactgatgtatgtagttactatttttatcagtgttctttttttttctcatcatggctttgaattactatcaagtttcctttcatttcagcctgatggattcattttagcagctcttgtagagcagggctactagcaatgagctttctctgcrtttatttatctgaaaatgtcttaatttctcctttattcctgaaggatagtttgtctggtaggaaattcttggttgacagtcttttttttttttttccccaggactttaactgtgttattccactgcctctgggcctctggttccttttcttttcttttcttttcttttctcttttctttttttttgagatggagtctcacactgtcatccaggctggagtgaaatggtgccgtcttggctcactgcaacctctgccttccaggttcaagcaattctcctgcctcagtctcccaagtagctgggactacaggcacccgccaccacgcctggctagttttttgtatttttagtagagacagggtttcactatgttgacc

SEQ ID NO: 736468 - DNA, 586 bp, Homo sapiens
ataggtgaaaaacaaagtattatgaacaaaacctacaataatactggcttttatatttactgatgtatgtagttactatttttatcagtgttctttttttttctcatcatggctttgaattactatcaagtttcctttcatttcagcctgatggattcattttagcagctcttgtagagcagggctactagcaatgagctttctctgcgtttatttatctgaaaatgtcttaatttctcctttattcctgaaggatagtttgtctggtaggaaattyttggttgacagtcttttttttttttttccccaggactttaactgtgttattccactgcctctgggcctctggttccttttcttttcttttcttttcttttctcttttctttttttttgagatggagtctcacactgtcatccaggctggagtgaaatggtgccgtcttggctcactgcaacctctgccttccaggttcaagcaattctcctgcctcagtctcccaagtagctgggactacaggcacccgccaccacgcctggctagttttttgtatttttagtagagacagggtttcactatgttgacc

SEQ ID NO: 736469 - DNA, 586 bp, Homo sapiens
ataggtgaaaaacaaagtattatgaacaaaacctacaataatactggcttttatatttactgatgtatgtagttactatttttatcagtgttctttttttttctcatcatggctttgaattactatcaagtttcctttcatttcagcctgatggattcattttagcagctcttgtagagcagggctactagcaatgagctttctctgcgtttatttatctgaaaatgtcttaatttctcctttattcctgaaggatagtttgtctggtaggaaattcttgsttgacagtcttttttttttttttccccaggactttaactgtgttattccactgcctctgggcctctggttccttttcttttcttttcttttcttttctcttttctttttttttgagatggagtctcacactgtcatccaggctggagtgaaatggtgccgtcttggctcactgcaacctctgccttccaggttcaagcaattctcctgcctcagtctcccaagtagctgggactacaggcacccgccaccacgcctggctagttttttgtatttttagtagagacagggtttcactatgttgacc

SEQ ID NO: 736470 - DNA, 568 bp, Homo sapiens
ttttttgagacagagtttcttgttgcctaggctggagtgcggtggcacgatcttggctcactgcaacctccgcctcctgggttcgagtgactctcctgcctcagcctcccaagtagctgggattacaggcctctgccaccacgcccagctacttttttgtatttttagtagagacgaggtttcaccatgttggccaggctggtctcgatctcctgrcctcaggtgatccacctgccttggcctcccaaagtgctgggattacaggcgtgagccaccgtgcctggcttgtgcattcttttttcattatttgatcgttaccttgctttctggcacaggatgttccaggcttgccctgtagtttgccttagtcctgaaattgactgtttcttccaagagccttataaaataagaaatgcttagaaaccaagatatggacacaagtagtgctgattgctgctggggtgttaattgcatcaagcagacagtactaaggaaatatattaaccttcaatataccagaaaaagcagtcatcaccatttaccatctaggtccagtggatcctgttta

SEQ ID NO: 736471 - DNA, 540 bp, Homo sapiens
gtttattttagcatccatggatacttgggttgcctctaccttatggtgattttgagtaatgctgctgtgaacatgggtgtttggtttaagtatctgcttttgattcttttttttttgtttttttttttttttgttgtttgttttgagatggagtttcactcttgttgcccaggctggagtgcaatggcacaatctcggctcactgcaacctctatctcctgggttcaagtgattctcctgcctcagcctcccaagtagctgagattacaggcatgcaccaccacccctggctaattttttgtgtttagtagagttggggtttcaccatgttggtcaggctggtctcsaactcctgacctcgggtgatccacccacctcggcctcccaaagtgctgggattacaggcgtgtgccactgcgcccggctgctttcgattcttctgggtatgctcagaggtggaatttctggatcatatggtaattctgtgtttaatttttaaggaactgccacactgctttctccggtgactgtaccatttta

SEQ ID NO: 736472 - DNA, 634 bp, Homo sapiens
tctaacctacgtctcggcaaaattataaactacccaagtgctagaccttcaggtcacacccaaatagtcaaaattgtaaatattaaatccataggtgcttgaagtctattacacgctcaatcttttgatgatgtcctaagaaataatgacttcactcacaaaatactagaatactgtgctgaatatgcagggtgcttggaaagatccatgtcaatactggaaattcatccctaatttaaaccttccttgagggtgattattttgtatgtcatacttctaattgctgatctgatctggtccttagtacgtaaaaaaacaatcctaggaaaagtgtttggtttttcaaacttacrgtataacaagttttgaagaagcttcaaggcaagtaaaggaaacacacctgagttttgttggtagaaaacattttattttctctctctctctcacacacacacaaacacacatacacaaacacacacacccctctggagccacaggctctcctgccttcctcctctcacagcaatttttctttggttcttccccattgttagtgaaatagctggaactcaccagtctacaccgctgatgattgtctgtaggatgaaaacatgatgatatggtggtagcagct

SEQ ID NO: 736473 - DNA, 584 bp, Homo sapiens
cctttcttttgattgagcagtttggcaacactctttttgtagaatctgagaagggatattagggagtgctatgaggcttatagtgaaaaaaacaacatcttcagataaaaactagaaagaacttttctggacaactgctttatgatgtgtgtattcaaatcatagtgttaaaactttcttttgattgagcagtttgccaatactctttatgtagaatctgagaaagaatattttggggtgatttcaggcctayagtgaaaaagagaacatcttcagataaaaattagaaagaagctttctgagcaactactttctgatatgaccattcatctcagagaggtaaacctttctttgattgagcagtttggtaacacagtttttgtagattctgtgaagggatatttgggagcactttgaggcctgtggtgaaaaggaaatatcttcatatgaaaactagaaagaagctttctctgaaactgccttctgatgtgtccattcatctcatagagttaaaacattcttttaattgagcagttgggacacactgttctggtaggatctgcgaaggaatatttgggagcaca

SEQ ID NO: 736474 - DNA, 613 bp, Homo sapiens
ttaaacctttcttttgattgtgcagtttggcaacagctctgttgtaaaatcagagaagggatatttgggagtgctttgaggccaatgttgaaaaacaaaatatcttcagatataaactagaaagaagctttctgggaatatgctttgtgattgtgcattcttctcacagagttaaaccgttcttttaattgagcagtttggaaatgctgttgttggagaatctgcctagggatgtatgggagctcattgaggctcctggtgaaaaaggaaataacttcagataaaaactagaaagaagttttctaagaaacagccttgtgatgtgtgcattcaccttacagagttaaaccattcttttcattgagcagtttagaaacaatgttttagtggaatctgcaaagggatattttggagcgccttgaggtgtatggtaaaaaaggaaacaacatckgagaaaaagcagaaagaaactttctgagaaactcccttgtgatgtgtgcatgtttctcacagagttaaacatttcatttcattgagcagtctggaaactctgctttttcagagactagcaagggatatatggtagcacattgaggtcaatggtgaaaaagga

SEQ ID NO: 736475 - DNA, 548 bp, Homo sapiens
aaaaggaaataacttcagataaaaactagaaagaagttttctaagaaacagccttgtgatgtgtgcattcaccttacagagttaaaccattcttttcattgagcagtttagaaacaatgttttagtggaatctgcaaagggatattttggagcgccttgaggtgtatggtaaaaaaggaaacaacatctgagaaaaagcagaaagaaactttctgagaaactcccttgtgatgtgtgcatgtttctcacagagttaaacatttcatttcattgagcagtctggaaactctgctttttcagagactagcaagggatatatggtagcacattgaggtcaatggtgaaaaaggaaatatcttcagataaaaamtagaaagaagcattctgagggactgctttgttctgagtgcattcatctcatagagtgaaacctttctttgattgatcagtttggccaccctctttttgtacatcttgagaagggatatttgggagcactttgagacctttagtgaaaaagggaatgtctccagataaacactagaaag

SEQ ID NO: 736476 - DNA, 629 bp, Homo sapiens
tgtgcatatttctcacagacttaaacctttcatttcattgagcagcctggaacctctgtttttgcagaatcaaggaaggtatatatgagagcacattgaggccaatggtgaaaaggaaatatcttcagataaaaactacaaagaaggtttctgagaaagtgctttgtgctcagtgcattcatctcacagagttaaacctttcttttgatttagcagtttggaaacactctttttgtagattctgtgaagggatatttgggagcactttgaggcctatggtgaaaaaggaaatatcttcagatgaaaactagaaagaagcattcctgtaaaccaccttctgatgtgtgcattcatctcacagagttaaagtattcttttgattgagctattttgaaacactgttttggtaggatctgagaaatgttatttgggagtgcttacaggcctattgtgaaaagytaaatatcttcacataaaaactagaaagaagctttgtgagaaactactttgtgatgagcaagttcatctcacagagctaaacctttcttgtgattgtgcactttggcaaccttgctttagtaaaatctgagaaggaatatttgggagtgctttgaggtctatgttgaaaa

SEQ ID NO: 736477 - DNA, 596 bp, Homo sapiens
aaggtgaaaaaggaaatatcttcacataaaaactagaaagaagctttctcagaaaccgttctgtggtgtctgcattcatctcacagatttatagtatgttattttattgaccagtatggaaactgattttgtagaatttgtgaagggatatttgggagcacattgaggtctatggtgaaaaaggaaatatcttcatatgaaaactagaaagaagctttctgaggaactgctttgtgataagtgcattcatctcakatattccaacttttctttagattgaccagtttggaaacacagtttttgtagaatctgcgaagggacattttggagcccatggatgcctaggctgaaaaactaaatatcttcagataaatactagaaagaagctttctcagaaactgttttgtgatgtgtgcattcttctcagagagttaaacctttctttagattgagcactttggaagtacggtttttgcagaatctgtgaagggctaaatgggagtgcattgaggcctattgtggaaatggaaatatttaaagtgaaaaactagaaagaggctttctgagaaaatgctttgtgatgtgtgcattcttct

SEQ ID NO: 736478 - DNA, 629 bp, Homo sapiens
gatgaatgcacacataacagagaagtttctcagaaagcttctgtctagtttttatgtgaagacatttccttttcaacaacaggcctcaaagcactccaaatatccatttgcagatactacaaaaagagtgttcccaaactgcttaatcaaaagaaaatttcaactctgtgaaatgaatgcacacatcaaaaagtagtttctgcaaatgcttctgtctagtttttatgtgaagatatttccttttccaccataagcctcaaagckctccaaatatccacttgcagattccgcaaaaagagtgtttcaaaactgcttaatcaaacgacagattcaacttgtgagatgaatgcacacatcacaaataagtttctcagaatgcttctgtctagattttttgtgaagacatttccttttcaactataggcctcaaatggctaccaatatccatttgcagatacttcaaaaagagggtttctaagctgctcaatcaaaagaaagtttcaactgtgtgagttgaatgcataaatcacaaagaagtttctgagaatgcttctgtccagtatttatatgaagatatttgcttttctgccaatggcctcaaagcactccaaatatccacttgcagattc

SEQ ID NO: 736479 - DNA, 607 bp, Homo sapiens
ttgagacctgtggtgaaaaaggaaatatcttcacataaaaactagacagaagctttctgggaaatggctttctgatgtgtgcattcatctcactgagttgaaactttcttttgattgaggagtttggaagagtcttttcatagaatctgcatagggatatttgtgattggtttgaggcctacggtgaaaaaggaaatatcttcacataaaaactagacagaagctttctgagaaacttctttgtgatgcttggattcatctcatagaattgaaactttcttttgattgatcagtttggaaagactctttttgtagagtctgtaaagggatatttgtgagctgtttgagtcctgtggtgaaaaggaaaataacttcatatgaaaactaaatagaatctttctgagaaaatgctttgtgatgtgtgcattcatctcrcagagttgaaactttcttttgattgagcagtttggaaacagtctttttatagaatctgcaaaggcatatttgtgagcagtttgaggcctatggtgaaaaaggaaatatcttcacataaaaactacacagaatccttctgagaaacttctttgtgatgtgtgcattcatctca

SEQ ID NO: 736480 - DNA, 583 bp, Homo sapiens
ttaaaggttataaaatcacattacctgattagactgtgataatcttaggatggtgggaaattcatctttaaactcatctacaaggtccatgattgctttctggatcccctcgactaagacaaaaagaggttaggaaaaagaaaactttgaaaacatcccctaaatgtttcaaaakaacatgaaacacttgatcaaattcctagatgactcggaaagtaaaggaactctaggggatcttattcccaattgttcccacacccatacgccctttacaacaagattgtgtatacttcttccagaaaagttcttcaacacctgcccacatatccacccaacaggtttgattggcatggtgagttcttgcttgggttcctagtccttaacaagcttgcaggcctgggtaatgcttgtcctagtctgccattagtgaaagatgagggtagccttccacttgggaaagccagcaaggacagaactcacagctcactgctggaattctttgttactgtacaataggcttccgagaacctgctacagaatcttctgacatcactctggcagtgagaggaagaggagtgtgttt

SEQ ID NO: 736481 - DNA, 612 bp, Homo sapiens
actacctgaatgcaacaacataactataaaatctccctgagatttgaaaggggtgggagtggagcactatgagctggaacaaatggaaggcgcaggcttgaaggtcagtgggagctttcagcatgcaccctgctcagttcaactcatttaataaagtgctttcaatgctgcgattcattgagcttctatttttgccaggttgaggttctgctgggtatattttaatgaagkaacaaaatgtatttatatttaggagaatggtgtttcataatgattgtaaccaggctaacctgagttcatattctggctctgctacttaaataatgtggcacatttgtaaatctcttggaccgtcggttttctcatctataaaatggggataaatcatgcctactttacagggctatcataaagagtaaatgagataatatatgtacagtaagtatcacagtgcctggtatacaatcagcactccataggtagcatcaagaattatgatcatgctcttagtgtggtgacctggccaatgggaaacatttaccaggaactagtgcacaaaatagactgaagaggaatcaagactaagaacagggagaaaaatgagaaacattt

SEQ ID NO: 736482 - DNA, 612 bp, Homo sapiens
actacctgaatgcaacaacataactataaaatctccctgagatttgaaaggggtgggagtggagcactatgagctggaacaaatggaaggcgcaggcttgaaggtcagtgggagctttcagcatgcaccctgctcagttcaactcatttaataaagtgctttcaatgctgcgattcattgagcttctatttttgccaggttgaggttctgctgggtatattttaatgaaggaacaaaatgtatttatatttaggagaatggtgtttcataatgattgtaaccaggctaacctgagttcatatyctggctctgctacttaaataatgtggcacatttgtaaatctcttggaccgtcggttttctcatctataaaatggggataaatcatgcctactttacagggctatcataaagagtaaatgagataatatatgtacagtaagtatcacagtgcctggtatacaatcagcactccataggtagcatcaagaattatgatcatgctcttagtgtggtgacctggccaatgggaaacatttaccaggaactagtgcacaaaatagactgaagaggaatcaagactaagaacagggagaaaaatgagaaacattt

SEQ ID NO: 736483 - DNA, 634 bp, Homo sapiens
aatgtgtagaatatacttggaaaaatttcttatgcaaagttccacataacagaacgaaaagatcactcgctcgtgtaagttttcagttaaagaagaaagttatgttaatttggtaaaataaaaaacaggccttttcaattaagagatactattaaacccctagttatgatagtgatgatgctgttcataaraagtattgatggagaacttactggtcagagtctatgcaggcaaatgaaacacttcttttacttgggatctttcgttgtgaaagatcttacagcctaaaaacatgacggttcaacatgcagttgaataaatgtttagcgaatcgagtaaatgtagggaaaataaaactagctacattaggatgttaggattgctttcccgtatttaatttgagctgttaacactttcctgtttatactgttaattttgcaaacagtaatgcttgtgatcccatacactttgtctagtaaaatgaaatcttccaaatggagaaaataaacctctatagtacggatttttgccatatgctggttgttatggtttatcttgctaataactttttgtttggttagactctggccctatttaaggcaccaagtttgtaaccaggtacaattttctaggt

SEQ ID NO: 736484 - DNA, 609 bp, Homo sapiens
cgtgtcaagttctaagtatagaggctggcatttagtagatgctctataagtggtagctaatataaaaataaagtgttacaactttagttatgtatcacttatattaatactaagcaaaagtaagattttcacaggtcattcaagatttatacaactacagtaccagtacactggggcagcgatgttcatacttcatacatgcagccccacaatcaagtaaaataaaatagtttcactgtagaaattcagatttttttttttaaaagatgagttcaattytccaaatgtggctccaagccttgtgttgcataacccccagaggaaaccctggaactgatttacaaggggtgggagaatttgattttcttcataattctagaaatctttggagtattttctctttggcatagtttgagaagagatgtgttgttgttgccttgaagttgaaatgaggtagctgtgtttcccttccctagttctcttctatagatccttagccttaccctggatccttgccttatatacttggcacttttaaaacaaatgtgctgcagattcattagatgtagcacattatttagtgtgtctttctctctctttcccatccgt

SEQ ID NO: 736485 - DNA, 609 bp, Homo sapiens
cgtgtcaagttctaagtatagaggctggcatttagtagatgctctataagtggtagctaatataaaaataaagtgttacaactttagttatgtatcacttatattaatactaagcaaaagtaagattttcacaggtcattcaagatttatacaactacagtaccagtacactggggcagcgatgttcatacttcatacatgcagccccacaatcaagtaaaataaaatagtttcactgtagaaattcagatttttttttttaaaagatgagttcaattctccaaatgtggctccaagccttgtgttgcataacccccagaggaaaccctggaactgatttacaaggggtgggagaatttgattttyttcataattctagaaatctttggagtattttctctttggcatagtttgagaagagatgtgttgttgttgccttgaagttgaaatgaggtagctgtgtttcccttccctagttctcttctatagatccttagccttaccctggatccttgccttatatacttggcacttttaaaacaaatgtgctgcagattcattagatgtagcacattatttagtgtgtctttctctctctttcccatccgt

SEQ ID NO: 736486 - DNA, 579 bp, Homo sapiens
atatttggccagagaagcaagttttttcctcagtgtgatgattgcttccctaccaattttgaagtgctctgataaaatgcataagaaataggcttgccaagataaacagtttattttttcatagaaggtcactcatttattttttttttttgcatccttgttcctgtcaattttgatataacctctcaaaatttaggcttctaaagtcatttttatttttgcttcagcctccatgagattcstaatcatagtaaataatgtaataattagtcccagaaatggtttagacaataacatttttagagcagactatgggggccctttgcagattttgaaaggaatctattttcaattacaaaaagacctttctttcataaaatagtaggaacacatttgcaactttatgttatttgtccacagacctgtttttgtacatgaatggggaagttgtaaatgttgttcatgtgaatgagcagagtgaagtttaaaaatagtttcagtattctttaaatatattggagagagatggaatggatgtgaatatggaaaagttttctggatttcttctccaaataatgc

SEQ ID NO: 736487 - DNA, 631 bp, Homo sapiens
aaaaaagaaacatgcaataaagaaataataataagaaacatgcaataaagtacccaaatgggtggtgtattaaaggaaaaagtaaaagcagagctccctttccaaatcaaagtgcgtgcacaacaccaacatagaaaacagagaaatgcgatcttttgttactgtaattttgtcatgcaagttcaaatgtwtataacatttactcaagaaattattcaggaaatgaggccgtttttaagtagcaaagggactggtctgtgggaaggactcaataaatgttaaatactgttgttggtattacttatatattatgtgctttggatagccatggcaacatgtcattagcctcagctttcactttgtttctgtattttgttcaggctgcatattgtagagaagaattttgattcacacagataagtggttgtatgttgtaaggttttgtttcgttttaacagcttgctctgctaacgtcacattgtgatagtcttcagttaaataagagggcaagaagagtttcttttaagcagcacccccacgcacacccaacagaggaaacaacaacaacaaaaacttagtggcacaagttaaataattggttattttagtatacaaaaagagatgatagtga

SEQ ID NO: 736488 - DNA, 596 bp, Homo sapiens
acttcataccacctccaactgctgtcacagtggtccaagtcactgataactcttgactggattaattcaatatagcttctgtctgcttccacccttggatctatgttctgaattcaacacagaagcttgggtgatcatttcaaaactaaattagaacatrgtacactcctgttcaaaatcctccagaggttccccaaatttctcagagcaaaagctaaaatccttacaggacccacaagaccctatgtgatctgtccttcttagatctcctctttgaccatgtctcctgctagtcttcattccattcactctgctgcagcaccttactcatcttccaaagtgctgggacagtttccatctcagggcctttgcactgtcctaactcttgccccagatatcagcctggctttgtttgctccttcatttcctttaaatctttgcgcaaatatcatcttttcagtaagatcatccttgactgcctgtttaaaattacacccatcttccctccctctcttttccatccagcttgtcttgctttatttttctctatagtacttaacaccttttaacatatttgtttatttattttatttatt

SEQ ID NO: 736489 - DNA, 625 bp, Homo sapiens
tctcttggccactgtattgcctcctgagtatgctaaatgattttataatacgtattcataattgtctacacctcttgaacttttctctgtgaatagcggggaaacctgatgctcatgaccctttatcagtttttaggacagtctttatccagtgattgatcatcttattttatataaatgttggttcttgttgcttatgtactaacatttgacttggcttgtacagtgaagtcaatttgtgtcatttgctatttgtagtcatctgtatgtctttaatgttcatatgtgcttatagcatatttaatgtaaaatcaagtacaaggaagataaataggatattgcacttgtttagagcataatcaaatatgaatcaggcattttgaactattcaaatagagcatgagaacaaactrcaattaatgatttttggtggccacacaaaatattggatgtgttagtttttttggtaggcaatggaagaggacagtgagatatgtatatttgatttgacagaaagccgtcagattattttttaatgatttaggatattatagtctagggcctttatttgtactcttagcgtgtaaaaatagtttttaccatataaaatgttgttattgttggt

SEQ ID NO: 736490 - DNA, 662 bp, Homo sapiens
ggctgccctgtattcttgatcgcagtactgatctgggactttttaacataaccatgtggcttgacaaaacttttgaattgctctgggcaaaaggtcttccaagtcaaggaggtcactttgtccatgattatgattggagatgtcattttagttgggctgccatatgtcagacatgataaaaaaatttcattctgtcaaacataatattctgtcaaaaaatattgagtcagcacccacygtgtgctgggccatgtactacatacagatgtttagtttctgcattcctaaagggataatgctggtaggatccagaggacaggctagcctgcttattaaaaaaaatgcatcttgttttccagacaagaatagcagggagtggcctggtgacattattcatcgttttggtgtaacccacacctcaccccagccttgttgaccttctgatactattggaagattaaaaggttataccttccctacctctccttgggataccaacccttttaagctgttagttaacccaaattaggatctgggatacatcatcaaagtaaatacactcatgaaacaaaagaaaccccaacaagcattctgggttaccccggtatcccttttgttgccagactagcactgataaattattcaagaaaaaaatttctatg

SEQ ID NO: 736491 - DNA, 599 bp, Homo sapiens
ttctcctgagagagcctctccaagaatgttctctgagaagtaaaaaatcaaatccctcttcagtgtggctttgtgttctacctactttgttctctttagctttagtgttccttattttccgagatacaatgaaaagtaggagcaaaaagggagaaaaagcccaagagctgcatccctttcttctaaagtatcaaaccatatgtcttctattcccaagtgctgtcttatggttttacctgctcttcaagataattttgtcctcaccagctgatgttggactagatctacttcgctacttactaattagcctactaatgttagacacataacacatgatttattttgaagaaaaacaaaacaaacatgtcccaactttcctatttagaaagtgagagtaacactcaaaacacaatataaatttaacmttaaaataattcattatattgtatgtttatcacagattagagtcacattcttgtatccactaacataggcatagttaagcctctccagaaggtctttcccttttcatctcctagctggactttagataaatatcagctttccagtttacctgagttcaatttatttaggaaagg

SEQ ID NO: 736492 - DNA, 635 bp, Homo sapiens
attcttatggcgacaatttatttggaaaagagatgacaaaatatgtcaagacaatgccctggctttcttcattaaagttagtaaatgaatttgaaggaaaccaaaacaacagttgttttctataacatttctttctacagatgtatagacatttatggaatgactatctttgaggaaatagatattacttacatagagttaatattttggatgttatgatcttgttggaattagaagctttcagtaatttacatccttaaatagatttctatcttctttttatttccaagatttttctcacaagtttattcccagtacagagacatcattatgttatagaggagcttttttgtgtgatagctcttggcagccatccatctgtaagtaggacataatagtgaagcttgttagagggggagaagtgtaaagtattaccaagcaggccctgacaggcatttagacatccasgcagacattgctgctgcttgatggccgtcttccattgtgacaaatgtagctgtttaaaaagggacaaggtcacaataactttacaatgctacactcctgttgtttatgggatgcacatatattttactcctgattctttccccagtgacagtattttccttatgttt

SEQ ID NO: 736493 - DNA, 600 bp, Homo sapiens
gccttgatagggaagctctgggattcctttttgcagcagaaatatttttgttccctaaaggctttggagaaggtgggagatttgatcaaagttgtttcaagaagattaatctggctagtgatgtggcaaaaaggagttagaagggacagctttgaggagaagcgggccgtaaaatgtcctagaaagcaaaacagaatgaataaaatggagaataatgtcagatctagtaggagaatggcaaaaccacaccttggatttgaaaataatgcaaagagacaaaagcccagtgtgattaagaaggcagtgggtgaaagagaatacatagagaaggtgcctgagaattaagatcatagctactattaattccaagaccctgtaagtcctattttcatagtactagcaattgctrttgtctctgtgaagctttaaggctatttagagcctttcagttctaccctcagatgctgggaaggatttgcctgatgtccaaaatgaatgtggcttatttagatttttattacattttaataccctagctgagattccagcctagttagtcataccccttgttccctcccttgtccaaccaagtccttctct

SEQ ID NO: 736494 - DNA, 561 bp, Homo sapiens
aagatgtttttaatatttattaatttgattccatctgttttctagtgcctagaattagagtattagtctttcaaataaaagcaaaattttggggttggagtagatgttaaaaatacagagtaacaaagtatctcttgtcatcctctttaaaaataagataaagaaaacttttaaattgtaaatatatttttgggccgagcgcgktggctcacgcctgtaatcccagcgctttggaaggccaaggcaggcggatcacgaggtcaggagatcaagaccatcctggctaacacagtgaaaccccctctctactaaaaatacaaaaaaattagccaggcgtggtggcgggtgcctgtagtcccagctactcaggaggctgaggcaggagaatggcgtgatccctggagacggagcttgcagtgagccgagaccgtgccactgcactccagcctgggtgagagcgagactctgtctcaaaaaaaaaaaaattgtaaatatatttttgtatcaattagatttatgtagcattttccttccatataataaacatttatattaaaatat

SEQ ID NO: 736495 - DNA, 561 bp, Homo sapiens
aagatgtttttaatatttattaatttgattccatctgttttctagtgcctagaattagagtattagtctttcaaataaaagcaaaattttggggttggagtagatgttaaaaatacagagtaacaaagtatctcttgtcatcctctttaaaaataagataaagaaaacttttaaattgtaaatatatttttgggccgagcgcggtggctcacgcctgtaatcccagcgctttggaaggccaaggcaggcggatcacgaggtcaggagatcaagaccatcctggctaacacagtgaaaccccctctctactaaaaatacaaaaaaattagccaggcgtggtggcgggtgcctgtagtcccagctactcaggaggctgaggcaggagaatggcgtgayccctggagacggagcttgcagtgagccgagaccgtgccactgcactccagcctgggtgagagcgagactctgtctcaaaaaaaaaaaaattgtaaatatatttttgtatcaattagatttatgtagcattttccttccatataataaacatttatattaaaatat

SEQ ID NO: 736496 - DNA, 628 bp, Homo sapiens
aaaggggtcaggccagcacttgttgaagatttcttgttgccattgtcctagtaaaagagacttgatgctggtgaatgtggactattcaatgtattagggaggaggaaagggaggcttagtacctagtttaataattattatgatattttagtttaaccactctttagaaggttaatacaaaaaatcaaatgccatcctaataaagatgtgcagggctttttctccttaaaaagaaactaggtacagcaaataatggcactgtgaaaaytttgaggcacaaattcgccccttttttttttgcatgctaatatactgaaaaagaaagaaagctgcagtaggattggcaggttatgattctcataaaaaataacaaatttttaaacaagaaaataaagaatactttgaaaaaattgtacattactcagcatcgaaaaatggaaatcatttaatcttgtgccttcttctcctctgtggaaactagggttctaaataggaaactactttcaaatggtaaactgtttacaaatttgataaaaagagcccattaattaaaatctgattcccacattcaagtgacaattttctttatgaatacatgcattaattcataggttttttgttttgtatg

SEQ ID NO: 736497 - DNA, 584 bp, Homo sapiens
aataccaatatattttcatagatctggtggccagaaatctgaaacatacactggtttggtcccttctggaggccctgaaggagaaaccatttcatgcctttcgcccagctgcttctgatggctgctggcaatcttcrttgtttcttggcttgcagaaacatcactctagtctctgcctacatcttcatatggtcttccctgctatgtctctgcatctcaaatctccctcctttctcttataggaataccagtcagtggatttagggcgcactgtaaatccagcatgatctcataccaagattcttaattaaggatttgtgaagaccctatttccaaataaggtcacatttataggtactggagttgggagatggacatatattttaaggggatataattaaaatcattacaatattattaggtaatgttaaaaacaactgtgtaccagaagttacatgacactaactcttaatcctccaaacctatgagattggcactgttactagtctcatttttgctgccttttgttaaacaggtctattactatttcttggcctaattctttttgcagtcaaagtctactt

SEQ ID NO: 736498 - DNA, 660 bp, Homo sapiens
ggagtcttgcactgttgtctagactggagtgcaatggcacaatcttggctcattgcaacctctgcctccctggttcaagcgattctcctgcctcagcctcctgagtagctgggattacaggcgcctgccaccatgcccagctaatttttgtatttttagtagagacagggtttcactatgttggccaggatggtctcgaactcctgacctcatgatccgcctgcctctgcctcccaaagttctgggattacaggtgtgagccaccacacctggccactacatttgcccactttttgatggggttgtttttttctttaaatttgtttaaggttctatgtaaattctggatattagacctttgtcacatgggttgattgcaaaaatgttctcccattctgtagattgcctgttccctctgatgatagtttattttgctatgtagaagctctttaattagatcccatttgtcaattttggcttttgttgcaactgcttttggcaatttcgycataaaatctttgcccatgcctatgttctgaatgatattgtctagattttcttctagagcttttatggctttgggttttgattaagtctttaatccatcttgagttaatttttgtataaaatgtaagaaaggggcccagttacagttttctg

SEQ ID NO: 736499 - DNA, 624 bp, Homo sapiens
gtcacaacttttgactcccccaaaacttaactgcttatagtctactgttgactagaagccttaccaataacataaaaacaggctgattaatccatattttgtatgttatatgtgttatatactatattctgtgaataagctagagaaaagaatattatttggaaaattaaaagaaagataaaatgtatttactattcattaatggaagtggatcatcataaagatcttcatcctcatcattttcacattgagtaggctgaggaagagaaagaggagaggttggtcttgcggtctcggggtggcagaggcagaggaggcaggaaaggcaggagcactaggtataacyttatggaaatacattgtaatttctgtctgacttttttgctttttcatttctttaaaaatgtttctataaagtaccaatccttctgtgttcactttaaattcagtgccctgtatcatagaaaggtccatgtcctgaaagaagtctggaataatggaaacatttctgccagattgtccaatgttaatttttttttttctggcactgctgtttctactacatcttctccctcatcatgtggcactggttcagaagcactcatctccataaaatcatctgta

SEQ ID NO: 736500 - DNA, 624 bp, Homo sapiens
tataatagatttgtgtatattttatgatagtaaatgataaaatagagtagtatctacatttataccttcttatttttaaaaatatttcaacactacaccattcatttgaggtgcctttttttttttttttttttttttgagacatagagtctcactttgtcactgaggctggagtgcagtgtgtgatcttggctcactcctccctttgcctcccgggctcaagtagtgatcctcccacctcagcctcccaagtagttgggactacagatgtgactaccatgcctggctaagtttttgtattttttttstagagatggggtttcaccatgttgctcaggctggtcttgaactcctgagctcaagcgatccgcctgcctcagcctcccaaagtgctgggattataggtgtgagccaccatgcccggctatgtccgagtttttaaaaattgtcataagtctccaaaaatttttccaatatatttattgaaaaaaatccatgcataagtggttctctacagttcaaactcatgttgttcaagggtgaactgttaccttctttggaaaggtgtctgttaaggtcatcggcccatattttaatcagattgtattcttatttttgagtttt

SEQ ID NO: 736501 - DNA, 578 bp, Homo sapiens
tattggctgtgggtctgtcataaatagctcttattattttgagatatgttccatcaatacctagtatattgagagtgtttagcctgaagggttgaattttattgaaggccttttctgcctctattgagataatcatgtggtttttgtcattggttctgtttatgtgatggattatgtttattgatttgcatatgttgaaccaggtttgcatcccagagataaagccgacttgatcatggtagataagctctttgatgtgctgctggatttggcttgccagtattttattgaggatttttgagttgatgttcatcaggtttaatggcctgaaattttctttttttgttgtgtctctgccaggatttggtatcaggatgatgctggcctcataaaatgaattagggaggagtctctctttttctrttgattgaaatagtttcagaaggaatggtaccagctcctctttgtaactctggtagaattcagtcgtgaatccgtctggtccagggctttttttttggttggtaggctaccaattactgccttaatttcagaacctgttattgctctattcaggg

SEQ ID NO: 736502 - DNA, 570 bp, Homo sapiens
ttttctttttttgttgtgtctctgccaggatttggtatcaggatgatgctggcctcataaaatgaattagggaggagtctctctttttctgttgattgaaatagtttcagaaggaatggtaccagctcctctttgtaactctggtagaattcagtcgtgaatccgtctggtccagggctttttttttggttggtaggctaccaattactgccttaatttcagaacctgttattgctctattcagggattcaacttgggtttagtcttgggaggtatgtgtgtccaggaatttatccatttcttctagattttctagtttatttgcatagaggtgtttatagtattctctgatggtagtttgtatttcygtggggtcagtggtgatctcccctttatcgttttttattgtgtctatttgattcttctctctttttttctttgttagtctggctagtggtctatctgttttgttaatcttttcaaaaaaccagctcctggattcattgactttttgaagggttgttcgtgtctctatctccttcagttctgctctgatcatagttatttctt

SEQ ID NO: 736503 - DNA, 573 bp, Homo sapiens
tacgtgcatatgttatatgcgtgtgactgaatagtgtatatggtacgtgtgtcttgtctgtgtgtacaactacatgtctatgtgaagaatctgggtggtgtgtgtgtctgtgcccttgtatgtgcatgtgtttgtgtgtgtgtatacaaggtatgtgtgtwtacagagtatcttagtgcacatgtgtgtgtagagggccaggcagcaagaaggcctcccagagaggacaatctttggcctggctcttggaggaggaggaacagttcagtaagtggaaaaagaagggagaggccttccaggaagagggacaggcaggcagggtgtgtacaggcagaggtgtgactgagactggcatgtgtggggcatggtggcagggggtgagggggtggcgaggagatgggggcacggatgggagaaggtgaggactcagtttgcgggggcacactaagtgtgcctcactggagccctcagcgcccctttagaatttgaggtgggcttgccagagttttgggaagatggcagcagcagcagggcagcacctctgggaagtcccgggaagaggcctggctaggc

SEQ ID NO: 736504 - DNA, 573 bp, Homo sapiens
tacgtgcatatgttatatgcgtgtgactgaatagtgtatatggtacgtgtgtcttgtctgtgtgtacaactacatgtctatgtgaagaatctgggtggtgtgtgtgtctgtgcccttgtatgtgcatgtgtttgtgtgtgtgtatacaaggtatgtgtgtttacagagtatcttagtgcacatgtgtgtgtagagggccaggcagcaagaaggcctcccagagaggacaatctttggcctggctcttggaggaggaggaacagttcagtaagtggaaaaagaagggagaggccttccaggaagagggacaggmaggcagggtgtgtacaggcagaggtgtgactgagactggcatgtgtggggcatggtggcagggggtgagggggtggcgaggagatgggggcacggatgggagaaggtgaggactcagtttgcgggggcacactaagtgtgcctcactggagccctcagcgcccctttagaatttgaggtgggcttgccagagttttgggaagatggcagcagcagcagggcagcacctctgggaagtcccgggaagaggcctggctaggc

SEQ ID NO: 736505 - DNA, 575 bp, Homo sapiens
aatgtgtaattatccaatcagggtatttaggatatccatcaccttgaacatttatcatttctttctgttggaaacattttaaattttgctttctagctatttggaaatatagaatatattgttgctaattatagtcaccttactttgctaccaatttttagaacttattccttctgcctaacaktatgtttataccttaacccacctctcttcacactctgccttactctccagcctctagtaaacatcattctactctctacctccatgagatcaactttttaagctctcagttaactaagcagaagtctcataaggaaataagagacttgaaaaacatttttaaccaactagatgtagcatatatctatggagtacttcaccaaactgtagctgcagaacatataatctgaagtgcacagggaatgttttgtgagatggaccatatgctgaaccgtaatacaagcctcaatacacttaaaatgattgaaatataaagtatgttctcttctccaatcacaatgaaataaaattagaaatcaattaaaaaaggaaattggggaaaccacaaatat

SEQ ID NO: 736506 - DNA, 610 bp, Homo sapiens
gaacagaacaacaacgatgtttggggaacaaaggaagataaccttaaggtctgactgcctgtggggtccagcagaatgaagccatagttttcttcttgcagaaagcgagtaggagaagtatcgctgaatttttttcccagcaaggaataaccctggggaaggaatgcatttccaggggtaggtctatggatggccactctgggagtgtctgtcttacgtggttgaagctaagggatgaaataagccctggtctcctgcagtaccttcaggcttactaggattgggaaattccagcctggtgaattctagtcagactggttgtctgctctggaatcctgtttcctgttaagatgtttatcaagacaatacatgcccagtgggacatggaacctcatcagtaattcttatttcaccctgaccttgtgatcttgctctgctcttctgccctcrtgatgttttattgccctttgaagcatgtgatctttgtgacttactccctgttcatacccccctccccttttggaatccctaataaaaacttgctggttttgcagcttaagaggcatcatggaacctaccaatagtgatgtcacccctggaggcccagctg

SEQ ID NO: 736507 - DNA, 419 bp, Homo sapiens
ccctgcactgcctgaagtggggtctaccgcacttgctcactactttgtctgtcagtggtgctgcagggtgtgtctctccagctcaatagagagggaaagacaaatgaaaccaaaacaccaaaaaacctaaagaaccacttgtatcacagcctgaatacaaaccrattttaaaccagatatacctagacaaatgatcaaaatcaaaacaaataagcacacatgagactaaaatcaagaagccctttatggccttagccaagttttccaaagaaggagcaaaagctgtaaccattccaaaattcagataactcccaatggtagtataaaggaagaaaaattttgctagcaacaaatgggatacaacccacatctctgtgtggtctcattttccaggaccccagtgtctcagctgaccatct

SEQ ID NO: 736508 - DNA, 695 bp, Homo sapiens
aaatgttctgaatttcagtatgaagactacattatccattttaataatagctgttatttaatagatgccaacgctctggaagtttaataaatacctacagtgtaataacagtcaccattttaattaataggcattcaatacacattgtgtcagctccacctagtagtactgcttgtagataacaaaattacgactcagagatgcacaatcatctagctaattaatacagaatcattatttgcacctggatctgattctagatcttgggattttaccttataattcttatatataaataacattccattggaatgtttattttaaaacagtgtaaacatttctagaacattactaatctttgggaacttaaactgaatatatatatcaaatagtattagataggtgttttaaccaaaaatactggcttcgtagttgttcagttagaactttaacattgccacttacaaatgatgggatcttaggaatttaagmcaaagttttggtgagtctcagttttctacatctgaaaagtttcttctcccacttacaaatgatgggatcttaggaattcaagccaaagttttggtgagtctcagttttcttcatttgaaaatgggaaaaaaataagatcatacatttgccattaggttgctgttaaaataattaaatgaagtaatatatgcaaaatgcttagc

SEQ ID NO: 736509 - DNA, 473 bp, Homo sapiens
tcatactgggtgacagtgagactctatctcaaaataaaataaaataaaataaaataaaataggacatagaaaatgtgattaatataatcaattgacataggatctgatataagggtcaatcaaataataaatattttaggctttgcagwccatatggtctctgctgtacgactcaactgtagtgtaaaagcagccacagacactatagaaacaaatggtcatagctgtaatcaaactaaacattatttactaaaatgggcagtgggccagatttggtccataggctatagttttcccacctctgatctaatggtataaaattttacatatacatgcatacaactttatatcctgaggacaggaaatgcaccttttactcaagcactcagggaacacttaaagaaatataacaggagaatttctaagatagtcaaaatggtatagatgatattttctgaccacaatgaaataaa

SEQ ID NO: 736510 - DNA, 645 bp, Homo sapiens
ataaaactcaataacaaaagaggaaacaaaataacttctttgacagatataacagagcagctcaatcaataggactctaactcatttgtcagattccttcctgtggacaagagccagaaggccaaagtctgcatttttcccattcccttgagactaaggttctgtaagggcctgcctttcaccaaagacacatatctatgagagacttggaagcagaattgaattttgtaagggaagaccatggctgctcaggcaggtatcatctgggagtttggtttttctgcaacagttgcagtggagtgttttggtgtctagtcattatctttgtgagcagcaaaggagaggtggtagcaatgaactttttactggcacagtacagtgggtcattgatcctgaccatactgcttctcataaaatatctaggcttgatcctctagctcattcagaaactctgaaagctaaatagaccccataataaattcctgtcttcataaactggggagtatgttctgttgtctgtaactaagaacttgttcaaaacaaccccaaccacttgaaggttttacaactgtctaaatctttgtaactcttttaaaggtactwagtggcagggccagcactagaagtgctgtttgtactgagcca

SEQ ID NO: 736511 - DNA, 535 bp, Homo sapiens
cacttggaaaactacagactggcagattaaagatacccttctttgtggatgtgaatctggaaacaaatcatggctgctgatcgaactgtctggaacaattgcatagatactctcaaataaggactggttttctgatggaacccaccattcatcaagtctggctgtttctgatgcagaggctaccaatgaatgacagacttgtgactcctgccaaaagctgacccattagtcttgcaatgagaaaggtcatattgcaaggagcattaccccctaytgctcctggcagattggctacatcaggccttcaaacccctctcagggctatcaatgctgccttaccactgttgataccttttcggattattactggtcagctgtttccagccacaccattgtagctcttgaacgaatctatatactcaacaatgaactggctgtccagctccctctctccctcatctcctcctggtccatacactttagtaaggtactttgatcattgaatgtactatccccaaaaagggatcatcacttc

SEQ ID NO: 736512 - DNA, 471 bp, Homo sapiens
aattaataaccctacagtggcccctaagtgttcaagtgaaaggaagacgcacacatctctcacacattttaaatcagaagctggaaattattaagcttagtaagaaaggcatgtcaaaagacaagacaggccaaaagcaaagccccttgcaccaaagagttagccaagttatraaggcaaaggaaaagttcttgaaggaaattaaaagtactactccagtgaacacatgaatggtaagaaagtgaaacagctttattgctgatatggagaaggttttagtggtctgggtggaagattaaaccaggcataatatttccttaagccaaagctttatccagagcaaagtcctaactctcttcagttgtatgaagaccgagagaagtgaggaaactgcagaagaaaagtcggcatctagcagaggttggttcatgaggtttaaggaaaaaagcctccttcatgacataaaagtgc

SEQ ID NO: 736513 - DNA, 588 bp, Homo sapiens
tattactctatatatattaaataatataggccgggcgtggtggctcacgcctgtaatcctagcactttgggaggccgaggcgggtggatcacctgaggtcaggagttcgagaccagcctggccaacatggcaaaaccttgtctctactaaaaatacaaaaattagctgggtgtggtggcacatgcctgtaatcccagctactcaggaggctgaggcaggagaattgcttgaacccagaggtggaggttgcagtgagctgagatcgcaccacttcacttgagcctgggcataggagcaaamctccatctaaaaacaaaaaaaagaatatatatatatatataaaactatatacataaaaagattataaccttttgttatatagtaatatttattgttaagatacttgagtttatgggaatagtaggactgcagacataagaaaacctttatatgataaggttaatttctgttgcttatctctctttttactatgacccaacatgcttcacaggcgcttggtgagaggttcacagtttcacctcccttcccacagccatgaccccctctctgaaatcatcataggaggcc

SEQ ID NO: 736514 - DNA, 572 bp, Homo sapiens
atgggctggtgttgagtgtctgtgtcttttccaggtgcacagtgcaagttgtcaattaatctaccattctgggatctggagaatggtggccctcttctcacagctccattagacagtgtcccagtgggaactgtgtggsagctgcaaccccacatttcccttcctcactgccctagcagaggttctccatgagggcccctcctctgcagcaaacttctgtctggacacccaggcatttccatacatcctctgaaatctaagcagaggttcccaaacctcagttcttgacttctgtgcacctgtaggcccaacaccacatttaagctgtccatgcttggggcttgcaccctcttaagcaatgacctgagctctatgttggcaccttttagccatagctggggtgcaggccaccaagtcttgagacttcacaaagcagtaaggccctaggcctggcccacaaaaccattttaccctcctaggcctccaggcctgtgatgagaggggctgccatgaacacatctgacatgccctggagatgttttccccattgatttggtgattaacatttggct

SEQ ID NO: 736515 - DNA, 572 bp, Homo sapiens
atgggctggtgttgagtgtctgtgtcttttccaggtgcacagtgcaagttgtcaattaatctaccattctgggatctggagaatggtggccctcttctcacagctccattagacagtgtcccagtgggaactgtgtggcrgctgcaaccccacatttcccttcctcactgccctagcagaggttctccatgagggcccctcctctgcagcaaacttctgtctggacacccaggcatttccatacatcctctgaaatctaagcagaggttcccaaacctcagttcttgacttctgtgcacctgtaggcccaacaccacatttaagctgtccatgcttggggcttgcaccctcttaagcaatgacctgagctctatgttggcaccttttagccatagctggggtgcaggccaccaagtcttgagacttcacaaagcagtaaggccctaggcctggcccacaaaaccattttaccctcctaggcctccaggcctgtgatgagaggggctgccatgaacacatctgacatgccctggagatgttttccccattgatttggtgattaacatttggct

SEQ ID NO: 736516 - DNA, 605 bp, Homo sapiens
caggccaggcacagtggctcatgtttgtaatcccagcactctgggagaccaaggcaggaggatcacttgaggacaacagttcgagaacaacctgggcaacacagcaagaccctgtctctacaaataatttttaaaaaatcagtcrggcattggccaggcacagtggctcacgcctgtaatcccagcactttgggaggctgaggcgggtggatcacgaggtcaggagttcgagaccagcctggccaagttggtgaaacctcgtctctactaaaaatacaaaaatgagccgggcacggtggcgggcacctgtaatcccagctactgaggaggctgaggcaggagaatcacttgaacctgggaagcagaagttgcagtgagccaagatcacgccactgcactctagcctgggtgacagagcaagactccgtctcaaaaaaaaaaaaaattagtcgggcatggtggtgcatgcctgtggtcccagctactcagtaggctgttaggaggattgcttgaagagcccaggaggttgggggctacagtgagctgtgattgcacattgcactccagcctgggcaacaagagcgaaactccatctgaaaaaaaag

SEQ ID NO: 736517 - DNA, 527 bp, Homo sapiens
aaatactcattagttatgtttcctgatcctctccttcctcccaccctccaccctcaggtaggcctcagtgtgtgttgttcccctctgtgtgcccacgcgttctcatcatttagctcccacttaaaagtaacaatgtctggtatttggtttcctgttcctgcattagtttgctaaggataatggcctccagctcaactcatgttcctgcaaaggacatgatcttttcttttttatggttgcatagtawttcatagtgtatatgtaccacattttctttatccagtctaccgttgatgaacattatgttgattccatgtctttcctattgtgaatagtgctgcaatgaacatacatatgtgtcttgatggtagaatgatttatattcctttgagtatatgcccagcaatgagattgctcagtcaaatggtagttctgtttttagttctttgagaaatcaccatactgctttccacaatggctgaactaatttacattcccatgagcagtgtataagtattctcttttct

SEQ ID NO: 736518 - DNA, 548 bp, Homo sapiens
ggaaaacccgtccctatctcaaccaggttggcatctgtgctggagtcttttgataaagagggtttcttctgcagacagctaagacatatctccctgagattcctccctcatcttcacacccatgatcctcatataaggaaagaactgagccctatacatataggtaccatttattcttaccatgtgccagccaccrtgccaaacactttatatgcattttcttatttggtcttcacaagcaccctgtaggttatagaagaggaaactgagacttggagaggtgaagtctggccagtaaagaaagaggcaggcttagactctcgtctgcctgactctagagtccaccttcctgcccactcttgctgtctttccgtctttctaggctctggtggccttgaatgtcctcactgctccctgtctaacccccaagccccaccccagcatgcagaacctcatctaggtaagaatactcaatcacaagagttggggttgttcacatccagtaacttgtctttgttcaaactggttcctttctggttttttccttt

SEQ ID NO: 736519 - DNA, 665 bp, Homo sapiens
cggttttcagacagtccttttggtctcctttgtttcgtcttcaatctggagtacctgaaagctggtttcctgcccaattagcattctgcatggttcatttggctcatggcaaccaataatcacaacaccatttgtacatcacagttctgtgatccaatttgggcttaaaaactgtagggaaaaattattgtgaaaaaaaatttgsgtgtagaaagtcaatacaaattagtttcagatgaacctaaatagacctgacaaattcaccaagcagatgcctattaaaatgaagaatgttcttaaggttttctgtgaatttgggggtttggggcaaattaggattataactttgtagtaatggtatgttttacaaaggccatttcacttcaggctaaggagagtgaaaggctgagacaagtagatggaaaattcagatataataggcttacttatgaagtaaatgttttcatttagaatccttatattgacagtcttcctttatctaattttctgaatagctgcttaagtctaagttatatttagcctatataagcacagtcacagacagggaaatcgacaaatgtttgcagatacctataaatatgctacatgtgggtagcacttttcaaagttttgaaagtgacttaaacagcctcttaaattgcagc

SEQ ID NO: 736520 - DNA, 649 bp, Homo sapiens
gctcatgcctgtaatcccagcattttgggaagctgaggcaggagcatcccttgagtctaggagttcaagagcagcctggacaacataatgagaccctgattctacaaaaataatttttaaccaggtgtggtggcacacacctgtagtaccaactgcccaggaggctgagttggaaggattgtctgggcctacaatgtggaggctgcagtaagctatgaccacgccacactgcattccagcctgggcaacagagcaagactytgactcaaaaaaaaaaaaaagaaagaaagaatatttttaacatgtcttatagataacttttgaaaaatatcaaataatattttcttgatctgacatatttttctctatacaaatgaattctaatgaaaaatatgtggaatataatgcaaaaacaatcagaaagtattcttaaaagctcaaagatatgcagagatcaaagcagaaacacatcataatacaatagttatcagccagaagaatgtttttgtggttgagataataagaaaagagtatgaagcacaggaagttaagttagtaaataaaattattattctaatgtattgtgatgttctttatagtattactgtagaaagtctctaaaagtacttgttatgagtgaaaaatgatg

SEQ ID NO: 736521 - DNA, 634 bp, Homo sapiens
acaatatacaggttgtgcagcttgcgtatattgcatcactgttaccagtattcaagcttcatattaccaaaaatcttttaaaataggattagatataacaatactcgcagccgtgtaaaatgccacttatggatcttttacttgcaatgaagaatgttgcctaaaatgttactctaggacgggttatgtaaaataatactccctcagggctctgccctaaagtctggaatacaaaggatttactgtgattaaaaaccatactagctttgcaaatacaataaatggtaaattacagataaggtataagggtaaagatagaccaagattgtttacagaaagtgactcatcamaatcaaaattgtgcttcttctcattaaatcatcttttaaaaattctcagattatcccttccctatcttgccaccactttataagaattcagtagtgggaacaagagatgactggcatccattttcaagtgattctgttctcttcatgttcttataaaactattgtcagaactgctataaatagccaaggcttctgctggtactttagcttactttatcttcagcattaaaaattcactttttctttgttgctgaggcaaattgcaggttaaaaaactaatatgg

SEQ ID NO: 736522 - DNA, 616 bp, Homo sapiens
aaaaaactaatatggctatttcttcatattttcatgtaatgaccctttcccacccactggtatctactgatattgatatactaaagtattttgaaatgacaaagaacatttgtgaaatgtttgcatattttatacacatcaagttagaaggatgggttgtaaggatgggatcaagtctatggtgaggaaaatgrttttcttattttattcccctgtgcgtgtgtgtgtatgagtgtgtatattttcagggatgtttttgtttttcctctgcataaatgttattctttcatgttccatggataccttgagtagtgggatatatatgaaatggttgatagattttttttttttaatatataaaacattagtacaaggcaggctagcatcctttatggatacaaccaaaggtgcattgtggtctaattgtggatttcagatcaagttaagaaaaatatagcctagttaataaggtctcttggcttctgccacccagcggcagccttttacaatgagaaacacatagcaactatgcaagtaaaagagaaaaaatggataagaaatgtcctacacatgatatagcagtgttgatattactgcctatatcttctttgctgtg

SEQ ID NO: 736523 - DNA, 617 bp, Homo sapiens
cattttctgtgttcatggactctatccctagactagttctaaaaattaaatttctaagcatttagatacagtgtttagctctggaattagacttccttgatttactaatgcttgtgtttgaatattatttttaaaagcttattatcaatataaatatttgcctccaattaataagcacatacagatggaatcacatagtcttcagagaaagtgaagggagttaaattttaaatgactagaactcaaatgctgcacaataactgtatctggtaaaaagctttggaggtggaaaaaatggaaagggggagggaaattgaaaattatctgcagaaagtttaaacgttggttttcaaacacttaagactttctactccattaaaactgataatttgactttcttcatccttttgcagttacatgaratgaaaatactttgtgttccacaatgacctcaattttattaatgttagtcactccctgatgcgtgcggttcttaggctaccactcctcttatttatcattggcattagttgatgaatctggtgttgcctaaggaaagcttgttgccaagaaggatgtagtgtgattttactgtgtttataatccttaatcctcat

SEQ ID NO: 736524 - DNA, 531 bp, Homo sapiens
ggttttatttagtttcaataactaatttattttcttcttacttcttgttttcttctcagttctagaacagtcagagaaattttaatggatgaaaaaaatatttgctccatcacacccctgattcatttcccagtttgggtactggttaacaaaatatttgatgttaagagttttcttcattataggatatggagaaaacccaagacttttacccacttacctaactgcgtaatgttccatctccatgttgccaggagataattcatggttgagctgctgtaaaatttccctttagcagccrcagttgctccaaggtggatgattaaactgaagggctagctttagaactagagagaacttgacagcttcacagaatgtgtgatttaacataaattctgatggaggaaacagcaagaatgacagggatttcagcagaataggcagcaattactaatctttctgttaacagaataactgactgatcattaggctactgttgctgttcttgtagtctcaggagttcattggaca

SEQ ID NO: 736525 - DNA, 614 bp, Homo sapiens
cctctacccagttttttcttttttttgcttattttcttttataagcatagttgtaaaaatcagaatgtttttaatgttttaatgattttaacattcagagtaattagacgctgaaagagtcccttgagagagaaagttgggtaatcactgatacgaagtgaaccaaaaaaatactaggtagtctcaaaactgaagaacaaggcctgaataatcggaaatagccaaaggacatgttggtgattgtgctattacagaggctagttctttataatrgttatattttaatactttggaaatggatcaaaagcagaggtcatagttgaaagatcagaggtgaagtaacagggaaaacataataatgagcttttactttaatcacttaatgcacaagtttaagtctgattttctttaaacaaaggactattatttgaagaacaccaaaagaccttgacaaagagaagattatttgaagtttaagttctaaactcttttaagggtttaaagtattgtgaggagaccctttaaaacacaccaccactgttggggactcagcaaaagtgaaatgaggaagaaccctatttttaatatctttgaaaaggagattctgcctttag

SEQ ID NO: 736526 - DNA, 576 bp, Homo sapiens
ggaaagagccaagagggtatgtccatgaaaccaaagagctttatcatagtaacaatatcatcctgctgaaaaatcacaatcattttgaaaactgcctctttacaaagcagggttattaataaggttataaattccttatcactttcttactgagacagaacaactgagagaagacattcagaagaaaaacacaacctagaaagccccatctctagtcataaagactaccagttgtgtgagcacaaactttaccagaggattataaaatgaataaagtaatattttccacargaaaaacataggctgttagaaagatatcagacatattgcttaattgtggatttgagagcaaacaagccaatggggaaagtgatacattaagtttggggtagtaaaaagtaatgaaaagagagcaggaaagaaaggaagaaaacatttatgttttactatgaatatttcactacatctattttagactttggcctctagcagtgttcttaaagtgcaagctttgacccaacctcttacatcagaatggcaagggacgacagaaaaataaagattcctgaatgccac

SEQ ID NO: 736527 - DNA, 578 bp, Homo sapiens
aaataactaaatttcctgactaattcaaatgaaagtatgatcagagaagactatttcatttgtattatataggcaaatctatagctctatagcttaaaaagataaatcagagaaacattctgatgttagctatgacaaatgtgtcatcaaacccgagtggcaaatagggaatggtatggcagaccaagttaaaaggtgatttggtatcatatgtcctggacaagatgaatgtcaaaatagtgtaccttggcagagtgtttaataggaaaaaatgaatgcccatgctccaaagsctccacagccaaaatggagtagtccattttaattttcagaggaatttggtgaacaaatgactggatatccaccaaaccttgatgctaatgaaaaatacagtgcattctgagaaaatcaatatatagtttgcctgaaggtatcccaaaggaaacattcagttattgaggtttaaaatatgttagccccagaataataaaattcttgaattgcaggcgtttgcaagaacagcaaaggggttaaagacattttatattttatcaaagctttaaaactgctgtgcagag

SEQ ID NO: 736528 - DNA, 519 bp, Homo sapiens
ttctgataaataggctcccagaagagacaatttgggaagctagaaaatacttttttttttctttttctttttttttgagaaggagtttttgctcttgtcacccagtttggagtgcagtggcatgatctcggctcattgcaatctccacctcccaagttcaagcaattctcctctctcaggctcccgagtagctggtaytacaggtgcgtgccaccacgcccacctaatttttgtatattcagtagagacagggtttcaccattttggccaggctggtcttgagctcctgacctcatgattcatctgcctaggcctcccaaagtgctgggatgacaggcatgaaccaccgtgcctggcctttatttttctttatagcacggcatggcattgtccaggcctttcaggtgggggaaccatcggaaacagggaggtggaaggagatcgaggggtggtagtgactgacaaatcaaaagaaactttatgctgcctaatgtgaaccttaaaggttaatgcactttt

SEQ ID NO: 736529 - DNA, 519 bp, Homo sapiens
ttctgataaataggctcccagaagagacaatttgggaagctagaaaatacttttttttttctttttctttttttttgagaaggagtttttgctcttgtcacccagtttggagtgcagtggcatgatctcggctcattgcaatctccacctcccaagttcaagcaattctcctctctcaggctcccgagtagctggtattacaggtgcgtgccaccacgcccacctaatttttgtatattcagtagagacagggtttcaccattttggccaggctggtcttgarctcctgacctcatgattcatctgcctaggcctcccaaagtgctgggatgacaggcatgaaccaccgtgcctggcctttatttttctttatagcacggcatggcattgtccaggcctttcaggtgggggaaccatcggaaacagggaggtggaaggagatcgaggggtggtagtgactgacaaatcaaaagaaactttatgctgcctaatgtgaaccttaaaggttaatgcactttt

SEQ ID NO: 736530 - DNA, 519 bp, Homo sapiens
ttctgataaataggctcccagaagagacaatttgggaagctagaaaatacttttttttttctttttctttttttttgagaaggagtttttgctcttgtcacccagtttggagtgcagtggcatgatctcggctcattgcaatctccacctcccaagttcaagcaattctcctctctcaggctcccgagtagctggtattacaggtgcgtgccaccacgcccacctaatttttgtatattcagtagagacagggtttcaccattttggccaggctggtcttgagctcctgacctcatgattcatctgcctaggcctcccaaagtgctgggatgacaggcatgaaccaccrtgcctggcctttatttttctttatagcacggcatggcattgtccaggcctttcaggtgggggaaccatcggaaacagggaggtggaaggagatcgaggggtggtagtgactgacaaatcaaaagaaactttatgctgcctaatgtgaaccttaaaggttaatgcactttt

SEQ ID NO: 736531 - DNA, 653 bp, Homo sapiens
cccctcccccagcctcactgcctccttgcagtttgatctcagaccgctctgctagcagtgagcaaggctccatgggtatgggaccctctgagccaggcatgggatataatctcctggtgtgccatttgctgagaccattggaaaagcacagtattagggtgggagtgtcccgatttttcaggtaccatctgtcatggcttcccttggctaggaaagggaattccctgactccttgtgcttcctgggtgaggcagtgccccaccttggttyggctcacagtcacgtgggctgcacccactgtccacaagtcccagtgagatgaacccagtacctcagttggaaatgcagaaatcacccgtcttctgcgtcactcacgttgggagctgtacactggaggtcttcctatttggccatcttggagggcagagctccttgctttttttgtatactcactataggtttttgctttgtatttatcatgaggcttacaaaaaaacatcttatagtcataactggttattttaagctgttgacaacttaacttgattgaaaaaacaaagactccacaatactctacacttttatttcactctcccatttaaaagttttgacttcataatttatatatttttacattgaatatctcttaacat

SEQ ID NO: 736532 - DNA, 653 bp, Homo sapiens
cccctcccccagcctcactgcctccttgcagtttgatctcagaccgctctgctagcagtgagcaaggctccatgggtatgggaccctctgagccaggcatgggatataatctcctggtgtgccatttgctgagaccattggaaaagcacagtattagggtgggagtgtcccgatttttcaggtaccatctgtcatggcttcccttggctaggaaagggaattccctgactccttgtgcttcctgggtgaggcagtgccccaccttggtttggctcacagtcacgtgggctgcacccactgtccacaagtcccagtgagatgaacccagtacctcagttggaaatgcagaaatcacccgtcttctgygtcactcacgttgggagctgtacactggaggtcttcctatttggccatcttggagggcagagctccttgctttttttgtatactcactataggtttttgctttgtatttatcatgaggcttacaaaaaaacatcttatagtcataactggttattttaagctgttgacaacttaacttgattgaaaaaacaaagactccacaatactctacacttttatttcactctcccatttaaaagttttgacttcataatttatatatttttacattgaatatctcttaacat

SEQ ID NO: 736533 - DNA, 653 bp, Homo sapiens
cccctcccccagcctcactgcctccttgcagtttgatctcagaccgctctgctagcagtgagcaaggctccatgggtatgggaccctctgagccaggcatgggatataatctcctggtgtgccatttgctgagaccattggaaaagcacagtattagggtgggagtgtcccgatttttcaggtaccatctgtcatggcttcccttggctaggaaagggaattccctgactccttgtgcttcctgggtgaggcagtgccccaccttggtttggctcacagtcacgtgggctgcacccactgtccacaagtcccagtgagatgaacccagtacctcagttggaaatgcagaaatcacccgtcttctgcgtcactcacgttgggagctgtacactggaggtcttcctatttggccrtcttggagggcagagctccttgctttttttgtatactcactataggtttttgctttgtatttatcatgaggcttacaaaaaaacatcttatagtcataactggttattttaagctgttgacaacttaacttgattgaaaaaacaaagactccacaatactctacacttttatttcactctcccatttaaaagttttgacttcataatttatatatttttacattgaatatctcttaacat

SEQ ID NO: 736534 - DNA, 516 bp, Homo sapiens
agttttgacttcataatttatatatttttacattgaatatctcttaacattagttattattttcatagtttcactttttaaccttcgtacagaaaatgtgatttacatactgccattacattattagaatattcagaatttgactatgtacttaattttattagtgagttatatactttcagttgtttttgtgttactcattagacttcttttctttcaccttaaagaactctccttaaaattttccgtaagacagatttggtggtgatgaattccctcagcttttgtttgtctggaaaatcttctttcttcctcatttctgagaaacagatttgctgaatacagtattcytgtttggcaggatttttttatttgagcactttgaatacatcatcccactctctcttggtcattagatttctgctgagaggtctggtgttagatatattgggacttctctatatgttgtttgcttcttttctgttgctgcttgcaggatcctctctttgtctttgc

SEQ ID NO: 736535 - DNA, 645 bp, Homo sapiens
cttactttcctctctttcggccaggtaaatgttgtctttctctgtgctgtgctacttggggttctggaaagggcaacataggcaatcccatggccactgaggctaatgcaaattggtcttccccaggcccagtgccacygatagcagtgcagcactggggcatgcctaaggcctgtgtgtgccctgccctgcctgccactgaggtttgtttagagcccaaggccactacagtaggcctgcagtgagtttagtctatcatgctgagtttagtccgtattgactggaacataagtccattccactggggctgcagtttcctgtctagtgctagggtgggtctggaggttctgtccatgggtaccagcctgatgtcaggtgccaagaggttctgtctggtgctagtcttctggctggcctagtactgttctgcaaagcaaagttttatgctcatttctctcctcttcccccaaatggacaatgtctctgcactgtggtgcgtagggttaggggaggggtagcataggtaatattaaactgttctttctatcctcttcaatgtgtcttgtcttattattatgctaaaaccaagtactggtatacaaggcgatctcttaccttgttgtccgatctcctgtgaaggctttt

SEQ ID NO: 736536 - DNA, 657 bp, Homo sapiens
aaataaatccaacagcttaatttgaagatctgaatttataccctagctttgcatagaagccttggcattggtagattagaagagctctatctttgagatctggacaatttttcaagctaagtatatagaacaagctcagaatacacaagggcaactgcgtttaaatcagatggagaatgctacttcacagaattagctgattgccagtgagcaagacaggttttgatttttccgtagttgaactgccaggaagaatttgagaagttgagaaaactgagttaggtgatggtatttttcagccattttataaaagtatggcaagacaaagagttttttaaaagacatatttcaagatgggatggrgtcagattttgtttaaaaagcttatttgccaaaaaccacaaaggcttttttgttgtgatgtctaatttggagcttttcaatatttctatctgctgatgcaaagaatatttgcattggtatacagaatggttttatatgttatttgcaagtccagctgccagtttccaatgcaaatgaaagtatttgtacttgcaaaagacacccacctgcagtctgaggatgatatagcagaaggctggagagttctaatatgtatttatatttgaatttccacctccttgttctccagtctta

SEQ ID NO: 736537 - DNA, 584 bp, Homo sapiens
catgtgttctctttattcgtgattcaactttggtaggctgtatgtatccaagaatttatccatttcttctaggctttccaatttgttggtgtctagttgttcatagtagtctcttatgatcctttctatttctgtggtattagttgtaatatctttttcatttatgattttatttataggggctctctttctctattagttattgtagctaaaagtttgccaattttgtttatcatttccaaaaactaactcagttgattttttgtatttttaaagtctccattttgtttatgtctgctctcatcgatattatttctttccctttactaattttgaatttagtttgttcttgattttctaattccttaaggtgcaatgttaggttgtttatttgatatatttccttttttcttttctctctctccttctttctctctctctctcttyttttctttttggcagggtctcactctcattgcccaggctagagtgcagtggcacaatcttggctcactgcagccttgacttcgtgggctcaggtgatcctcctacttcagtttcctaagtagctgggaccacaggtg

SEQ ID NO: 736538 - DNA, 606 bp, Homo sapiens
ttttattttaacctatgtatttttaaagctctttgaatactgtgagatttttcgttttctttagtctgacaatctctcttttaaccaatgtccttagtccacttaaacataatataattttggccatactgaatttgttttctatttgttccatctcttyttaattcctttgtgtctttttctctggcttctgttggactgagtacactttttactattccagtgtcttctttacttgcttattagctataattcttgctttatatttttaatggattgtctagcatttacagtatgtatttttaacttattacagcctccttacaaattatttataccactttatatataatgtaagctccttaaaacagtatactcctctttttccttcctttttgctattatgcatcttactttcacatttcctattatcagtttaattctacatatattttaaacaccaaaatacattgtaatcattttgcctcagttaattatactaaaaataatatcgatacttttttatacatttaccactatcagcttccttccttccttcacatagacaccactttccatcttgaaccattttatttcagcctgaag

SEQ ID NO: 736539 - DNA, 584 bp, Homo sapiens
taataatacacaactcctatatgatttgtgcttgaatagatctcctcttccaactctgctccattgtgtttagtcaacagttttcgattatctctatgttaatggggtgcatattcatttcaatgccaaaatatttctgggcttttggatattattttcctttgcagttcataaataaagtggatggacagaatttcaaggatcgcatcatttctgacttcatatcatcgattttatagccagaaagagctttctaatctttcagcatattcatgaattaaatgagagtaagttcaaagcacagaatattggaaacagattcatgcaaaatttatcttcaacagcaaagaggaataataatagcagtattytacttcataagaatatattaagagcaagtaaagtatcacagggcagtataaaatgtgtgtataagatgttatttttctaattctgttgtaagatattaaattgccaatactgtaataagtgggaaaataaacacttaaaaggatatggttatctagctaatttttatcataattatattttacataagcatctcaaactaagttttaaaatgg

SEQ ID NO: 736540 - DNA, 616 bp, Homo sapiens
acctttcattaattcatttgataaacatatcttattcacattttatttatttactcaacctgtttttgcacatatttattgaatgactactatatggccagcattgtcctaggagatgaattaattatctaagtgaacaaaattgacaaaattctcaaccctcttctctacattctaccaaaatatcctagttgtatcaggagaattttacatttaaaaataggaagctgttggacatcacatcatttgtttaatcagatattagatgcaagaaaccttgaaacagtgcttatgtttggcaaacctatgtaaagaatgtatgaatgaccaatgtaaaggaagtaaaatgcattayttttttcaagggcaatagaagattttcaagggtaattttgacaataagcaactttccaattcttgtcttagtggttgacttaagtatcctttgggaaagattacactctcctgtaatttgggtataactgtaaggaattaattagggattaagtttacaagctcttccaaaatagagttacttaggtattgggcaaatagctctcattgtttttaagaatgaatatgctattttgcagagcactaaaagtataggacaagg

SEQ ID NO: 736541 - DNA, 579 bp, Homo sapiens
tgaaactgggtaataggcagaggttggaacagtatggagggctcaaaagaagacagggaaatgtgggagagtttggaacttcctagagacttggagggctcagaagactttttgaatggctttaaccaaaatgctgatgtggacaatgaagtccaggctaaggtggtctcagayggagatgaagaacttgttaggaactggagcaaaggtgacttttgctatgcaaaaagactggtgtcattttgctcctgccctagagatctgtggaactttgaacttgagagagatgatttaggatatctggcagcagaaatttctaagtggatatcattcaagaggaagcagagcataaaattttggaaaatttgcagcctgatgatgtgacagaaaagaaaaccccattttctggagagaaattcaaactggctgcagaaatttgcataagcaatgaggagctgaatgttaatcaccaaaaaaataggggaaaatgtctccagggcatgtcagagacctttgtggcagcacctcccatcataggcccagaggcctaggagagaaaaatggcttcctaagatgggc

SEQ ID NO: 736542 - DNA, 539 bp, Homo sapiens
acatatacactatgaaatactatgcagtcataaaaaaagaatgaaatcatgtatttttcctaccaacatagatgcagctggaggccattaccctaaagtgaattaattcaggaacagaaaaatcaaatactgcatgttctcatgtataagtgtgagctaaacttttgagtacacataaacacaaaaaggaaaaccataaatgccagggcttacttgatggtgaagggtgaaagttagaatcagaaaactacctattgggtactatgctcastacctgtgtgataaaatcatttttacaccaaaccccagtgacacacaatttactcatgtaagaaatatgcacatgaacccctgaacttaaaagttggaaaaaaaccttggtcttctcttaaaattactgggtttcttttggagagactataataagagtttataaaaggctttttaaaactctctttacacaaacttcttggaaaaaaaaaattctgtgtttaatcaaaataatttattgtgctctgtattttattaggtcttctgat

SEQ ID NO: 736543 - DNA, 692 bp, Homo sapiens
gttattttcctgatcctctccctcctacaaacctcctctctttgataggcagggggtgttgttcccctctatgtgtccatgtgttctcatcatttagctctcatttacaagtaagaacatgtagtatttgtttttctgtttctgcattagttttctaaagataatagcctccagctccatccttgctcctgcaaaggacatgatcttgtttgttttcataactgcatactattccctggtgtatatgtaccatattttctttatccagtctgttactgataaacatttaggttgattccatgtgtttggtattgggaataatgctgcatgcatgtatctatataatagtagaatgttttctattcctttgggtatagacccagtaatggaattgctgggtggaatggmaattctatttttaggtctttgaggaattgccacactgtcttccacaatgattgaactaatttacacttccaacaatgtatgtgttcttttttctccacacctctgccagcatctgttattttttgactttttaatactagccattccaactgatgtgagatggtatctcatggtggttttgctttgcatttccgtaatgctcagtgaagttcagctttttaaaatatgcttgttggatccacatttgtcttcttttgaaatgtgtctgttcatgtttattgccc

SEQ ID NO: 736544 - DNA, 634 bp, Homo sapiens
tccatagatctatctgtttttctaccagtaccatgctgttttggttactgtggccctgtagtatagtttgaagtcaggtagtgtgatgccttcagctttgttctttatgcttaggattgccttggctattcaggctctttcttgattccatatgaattttaaaatagtttttttcaattatgtgaagaatctcagttgtagttttatagaaataacattgaatctacaaattgctttggccagcatggccattttaacaatattgattcttcttatctcttgagcatggaatgtttttccacttgttcatgttatctttgatttcttggagcaatgttccatatttctccttgtagagatctttcacctctctggttagctgtattcctaggtattgtatttyatttttttgtggcaattgtgaatgcgattgaatttctgattaggctcttggcttgactgttgtcagtgtataggaatgtcaataaattttgcacattgattttacattctgagactttgctgaaattttttaggataatggagcttttgggctgagattattgagtattttagatatagaatcatgtcatctgcaaacagtgatattttgacttcctctcttcttatttgg

SEQ ID NO: 736545 - DNA, 417 bp, Homo sapiens
ttttagcttccttggattaagtttcaatgtactcctgtagttcagtgatctttgttcctatctatgttctgaattctaattctgtcatttcagccatctcagctcacttcagaacctttgctggagagctgatgtgttcatttggaggaaaggaggcactgtggctttttgagttttcagggttcctgcmctgatcctttcattttcgtgggcttattaccttcaatctgtgagacttctgacctatggatgagtttttttcttttatcctaattgataaccttgagggtttgattgtggtataaggtggattcagctgactggcttcatttctggaagatttatggtggccaacactcaactcccagctcctggactgcatgctctaaatctgggtgacttgtattctgtcccaac

SEQ ID NO: 736546 - DNA, 554 bp, Homo sapiens
aaactattatgcaaatggagaacaaaaaacaccagggcttacaattcttttatcagataaaagagactccaacaacagcaaaggagaaagcaggtcattagataattataaagggtttaattcaatcataagccttaactatcctaaatatatatgcactcaacattgaataacccagattcataaaacraatacttctagaccaacgaaaagacccagagagccacacagtaatagtgagggatgtcagtatttcactgacagtgctatacagatcactacggcaaaaaaaacaaaaaccaaaaaacaaaacaaaacaaaaaaacctaacaaattctggacttaaatttgacactagacctagaccaatcagatataatagacatctacagaatacgtcatccaagaaccccacattatgtatttatctcattcacacatggaacatactccaagattgaccacatgcttggcaataagtcaagtctaaatgaattttttaaaaaatcaaaattatatcaagcatactattggaccccagtatattaaaagta

SEQ ID NO: 736547 - DNA, 554 bp, Homo sapiens
aaactattatgcaaatggagaacaaaaaacaccagggcttacaattcttttatcagataaaagagactccaacaacagcaaaggagaaagcaggtcattagataattataaagggtttaattcaatcataagccttaactatcctaaatatatatgcactcaacattgaataacccagattcataaaacgaatacttctagaccaaygaaaagacccagagagccacacagtaatagtgagggatgtcagtatttcactgacagtgctatacagatcactacggcaaaaaaaacaaaaaccaaaaaacaaaacaaaacaaaaaaacctaacaaattctggacttaaatttgacactagacctagaccaatcagatataatagacatctacagaatacgtcatccaagaaccccacattatgtatttatctcattcacacatggaacatactccaagattgaccacatgcttggcaataagtcaagtctaaatgaattttttaaaaaatcaaaattatatcaagcatactattggaccccagtatattaaaagta

SEQ ID NO: 736548 - DNA, 554 bp, Homo sapiens
aaactattatgcaaatggagaacaaaaaacaccagggcttacaattcttttatcagataaaagagactccaacaacagcaaaggagaaagcaggtcattagataattataaagggtttaattcaatcataagccttaactatcctaaatatatatgcactcaacattgaataacccagattcataaaacgaatacttctagaccaacgaaaagacccagagagccacacagtaatagtgagggatgtcagtatttcactgacagtgctatacagatcactacggcaaaaaaaacaaaaaccaaaaaacaaaacaaaacaaaaaaacctaacaaattcyggacttaaatttgacactagacctagaccaatcagatataatagacatctacagaatacgtcatccaagaaccccacattatgtatttatctcattcacacatggaacatactccaagattgaccacatgcttggcaataagtcaagtctaaatgaattttttaaaaaatcaaaattatatcaagcatactattggaccccagtatattaaaagta

SEQ ID NO: 736549 - DNA, 546 bp, Homo sapiens
tataaatatataaatttccatttttattttagattcagtgggtacatgtgcaggtttgctacaagggtaaactgtatgatgctaagggtttgacttctattgatccgatcatccagacagtgaacgtagtacccaataggaattcmgttcttgtcctcattcctccctccctccttttggattctacagggtgtgttgttcccatctttatgtccatctgtatctaagatttggctcccacttataaatgagaacatgcaatgtttgatttttttttctgtgtcaatttgcttaagatactagcctccagcttcatccatattgctgcaaatgacattatttcattttttacagctgtgtagtatttcctgatgaatatgtaccacatttgtttatttcaatgagttttagggtacaggtagtttttgattacataggtaagttctttagtggtaatttttgaaattttagtgcacatgtcacctgatcagtgtacactctatccaatatgtagtcttttatccatcacctccctgtcaacattcc

SEQ ID NO: 736550 - DNA, 583 bp, Homo sapiens
aaacttttgataaaatccaacatccctttatgataaaaccctcaacaaagtagtcattgaaagaacacacctcaaaataataagagccatttatgacaaacacacagccaacattttactgaatgagctcgaaccactcactttgagaactggaaaaagacaaagatgcccactttcaccactcctattcaacatagtactagaagttcttgccagggcagtcaggcaagrgaaagaaacaaaagacacccaaataagaaaagaataagtcaaatcgtctatcttcactgatattatcattctgcacttagaaaatcctaaagactcttccaaaaggctcctagaactgataaataactttagtaaagtttcaggatacaaaaatcaatgtacaaagaatttgtatataccaaaaatgtccaggctgagagtcaaatcaagaacacaaccccacttagacaatagccagacacacacacacaaatgctcaggaatatagctagccaagtagatgaaagatcgctataaggagaaatacagaacactgctgaaagaaatcagagatgacaaaaataaatggaaa

SEQ ID NO: 736551 - DNA, 583 bp, Homo sapiens
aaacttttgataaaatccaacatccctttatgataaaaccctcaacaaagtagtcattgaaagaacacacctcaaaataataagagccatttatgacaaacacacagccaacattttactgaatgagctcgaaccactcactttgagaactggaaaaagacaaagatgcccactttcaccactcctattcaacatagtactagaagttcttgccagggcagtcaggcaagagaaagaaacaaaagacacccaaataagaaaagaataagtcaaatygtctatcttcactgatattatcattctgcacttagaaaatcctaaagactcttccaaaaggctcctagaactgataaataactttagtaaagtttcaggatacaaaaatcaatgtacaaagaatttgtatataccaaaaatgtccaggctgagagtcaaatcaagaacacaaccccacttagacaatagccagacacacacacacaaatgctcaggaatatagctagccaagtagatgaaagatcgctataaggagaaatacagaacactgctgaaagaaatcagagatgacaaaaataaatggaaa

SEQ ID NO: 736552 - DNA, 583 bp, Homo sapiens
aaacttttgataaaatccaacatccctttatgataaaaccctcaacaaagtagtcattgaaagaacacacctcaaaataataagagccatttatgacaaacacacagccaacattttactgaatgagctcgaaccactcactttgagaactggaaaaagacaaagatgcccactttcaccactcctattcaacatagtactagaagttcttgccagggcagtcaggcaagagaaagaaacaaaagacacccaaataagaaaagaataagtcaaatcgtctatcttcactgatattatcattctgcacttagaaaatcctaaagactcttccaaaaggctcctagaactgataaataactttagtaaagtttcaggatacraaaatcaatgtacaaagaatttgtatataccaaaaatgtccaggctgagagtcaaatcaagaacacaaccccacttagacaatagccagacacacacacacaaatgctcaggaatatagctagccaagtagatgaaagatcgctataaggagaaatacagaacactgctgaaagaaatcagagatgacaaaaataaatggaaa

SEQ ID NO: 736553 - DNA, 585 bp, Homo sapiens
tgccaaaattattcataaaagcaataagcattacgtgcaatggccctgaggatactcgagacccttgagccatgttgggaaaagcagccatacattcacaagttacaaggatacattttcaccattctcagctgtctcccaattgcctgtactcagccccagatgctgatgttctacatggcaacaggaactcaataagcatttgatgaattaattaatccaataaaactttctcaattctcgctcatttaatggagtcaaccaaggtgcctatagaagaatagtgtgcaatgacaaggccctggcaaagaaaggtgtcttgacattgcgaatcctccatgcttacggctgcctacagaccaaggcaggtgatggtgaagagtgaagcaacacaccgtggtgataaacagtaacccacctcagcctctttttaaggaaacaggagtggyggggacctccctgtccacagcacaggagaaccagatacggagctcctctccctatctgaaggcagtggcagacgcatagctcagccaactgctgccaggtcagaagagggagccagtagatcaaattctcaaactt

SEQ ID NO: 736554 - DNA, 581 bp, Homo sapiens
ggttagcatacagcaggattatgaactgctaggcctgggatgcatcatagcaaaggaggctaaagattacttcctgctcctccagtcatatcctgaaagttcacactgactgctaaacgaaatcacattttccatactattgaaagcagtccctgccctgcactctggtgaactggaacaaggtgacttgagctaagtgaatcaagtaatttaaaaacagagctagaaatagaacccaggtatcccaatatccatcttcctctccaaaaagacaatagtaagaactagctttaaatgatcactttgccatgtacaggcatttacatataggttgatccttacaaagcactcttatgaggtaggggctattattatcacaatttgcaggtgaggaaacctgctcagagagactgtcattttccartttgagactgccaataagcagtggtgtaggatttaaacttgggctgtgtgagtgcacattcttaaccaccataacattctgcttctaatcctgagagctcatcttaacagtaatcaatcttacttttccctttaaaaacttttcacagctcactctt

SEQ ID NO: 736555 - DNA, 611 bp, Homo sapiens
aggtttggaggaaatgctaaattcatagaaaaagcacacctggccctcactactcatacttgccttttgcattactggagacacctgagaatagtcaagcattgttagagacagctggaccacagaagagagatgaggggaaggaaatgacatatttgtcccaagctcaaagaaccctttttaataaagctatcagagaactgaaaccttataactacatgccccacaaaacattcttcttttctatagtagtaattatgaaaagtcaaaatctctgtgtaccttgtaacactgcaaccatggaaaacaatttatcggtgtcaagaactaataagctcttrgaaaaattttacaaagaagtgtctatttgctattatacaaggcggagtatgtaattttgtcatctttgttttataatagaggaagtagttaacaatttctgagcaaaaaaacacaatggtatacctacctcttacgtttggccttaaactcttacaaacttcagtttccattaacagagaacctagcaaacataagagggtctttgaagcacacgagaagccatccagaaaacactatacatatctgacaaaggagtttttaaacagatt

SEQ ID NO: 736556 - DNA, 669 bp, Homo sapiens
taaactgaaggataagaatcaaaagataatttgaacatttaatctctaattatatacattaaaaagcctatctatcatcacagagtgtactgcaaccaattgatctcttaacgtaagaactctagacagaggcaaaagcaaagcaaaaataacttgtagagttcaaaagagttgatctcacattgaaatttacaaatggagttatttatctaataaggatcacatctggtaggcttayagaaataaggaatacaaagtattaatatgacaggtcgacatattaccaggccacaaagtcaaggggaataaaaaataatagatgaacaagagaacacaagaaaattagcccgtggactgtaagaactttaaggaaagggtcatacttgtagtccttacagtatataggtcattaatctgtacagagtaaacatttagtatttgacagatgaatgaatgaacagttagcaaataccaataactaataacagaaagccaagctgggacaatctttttaaatcaagttaatgagatcatgctactctcttgtttcaatagcttctaactccttaacaaggcttacaaattcctacacaaactcccttaacccttctttggccttattctggcctctcttcccatcagccaggccccagaaggtctcaaacagtc

SEQ ID NO: 736557 - DNA, 620 bp, Homo sapiens
atttctaatgaaggcctaggtaattcagatgaattttttttttttttttttttttttaagagacaaggtctcactctgtcacccaggctggaatgctgcggcgcaatcatagctcactgcagcctccaacttctgggctcaagcaatcctcccagggcagcctctcaagtagttaaaactaatacatgtgcacaccactacatctgttttatttttggttttgttttgtttttttggtagagatgggggtctcactatgttgctcagactggtcttgagctcctggccgcaagcaatccttccacttcagcatatcaaagtgctgggattacaggcaggaaccactgcacccggcctcaattgaacccacttagagaagaaaactaaaactaaaaatgttaaataaaataagcaaaacatttcagaaaaaaaagagaacaaattatgaggaagtgctaggccaaaatctagtgaggtactcaagkgagctactcagatacctgacttcgccctgaggactttcactgattttaaggaagaatctagaatacagaactgtggtttctggagcacaagggaagaaaagattaaaaaaaaaaaaagtcatggccaaaagctaa

SEQ ID NO: 736558 - DNA, 569 bp, Homo sapiens
tattatttgttcagcaacattcattttgaacactttagcatttacgtgtattgtgtaagtcttcataaacttctgacttctggaggtcactcgcgtaaaatgaaattcaagatggcagccttttttttgcaatttccttttgattctaaaaaaaaaaaactcaggcactggaattctgaacaacttaggtacatttacatgatattacttgagtgatttgactgtaasactgtaagggggtcaaatttcactggagaagaaatgtaataatagttctcttagctggtagtcagtgtctgatggattcagtcctgtgaaacacaagctgaatgcaagaggcttgcaaaaaaaaaaaaaaagagggaatcaggcatagtaaaggtgggaaggggcctgctgacacggatggtgaaaaaagagaacacaaactacaatgtgaaaacagagtaagagtactttggagaagaacccataatattacctgtgtttcgctggaaaaaagaagctctgaatcacattctgttgaatgtgattaaaacaactaataacaaaatcaaatgtcatttatt

SEQ ID NO: 736559 - DNA, 627 bp, Homo sapiens
tgtaaaatttgaaaagaccagaaatgcatataattgtattatttgttcagcaacattcattttgaacactttagcatttacgtgtattgtgtaagtcttcataaacttctgacttctggaggtcactcgcgtaaaatgaaattcaagatggcagccttttttttgcaatttccttttgattctaaaaaaaaaaaactcaggcactggaattctgaacaacttaggtacatttacatgatattacttgagtgatttgactgtaagactgtaagggggtcaaatttcactggagaagaaatgtaataatagttctcttagctggtagtcagtgtctgatggattcagtcctgtgaaacacaagctgaatgcaagaggcttgcaaaaaaaaaaaaaaagagggaatcaggcatagtaaaggtgggaaggggcctgctgacacggatggtgaaaaaaragaacacaaactacaatgtgaaaacagagtaagagtactttggagaagaacccataatattacctgtgtttcgctggaaaaaagaagctctgaatcacattctgttgaatgtgattaaaacaactaataacaaaatcaaatgtcatttattagacctgcactgggagttctat

SEQ ID NO: 736560 - DNA, 583 bp, Homo sapiens
acattcactttgaggaagaacattctaaaatagttggatttgctctatctttatcatattgcaaagataagaggaaggaattgcttgtggccctttgttccttgatgattttttccccaaacatattactaattaataactttgctgaaaatctaaataaatcagaaagatgaaataaaatgagacatagacaagaaaagattgttgttgttttttagatgacacaatccatatgttagcatttaawgaagagcttgtttgcttatgaagtgaaacatgccctttttcatagtcacaatctatagacccagtatgtgtgtgtgtaattttgatgtggaaggaaacataaaatcaagtaagaagctttctttgctggaatactaatagtctctcaataagtttccctaatgtctacagggggaaaaaaagaccttagcaccttttaattttgcagctgtttttacacttttatttcctcttctttcctctcacatttacacaaaaaccttctcaagtctcttttaagcactgcagcaactaaatcaatcctaagtggcaaccacttctaacagcgttgcgtatg

SEQ ID NO: 736561 - DNA, 579 bp, Homo sapiens
tgaatatgcccttaggctcccaatgaaaagggagcttaatgatgtgtcaaaaattgcactacaagggcccacaataaattcagactttgtaagtacaggagccaacagggcagctggaatttaaggtagtgctcacaaccagaccacttgtcatgaagtcattctgaaggggagtagggaagtgtgtgtgtgtgtgtgtgtgtgtgtgtgtgtgtgtgttcagctagcccaaagcaagagaaargaacctgtgtgaaaatgactgagagaagtcaaaggataagctggaaaccatgagtcaaagaagccaaatacatgttttcaaaacaatttatagagggagatataaatgttcacatcgtcgatcaaagaaatcacagacatattttcccagcaaaaataaccttaggtagaaatgaagctttgaaagcttgggtcttcttggggaaggtgcggtgattacctgggaactttcttttcttacattgaagaaagtacaggtaaaactggataacttttctaacccccttggcaatggaagtagcttctcattgtattttctcttaatctagtttagaa

SEQ ID NO: 736562 - DNA, 538 bp, Homo sapiens
ttgggttataaacataccaaatacacatgtgatatagactgggtatattgtattaaacactaactcagttactattgtacaaaattagaagttacagttatcactattgatgtttcaagtccaaactatttgcataagaatgactatcaggccaggcacagtggctcacatstccaatcccagcactttgggaggctgaggcaagtggatcacctgaggtcaggagttcgagaccagtctaggaagaaggtgaaacctcatctctactaaaattacaaaatttaggtgggcgtagtggcatgtgcgtgtaatcccagctactcaggaggctgaggtagaagaatcgcttgaacccaggagactggaggttgcagtgaactgagatcacgccattgcactccagcctgggcaacagagcgagattccatcttaaaaaaaaaaacaaaaaaccatcaaaagtataaaattagagtctcacttgtgactttcagtaaattctacccttgatcttagccaaaaggcggagaagcaatgactt

SEQ ID NO: 736563 - DNA, 628 bp, Homo sapiens
aaatcccccaacactaactagttataaatctccatcagcatggactttagggagactagactgggtaaaatgcaaaaggctatgtcatcaatcaattctctcctaactgcatgacagagctcatcataaagcaaaagttatctatgtaatgaaaggaagacgcacgtccttgagtcaaccagtgtggtcacagcatgattgatgtccaagagctagaggaacatgggccaaaactcatccaaaataggctgaaagtcagagactgaggagagacaggaagcattaagagactgctaagtgataaagagctgcataaatcagcttgctgcatgtcagagaacagcttgactttgacctgacatttgtttgtaggtcaattccttgctcacatctgtgtaggcctggagggtccctttcacttggccaagggttaatccaaggatcctagacaaaactgaaaaataagcaattytgtttcactactttgtaccttggaaaacactactcctttaatcctcaggtacttagtgacccctgactccaacaaaatatgctgtcagcatcttcatacaaattgtctaacacaaaataggtgctcagtatacattttcttttcctccttctttcc

SEQ ID NO: 736564 - DNA, 636 bp, Homo sapiens
ttatgttcatgtaggtcaggttaaagtaagctccaaacttgtggccttcagaagcatctcctgtttaacacacctgaaattactctaacttaatacatttgtattctctaagaaataatgctgactgctgtcaccacagcatcactgatctctcagtggctgttaaaatataaacaagtggaaaaaaagtatacaagttgatagcagctgttcatgtattcttgttttgctaatacctgtgtagagaaagacagtttcacatgcagatcaccatacatttttgcttaaaggttacactgggtaaactgtttgtttatcacattacatctgggtgagattttgcatgtgaccaagaggaagaaatcattcagtcccggaaatagcaactgctatgtaaaaccacatccttgactagtacttcatctttccacagtcatycatctgctaatcaggtgaaatatcagctcagcagaacaaagcaagttatacacaaatttcccccacattcacactgatgccgtacttagtaattctggttctaccattcccttttgcactttttgcaagtcaaattcatgtggaaaaatgttctgtttgtagaactcatagtattcacttatagtgctcatgtcagga

SEQ ID NO: 736565 - DNA, 596 bp, Homo sapiens
cccttgttaaactgcaattcctgggtctcaaccgaaacctacttagtcagaagccagggaaaatatctggtaatgctgttactggaaaatattaccgatccagaccccaagagagggttcttggatcttgtgcaagaaagaattcagggcaagcccacagagtaaaatgaaagcaagtttattaggaaagtaaaggaaaagaatggctactccatagagcagccttgggggctgctggttgcccatttttatggttacttcttgataatatgctaaacaaagggtggattattcatacctcccctttttagacgttatagggtaacttcctgatgttgccatggcatttgtaaactgttgtggcgctggtgagagtgtagcagtgaggacgattagaggtcattcttgtggcygtcttgggtttgctgttttggctggcttctttactgcaatgttttatcagcaaggtctttatgacctgtattttgtgctgacctcctatctcatcctgtgacttagaatgccttaaccatctgggaatgcagcccagtaggtcttagcctcacttttacctaactcctatttaagatggagtt

SEQ ID NO: 736566 - DNA, 551 bp, Homo sapiens
actgcaagctctgcctcccgggttcacaccattctcctgcctcagcctccggagtagctgggactacaagcgcccgccaccacgcccagctaattttttgtatttttttttttttttagtagagacggggttttactgtgttggccaggatggtctcgatctcctgacttagtgatccgccccccttggcctcccaaagtgctgggattacaggcatgagccaccgcacccggccttggataccgttttcaaatgatcagagtaatattctttaccgttgctcaaaaatgtgctatggttaacagttaactgttacagaacaatcactgtttcatccattttctacagagcccgaaggattccatacttcatgaggctaaaggaaagtgataggyagctgagaatgagggtatttcagctcacctatccctactccaactctagttctagtacacgaacttgtgggtacaaatccattaaacatacacgtcatggtcaaaaacaataacctggccaggtgcggtagcacctataatcccagctacttggga

SEQ ID NO: 736567 - DNA, 529 bp, Homo sapiens
accgttgtttagtttttccaatcctcctgctgtggcccacttacgaaggagaaaacaagagagtgcacagaagcctgccaccatggtagctccgccagtgtgcgtggtaacaatttattttcatattggtcaaaatgttctaaataattttaacaccagaaatagcatggaaatggggaactaaattataaatgaaaaaccaggagaaatgctaaggatgggacatttcttctccatttctgwttttttctttccaactggcacccatgatgggagcactctggcctctcttctactccttactcagcattacccagagtggcacatctgactagtgagttgggagagaaaacaaaacaagcaaacaaaccttctgcaggagtttgctgtctgctctgttcctcagggctgcaggtttcaggaagacctgtcccttcagcaccatctaggtggaccagtaacttctatgactggggagaagtctgtctacctctagggttttcacacctaagccgctgtctccaatgtc

SEQ ID NO: 736568 - DNA, 507 bp, Homo sapiens
gtttaagcagatactattcaatgagcccaatcggcacatggctttgtgtgcatgaaagtgcccatccctttacaaagagtctggtttgagtcttagttgcctattttagggcaatagtaaaagtcccattcaaaagcctgttatcctttaaaacgcaatgcatttgatctaatgcaagcatttcttattgtgttctgtgaagaaaaacaattctcaaccttgactaaaagctgtaagctgcctgcatttatgtatttatcctgcaggttttgaaaaaattgagtgtaatcaaaatcccactgggraaaagtatgtcaaaaagattaattagaaggaaagcaaaaatgatgtcttctcctgcctttgtgttaaacattcttagaaaacaagcactgaaataaaataagtaaagatgcctctatatactttcggctgtaaattttattaaggtcttgaagagagttcctctgagtgtttaaatagcatttactgaaaaccatctccaac

SEQ ID NO: 736569 - DNA, 671 bp, Homo sapiens
gtttactctaccagtgaattttatactttcttgcattttcatgatggctaatattgtctttttacttccaggtgtagggctttcttacgcatttcttgtagttcaggtttagtggtgaattcccttggcatttgcttgctagagaaacactttatttctctgtgatatataaaagataactttgctgggtatcatatcctgggatggcagatttgttgtttggttttyttctttcagcactttggagatatcatccctttctctactggactatatgatttctgctgaaaaaaatttactgttagtctaatggagtttcccttgtaagtaactagatgcttttctcttgctgtttttagaattctctgtttgtctttgactttcgacagtttgaccaagttgctgtagagaagacctttttgaattgtactcactgtgaatccttgagcttcctgtatctggatctctaaatctcttactagacatgggaagcttacagctattattttattaaataggtttttatccctttggtgttctgtaggccttctggggaccctgataatttgaatatttggttactttagcatgttgcacatgtcacatagactttgtacatttcctttttattctttctcatttgtttttgtctgactgggttatttcaaaat

SEQ ID NO: 736570 - DNA, 515 bp, Homo sapiens
tttttatggttttaggtctaacatttaagtctttaatccatcttgagttaatttttgtgtaaggtgtaaggaaagggtccagcttcagctttctgcatatagctagccagttttcccatcaccagttattaaatagggagtcctttccccattgcttgttttagtcaggtttgtcaaagatcagatcgttgtagatgtgtggtgttatttctgaggcctcttttctgttccattggtctatatatctctttttgtaccagtaccatgctgtttaggttactgtagccttgaagtatagtttgaagtcaggtagcatgaygcttccagctttgttctttttgcttaggattgtcttggctatgctggctctttttaggttccatgtgaaatttaaagtagttttttctaattctgtgaagaaagtcattggtagtttgatggggatagcattgaatccaagaattactttgggcagtatggccattttcatgatattgattcttcctatccatgag

SEQ ID NO: 736571 - DNA, 582 bp, Homo sapiens
ttccatttccctggtggaaattcctttcttcaagggagaaaaaaaacttgtttctcattatctagaatatattcattttctcaattctagaatacaaataatttcaaatttgctaatccatacttgtgtgaaaaacaaatttactaagtagagtacagtatttgtataaagagcttctgttttaccacgtagagtcaaaatactgttttccaaagttacttggattagtttttttttgttcccaactgcctttactgtggttattttattcatttgtaatagagttggattcatttgttatgtttctattttattttggattccaccctcatcatggtgaattttgttttatttttgagcatgtagaaacattaacatggttcaaaaagtcagttttttggaaagttgtacgtagagatgtaycaatccttctcatcccctgaaccgtatactccttactctttctttttaccatattcccacctatgtcctctatttaaccaatctgttagcttctggtttattcatcctgtattttctttttgcacaaataaggaaatacatgtatattttcatatggac

SEQ ID NO: 736572 - DNA, 529 bp, Homo sapiens
ctgttagaacaaagtgatttcagctttgtcactgaacaataaatgtgctcaatgaagcttgactggttgtgtttttcttttttttgccatcctgcataaaacaaagatcaacttcagagcacaagtggcatttggcamtaagttggcactgttgcaaagtggaattttttctgtctactttgacaggaaaattttttttaatggctgttctcttcactggttatcaatgcccttaaagtcaaaaggtgtgagttttaaatgtatgttcaccactttcaggttatggaacattgaaaacaacacttgtccctctgtgccacacctgaggaaagtaaggagaatgatatttgtgttgtctgtctcaaaacgtgtttaggtagaacacgtccattcatataaaggaaactggtaaatcagcaaatcatgattgtaaatgttaataaccaaattctctataaatatacttggggaaagagtcataaggaaataagagctaatatgcatttgaattcctactatgtgtcaaaat

SEQ ID NO: 736573 - DNA, 514 bp, Homo sapiens
tagctgtcttctccaggagatgaggtagaactgagatagtgggggtctctgcaggcagtctgtgcccctggcaagcccctcaccttaacctgaggctgggtggggaaagatgccttgatggagtcagaacagaaagcaagtgatcgctgcctgaaccaagcagtcactttcctggaggtgaaacctagaaacggtccctcaggctgggtccagggaggtggacttgggtcccaggggcrggaagcaacctgcccctcacctgctcctacctctttgtagcctatcttggcaaccagaagtaggtatacaagtgacgttgaagctgggcatgttaacaatggtgtgagcccgcctgactccaatctggtccagctgtactggccgtgcatcctcatctccagcccccagggtcagcccagcggctgtaacaatggtctgtcccctccccgccccacccacttctttgaactcctccaaggatctgtgatgatagggctgtcactgtcttagcttc

SEQ ID NO: 736574 - DNA, 409 bp, Homo sapiens
tcttttaggacagcatggcaggccactgggacatgggctctcctgactccaggcttgtttgtctgataagacatgaagagtgaaggtggcaggactctgagctcaggcctgtcctcctcctcttccctctcttcgttttttctttcctctttcctcttttcttcycaagctccagaagttgccattttcctttcccattgctgattttctctgccttgggagaaagcccgagaagatcacttggaaaagcccacgagcatctctggcctcactcacccagctcctgccattgtctttactcttcctcagacacaccaggcacagtcctacctcagggcctttgcactggctgtttcctctgtctgcattgttcttctctcaggtgacctcatggcttctccctcctctc

SEQ ID NO: 736575 - DNA, 409 bp, Homo sapiens
tcttttaggacagcatggcaggccactgggacatgggctctcctgactccaggcttgtttgtctgataagacatgaagagtgaaggtggcaggactctgagctcaggcctgtcctcctcctcttccctctcttcgttttttctttcctctttcctcttttcttcccaagctccagaagttgccattttcctttcccattgctgattttctctgccttgggagaaagcccgagaagatcacttggaraagcccacgagcatctctggcctcactcacccagctcctgccattgtctttactcttcctcagacacaccaggcacagtcctacctcagggcctttgcactggctgtttcctctgtctgcattgttcttctctcaggtgacctcatggcttctccctcctctc

SEQ ID NO: 736576 - DNA, 602 bp, Homo sapiens
gggtgaacagacccggagaggtgaattccaggttactgaggcatttgagagccaagccaagagagagatggtgtgaccttgaattccaggccagaactgaccacttataggatatggggacccaggctcagccaaactgcaggtcaccagctaggactgggtgactttcccagctagggatcggatgggtggcctgaattgtcctggtccccgaggcctgagctgagagaatragacacacaaagtgagacttttattttatttttagagacagggtctcactctgtcacccaggctggagtgcagtggtgcaatgatggctgattgcagccttgacctcctgggctcaagtgatcctcccacctcggtcacctgagcagccaggaccgtaggtgcgtgtcaccactcctggaaaatttttaaatttttttgtagaggcagggtcttgctatgttgcccaggctggtctcaaactcctggcctcaagtgatcctcctgcctcggcctcccaaagcattgagatcataggtgttagcaaccatgctcagccccccagagagatcatattttaacacaagtcagattatatccctcctctgctc

SEQ ID NO: 736577 - DNA, 602 bp, Homo sapiens
gggtgaacagacccggagaggtgaattccaggttactgaggcatttgagagccaagccaagagagagatggtgtgaccttgaattccaggccagaactgaccacttataggatatggggacccaggctcagccaaactgcaggtcaccagctaggactgggtgactttcccagctagggatcggatgggtggcctgaattgtcctggtccccgaggcctgagctgagagaatgagacacacaaagtgagacttttattttatttttagagacagggtctcactctgtcacccaggctggagtgcagtggtgcaatgatggctgattgcagccttgacctcctgggctcaagtgatcctcccacctcggtcacctgagcagccaggaccgtaggtgcgtgycaccactcctggaaaatttttaaatttttttgtagaggcagggtcttgctatgttgcccaggctggtctcaaactcctggcctcaagtgatcctcctgcctcggcctcccaaagcattgagatcataggtgttagcaaccatgctcagccccccagagagatcatattttaacacaagtcagattatatccctcctctgctc

SEQ ID NO: 736578 - DNA, 551 bp, Homo sapiens
ctagcatcctatactttctgtcactggatagccttggaattatttttccttctttttgaaatactcttcttctttccaccctttgctgtcaagtctcagaataggcattatttcctccaaaaaccctctcctgaccctccaaatctggatgaggacacttcctttgcccagagagcacctgttttaatcctctcaggtggctataataaaataccttaaactgggtggcttatacacctcagaaatttattttccacagttctggaggctgggaagatcaaggcactgacagatttggtgtctgatgaggggccatttcttgtttcgtagaaggggtcttcctactgcatctttmcatggtgaaaagagttgaggcagctctctgaaacctctttcatgagagcatgaatccctctgtcttcatgatctaatcacctcccaaaggccccacttcctaatatcttcacattggtgactaggtttcaacatatgaatttgagaaagacacagacattcagaccatagcagtgctcttccaccaggttttttat

SEQ ID NO: 736579 - DNA, 593 bp, Homo sapiens
ggtttgtctgtttgtttctggtctgtcttttctgctaccgtgtctctagtgcttagaaaagtgcctagagtataatagataccaatgtttgttgagtgaataactgatggacccctgtgaacttgaacatctatgtggatcacctcttcgtggctctggctttgagacctgaaagcctcttagagcaagtgaaccctattttcttttccattctctgcccaggggatcttctggttccacatttatgcactgtactcaagggggcctgcctggaggaggaggcagacatgcaaacagcmgctgtacaatgtctatgagctacacagagaccagttcccatttattccacacccgccatgggcccagccctaggccaaggggctttgggtatgagctcatgggttactaaccccagtacccattttacagaggaggcaaccgaggcacagaggggttaaataatgaagccaataagttagaaccagctttggaacccaggtctgtcagaatccagagcccatgttcttaactcctgccttttcaaggtcttgaacttggaaatgcctggcatagagtcgaatgaacgaatgaat

SEQ ID NO: 736580 - DNA, 589 bp, Homo sapiens
tgctgggtcaaaatctaatggtgacaatgaacttaaaaaacaatcccattatccccagcattttgggaggccgaggagggcagatcatctgaggtcaggagtttgagaccagcctggccaatttggtgaaaacttgtctctactaaaaaatacaaaaaaacaaaaacaaacaaacaaaaaacaaacacgcaaacaaaaaaacagaaaacaaacaacaaaaattagccaggcgtggtggtggcacacatctgtagtcccagctactcgagaggctgaggtaggagaattgcttgaacccagaaggcagaggttgcagtgagccaaggtcacaccactgcactccagcctgggtgacagagsgagactcctcaaaaaacaccaaaaagcaaaaaacaaagagctacaataacaaaaccccaatcccactatctctctgaaatgccacgttgcaaatcaaatgtattcctttgccatccaagaaggccattcttgcctggtgaaattcctctggagggccccacatatgttgcaaaagacagatctggggacaaaaggagccaccttgaaaatcccagctcatcctgttaga

SEQ ID NO: 736581 - DNA, 633 bp, Homo sapiens
gcgaggcccgtggatgttgaagtcttcctgggtccccgactccatgctctcgcgccccagttactatgacgccctgcacaaccgcagctcggggcacgcccagcgccctgcaggacactcggcctccccggctcagcatctgcttcgagggcccccctctgaggcggcggggcggcgtggtggatcaccgagatgtcatcttggcccaccaggcccacaaaatccacagcaccccccaggccaggaggaaagaatgggagtgagtatgcctgggtggtggtgatcggggggcggtgcggctgtaccggggatcccttgggggttaggatgtttttggcgagctttttcggggagcaaattcatgcagctggaacatattgataaggctgtgctggcttctgaaatctcaaaatccttccctgctaactgatcaatactggttgccktatgccccccggacacccccatccggctctgtgaatccctgagctgccccaggctgaggcaacagagattaaccatggatggggcagccaggaccaggctcccaggattgtgagtgtccactctgatgggttggcaaatctttctttctttctttctggtttttttttttgttttttttttttgaga

SEQ ID NO: 736582 - DNA, 641 bp, Homo sapiens
atagattgtagtagagtcacatacacagatgtgagcaaaagaagccagtggcaaaagaacgtactgtgtgactccatttacatgtttaaaagaggcaaaatgaaccttagaagtcaggtgagcggtacccttgttgggggagcaactaggaggcggtatggggagggggacttccagggcactgatcgggacctgggtgctggatacgtgggtgtgttcattttgtaaaaatctatgcatctgaatatatgtacttgcctgtacatatattagactttatttaagtacctacacactttttttttcactctcaggatatgctkaaacatttttttttaatggcagaaatatttagattaaaaagtagaatgttctgccctggtatcgtgactctgacattccacgtgtctttctctttacactggcctgaattcttttattcactacctccctccccaggtctctgtccatcccctctcatctccaaccctcccacccaccccgccaccgccctccgctccatccaggacagagaaagctcagtcctggatgacccagctcgatgacagattgtgaggtggggagttttcccttccagagtagggctgtataatgtgtttgttacctcgggtcaaagagaa

SEQ ID NO: 736583 - DNA, 629 bp, Homo sapiens
tttctctctctctttctcttttttttggtaaaaaagttttatcgaagacatcttgacttaaaaatttcactatcacactgagttaaggagtgtctagaaattttctcttacaatccatttggagaaggatagtatgccgtccttttgacttttatattgtttatcccatcaaagtttaagtgaagattaaagattaaaacaggatgacaatcaaaagaaagaacaccactgttaaaaatcatagcaaaataaaatgctacattttagggagtgtttaacaatattatgctatatatatatatatagcatggccagttttaaaagattaatattaaatttttgacttagaaaaatggtactataaagcatctcatacataaattacttcatatataaattaaarttagttgatagctggagtgctgtgaaaagattctgtataaagaaagaaatggctcagaagttgagacttagttgtgttttataaaccagagttaattccttgaatgtacttggaagaagattaatacggtattctttgaaattctccacttgagctgttaggtattataataagtgaaattcctctattgttgaattaaattataaatctaatgttttagactttt

SEQ ID NO: 736584 - DNA, 618 bp, Homo sapiens
agaagaatttgccttgggcttatttgtgcaatggtcattaaatcacctgttgaacaaactttcaagcattggctttacaggagatgcaaagactttatatggcaattaaaaaattattcttaataaacatactaagagtatgtcatcaaatagtttttttaggagagacatttccctaattaataagtcactgtctggtattgaaatgtgacgcaggtttaggatatccagaaacagaatcaagttacttaaaatgagcctcggtaagactatggctttcactcctcactatcattgcagtcttttccttggaactgatcattgctgtcagtgaagcactgaaaatcattccaggctgtttagagttgacatrtaagatgaaacctcttgccatttttgacctatagaaagatcctcaggtatttatttcacatgtacttttagtagaagttatcagcagagtctaaatttgaactccctgcctttccagaattattatatagcagaccagacagagttaccaagttgagagttaccaggttgatgatgttgcaattaagagcttaagctctgcagtcagatttgagttcaaactctgtgccaagattatttattagt

SEQ ID NO: 736585 - DNA, 534 bp, Homo sapiens
tcaaaatttacacataacgattgatgtgtgtttttttaaagtaattttattttctttaattgtaattttttataattccattttgtcctctactctcccagtcactgtcttgaccagacaacttattctttttttgtaattccagtattttcagtccaatcagtgccttttcagtgaaattaaaatattattacaatcgtagtctgatttctatctcagctacttttgcatacattctcagtcttctgtattttctttatgcctctcttgtgtcctttttctaccactygggagtagtctattttcacaggacagcttatgtattattcatctgttcttgtcctgcttggacttaggcatcagtctgtcactctgttacctgcagtgatgttccgtggtgtacctgttccctgaacatcctgcgctggtatccaccgaggtgtggtgcatgttggcaattggcttttgcctctaattgcaaaagctctgaactttgcagctacctcctcctgacctcatatatctacctgttca

SEQ ID NO: 736586 - DNA, 629 bp, Homo sapiens
acttgcctcaagatccttaattacatttgcagacaccttccccccacccaaataagataatgtccaggttctgataattagggcctagacataaattcttgggggaccactattaaacctactgcagtttgtcctctggcttcccgatattcacgtaacatctcacatgcaaaatacatagagctccttccaacatccctcaaagcctcagctcatagcatcagccccatctaaatgtcatccactcaaagttacaagtctcatcttctaaattatcttaatcaggtatgggtgagactctgggtatgaatgagtctagggaaaaattctcttgttatttcttttactatattttttgagttgttttcttagtgattgtcctgggaattaaaattaatatcttaactaaaaatagtctagtttgcattattaccaacttaatttcaatagtacacaaaactttgctttagtrtatcttcattttctccccacttctttgtgtgattattatcagattacatgtttacatactgtaatcatctatagttttataataattgctttatacagctgtcctgtaaatcagatagaagaacaaattataaaaatatatttgtactgtcctgtat

SEQ ID NO: 736587 - DNA, 591 bp, Homo sapiens
gtgttagccaggatggtctcaatctcctgacctcgtgatccgctctcctcggcctcccaaagtgctgggattataggcgtgagccaccatgcccggccttgtttaggaaatttttatagacatttgacattggtataacatccaagcacatgatctggttttttttttttagtttaatttaacttaattttttttttttttttttttttttttggagayagggtctcgctctttctccaggctggagtgcactggcatgagctcagctcactgcaccctccacctcccaggttcaagccattctcctgtctcagtctcccaagtagctaccatgcccgactaatttttgtattttttggtggagacagggtttctccatattggccaggctggtcttgaactcttgacctcaagtgatcagcccaccttggcctctcaaagtgctgggattacaggtgtgagccaccttgctggcatttttttttaaacttaagttctgggatacatatgcaggattatgcaggtttgttacataggtaaacatgtcccatggtggtttactgcacctattaaccctaggtattaagccct

SEQ ID NO: 736588 - DNA, 613 bp, Homo sapiens
atattgtgctttataggccacataaagaatttcaggctgggcacagtggctcacgcctgtaatcctagtactttgggaggccgaggcgggcggatcacgaagtcaggagattgagaccatcctggctaacaccgtgaaaccccgtctccactaaaaatacaaaaaaattagccgggcgtggtggcgggcacctgtagtcccggctactcgggargctgaggcaggagaatggcgtgaacctgggaggcggagcttgcagtgagccgagatcgtaccactgcactccagcctgggcgacagagcgagactccgtctcaaaagaagaaaaaaaaaagaatttcgagaataactatacaagattttaattgtatgtactgactttcgaacctagcatgcaaatgaaatgaaaccgttgtagtaaaattacatgtcttggtgctcgccttgtggtcatcatcatggcaggaaaagggactctatctagagttactgtggcacttcgtagctatggaaagtttcctctttgccttaatttctctgaataccatccttctctatccaccttccacccctgcagttgccattaaacaactgtcttgctcattgaaatgtt

SEQ ID NO: 736589 - DNA, 573 bp, Homo sapiens
tgcgatagtatctccggaacaaatttgtccctctgcgcgatccggaactccgaggtcgttcctacgcgccgtcgttcgcctcttcacatcggattgggtctcacgcaaggatgaggcggggtttcgccgtggcgcgcatgcgtgcagcaaagaatggaggagtcggaacccgaacggaaggtaggagagaggcgagaccccgcgcgtgtgggagcgggcgtgaagaggggagcaggccgtgcctgactggcgtgtgcttgcagcgggctcgcaccgacgaggtgcctgccggaggaagccgctccgaggcggaagatgaggacgacgaggactacgtgccctatgtgccgttacggcagcgccggcagctactggtgaggggcacgcgtccggggagggatggggccgtgaccgcggggtcgcakggggcgggcgtggcctcggcctccgtggggaggagggcagtctgaggagtgagcttcagtacaccagggcgcggcccccagacaaacgagggaccgacggcttgatctgaggggtagggcagctttgcgcctcgggcacaggatcctc

SEQ ID NO: 736590 - DNA, 611 bp, Homo sapiens
ctcacccacaaagggccaggcactgtggggatagatcagctaacaaaacagttgatgcttcctgcccttctgggccttacattttggctggaagaagaggggagaggcagactgtaagcaataagcgcaataagtaggttgcctggaagtaatgttagatcacgttacggaaaacaggaaagagcagagcracaagtgctggggtgcgtggtgcagggaaggcagctggctgctgctggtgtggtcagagtgggccctcatggagaagactgcattcgagcagaaacttgaagggggtgaggggtgagcctagagatatctggggcagagcagtccaggcagaggggacagccggtgtcaagcccaggacaggagtgtgcctggtgtgccagtttcaggcaagaggccagtgtgcagaggcaaggtgagaacgcaagggagagcagtggcggagacgggtgggaacgaggtcagacctgctggcctccagcctctgcatggggcttggctcttgctgggagcaatgggaagcagtacacagtttcatgcagggggagaaggcctgtcttgggttgcaggggcccgctgtggcagctgggatcagagagagg

SEQ ID NO: 736591 - DNA, 642 bp, Homo sapiens
ttattttgatggcaggcaggggtacatcataatgttccacccagcaaagtgtcagctcatattttcttcttctggccattgatatcctgtgttctgacagatattaccctaaagcccctcttgccctgtatgtttagatttttacatttgccctgatgattaaggatggtgtaaaattttaataagtcctccatagtttttggaagaatgtgttttatatcagctataaaattacttccatggggtacagtggctcacgcctgtaatcccagcactttgggaggccaaggcgggaggatcacgaggtcaggagatcgagaccatcctggctaacacggtgaaaccccgtctctactaaaaatacaaaaattagccgagcgtggtggcgggcrcctgtagtcccagctactctggaggctgaggcaggagaatggcgtgaacccaggagacggagcttgcagtgagccgagattgtgccactgcactcaagcctaggtgacagagcgagactccatctcaaaaaaaaaaataaaaaataaaataataataataataataataataataataattacttccatggtctgattcagcctacaaaggcatgccaaaatgagaaataatttcagttattaattactt

SEQ ID NO: 736592 - DNA, 621 bp, Homo sapiens
cttaactttctcacacaaagacttcatggctatcacattgtcttcagttggaatgttgaattcactcttttaaattgaaaaggaaataaaaaccagctagaaagaaaagaaaacaagctctgggggaaaaaagcaaacgataacaaattaagttgttagccaggtgcactggctaacgcctgcaatccyaagacttgtggaggccaaagaaggaggactgtttgaggccaggagctagagacaagcctgggcaatgtatcgagaccccacctccataaaaaattaaaaattacccaggtgtggtagtgggcgactatagtctcagctacttgggaggcggaggtgctcaagatggggaagtcaaggctgcagtaagccgtgatggcaccactgctccagcctgggccacagagcaagacattgcctcaaaaaaaaaaaaaaattaaattattgtacctcatacatcagccttctatggaaaatgtaatcctattatatttatttgccgtttccctatataagtgttagggaagcaggtgcctaggggagccagagaaagaccaaccagctccatcttgagactaacaagaaacactccttgccagtcacaacccatagtca

SEQ ID NO: 736593 - DNA, 578 bp, Homo sapiens
ggaggcctgtgtttggggcttgtgctcagtgtgtggggacatcctccggcctctgtcctgcgggacctctccgacttttaattggctttcttctggctccgcgtagatgaagagtttttgccagagccagagccataacggtttatctgtctgctggcttgcgtttctcagactgttactgaattaagttgtatgtatgaagactcttaaataaaataatatcatcgtgtttattcggagcttggccttaaagtgcacttttgagtgtgcacatcattcttcttaaaccagggcctcctttattaggggatttatcttcactttgagaaatgtctgctaaagcctgctgtgccaaagtcctcatgcttactgctagagccacagaagtgaaggggggtctggcttstcctcaggcagctcaaagtcagggggacggggacaaaagaccagccaaaaagtgttgcaaagacatcaatgggtgctataagaggatgctattcttttgtttctttagttttccattgtttacaattaaacattattcacaacaactgacaaaacatgattcacaataattt

SEQ ID NO: 736594 - DNA, 538 bp, Homo sapiens
agctctctctctctcggctgctgccatgtgagacgtgcctttcatcttctgccatgatgtgaggcctccccagccacgtggaactgtaagtccaataaacctctttcttttgtaagttgcccagtctcgggtatgtctttatcagcattgtgaaaacggactaatacaaatgcctctctcacagctctgtgggccagaagtctgaaatgaatctcactgagccaagatcaagggtggacagggctgtgctccctccagaggctccaggggagaatctgtttctggcccatccccgctcctgggggctgccagcctcccttggcttgtggctgcatcatgccaatctctgcccccggrtcatgtcgccccctcctcttctgacgtgtccctgtgcttccctcttgcaaggatgccttgattacatttaggactcacccgagtaatccaggacaggcttctcatctcaagagccttactgcaagcacatctgcaaagccctttcttcccatagaaggtacccgtctcaggttgcagggat

SEQ ID NO: 736595 - DNA, 581 bp, Homo sapiens
ggcgtgcttcagggctgagcgcacccttggcagacgccgcggcgctcctgtcctcgtgcagaccgggcccttgggatggctgttggagatgccagcgcggtgatgtggcccacgcggaaggggtgggcgggggccggcgctgggaaagccgaggctgcacattctccgaggctggagttgcctggggtcagccggggagagcaggaggggccagctcccgggcctggctggctctctggctggagtctgctgctcagagcgctgccctgtgggtgcttcccaccccctgggctgtgaaggcagaagcgaggcttgcagccccagcgagggctgggscccccttattccacagtggagacgtgccagggtgtgctccccctccacggcgtctgggcctggcactccgcctgacagcccccacgtgcgcagcaactcccctgtgcctccgacataaatttagtccctgagtctcaggcttgcccttcccccgccacctctcccctcccgacatggtttctggttcaggggtggagccgaccaggtaaatgtggctggcaagggcctggatctttggtggagca

SEQ ID NO: 736596 - DNA, 584 bp, Homo sapiens
tccaaactctgccagtttgtgccagccggaggcctctgaccacaggccccatctcctctcagaattctctgcaggttggcagacacttcagccagctccaagcctgaaatattttctataaaaatttccaattttctttgacccgtttctctttgaaattaatcctaggcagcgctgtgctctgggccctgaaggagctctgagcggggaaaggtcgcgcagtcagatgggcgtgctggcgtctgtcttctctctctcctgctctcyggcttcatttttctctccttctgtctcaccttctttcgtgtgcctgtgcatacacacgtttgggacaagggctggattcttcggctgggatgtctctcagagctcttgacttggtccctttggctggggcttgccgtgaggtgtgggctgcgccacgagcacagctggtagagaacccggccaggagcgcagctcacgcctcccacgcctcccatcccaaactgtcggcacacccagagagagcctgcaggacaggacaggaggtgacctgggcactgggcctgtgtggagaggtggctggtgcgctggtctggttg

SEQ ID NO: 736597 - DNA, 584 bp, Homo sapiens
tccaaactctgccagtttgtgccagccggaggcctctgaccacaggccccatctcctctcagaattctctgcaggttggcagacacttcagccagctccaagcctgaaatattttctataaaaatttccaattttctttgacccgtttctctttgaaattaatcctaggcagcgctgtgctctgggccctgaaggagctctgagcggggaaaggtcgcgcagtcagatgggcgtgctggcgtctgtcttctctctctcctgctctctggcttcatttttctctccttctgtctcaccttctttcgtgtgcctgtgcayacacacgtttgggacaagggctggattcttcggctgggatgtctctcagagctcttgacttggtccctttggctggggcttgccgtgaggtgtgggctgcgccacgagcacagctggtagagaacccggccaggagcgcagctcacgcctcccacgcctcccatcccaaactgtcggcacacccagagagagcctgcaggacaggacaggaggtgacctgggcactgggcctgtgtggagaggtggctggtgcgctggtctggttg

SEQ ID NO: 736598 - DNA, 611 bp, Homo sapiens
ctcaagttctgcctcccgccagtcctgtctgcaggcaggatccagtcctcacgcacccatgctgggcacggccctgcttccacaccgtgctcaggaggagagcgtccactcccaggagaggacttgccaggcacctctccttagggacacctgcagttaggggtctggcgccagcttgtgtgtgagagatyaactccccctggtaccgtcaggccccgagtgagggagccgcagcccagagaggcctctttctgtccagtttgcatcgccacatttgggtttctgtcccgcctggcctgggccccacctgcctgcggagctgccgaggccctcgtctagtgccctcccagaggggccttcagtcctggttcttatattacagaggcagccagaggcttccctgactctgtggctggcgcagccttgacaagtcatctggaattggctcacggcctcctcgcgtctcccggtgtctgatgtggcaatgaagctctatttcagggcctgcgggaggacccagcgtggctcagggtttgtcctcaagggagggcgtggatcagagcctgtagtgcggacctgggtgggggagggagaactggaccctgcactcc

SEQ ID NO: 736599 - DNA, 611 bp, Homo sapiens
ctcaagttctgcctcccgccagtcctgtctgcaggcaggatccagtcctcacgcacccatgctgggcacggccctgcttccacaccgtgctcaggaggagagcgtccactcccaggagaggacttgccaggcacctctccttagggacacctgcagttaggggtctggcgccagcttgtgtgtgagagattaactccccctggtacygtcaggccccgagtgagggagccgcagcccagagaggcctctttctgtccagtttgcatcgccacatttgggtttctgtcccgcctggcctgggccccacctgcctgcggagctgccgaggccctcgtctagtgccctcccagaggggccttcagtcctggttcttatattacagaggcagccagaggcttccctgactctgtggctggcgcagccttgacaagtcatctggaattggctcacggcctcctcgcgtctcccggtgtctgatgtggcaatgaagctctatttcagggcctgcgggaggacccagcgtggctcagggtttgtcctcaagggagggcgtggatcagagcctgtagtgcggacctgggtgggggagggagaactggaccctgcactcc

SEQ ID NO: 736600 - DNA, 611 bp, Homo sapiens
ctcaagttctgcctcccgccagtcctgtctgcaggcaggatccagtcctcacgcacccatgctgggcacggccctgcttccacaccgtgctcaggaggagagcgtccactcccaggagaggacttgccaggcacctctccttagggacacctgcagttaggggtctggcgccagcttgtgtgtgagagattaactccccctggtaccgtcaggccccgagtgagggagccgcagcccagagaggcctctttctgtccagtttgcatcgccacatttgggtttctgtcccgcctggcctgggccccacctgcctgcggagctgccgaggccctcgtctagtgccctcccagaggggcctycagtcctggttcttatattacagaggcagccagaggcttccctgactctgtggctggcgcagccttgacaagtcatctggaattggctcacggcctcctcgcgtctcccggtgtctgatgtggcaatgaagctctatttcagggcctgcgggaggacccagcgtggctcagggtttgtcctcaagggagggcgtggatcagagcctgtagtgcggacctgggtgggggagggagaactggaccctgcactcc

SEQ ID NO: 736601 - DNA, 604 bp, Homo sapiens
tgttctctcattgtggaaaacagttttctgttttataaacttacacacatgcttaccatatggcccaacagtttcactcgtaggtatttacccaagagaagtaaagacatatgtccaaacaagacttgtatgcaagtattgcagacttactagaaatggcccaaaacaggaaacaaaccaattatccatgtagaacaggaccacggctgcatccccacagtctgcttgggcacgaaggagaaagaagctcccaagaggcagctgagagaatccacctgagttcccgcagcaggggcagccactgagtgctggtgatttgtagttggggggcatgacagttgggcttgtggggagagcggtacctgggggacccagagattgaggaagcacctgtgtccctctcatcttcagattcccartcaggttcagaagtgttctgctcttctctggagagtcatgatttagaattacatgttttgtttgtgtgattatttgtttaatgtcatccttccccacccaccatcacagtgcctggctcagagtgagtgggctctcaataatgaggattgtggaatacatgtggattggagaaagaatgggcagg

SEQ ID NO: 736602 - DNA, 542 bp, Homo sapiens
agctaaggcccccaccccctgctccgtcacaacttgccccctcaaccaaaaagctgctttgagtcaaaaagcacccataagatacctgcatctgccttgaaatcttgcagcatggagtgtcatatgtactcaggagagaggcagggctttgcgggcaggagaaggaagggaggaatgctctgagctgcaaagacccagtactcaagttctgacgygggaggagatgcagtgagacgtctcttgttgcctaaagcctgttcctgttggttttcttagagtgatttctcctagacatgtgcagtaggcccactggggctgctgtgcagtggtgagtaaaagggcagggaaggcatggacagcctggtccttctgcatggacagctcagtccatggcccatcccaggtatagagttcagttaatcccatttgagcctgcagcttaagagatggctcatcctaactgtgaagcaaaatcagccccagaggatgtattgatctgactcactgatgtcaaaattgcagtatttttttagcatttgaga

SEQ ID NO: 736603 - DNA, 656 bp, Homo sapiens
tgtgaaataaaggtaatatgaaaataacgacagctaccattgttgagggtctgctttgcaccgaacaccattacaagtgtttgaggtatcatacattttttacctgcacaagaatacagtagtcttgcacggtaggtatttgcactgtaccatargtaagctcagagaagagggttcttgcttaagatggcatagtacgaaagagagaggaaagccttcttgtgactcatcctctctttgcagaggagcttagcttctgagatgctccagtgtatcttgtgggtctagtgcattttgttttctggaagaattgcctactgatggggatgccaaacaaagtgccgacccactgagaaatagtgtgagaccttctgcttctcggctgctttgggtcatctgtgagtgttgcagtccttaggggaggatgtgaggtgggttgccaggcaaacagggcagcttgccttctgcacagtctacttatcacagggcctggctgacattcattcattcatttacttattttacttgtgtgtgtatatatatacacacacaacatataattatatattaaattaaatattaagtatatattatatataacatataattatgtaatatatttttataaccaatatatatacacataccataattat

SEQ ID NO: 736604 - DNA, 632 bp, Homo sapiens
cattgtgttccacatggcattttgtaattcattattaggatgccaaatatattttcctacataaacagtaatgtggaaagaactcagattcctaggtttgctcataaaatgagtttatcacatattgcaaattctactgttttaactactccagtagcaaacttttctgggttagcttgggaatcaaatcattttttaaaaacttgtttatgtggagaaggtacttcttatcccaaggtgacctctacactgaattaagaaatatatttctttctgtgtgaatattagtcaaatggtattcagagagatgkagaactggctgccaaggaggaaatggcatcttcttcattgctttggaaagacttgatcctaactcctggctctataaaaatacttgcctcctactaacttccccattacattatgaagatttctaattccttatgtgaccctctccttttagcctcacattctacataattatctcagcccctatggaaaagagaaggaatattctagaacaaattctgaatttactacagattcctaggcctttatccaaaactcatggggccagatgtgttttggagttcagagatatttttggatcttagaaaggtaatatgacacat

SEQ ID NO: 736605 - DNA, 609 bp, Homo sapiens
aattgtaataatccccacatatcaagggcagggccaggtggagataattgaatcttggtggctgtttcactcatgccattctcgtggcagtgaataagtctcgcgagatctgatggttttataaatgggagttcccgtgcacacactgtcttgcctgtcgccgggtaagactttactttgttcctcattcaccttccacaatgattgtgaggcatccccagccgtgtggaactgtgagtcaattaaaactctttcctttataaattacccagcctcggttatgtgtttattagcagtgtaaggacagaccagtaaagggcttcctcatccacctggttgatgtaamagcaatttaggtgttgttgatttctctcatgcccttgttccccacgtgcagttcatcaacaaatcttatcagctgtgccttcagaacacatccagaatttcagtgcttctctccactggtattcctattactagtccaagctgccatctgttatctagactattgcagcagtattccaattgctctcttcccacttgtatcacctctacaatcaggatccaggatgattttaaaatttaaaaataagaaaaaaaccatgttac

SEQ ID NO: 736606 - DNA, 609 bp, Homo sapiens
aattgtaataatccccacatatcaagggcagggccaggtggagataattgaatcttggtggctgtttcactcatgccattctcgtggcagtgaataagtctcgcgagatctgatggttttataaatgggagttcccgtgcacacactgtcttgcctgtcgccgggtaagactttactttgttcctcattcaccttccacaatgattgtgaggcatccccagccgtgtggaactgtgagtcaattaaaactctttcctttataaattacccagcctcggttatgtgtttattagcagtgtaaggacagaccagtaaagggcttcctcatccacctggttgatgtaaaagcaatttaggtgttgttgatttctctcatgcccttgttccccacgtgcagttcatcaacaaatcttatcagctgtgccttcagaacacatccagaatttcastgcttctctccactggtattcctattactagtccaagctgccatctgttatctagactattgcagcagtattccaattgctctcttcccacttgtatcacctctacaatcaggatccaggatgattttaaaatttaaaaataagaaaaaaaccatgttac

SEQ ID NO: 736607 - DNA, 637 bp, Homo sapiens
ttgaattatagtttctgtttactactagcattgtagtagtctgatcttggacacattgtctaaatgttgacactgtactttaatttctttgctgtgaggattaaatgtatcaataagttcagaaaagagctaacataggaggcctgagactgctctccttagaaaggcctgcttggaaggttggcccctgtctggcatctaggaacttggatttctggagtattcccactattccttaactgataagagtggcctattgtgtgcctggagcatttgtgcattgtggtttatgccgaataccagctttccttccaggagtatggaattttggtatgtgcgaagtagagggtgcttatataatcagcacccccgcctaaaaaacttgggtactgwttctctaatgagcagaaacaacacttcacatgtgtcgtcgcaatttgatggtggaagaattatgtcctctgagactccaaccggacacttgtgcctagtttcttctggactttgccctaagcaccttttccctttgctgattttgctgtgtatccttttatgtaataaattatagccatgagcgcagctgtattctgggtcctgcaattcctcctactgaacttcggtgtgatcttgggatccc

SEQ ID NO: 736608 - DNA, 577 bp, Homo sapiens
tctggggcacaatctagatgaaactgtgaggtttgttcaaaaagtaagtgtacaaaatttcatcatgaactggctttattacaactctttaccgtggtttattgaaaccacaatgtatactactttcctccagattctgattctaatgggcacatttgtttgttgaaatgataaatatattttccttgtcaaacatggtgggtcctggttgatatctcctgtttcctgccttgaaaaacatccttgttggtgcctttctcccactttggtacatcactcccaactgaaaacagtctagatataaactttaacaagytggagatctatttctacagcacaactctttcatgtttaaaagcaattatgccgtatcaggtgattgccacatgttggggaaagcagccatcttagagcaaaagtctgccaacccacagtccctgttgatccacatgtgggcattgtctaatgttaacaaaatcagcacttgtagacttactttctctgaacaatctagtacacttctctagtttctcccaacctggagaaaatgtatagcaaaagccagaggcaaaattat

SEQ ID NO: 736609 - DNA, 504 bp, Homo sapiens
agcctccagaactgtgagataataaatttctgtcatttcggttatttgtcatgacagccctagaaaactaatacaccattatagttcataacccaacatcttgcaaataagaaatgggtaatagttaaattttgatcaaattcacttttaggaaattctcttcatcaagataatttsatttcctcttactcttattggtcaataaggcttggcatgttgcttttgcaacacagaatgataacactctctaatgacaactgttcttaaatatgactgcaagtacttggattttatggaatctgtgtaccactgacctcagggcaaagctctttttgcaaactcattttcattcacttgataacttttattttatttttgcgacagagtctcactctgttgcccaggcgggaagcacagtggcagatctcggctcactgtaacctctacctcccaggttcaagtgattttcctgcctcagcctccaaaatacctgggattacaggc

SEQ ID NO: 736610 - DNA, 577 bp, Homo sapiens
tgcatcttccttctcaatccttccttctgcattcaattttcttcttactgcagaaaagcccttagtgattctttcagcaatggtctgtaactgtcaaactgtctttgtccgaaatattggtttaccttcactctttgaatggtttactttagctggatacagagttttagaacgactattattcaaaagtgacagtgaaacaactactctagaagacaaaatagtgcccctcccgcccaccaaaagatgtctacatccacatcctaatccctggaacctgtgaatatcacattatatagcaaaggatctttgcagatctatcaaattaaggatattgagagggggagggtatcctgkattatccaggtgtgctgaatgtaatcacaagggtccttataagaggaaggcagggaagtcagaagtaggggagtagatgtgatcggggaaggagagttatgtgcatgtgagggagagaaaagggaggaagagaagtacagatggagagagaaaggggggcagggagagagagagagagagaaatggaaagattctatactgctggctttgaagatggagg

SEQ ID NO: 736611 - DNA, 551 bp, Homo sapiens
aaaacaattttgtcaaagttgaacgtgagagatcacatgtttcacaactttcaaagggcccaaagtaagcaaattatattgggaatcaaagggcccaaattaagcaaattatattgggaatcagaaatcgcaaattctgctgcttctctgatgaacggaaattatgtaatcttcatcaatatggaaaatcaaaacatgggaacagtgtgagcactttggtgtaacccaattgagggtaatactttaatggcacaatcttacctgaagcaattatttaaaaataacctatttgaaaaatgtcagcctgaggtttctcccaaaacatcatggtggattattgaggttcacttctgaagagatagatgcctatsattaggtcatccccctaccaatcttagccacctccatccatggaaagttgcttatgtaatacaagatgacagaagtcatacccttaaacaatatgtaaatctgactaactgggcaagtggtataataaagtaggaatagctagaaaataaagtttcttaaatgccaggggtcaggttgac

SEQ ID NO: 736612 - DNA, 615 bp, Homo sapiens
aggatttgtgaaaatcaatgggcagtaaatttacctctcagacaacctcagaatggccctcatttacatcagaaattgaaacaaggagatggaagtagtagaaatgggattactatagtccagcaccctgagaaggtggggcktcaggcctctgtgcactgagtcagagtcaaaatcacttagtgatatgctactatggagaggaaggctggctctaaaacagagcttctacttgaatactggcattagcttaatctttatgtgtgctttaggtacgaatgcttattgtccgtacaaatatggctccaggtgaagtatcattcttgattttccaaagtatcttctgtcaataatattttactttagagcagagtttctcaaatgtgcctgatgataagaactacttgggagcttgttaaacactggcattcctgagaccctccctagacctaattaggatttctaatttctggaggatacacatttaaaatccaggtgattcttaaccacctactactacgtgtttatttctgcaagtatttttatgaggcaaattagaaaagcttctctgttcttgttcattcatccagtcaataagtttttgagtaattcctg

SEQ ID NO: 736613 - DNA, 615 bp, Homo sapiens
aggatttgtgaaaatcaatgggcagtaaatttacctctcagacaacctcagaatggccctcatttacatcagaaattgaaacaaggagatggaagtagtagaaatgggattactatagtccagcaccctgagaaggtggggcttcaggcctctgtgcactgagtcagagtcaaaatcacttagtgatatgctactatggagaggaaggctggctctaaaacagagcttctacttgaatactggcattagcttaatctttatgtgtgctttargtacgaatgcttattgtccgtacaaatatggctccaggtgaagtatcattcttgattttccaaagtatcttctgtcaataatattttactttagagcagagtttctcaaatgtgcctgatgataagaactacttgggagcttgttaaacactggcattcctgagaccctccctagacctaattaggatttctaatttctggaggatacacatttaaaatccaggtgattcttaaccacctactactacgtgtttatttctgcaagtatttttatgaggcaaattagaaaagcttctctgttcttgttcattcatccagtcaataagtttttgagtaattcctg

SEQ ID NO: 736614 - DNA, 601 bp, Homo sapiens
aatttactaatctttgtctatatggtttgtgggttttgtgtgtcttaagaacttctctaattctaggttataaagacagtctatattgtcttctaagagttttataaatttaccttgcacatttaaccactagaatggatgtcatatgtggcataaggtatagacccagtttttggtttttatcctgtgggtatccagttatcccagcgtcatttattgaaaagtccctgcaacttaatagctactgtcataaactaattatccatatgctataggctgaatgrtgtcttccaaaaattcatgtgttgaggccttaagtcccagtatggtggtgtttcaagataggacatttagggggcaattagaattatatgaggttataaggatagggctttataagaagaggaagagagagattgctgtctctctgccatgtgaggatacaatgagaaggcactcatctgcaagccaggaaaaggcccttaccagaaaccaacttagtcacatcttgattttggatttccagtttctagaactgtgagaagtaaatgttatgtaagccccccagtctataatattttgttatggcatcacaagcaga

SEQ ID NO: 736615 - DNA, 586 bp, Homo sapiens
atggagaacctaccatgcatgaggcatcgtacaggtcacaaggatggaaaataccaactctggctttcaaagatagtaaagtagtagaggatcatgagtaactccagttgggagcagtgtgcaaaaagtgcttttgaggtgcacagaggaggcagaggtgacttcccgccagaaagattagggaaggagggagagtttgacctggagaacatagatggctaattcatggagtcaaggatctgaaggaaagatgcccctgggagagggtcagcctttcattggtggggctccactgtctttccaagcccaggtctgcttcctctgtcagcwacttcatgcaaactaatagaagcacttctgtttctttaccaatgtctcgctaattttcactgctgtgattttgcctgtgctatttatttacccacaagactctcttcttattctggtcaacccatctcttttactattttagagtcacatctcccaagaattccttccaggctaatcccaggtcttcaccaccctttccacactcactttccttccagcatccccttgagacttgttgaggttttgctttctctcc

SEQ ID NO: 736616 - DNA, 586 bp, Homo sapiens
atggagaacctaccatgcatgaggcatcgtacaggtcacaaggatggaaaataccaactctggctttcaaagatagtaaagtagtagaggatcatgagtaactccagttgggagcagtgtgcaaaaagtgcttttgaggtgcacagaggaggcagaggtgacttcccgccagaaagattagggaaggagggagagtttgacctggagaacatagatggctaattcatggagtcaaggatctgaaggaaagatgcccctgggagagggtcagcctttcattggtggggctccactgtctttccaagcccaggtctgcttcctctgtcagcamcttcatgcaaactaatagaagcacttctgtttctttaccaatgtctcgctaattttcactgctgtgattttgcctgtgctatttatttacccacaagactctcttcttattctggtcaacccatctcttttactattttagagtcacatctcccaagaattccttccaggctaatcccaggtcttcaccaccctttccacactcactttccttccagcatccccttgagacttgttgaggttttgctttctctcc

SEQ ID NO: 736617 - DNA, 534 bp, Homo sapiens
ttacacatgagctgtcagtcagggtgcatagcacttttagggcacttgagtgttgtaatgtcttacatttggtagcattctaagtagaaggacaagaagtagagagcaaacaagtatgggtagaatggtgctggaatggggaagaggagtctaaggcagcaattttctgccctagaattttttttcttttctttccttttctgatggtgattgtggtaacatcaygcacaggcacaggtatatgaccttctgttggaacaaaagaggagtgtcttaggttttgagacaaatgaatgcatcttgctagatttgggagctaagtatcttggctcttatgcatccttccacaaatggcactgagttgtgttcaaaaatggaggaaacaaacaaaaaacaaagaagaccccacctgtgtaggggcttggagttcaaagataggggtgatggtgttcatatgatagtagcagaaaaagttgaataatgcactggagtgactgatgtgtagtaggtagcattaacagttactatctccta

SEQ ID NO: 736618 - DNA, 577 bp, Homo sapiens
ttcagctgtgggttccctttgtgttcctaactcagctgggcttatagtacattttaagtcttggtgactcatagtctgtttgttgtgttgcctcatttaaattgtggcatcataaatcatttcattttttaatcatttgagtagcaaacaccccaaagcattgaagttaaacaatgttaatggaggtttactttggatcccattgttttaatatgacaaatggccatgcatcaagctgcgtagcacagtttatttatgcagacataattagccctttgaaatgaaatatacagtgagccatttgccagaaattcaaagtctgctcaacatggcccatcctscaatcttactcctcctatgtgcttgataggttcaaggcagaatgtaagcaaggatactcttggctgggggaaattggaattaggattaaggaagaagttaccttgtattcagaatggaacactttcttctccatttctttgactttttgggggacttccaataggagagacttgaaaagttggaaaagaaattatttttggttctaaatatctgaagaaggggtagttccccaaaa

SEQ ID NO: 736619 - DNA, 586 bp, Homo sapiens
attttttagagatgttccctttacaaacatttcccacttaatactttgtaagtatttaatacgattgctgtctaacatagcagtttgcacctaggctttggtccaagctgcttcttggaaatcatatttttcagtagctaccaggctgaggtgtagtcagtaactgaggtatagtcaggtttcagcaaggtctattyggtattgtacccactagactatataaaccaaaatttctgctacaataaagagttaaatagtactccataagacgtgttgcacgaggcatatggagatttcaagtgtgcatcgcagtgtgagcattaacttaaatgtgtcattttatagttctctagtgcagaactatttggtgtacgattgtatgtaacatgcaaatcccatcagttcacactactattatttgtaggattattttaacaaaataatagttccatttcctgtttggtataaaactaaggctttatttttaaaagtggaggaagatgttaatacaaatttctctgtggtttattttccaaaattgatactttctcatatgtagcatgttgttgttgttgttgtttccaaa

SEQ ID NO: 736620 - DNA, 647 bp, Homo sapiens
agcctgaaattctccatcagtcaagctgaatccgttttctctgcactgctcagggctaccctctctgggcaacatcccctgctcactccctctctcttgctgtgcctcccatctaaactccctccaggcataggtgcagtgtggtgctcactatggactcctgtatgtctgaagtcataagtgaactccatgagggcaaagaccatgtaaaayaatcctgagcatacagttgcttcataaataggcatcagatgagttattaatctgtgataatagttttttcccctcaaatcagatggtttgttatgttaattctgagtccagaaacacaaattcttaaaaggttgatttatttgattttttaaaagtatgtgttattgtgcttattttaaaggctaataaaactgttcttctaaactgttgctattctcctagtaaatgtcccttcaacggtaatggaagccatgtgcagacaagacgccctgcagcccttcaacaaaagcagcaaactcgcccctaccacccagcagcgctccgttgttttcccccagactccgtgcagcaggaacttctctcttctggataagtctgggcccattgaatcaggatttaatcaaatcaacgtgaaaaaccagcgagtcctggca

SEQ ID NO: 736621 - DNA, 677 bp, Homo sapiens
tgatgctttcaggatttgcctatgttgtagcatatattaatatttcattactttttatagctaaataatattttagtatggggaaatatatatacactgtatcttgtttgtccatttatcaattgatggacatctgggttgtttccactttttggttactatgaataatggtgctatgaacattcatgtatgaatttttctgtgaccatatrttctcatttctctagggtatataactgggagtaaaattgccaaatcatatggtaagaatatgtttaattatttgaagaaatgccagactatattctaaagtgactgtaccattttacattcccaccaacaatgtctgagggctccagtttcttcatatcctaaccaactcttgttattgttggttatttttattctagctgtcctgatgggtatcaagtagtatcttattgtgattttcacttacattttcctgatgacagatgatgttgaacatctcttcatgtgattatcatccatttacatacctttttgaaagaaatatatattcaaatcctttgcctgtttttaagttgtctttttattattgacttgtaagagttcttaatatactctaagtgcagatcctttgtcaggtatatgatgtgcatgtatctcctcccattccataggttgtctttttactt

SEQ ID NO: 736622 - DNA, 560 bp, Homo sapiens
tcttatgtgggcacaggaatgctataagaaaggcatatctatagaatatgatttgagaaaaaatgaagtcattatatgataacataaagcataaggaaggtaaaggatctaaagctggaaaatttaatgccagcaaaggatggtttgatgcttatagaaagaggtttgagtttaaaaatgtcaagatgacaggagaagccagctgttgctgaccaagaggtagcagacgagttcccaggcaccattaagaaaaccattgcagagaaaakatgtctgcctgaacagatttttaatgcagacgaaagtgccttattctggaaaaagaaaaaaatctaccacaaaagatattttttagtaaggaagaggaacaagcaccaggatttaaagttggaagggataggctaactctactgttttgtgcaaatgcattcaggtttatgatgaggactatctttatctataaagctgctaatccctgagccttgaagggaaaagataaacaccagctgctagtctcttggttctataagaaggagtggatgagaaccccttttctggat

SEQ ID NO: 736623 - DNA, 670 bp, Homo sapiens
aagagaggcagaagtcttcgggctgcaaaagctttcccggacctagtcaacctccagcccagagtygttggaacctccaaccctgaagactttggaacctcgccaaggttctgggtgatgtcaggaataagtggagcctgaagatccctggcctcttttcaactcagtacctccagagtagaaaggagattggggatttgttgctttctacagcatacttcttgatagattccttacccttttataaatacccccagaggagatgtgaagggaaactcatttaacaactgctgtagacaattagcatccagcaatcattagcatttggcaggcaagcagaaatatattaaaaaaagaaaacctctgcctgattatattataagtatcacaagaatttcccaaacaacccaagcaaattcctcagcctctgctaaaagccaagcagaggaatagcagctttctggcagctcatgctttccctccactgttatttataaattccacacattttcttgattgttctagagattagcaaagttggtttttccctcaattcctaaattgtgtcccattatccaaagctgtgaccattcagatcctgtctgtaggctgctgataaggatccattaaatggtttccaaaagccatatactactattcattatattta

SEQ ID NO: 736624 - DNA, 615 bp, Homo sapiens
ctgtgaggtgtgatttcttttctttctttttttttttttttttttgagacggagtcttgctctgtcgcccgggctggagtgcagtggcgcgatctcggctcactgcaaggtcctcctcctgggttcatgccattctcctgcctcagcctcctgagtagctgggactacaggcgcccaccaccacgcctggctaattttttgtatttttagtagagacggggtttcaycgtgttagccaggatggtctcaatctcctgtgaggtgtgatttctgagtaatttcagggtgttacaagttcctttgcaagggatcgtatatcttgttatcagtagtgtagacctggagataaattagttccaggtagaggacttagaatgcatttttagatgggagcccccaaagtggtagggaagacctcaggtcatgatagggccaggggatgccaaggaaagggagagaagcgtgtgctataaggggtgagagagtgaagtgatgtggttgaatccccatattcaacctagagaaaacagagagaaaggagaccaccaaacatggcatatttctgaaagttagccagcatgactgactgcctatcagtacagaaccagtcagata

SEQ ID NO: 736625 - DNA, 558 bp, Homo sapiens
cgaaagtctcatctgagacaaggcaagttcctcctgcctatgagcctgtaatatcaaaaccaagccagctacttcctagatacaatgggggtacaggcattggataaacacacccattccaaatgggagaaattggccaaaatgaaggggctaaaggccccatgcaagtccaaaatccagcagggcaatcaaatcttaaagctccaaaatgatctcctttgactccatgtctcacatccaggtcatgctgatgcaaggggtaggttcccattgtcttgggcagctctgaccctctgactttgcaggctacagcctccctccctgatgcytccatagtctggcgttgagcatctgtggcttttcaaagtgcacagtgcaagatgtcagtggatctaccaatctagggtctggaagacagtgaccctcttctcacagctccgctaggcagtgctccagtgaggactctgtgtgggggcttcaaccccacatttcccttccacactgccctggcagaggttctccatgaaggtaccacccccacagcaaacatgtgcctga

SEQ ID NO: 736626 - DNA, 608 bp, Homo sapiens
gtaattgctgcaacgttaccattttgattttaattttggccctctccaagtctttgttatcatcaagttcttctttccagtgggagatgggaacagcttgagtaagtagactgtggcaccttttgtcctacattggcagaagttcaagcaatttaaaagctaccaaactgagtagctttcagtaacagctttgtaagcagtttttcattctgtgcttcaaatagactgatgctggagaataggaaagttgtgttcagtttcactttggaaaagttggtaaccacagtctgatgcagcctttcatttgtttctctaggttcagtagtaatgtctcctcttttatkcctgattttagtaagtttagtcttctgtattctttttcttgaccagctaaagatttgcctatttttgttaatcttttcaaatacacaacttttggttttattattacctttctcctgctgttttagatttagctgctcttgagtgttttaaggtgcttctaatggtaaggctgttgatatgagctcttatttcttttttaatataggcatttataaatttgcctttatgcattagtttcgtggcatcccatatgttttgatatg

SEQ ID NO: 736627 - DNA, 608 bp, Homo sapiens
gtaattgctgcaacgttaccattttgattttaattttggccctctccaagtctttgttatcatcaagttcttctttccagtgggagatgggaacagcttgagtaagtagactgtggcaccttttgtcctacattggcagaagttcaagcaatttaaaagctaccaaactgagtagctttcagtaacagctttgtaagcagtttttcattctgtgcttcaaatagactgatgctggagaataggaaagttgtgttcagtttcactttggaaaagttggtaaccacagtctgatgcagcctttcatttgtttctctaggttcagtagtaatgtctcctcttttatgcctgattttagtaagtttagtcttctgtattctttttcttgaccagctaaagatttgcctatttytgttaatcttttcaaatacacaacttttggttttattattacctttctcctgctgttttagatttagctgctcttgagtgttttaaggtgcttctaatggtaaggctgttgatatgagctcttatttcttttttaatataggcatttataaatttgcctttatgcattagtttcgtggcatcccatatgttttgatatg

SEQ ID NO: 736628 - DNA, 605 bp, Homo sapiens
attttagtgtatagactggtctaagtctcttggctttctaaaatatttaccttgtttttattttaagagaagaaaacttaggcctacctcaggggaggaagccactcctggaagactctttagcttcacttttgaggaaggtaaaatattcctgtggaatgaattccagggtgtaaaggaagcctccagtcacattgataaaagaccttcagttctgtcaagcacagactgtatgaaaggtttccctttctccatatgtatgcgtacgtgtgtgtgtgtgtgtgtgtgtacrtgcacacacacctatgtctacatttagattaacactgaattgtgtttcacaaccaaggtgtaagaaggaagactaatcgtggcagacacccccactgcctccctgctaccccacgtggtttgaaagtaacagaattccctgaacggtaatatgctacttatcttcctgtcagtcattcagtaccatttataaattctagagggctactgttagtaaaaccctcttgctttctattcctgagcatgtttcatcgttgtccattttgatcttggaaatgtaatctttaacaaggtaccaatgtctgtgaaatgtc

SEQ ID NO: 736629 - DNA, 650 bp, Homo sapiens
tctattttgtatgtatatttacctttatatgcctaacaaatctcacatacctaacaaatcttacatatactatatattctttcaatgctcagtggcttctattttgtatatatatttacctttacatacctaacaaatmttacatacttaacaaattttaaaaatcaaggcttttacagtgtgttaggttttaatattctgtatagtcatatgaattgctttcaactagttttagcaacaaaaatagtattttacattttcattcggtgccttcacatcttcccaataatacacttttttttttcttctctacctcttctgaaacgagtctactttttgcctactaaacaataaagaacatgttttaagtattgttttcctttacctcagctttggcccagactgttttctcaactctgattattattcgtgaatttgctcatgggtttgtccttacttttaaattttcctcagctttcttttgctcttctctttaatatgtgccattaacacatatatgtaaatacttatattcttcagaaacaataaaattgtattttctgcctactttgttaatagtctctgaatattccctgccagacactgtggccacggtaggtctttaagaacccgtgggaatgaatcacacc

SEQ ID NO: 736630 - DNA, 606 bp, Homo sapiens
catttttgcaattgcaaattgtgctgctataaacatgtgtgtgcaagtatgttttttgtataatggcttattttcctctgggtacatacccagtagtgagattgctgagtcaaatggtagttctacttttagttcttcaaggaatctccatactgttttmcacagtgtttgtactgtagcaggacgagccgcagacaaaacctctcagacactgaattgtagaaggaagggctttattcagctgggagcatcagcaagctactgccttaaaatccaagctccccaaatgcacagtttctgtcccttttaagtgctcacaacactaaagatttcacatgaaagggtcgtgattgatttgagcaagcatgcggtacgtgatggggcagcatgcaccggtggtcagagagaaacagaacagggcagggagtttcacaatgttcttctatacaatgtctggaatctatgaataacattggtttctaagttatgagttgatttttaactactgggtttaggccaggcaggcccagacctggtttcgggcctggcgcccagctgcctgtcttgggttttacgtccttggttttttttttttttaaaaaaaac

SEQ ID NO: 736631 - DNA, 606 bp, Homo sapiens
catttttgcaattgcaaattgtgctgctataaacatgtgtgtgcaagtatgttttttgtataatggcttattttcctctgggtacatacccagtagtgagattgctgagtcaaatggtagttctacttttagttcttcaaggaatctccatactgttttccacagtgtttgtactgtagcaggacgagccgcagacaaaacctctcagacactgaattgtagaaggaagggctttattcagctgggagcatcagcaagctactgccttaaaatccaagctccccaaatgcacagtttctgtcccttttaagkgctcacaacactaaagatttcacatgaaagggtcgtgattgatttgagcaagcatgcggtacgtgatggggcagcatgcaccggtggtcagagagaaacagaacagggcagggagtttcacaatgttcttctatacaatgtctggaatctatgaataacattggtttctaagttatgagttgatttttaactactgggtttaggccaggcaggcccagacctggtttcgggcctggcgcccagctgcctgtcttgggttttacgtccttggttttttttttttttaaaaaaaac

SEQ ID NO: 736632 - DNA, 443 bp, Homo sapiens
attaatgctttttttttgttttttgagacagagtctcactctgttgcctaggccggagtgcagtcatgtgatcttggctcactgcaacctctgcctcctgggttcaagcgattcttgtgcctcagcctcctgagtagctgggattacaggcatgcaccaccatgcccagctaatttttgtatttttagtagagacagggttttgccatattacccaggctggtctcgaactcctgatcttargtgatcacccgccttggccttccaaaatgctgggattacaggtgtgccaccgtgcccagccaatacttggctttttttttttgttttaaccaagagaaatgttaagaagttggttttagaacaagccttctttctataggaattctgctcattggagacagtggaacaatggatttgtgaatgtattaaaaggttgcaatg

SEQ ID NO: 736633 - DNA, 557 bp, Homo sapiens
ttctgcttgcagacatctgtgtgccatgttctatttctagctctgacgtcacgatcgaggcctgacaagactagcagcctggcattatctccatggagccagccaactgagcgaggagttctgtcctccctggaagccagggatgtgagctttacctgcgtgtaaatcgccgagagctgcagccaacactttataagcagaggtcttgccgcccatggggtctcctacratcatatagccatgtctcaccagcatcatttcgtagatctgggaggagacatcattcataaaagaagctaatcattgcaacgctcccccattgtgagttagtcagaagtcaatgaggaatgaggggtcagaagaggattctcacagttgcttctacctctggagaacttcggttcttttcatggtctattgtttacatatctttcagacgaaaaaatatatgtgtgtgtctcagattatttaagggatgggaactaccatttgctctgtacttgtctatgtgttaagaatcaactgataacccaaattatttaatctactccaatatc

SEQ ID NO: 736634 - DNA, 622 bp, Homo sapiens
acccctctctctatctcctcataacagaagttccactctgatgggtgtggctgagaaaatagggttctccctcctcccagttcccagtcaagggccaacatatatcctcagaagaggaagaccaccagcatgtctcatactcataccctcccttcacctttgtactgaagagactaaattccaggagagtacacttgtgaggttggaggctttcttcctctaccagcctccactcataggatggaggctccattctaggcaaggcaagccaagaatactrggaaccagatcacccttaccccagctggctcacagaagaagttcccctgttggggaaaggaagccaggaaggccaatgattacccgccagtgcactgcctcagtccaagagaagcagaccactgttcctgcctccagctttggagcagcaggacagagattatgcctagtaagagaggcaggccataagaacaaagagctccagagctctcccaagaaaactgacttaattgtctccaagggacagttttcctgaatttttcatttttttaattaaaataattttcctggagcgtgggaataattaggcccaaaagaacttcaaaagcaatgatgaaggatt

SEQ ID NO: 736635 - DNA, 555 bp, Homo sapiens
gccctaaataaccagcagtgatatcctggtagtatgctgtgggccttgtgttctgaaatgtgctgactacaggtgtgagacagtacattcccagctgtagtggcaacaacgagagactccttctgcttgagaaaagcagggtgaagagtaaaatggactttgtcctgcctctatccccctcgacaatggggaacagagcaccaaccagcctcttggagtcaccaatttcaggctgtggcacttggacagcatttctaggcccgcccagagcccactgccttgaagagtgagtcccaggtctggcagcattcaccacaagctgcctgaagagcccttaggctttagaggaacgttggtggtggcatggcagtaccctccatgacctggtggtggaggtaaccaagagagagrctcctctgcctgtgaaaagaagacagaagagcggaaagaagcttatattgtggactgagtgccagcttaactacggtagaatagaacattaggcaaattgctacggtttttgactgtaaacgctggctctcagacagcatctct

SEQ ID NO: 736636 - DNA, 443 bp, Homo sapiens
ttcatatcctttacccactttttaaaggggttgtttttattttggtgaggtgtttaagttggttgtagatttgggatattagtcctctgtcagatgcatgtttgcaaatattttctcccactctgtaggtggtctgtttactctgttgataatttcttttgctatgcagaacatttttagttgaattaagtyccatttgtctatttttgttttatagcattcacttttgaagacttaatcatgaattatttgcctaggtcaatatctagaagagtttttcctagtttgccttctaggattttgtatcagttcaggtcttacagttaaatatttaatctgtcttgagttaattctggtatacgatgacaaaaatacaaaaaaattctcaatatcactagtcatcagagaaaagcacagtgaaatgccatcttaccccattaaga

SEQ ID NO: 736637 - DNA, 646 bp, Homo sapiens
accattatcacacaggaaacagagtctttctggatcttaagtaaaaacatgagttcccaaataattcaataaagaacagcataatcacttgaaggacaatctggactatgacatgaaaaaatatcattttacaacaaagagaaaactattcagatatagaaaatgagaaaagataagcagatgaaagaatcaatccaggagatctaacttgtaaacaataacagatgtggaagctggaggagaatcaatattgwgtggaaaattatggagaacttcaaaatcaacaagagaaaaaaattgaatatgtaacaatcaatcaaatctaaaatgataaaagtgaacgaaaaactacaattcaaaataaatattaaactcaaagtaaggaataaaaaatataataagtcatattaggcattatcctaaatttgaaaggtctgaattcttcaattaaaatagaaacataattagattatatttaaccacacacacagacacatccacccatccacacagttatttgatgtttaaaaaaatacttaaaacaaagggatagagagaaaatgcaaatagaaataaagtagcatcagacaaggtggaatttaaggttcaaagaatagaggaatgtgaaactgaagaataataataa

SEQ ID NO: 736638 - DNA, 568 bp, Homo sapiens
gaaacttttgggggcaaaaggtgaactttagggaataggtattctctcagagtttacttgcatttttgaggaagtaaaaatatcagagcaaatataaaaaattcagtgcatcttgataggtactggaggtctagatttatataatgcaacctattatctcacttaatttatttaaaaactattgatttaacatccacttgctgggaggtgctcttctagatgcagtgaataatcagaaraatcccctttctcacatagctcacatatggacacaataacacataataaaatatttgatgtggtttgttagatggtgtaagtactatgagtacaataaataagaaaatgagctaaaaatcatggggcaaaaagtgaaaaagactgatgacaatctgtttggagacccagaaggtgagggaaaaaaaaacgaaaaaagggcaaaagaaaggataatggctacagcccttccagaatcaatagaaggcatcaatctttgtggatggaagacttaagacttcccaacaccaaatagcatctaagtgagaaacagatgtggtaatcagaggta

SEQ ID NO: 736639 - DNA, 556 bp, Homo sapiens
gaaacctgaaactggatcccttccttacaccttatacaaaaattaattcacgatggattaaagacttaaacattacacctaaaaccataaaaactctagaagaaaacctaggcattaccattcaggacataggcatgggcaaggacttcatgtctaaaataccaaaagcaatggcaacaaaaggcaaaattgacaaatgggatctcattaaactaaagagcttctgcacagcaaaagaaactaccatcagagtcaacaggcaacctacacaatgggagaaaatttttgcaacctactcatctgacaaagggctaatatccagaatctacaatgaactcaaacaaatttacaagaaaaaaacaaacaacccyatcaaaaagtggacgaaggacatgaacagacacttctcaaaagaagtcatttatgcagccaaaaaacacatgaaaaaatgctcaccatcactggctaccagagaaataaaaatcaaaaccacaatgagataccatctcacactagttagaatggcaatcattaaaaagtcaggaaacaacaggtg

SEQ ID NO: 736640 - DNA, 556 bp, Homo sapiens
gaaacctgaaactggatcccttccttacaccttatacaaaaattaattcacgatggattaaagacttaaacattacacctaaaaccataaaaactctagaagaaaacctaggcattaccattcaggacataggcatgggcaaggacttcatgtctaaaataccaaaagcaatggcaacaaaaggcaaaattgacaaatgggatctcattaaactaaagagcttctgcacagcaaaagaaactaccatcagagtcaacaggcaacctacacaatgggagaaaatttttgcaacctactcatctgacaaagggctaatatccagaatctacaatgaactcaaacaaatttacaagaaaaaaacaaacaaccctatcaaaaagtggacgaaggacatgaacagacacttctcaaaagaagwcatttatgcagccaaaaaacacatgaaaaaatgctcaccatcactggctaccagagaaataaaaatcaaaaccacaatgagataccatctcacactagttagaatggcaatcattaaaaagtcaggaaacaacaggtg

SEQ ID NO: 736641 - DNA, 592 bp, Homo sapiens
gggatacagttagtggcacaataatggttcattaaacgcacggtagtcttaccatggtaaaaataaaataaaattaagttcacaaataatctaacaaacttttttttttttgagacagagttttgctcttgttgcccagactggagtgcaatsgcacaatcttgccccactgcaacctctgcctcccaggttcaagtgtttctcctgcctcagcctcctgagtagctgagattacaggcatgcaccaccatgcctggctaattttttttgtatttttagtagagactgggtttctccatgttggtcaggctggtctcgaactcctgacctcaggtgatctgcccaccttggcctcccaaagtgctgaaattacaggcatgagccatcaagcccggccctaacagttttaaaatgcactgcattttattacataaaagtacaagtagtaaagtaatatactcatttattttaatatacttttaattatttctttgtgtcactataataaagtattgctctgaacatttacgttatacattacttaatagaattttactacaaacagcttctccacttgtattttcattatgcg

SEQ ID NO: 736642 - DNA, 569 bp, Homo sapiens
tgcctgggctagatggagtgccaaggccctgtctcggctcactgcaacctctgcctcctgggttcaagtgattctcctgcctcagcctcccgagtagctgggattacaggggcctgccaccacaccaggctaaattttgtatttttagtagagaagaagtttcaccgtgttggtcatgctggtctcgaactcctgacctcaggcaatccactcaccatggcctcccaaagtgcttggattacaggtgtgagccacagcacctggctgcttttttttttttaatgtacacttatcatttagaatgtgctagaggggcctctatgagggcatctctcctttgattgtactcctcttgctgtgacacyaaaggatgcagagacaagtttattttacctagaatctgcagataaggtctggctactgcctgggatttacagaaaagggccaaactttggatagaaaatgtacagaaaactaacaaaaggcattttctgcattgtgagatgtcaacatagatatcttacagcctccatttgggagtgtggaattatgagatttttcacatcttg

SEQ ID NO: 736643 - DNA, 611 bp, Homo sapiens
aaaaaaaaaaaaaaaaaaaaaaaaaagactttaaaacaaggtaaaacgtgattgtagcaggtaaactctaaaaagaaccccaaatctctacttcctggaattcttacccttgggtacccctcacacattttacaagggttgatctgtaaagcccgtataaaacagaaaacatgagaacatgtaacttccaattttaggttattgaagacactggtctccttcttgggtagactctcctgctcttggatcactttctctgtttgaaagaatccctgtgacgagcatccctatggagagatccatgtggcaaggaactaaagcttcctgtcaactgccatggaaaagagattagaattgaatcttccagcctccagcaartttcctgagactgtagctccagagacagcttaactgcaatttcatgggggattctcaaccttgacctacctaagctgcttccagattaatgtaatattctaaaatatgtaaacaaatgtagagtgacagaaagcagatcagtggtttcctaaagacgggtaggtggataaggaggaagagattacaaagagcccaagaaaacctttaatttcatggctataaacatgtaccaa

SEQ ID NO: 736644 - DNA, 551 bp, Homo sapiens
gtcccagctacttgggaggctgaggcagcagaatggcgtgaacctgggaggcggagcttgcatgagccgagatcgcaccactgctctccaacctgggcgacagagcaagactccgtctcaaaacaaaagcaaaaacaaaacaaaacaaaacaaaacaaacaaacaaaaaagacttgaaacacaaaaacgaatataactgaaaggataaggatggaataacaccaatgtaaagaaatctggaatagttatatcaaatggagtagatttcagacaaagaatgtgataaggaataaaaagagttatttgataatgataaaaggattaattcaacaataggtcataacaatgctaaatgtttttgcacccagtactagagcttcacattatakgaaacaaggctgataaaactcaaaagagaagtagcatatgagtcaaagaaatctcaagaaaaatttaaaaaatattttgaatgaaattaaagtgaaaactcaacttagcaaaatttgtggcacacagagcatatagttcttagaaggaaatttatagaaatg

SEQ ID NO: 736645 - DNA, 624 bp, Homo sapiens
tataaaggatggaggtttaattgtctcacagttctgcatggctgggaagacctcaggaaacttacaatcatggcggaaggggaagcaaacacatacttattcacaaggcagcaggagagagaagtgtcaagcaaaggggaaaaagtcccttataaaaccatcagatctggtgaaaacttgctcactattttaagaacagcagcataagggtaactgcccccataactcaattacctcccactgggttcctcccatgacacatggggataacaggaattacaattcaagatgagatttgggtggggacacaccaatcaacaaactccacatagaataaactgaaagagatacacattgaaatacattacaatcaaactgttgaaagacragcacaaattctcttaaaagcaacaagagggaagcaacttatcatgtacaaaggatactcgatctcacttttgcccaggctggagtgcagtggcatgatcatgactcactgtatccttgacctcctgggctcaagcaatcctccaacctcagcctcctgagtagttgggactacaggtgcatgccaccatgcctggctaatttttaaattattattattatttctgcagagatgag

SEQ ID NO: 736646 - DNA, 620 bp, Homo sapiens
catgacctcaggggatccacccaccttggccccaaagtgctggcattacaggtgtgagccaccacacccagccatgctttctctttttaattttatttattttgagacggggcttgctctgttgtctaggctggagtgcagtggtgtgaacatggctcactgcagcctcaacctcctgaactcaagtgatcctcccacctcagcctcctgagtagctgggactataggcacatgccaccatgagtggcttatttttaaattcttttgtagagatggggtctcaccaaattgcccaggctcgttttgaactcctgtgctggagcaatccacccgcctcagcctcccaaagtgttgggattacaggcatgagtcactgtgacccgcccactttccttcttttgaatgttagtggtttggtccacagatatayatgtatgcaacaccaacgtagtgcaacatgctcatcacagcctgaacacttgagtccaggcttgggggtctggagaggtaaagggaggccatgcctgcaccattttccccgccagatctgccaacagcatgtgcactgagcgcctagagacaacgctgctgctctctggtcagtcctcaaatcaggaagc

SEQ ID NO: 736647 - DNA, 619 bp, Homo sapiens
agtcatccatattttttgcatggctcactttttttttaatcactaagtagtatcccactgaatggacggaccactgtttctttatcctttcgcttattgaagaacatcttagttgtttatgattttgggtgatcatgaatacatctaccctaaatattcacatgcagacgtttgtgcagacgtatgttttgaaatcagttgggtaaatgctgagcagcctgtgttagtccattcttgtgttgctgtaaagaaatacctgaggctgggtaatgtataaagaaagaggtttaattggctcgtggttctgcaggctctaggagaagcatggtgctggtatctgctcctggtgagggcctcrggaagcttacaatcatggtggaagcaaagggggagctggtgtgtcacatggtaagagcagtagcaagacagagagggaggagatgccacattcttttaaacaaccagatctcacatgaactcagagtgagaactcactcattactgcaagcatggcaccaagccattcatgatggatctgtccccatgacccaaacacctcccatcaggccccacctctaacattgaggattatatttgaacatgagacttggaggggata

SEQ ID NO: 736648 - DNA, 591 bp, Homo sapiens
tcgccctgttgcctaggctggagtgcaatggcacaatctcaggtcactgcaatgtctgcaccccccccccccaatggttcaagtgatttccggctaatttctgtattttcagtagagacggaatttcaccatgttgaccaggctggtctcgaactcctgacctcaagtgatccgcccacctyggccacccaaagtgctaggattacaggtgtgagccattgctcctggccacctttgtcatttaatctttactctattaaaggttagtaaagattatctagtaaagagatacaggaaagcccgagaggctgccttttagatggtcagatggtcagaagttctgccctcatgttggcactggcagctctgtgcctgcacctccctcttctggacacaccaacatctcttcgaagtcagggactacatccaaccctctcccggcagcatccttccagcgtctagaatgtggaaggcactgcacatagatgctgtgagtgcattggtagagaagagggagtgggagacggaaattgctgagaaaatggcaatgcaggtttatttcactctccggatactgtcacaaaaatctgg

SEQ ID NO: 736649 - DNA, 591 bp, Homo sapiens
tcgccctgttgcctaggctggagtgcaatggcacaatctcaggtcactgcaatgtctgcaccccccccccccaatggttcaagtgatttccggctaatttctgtattttcagtagagacggaatttcaccatgttgaccaggctggtctcgaactcctgacctcaagtgatccgcccaccttggccacccaaagtgctaggattacaggtgtgagccattgctcctggccacctttgtcatttaatctttactctattaaaggttagtaaagattatctagtaaagagatacaggaaagcccgagaggctgccttttagatggtcagatggtcagaagttctgccctcatgttggcactggcagctctgtgcctgcacctccctcttctggacacaccaacatctcttcgaagtcagggactacatccaaccctckcccggcagcatccttccagcgtctagaatgtggaaggcactgcacatagatgctgtgagtgcattggtagagaagagggagtgggagacggaaattgctgagaaaatggcaatgcaggtttatttcactctccggatactgtcacaaaaatctgg

SEQ ID NO: 736650 - DNA, 527 bp, Homo sapiens
tctgtcaaaagagaagaaccattggagaaagaaatgaccaaattctatgtagagagcttgagcaagaagaaaaaatgtaggggaagggtaaatagctctgtctagagcaattggcttttgttgtttacagcttgtctatgtcagaccatcccgtaggaaaagtttggtaagaacaaagacctttgataaaagatgactgagagactgtctggggtttgatgcaaagatcatcagaggcatctacaaatgagtagtcaccagtgacaaaatctcaaagcgaggcaggctggagaatgggcgatctgttagtcttgccagagaggarggtattagcaaaggcagattgaataagcggaaggtaaaaaaataaaaagcagcaatagcattttttttttacatatacttcattagcacaggtttggctttaccaatataggaaaggcatttttacactaattaggtcattgtgaaaaagaaaaattggagttattttttaaatgcagtgtttttaactaagaagaaaatat

SEQ ID NO: 736651 - DNA, 574 bp, Homo sapiens
tcaaagatagtgctgtaacctcacctcacagggagaaaaggagataactccaggaatttcatgcccatgccagagggagctgcagggaccagcaatcactggtaatgtccaggtggacatctggagccacctctccctcttgcttggtccaggccagcatcaacactgaagcaggtaggggttccaggagcattgtgtcctggcagtggcagcacacagtgtctggcagctgacaacgtggaactttacagggtagattgtccagcatgatcaggaagccagccaggcggccagcttgagggaaggcaggcctcctccaagctggggaagagatcagcacagctgaactgcatttccaagtgagactcatccccagctgggttastgagatattggaggaaacgttgaggccaaatcccagtcataaagactgcacaaatgccatggggaggtaggcagaaagttgcaaacaagtgggtttgtatttcagataaccatcttggggctgcaattctaaagttagatataatcacacaggtgagaatagggctgctggtgcatggcaagcgccctc

SEQ ID NO: 736652 - DNA, 653 bp, Homo sapiens
attgtacatttttaaataaaagagtataactggattatttgtagcacaaaagataaatgcttgaggagatggataccccatttaccctgatgtgattattacgcattgtatgtctgtatcaaactatctcatgtaaccaataaatatatacaactaccatgtacccacaaaaataaaaaaaagatactatggttcatataagtgaaaacttgaagaaaactctcatatgggaagaaacactttcttctctttatagttagggaagtcagtgctttcctgtgaagagacttttacaggatttcagttccttggataaaaactatstaaaaatcctctctgttcagaataggggaggatcatatctcagactggtgtaacatctagtaattgaatattttaaaattttatatacttagaaattcaatcttttatgagtagtagaattcttaagataagtgagtattaataaatgaaagaggtggttaatgaaaaagccatcagagtatacatataacaatattagaaacatgaaagcccaagtattacaaatgttttatgcaatacaaattgtactttgtcccaagtagtgaacccttaattaataatatttgtctgtattgacatatatacagtctgaaaaacaatactggact

SEQ ID NO: 736653 - DNA, 625 bp, Homo sapiens
aattagtaagatattgtgtcagctttttttgttataaaatactgcttttaaaatccagcttcatgtgtgagacccagttcagtttaattattgtaacttagtgacatattgttaatgagagtgtcattaaatatgttagctattagaataagtgggctataagtgtttttttttctgtgattttaataaaatcatggcataaagtatttatgmttcctaactattgaatttttaaaattctactgataacttccttttcccagtctgtggatgtaaatgaaatgaaatgactataagttaaggctgctaacataatattaaggctgctgcaaatgtaaaatattttttctatttattgaatgatgaccatgttcaagttctttgcatatattacctttaatcttattaatcatgcaaagttaataatatcctcttactactgtagaagaaatggagatttaggtgttacttattctttctaaccatttaggaagaagctgaggcacaataggaacctagttctgtttaacaggttttatttaaatttcataatgtttccacaatcccatgaaacttcaataatgatgtggcactttgggaacagatgctagaactttccacaggt

SEQ ID NO: 736654 - DNA, 659 bp, Homo sapiens
ataatagcatttttatagactgttattgtagtgagatgttgacagtggtagtttgtagacaagatcagttggtagactaatagaacagctggtagagcagtagaccagtagaaaggcagtgattcatacattggtcaaaatattcttataactctaagatgaaagtaatacttaaatattttcaagkctagatggcctttagtgaattaatagggtctctctgagaacttcaccatcaagtattgtatagactactggagcagccagcccatagtggtggaaataaccaagcctgaatttcctgatatagcagatactgctagctgttagctcaaaatccattcccttaaaagagtcccatttttgtttgatagaaaaaaattacccagctgaaaatttcccagcctaccctatggatagggcagatagtgatagtcaatgagacattatggaagatttattcctgtcacattttctcctccttgtcactccatttgttctcctgcctggaacataggctgggggctgaaaggtagtatatatcttgtgactaacaacaaagatgaaatcagtcacatctaagagtggcagaatggaaaaattgtatgagtttcatgacatctgctgcactagtcgtgacagccttctagatttcctaa

SEQ ID NO: 736655 - DNA, 659 bp, Homo sapiens
ataatagcatttttatagactgttattgtagtgagatgttgacagtggtagtttgtagacaagatcagttggtagactaatagaacagctggtagagcagtagaccagtagaaaggcagtgattcatacattggtcaaaatattcttataactctaagatgaaagtaatacttaaatattttcaaggcyagatggcctttagtgaattaatagggtctctctgagaacttcaccatcaagtattgtatagactactggagcagccagcccatagtggtggaaataaccaagcctgaatttcctgatatagcagatactgctagctgttagctcaaaatccattcccttaaaagagtcccatttttgtttgatagaaaaaaattacccagctgaaaatttcccagcctaccctatggatagggcagatagtgatagtcaatgagacattatggaagatttattcctgtcacattttctcctccttgtcactccatttgttctcctgcctggaacataggctgggggctgaaaggtagtatatatcttgtgactaacaacaaagatgaaatcagtcacatctaagagtggcagaatggaaaaattgtatgagtttcatgacatctgctgcactagtcgtgacagccttctagatttcctaa

SEQ ID NO: 736656 - DNA, 627 bp, Homo sapiens
cccaaattctaattcctaaacatactttatttaaacagctctcactaaaaacccatggtagcaattagacattaaagaatctcattaacagttttaaaaacaaactcaggtacattattatatgtcagcatttttgcttatcttgggtaaataatagggaatgtgttagctgrgtcttatggtaagtttatatttaactttataagaagctaccaaactgtttaccaaaatgaccatactatttgcattcccatttgcaatacatgtgagttccacgtgtttgtcaacactactttagctgcctcccataaattctaatgtatgttttaatttcattaaattaaaaatatattctatttttgtgccaggcatggtggcctctgcctgtaattccagcactttgggaggccgaggtgggcagattgcccgagctcaggagttcaagagcagcctggccaacacggtaaaacccaatatccaataaaaacaaaaattatttgtgtgtggtggggcgtgcctgtagtcctggctactctggaggctgaggtagattgattggttgagcctgggagccagaggctgcagtaagctaagactgccccactgcactccaacccggatgataga

SEQ ID NO: 736657 - DNA, 538 bp, Homo sapiens
taaaccacagtaatatcagtaagtgatgcttattgctctgtgctgtagtccttttacagttaatattattggccccacatctgtctcaaacatatattttgatactgtttctaataatgctgtaatatgtgaatcacctaaaggaaaacaagttcatgagaaactttgttatagtcttctaagatagaaaagccttgcaggcagattggtgagactagaagctaggwttcaaacatttggtcacctgccaggtaccgaagataaatataaacagaacatcttcccaattctgaagggacctgcatccagtagaggagactgacatgatgcaactataatgtaagcccctcccacacatataacccaaatcgtgaagtaacacatcctgggtacctagagaggtgaaaaatgatttccagctatgcatttgatggaggtgacatttgagattgctcttaataaaacattgaagaaatatataagttttaaaaaggctaactatgaaatctactaagaagaagagaattctcaatttttt

SEQ ID NO: 736658 - DNA, 435 bp, Homo sapiens
ggctgggcgcagtggcccacgtctctaatcccagcagcactttgggaggccagggtgggtggatcacttgaggtcaggagtctgagaccagtctggccaacatggtgaagccctgtctctactaaaaatacaaaaattagccaagcatggtggcagacgcctgtaatcccagctactaggaaggctgaggcatgagaattgcttgaatccaggaggcggaggttgcagtgggccgagattgtgccattgcactccagcctggaaaacaagagygaaattccatctcaaaaaaaaaaaaagataaagttttctgtctttaagaaaatttcattctacctggggaagacaggcaacaagcatgcaaataaaaagggcaatattaaaggaatgaataggagagctgctcaaaaagtagccacattggaaagatctgag

SEQ ID NO: 736659 - DNA, 435 bp, Homo sapiens
ggctgggcgcagtggcccacgtctctaatcccagcagcactttgggaggccagggtgggtggatcacttgaggtcaggagtctgagaccagtctggccaacatggtgaagccctgtctctactaaaaatacaaaaattagccaagcatggtggcagacgcctgtaatcccagctactaggaaggctgaggcatgagaattgcttgaatccaggaggcggaggttgcagtgggccgagattgtgccattgcactccagcctggaaaacaagagcgaaaytccatctcaaaaaaaaaaaaagataaagttttctgtctttaagaaaatttcattctacctggggaagacaggcaacaagcatgcaaataaaaagggcaatattaaaggaatgaataggagagctgctcaaaaagtagccacattggaaagatctgag

SEQ ID NO: 736660 - DNA, 622 bp, Homo sapiens
cagattaggaccccaccctgactcttatgagctcattaaccttaattacctcctgaagaccatgtctctagaaattccaactgatggaattccaactgtgggctgaattatgcccacaattcaaataatttcacatcttagaatttccttcaaaatcagtttatgactttatgagccactaaaggaaataaatctcattatttatggttagaatggcacaaacatacctgtcttgatcacctgtcctactccccaggtttgtttcctcaaagctttccattcacagatattgaaygtttgccctttgagaatacttggaagagtatatttcagactttgatagaaattcttgaagaagaggtctggaaggttttgaacatcagcaccgtggttagaataatagtgtcacttctccgaatctctactttgaaggaaacaacattcatttttgagtgttttagtacaattgattagatcagtctgaattctgttatgccttgttcatcaggtagaatgtttaaagctttgagttttaatatcaagatttagttagtaatgagagtgttttaggacagtgtttttctttgacgtattgtcataataaaatatttgatttaaatat

SEQ ID NO: 736661 - DNA, 558 bp, Homo sapiens
ctggcccgcaagctccttttcacaaatgtcccgatgatgacatgtcatgagcagaagaccaggcaatttcaggccataggagagaaaggatgcagaggacaggacgagacttgtaatgccaaaaggggcccagaggccgcgcatcccacctatcgaagcctgggccgcggcgatgccgccaggtctccaggatgaaccgaagggaggccgatgrtggagaatagagcacgcaaggtccctcaccttcactacagctgtcccccggctgccctgccggccactgtctactcccgctccgagcttgtttacaaccagggtagccatcctcgcaggggaagcgccacagaaacagccttcagagtcctcaactgagaggcggggttgagccacctacccagaggcctctgcgcacgccaccggcgcacaggcgcagtaggacactgggcgccgcttagccgactcttactcctcctccccgcaatcgtcgggtggttagttgcacagcctcgcgcatgggcacttttgttatttttcattatgtagtctgcagctgctgga

SEQ ID NO: 736662 - DNA, 511 bp, Homo sapiens
gttcactaaaagaaaataaaaagtaaaactaaaaaatgcccagtgtttcattatgcctacaaaaaaacagagagaacacacattttttatttgtttgttttgaaagattatttttgcaaggcaacttgtcttaaagctctggaagaataaaacgtttaactgtaccttatttaggatttctaagtcctagcagttatgggaaagacatcttagtgtcaaaaaaaatcttaaacacaacaaatgaaaaggcaaaattgtcccmcaatatttgatgaagagcatttttagtttaatttacaccctagagtgccatttgatatttggtccagaatttggtaatgttgaatgaaaaatgacttttgttattttagagcaaagagaatcatttattccataatgataaattttaataatatacatttgggtactaaaatatattcttaacaaaattattttataaggtcctggttcctcagtcaggaggtctgggtttgaatcttgacactgccac

SEQ ID NO: 736663 - DNA, 592 bp, Homo sapiens
agaagggagcaagcaagagagagaaagtgccaagctcttttaaacaaccagctctcgcacgagctaacagagtaaggacttacttattcctgtgaagacaacaccaagtcattcgtgaaggatccatgtctatgacccaaacatctcgcattaggcctacctgcaacattggaggtcacatttcaacagaatatcagtgttttcacaatgcctatattactgctgagttttaggagttctttctgtatmtctttctggatacaagtttttcattgatgttatgcttgataaagcaaacaaggtctgagggcaaagactagagtaaatacctaatgccttgatgcacagacattgatgaatgttcacaagcatcaagaatatgaaaggcattatgacttcatgaaacaaactaaataaggtgccagtgactaactttaaatagagggatatgtgtgacctctcagacagataattcaaaattactgctttgaggaactcaaccgactttaggaaaatacagagaaggaattcaaaattttatcagagaaacttgacaaagaggttgaaaaaaatcaaatggaagtcctggagc

SEQ ID NO: 736664 - DNA, 592 bp, Homo sapiens
agaagggagcaagcaagagagagaaagtgccaagctcttttaaacaaccagctctcgcacgagctaacagagtaaggacttacttattcctgtgaagacaacaccaagtcattcgtgaaggatccatgtctatgacccaaacatctcgcattaggcctacctgcaacattggaggtcacatttcaacagaatatcagtgttttcacaatgcctatattactgctgagttttaggagttctttctgtatatctttctggatacaagtttttcattgatgytatgcttgataaagcaaacaaggtctgagggcaaagactagagtaaatacctaatgccttgatgcacagacattgatgaatgttcacaagcatcaagaatatgaaaggcattatgacttcatgaaacaaactaaataaggtgccagtgactaactttaaatagagggatatgtgtgacctctcagacagataattcaaaattactgctttgaggaactcaaccgactttaggaaaatacagagaaggaattcaaaattttatcagagaaacttgacaaagaggttgaaaaaaatcaaatggaagtcctggagc

SEQ ID NO: 736665 - DNA, 621 bp, Homo sapiens
aatcatttacctatttaaaatgttgactttctgggctttttttttttaactgactttgaatttcttttttttttttaatttttttcgagtacctgtggttttcagttaacttttataaatatattccaacactgtggcttttctttcttaaagggatcttttgaggaacagaaggttttgtggctgtacctacttctgtagtgctgtattgttttaatatggttgctgtatattttttgtatggtattgtatcagttttgttagagaatctctttctctgaggtcataaagatatctacctatattttttgtaaagttttatagttttgacttctgacattttagaatttttatctatctaaagttgatgtgtctgyatagtaagaagttttgaataaatttcatttttttctagtatgggtgactaagaattcttatacaatttatttgaattgatcttcctctcctcagttacgtacaacactacctgaacggtaaagcaaattcaggatatcaatgggtcagtttctggagattatctttagttgcactagcagcatgatcacaatctcttaattactatagcttttataattttcttcatttctgataggccaagtg

SEQ ID NO: 736666 - DNA, 575 bp, Homo sapiens
aacagaactgtaactagtacatttgcttgtcctcttcacctacactgagaaatggccagaattatggctttacactgaatcatggggtaaaggttaacactcaatgtggatggatggttaaggacttggaagaaaatagtataggaacagagcatacaagaacatctagggaagagctatgyggatggaccactgagaatgagcagtatgtaaaaattatttttgtcccttgtaaatgtacaccaaaggcatccactacagatgggcttgtcaataaccaggtgaacaaaattacaaggctgtggagaagttatcctttttcatcagtcacaccggtcttcctcaataggccaagaacaagtgaccatggtggaaagagtggaggctacatacggactcagcaaaggacttcttctcatgaacgctgacctggcctttgccaacaatgagtgcctgatctcccaacagcagaagccaatcctcagtccaagatggcaacattcccctggaagatcagacagccacttggcagcagattgattatattggatcctttccatcaagggagaggtaat

SEQ ID NO: 736667 - DNA, 568 bp, Homo sapiens
gcaagtcacagcacctggttcaatttactcctaatgtagcatatatagtacaaatttaaggagcaaaatgaactagcattgtttgaacataaacacgagtcattcaaggtgaaataatttattgctaaaaccatgaattgttaatttatgagctcatgatttttttaaaaagtgatcagcgttggactaaaactgtcttttctaaccagtatgaccttgaaattcacagggcaaaaaaatgactttaagttgtaattaataaaaaccaattatacaatgaattatcgtgaattcaaaaggaaataattatgaggctttaaraagttcaattggttcttagaatataacaaaaaaagcttgaaaacatttgaaaaagttctatctacttgcttcattatttataagtgagaaaaactgtcagtaacctaaatatctttttatatggtatgcttaaaatgtcattaaatgctgcactcaaaagaatatgaaatattaataacatggaaaattattacaatagaattctaactataaaaaataagtaatcaggtgtttttccctcaaagga

SEQ ID NO: 736668 - DNA, 634 bp, Homo sapiens
actccctaactctaaagcaacacatgtacaggatggattcaaaaaacatactgaagaccttgaaaactgaactgacattgaagaaatcactcacataaaatgatacagaatttctactaagaactacacctttatacagaaaatttaggtcaatttttcartgccactctatctgtgacttttggagtatagaagataagcatttaatttgtccatcagtaaaatgcacacctttatttcttgcagtatgagcctgtctttgcaacctcttggtagcttgtctatgtttaacttctctgtaccggtcacttagaacaagacattggaagctgcaccaaaagaaagaataaggtttgagaactgtggagtttaattaatgaatatgagagtcttccaggaagcacattatactaaaagattccagaaatcgtttgtgacagaaggagaaactgtatttcctttctttcccagttacacttgacaccttagggaaaatagcctttaatcctggtttttagtatataccgtggacactttttcccagaaaaagcaaattccactcctcgtggggttttgaataattaaagctcctcagcagtctcctcccaggcatgagaatcacaacatggagacc

SEQ ID NO: 736669 - DNA, 609 bp, Homo sapiens
aactttttaaaacacttgaaaatttccccaggtcagaatttccccccaaaagctaatgactctttttccttctttgatcaaagtatttttaaaattcatacacaacctagttaattttaatgagtttgaacatttgtgcctatagcctggagaaaattaagtgttcttgagatggataaaactcatgaagggcagaagtaaaaagacaataatatttgtcctagttatatagactattccagtagracaaatagtagagtttataagaacatagctcttggtccataaataaatggtgtcatcttaaaattctgtgaaaaccaaatggttttactactcactatttttgcataaaactagtggaggtaggtagcttgtaaagaaagtctaaattttaatggaattgatttgaacttgatgttagtatataattggaaatttttgttcatacattaaagaaaagcagccattttaagaaaaaagaaacttatgtggtaaaatcagtattatataagcagatttatccatgccttaaattagcttttagaatatttagaccacatcagagtttaaaagatttttaagacagaagatactatatgcaaagtt

SEQ ID NO: 736670 - DNA, 622 bp, Homo sapiens
agggcactattttttctcataactggattagttttgctagaaattttatttagaagatttgcatacagatgagttttctttaaaatatcattacctaggactaatttaatcttactaagtaccactaaatcttgtcttatcatatttgagtagatgcattcacttatttgattcttacartaccaaatcaggcagcttattataaaattcatccacagtttacagaagatcagactgagatggccaggcgtggtggctcacgcctgtaatcccagcactttgggaggccgaggcagacagatcacgaggtcaggagatcgagaccatcctggctaacacggtgaaaccccgtctctactaaaaatacaaaaaattagccgggcacggtggcgggcgccgtagtcccagctactcaggaggctgaggcaggagaatggcgcgaacccgggaggcggagcttgcagtgagccaagatcagccactgcaccccagcctgggcaaaagagccagactctgtctcaaaaaaaaaaaaaaggaagatcagactgaggcaagagaggccatttaacttctacaaaattacgtagccagcaagaggcagagccaagacgtgtactctagc

SEQ ID NO: 736671 - DNA, 622 bp, Homo sapiens
agggcactattttttctcataactggattagttttgctagaaattttatttagaagatttgcatacagatgagttttctttaaaatatcattacctaggactaatttaatcttactaagtaccactaaatcttgtcttatcatatttgagtagatgcattcacttatttgattcttacagtaccaaatcaggcagcttattataaaattcatccacagtttacagaagatcagactgagatggccaggcgtggtggctcacgcctgtaatcccagcactttgggaggccgaggcrgacagatcacgaggtcaggagatcgagaccatcctggctaacacggtgaaaccccgtctctactaaaaatacaaaaaattagccgggcacggtggcgggcgccgtagtcccagctactcaggaggctgaggcaggagaatggcgcgaacccgggaggcggagcttgcagtgagccaagatcagccactgcaccccagcctgggcaaaagagccagactctgtctcaaaaaaaaaaaaaaggaagatcagactgaggcaagagaggccatttaacttctacaaaattacgtagccagcaagaggcagagccaagacgtgtactctagc

SEQ ID NO: 736672 - DNA, 622 bp, Homo sapiens
agggcactattttttctcataactggattagttttgctagaaattttatttagaagatttgcatacagatgagttttctttaaaatatcattacctaggactaatttaatcttactaagtaccactaaatcttgtcttatcatatttgagtagatgcattcacttatttgattcttacagtaccaaatcaggcagcttattataaaattcatccacagtttacagaagatcagactgagatggccaggcgtggtggctcacgcctgtaatcccagcactttgggaggccgaggcagacagatcacgaggtcaggagatcgagaccatcctggctaacacggtgaaaccccgtctctactaaaaatacaaaaaattagccgggcacggtggcrggcgccgtagtcccagctactcaggaggctgaggcaggagaatggcgcgaacccgggaggcggagcttgcagtgagccaagatcagccactgcaccccagcctgggcaaaagagccagactctgtctcaaaaaaaaaaaaaaggaagatcagactgaggcaagagaggccatttaacttctacaaaattacgtagccagcaagaggcagagccaagacgtgtactctagc

SEQ ID NO: 736673 - DNA, 622 bp, Homo sapiens
agggcactattttttctcataactggattagttttgctagaaattttatttagaagatttgcatacagatgagttttctttaaaatatcattacctaggactaatttaatcttactaagtaccactaaatcttgtcttatcatatttgagtagatgcattcacttatttgattcttacagtaccaaatcaggcagcttattataaaattcatccacagtttacagaagatcagactgagatggccaggcgtggtggctcacgcctgtaatcccagcactttgggaggccgaggcagacagatcacgaggtcaggagatcgagaccatcctggctaacacggtgaaaccccgtctctactaaaaatacaaaaaattagccgggcacggtggcgggcgccgtagtcccagctactcaggaggctgaggcaggagaatggcgcgaacccgggaggyggagcttgcagtgagccaagatcagccactgcaccccagcctgggcaaaagagccagactctgtctcaaaaaaaaaaaaaaggaagatcagactgaggcaagagaggccatttaacttctacaaaattacgtagccagcaagaggcagagccaagacgtgtactctagc

SEQ ID NO: 736674 - DNA, 621 bp, Homo sapiens
aagaagttctcagtgtttcattgctactttaatcttgattattatgggactgattgctgtcacagctactgctgcagtagctggagtggcactacattcatcagtgcagacagcagattttgtaaataatggcaaaagaattctactctgctgtggaactctcaaactaaaatagaccaaaagatagttaatcaaatcaatgatctccaaccaactgtaatgtgggtgggagatcaagtagctagtttggaatatggaatgcagctgaaatgcgactggaatacttctgacttttgtatcactcctcacccttataatgaattagaccatgaatgggaaagaataaaaaaaagtatctggaaggacactctacaaacttgtcttyggatgttgcaaaattaagagaacaaatatttcaagcatcccaggcacacctgaccttaatgccaggaactggagtgcttgaaggagttgcagatggattggcagccataaatcctatgaaatgcataaaaacacttggaggctctgtgatttctatgatggttgtgctattaatctgtgttgtttgtctttgtgtagtctgcagatgcggatcctgactcctgcaagaagtagctc

SEQ ID NO: 736675 - DNA, 609 bp, Homo sapiens
tggaggctctgtgatttctatgatggttgtgctattaatctgtgttgtttgtctttgtgtagtctgcagatgcggatcctgactcctgcaagaagtagctcactgtgataaagccgcctttgcttttattgccctggtaaaacaaaaagggggacatgctgggaataggccccaagcctggccataaacaagccataagaaaagtcataaacaagatctctgcagcactgtgacatgctcgtgatggttatgatgcacacactggaggttgctggttcaccagaatgagggcaaggaacacctggcccacccagggcggaaaactgctcaaggtgttcctaaaccacaaacaatggcataagcaatctgtgccttaatgwcatgctcctgctgcagataacaagccagagcctgtccctttgttctccttaaagaatactttcagttaatctacaaactacagaaacgatgtttatcacaggctgtcaataaataggtgggtcaaactctgttcgaggctctcagctctgaaggctgttagccccctgatcccactttgcactctatttctgtctatgtctttattcctctagtgctgctggattgtgg

SEQ ID NO: 736676 - DNA, 650 bp, Homo sapiens
gctagtctaaatgaaaggtgaaatagcttactgaaaattcagatacagggccaactgggagacaacctctgaaagaatgggattctgtttcacaagacacagtgtatgctctgaatcagagatcactagatactactatctcaccacagtcagaacaaacaggcccaggaattgatgggtgaaggcagaattagctctaagacaaaaattttgcttccaatcccagcaatgtagagcactgtaatttggagatctgagtccataatggggaatgcttccccaggggcaactatttatttggtcccaatacactggaaagtgagattaacatctggcccttataagtttcatatccattaaaccaagaagaaaaagaaaaataaggaggtgagagggwataatctattaactgaagggattaatctcaactaccaaagggaaactggggtactactatacaactgaggcaaaaagaatgatgtctagaacctcctagcacttccataccacttagaaaggttaacaaaaaattaccgtagaaaaaaggcaggaaaatggaggaccaagatcccttcagaaggaaggtttgagtcactccatcaggtacagagcccagagctgctgattctggctgagggcaaggaaaatac

SEQ ID NO: 736677 - DNA, 650 bp, Homo sapiens
gctagtctaaatgaaaggtgaaatagcttactgaaaattcagatacagggccaactgggagacaacctctgaaagaatgggattctgtttcacaagacacagtgtatgctctgaatcagagatcactagatactactatctcaccacagtcagaacaaacaggcccaggaattgatgggtgaaggcagaattagctctaagacaaaaattttgcttccaatcccagcaatgtagagcactgtaatttggagatctgagtccataatggggaatgcttccccaggggcaactatttatttggtcccaatacactggaaagtgagattaacatctggcccttataagtttcatatccattaaaccaagaagaaaaagaaaaataaggaggtgagagggtataatctattaactgaagggattaatctcaactaccaaagggaaactggggtactrctatacaactgaggcaaaaagaatgatgtctagaacctcctagcacttccataccacttagaaaggttaacaaaaaattaccgtagaaaaaaggcaggaaaatggaggaccaagatcccttcagaaggaaggtttgagtcactccatcaggtacagagcccagagctgctgattctggctgagggcaaggaaaatac

SEQ ID NO: 736678 - DNA, 587 bp, Homo sapiens
tattctatgaatgagaaggctgaaactctgaggtcacactgggttacagaaaccccatgtctagactcctggtgtagattgtacccactaccatgggtttcaaactggggatccttaggctgaagagggccacaaatgtgtttaatttggtgaaatctaaaccaattatgttattttaaacttgaaatrtaattaatgtacaattaaaagtacagatcttaggtattcagtggatgaattttgacaatcgcatacacttgcataatcaaaagcctaaacaagatataaaacatgttcgtctccccatgaaaaccttcttgccccttccagtctatcttttcactctcaactccagataagcaccctgtgatttccttcatttagcagacacaacactggacaggtaaattaggcagtgtgctcatctctcgcaaatgtacatcctatcttcatttttctctactatttaaataacatgagataaaaattctaaaatctcccactgcaactgtggacttgtctatttcttcttgtgtatctgtaatgtatactcctttatacatcttgtaacaacattactgggtaga

SEQ ID NO: 736679 - DNA, 587 bp, Homo sapiens
tattctatgaatgagaaggctgaaactctgaggtcacactgggttacagaaaccccatgtctagactcctggtgtagattgtacccactaccatgggtttcaaactggggatccttaggctgaagagggccacaaatgtgtttaatttggtgaaatctaaaccaattatgttattttaaacttgaaatgtaattaatgtacaattaaaagtacagatcttaggtattcagtggatgaattttgacaatcgcatacacttgcrtaatcaaaagcctaaacaagatataaaacatgttcgtctccccatgaaaaccttcttgccccttccagtctatcttttcactctcaactccagataagcaccctgtgatttccttcatttagcagacacaacactggacaggtaaattaggcagtgtgctcatctctcgcaaatgtacatcctatcttcatttttctctactatttaaataacatgagataaaaattctaaaatctcccactgcaactgtggacttgtctatttcttcttgtgtatctgtaatgtatactcctttatacatcttgtaacaacattactgggtaga

SEQ ID NO: 736680 - DNA, 670 bp, Homo sapiens
tgtcatctcaccgactatgtcccccatgatttctgatgacatatttgttattaatagtattgagaatcacttctttcagcactctttgtctttgccatttgacattttgatgatatgtgattcactgtaggcctgagtttctctttttttaatrttttttttttttgagatgaagttttgctcttgttgcccaggctggagtgcaatggtgcaatcccagcttactgcaacctctgcctcccaagttcaagggattcttgtgcctcaacctcccgagtagctgagaatacaggcacctgccaccacgcccgactgagtttctcttacttggagtttgttgagcttcttggatttaaagattcatgtctttcatcaaatttggaaagttttgcttaatatttcttcacattttacttcttcccctttatttctctgttatctttcttcagcttccataatgtgtatgttggtctgatgcatggtgtactacaggtcctttaagttctgtttggtcttcattctttttcctttagtcccctcagagttgatatttttcaaaggttctatcttcaaatttgtggattctttcttctgcatgctcacatcttctatggaagagaagatgcaaccagtgaccaaagaactaatgttaggagtttggctttacaaa

SEQ ID NO: 736681 - DNA, 585 bp, Homo sapiens
ggctggagtgcagtggcgcgatctcagctcattgcaacctccacctcctgggttcaagtgattctcctgcctcagcctcccgagtagctgagattacaggcacccaccaccatgcccggctaatttttgtattttagtagagagagggttgcaccgtgttggtcaggctggtctcaaactcctgacctcaaatgatctgcccacctcrgcctcccaaagcgctgggattccaggcatgagccactgtgcctgacctcaaacagatacttatacacccatgttcatagcagcacggttcacaattaccataaaaagcgatttttaattcaaccataaaaaggaacgaggctctgatccatgctacagggtggatgaaccttgaaaacatgatactgagtgagagaagccagacacagaaggtcacatagtgcacgattccatttatatgaaatgtccagaataggcaaattcatagccagaaaacagattggtggttgccaggggctggggaggaggaatgaggaatgagtggtaatgaggacggggtttccttttgcggtgttgaaaacattctggaactagata

SEQ ID NO: 736682 - DNA, 477 bp, Homo sapiens
ctgaattccctccttcttgtcagcactctgtcttgcccactggctggcttgctctgatgaagtcagtgcccatgttctcagatgctctttggagagacccacgtgtcaaggaactgagactagccttcagccaacagccagtggggaactgaattctgacaacagccacatgtgtgagcttggaagtgggtccttcccagttgaaccttgggaaggctatagcccagcagatgccttgactacagmcttgtgagtggccctaagccacatccagatttctgacccacagacactgtgagataatccatgttgctgagattttgggggtggggcaatttgttaggcagccataactgactaatacaactccctcacctccttcaactctttgctcaagagtcaccttcaggccaggcgcagtgactcatgcccgtaatcccagcactttgggtggccgaggcaggcagatcgctcgag

SEQ ID NO: 736683 - DNA, 479 bp, Homo sapiens
gtttgagcccaggaaattgaggctatagtgagctttgatcacaccactgtactccagcctgggtgacaaggcaagatcctgtctccaaacaaaaacaaaaataaacagtctttggttatcatccatgtaactgtgggagtttctgggtattcgtgtgacagtgtgcacatccttgagtgttgcctggggtgttggcgtggctgtgtctggaggtattcgtgtgacagtrtgtgcacccttgggtgttgcctgggtgttggtgtggctgtttttttaggtgtttgtgtgactgcatgcacatccttgaatgttgcctgggtgttggcgtggctgtgtctagaggtattcatgtgacagcatgcacggtcttgagtgttaccgggtgctggtgtggctgtatgcacctctctgggtgttggtggctacgggggtcatggcatgcatctccctgggggtccgtggagatgggttaacctggc

SEQ ID NO: 736684 - DNA, 592 bp, Homo sapiens
taaatacacaattctggggggtagggtgtccagcatacaagcccactagataactctgacatctgctacatcttcagagctactgatttaaaaaacacaaccaagccaggtgcggtggctcacgcctgtaatcccaacactttgggaggccgaggagggcagatcacctgaggttgtgagttcgagaccagcctgaccaacgtggagaaacctcgtctcccaggcatggtggtgcatgcctgtaatcccagctacttgggaggctgacgcagaagaatcgcttgaacctgggaggcggaggttgtagtgagccaagatcatgccattgcactccagcctgggtgacaagagtgaaactccgtctcaaaaaacaaaaacaaaaacaamaacaaaacacaaccaaagcagaacttgcgtcttggtgctcacagtctgggagaaggagactattcagagcatccctctactacagagacagccgccagagcctgtgaatggggcccagcctggaagccgacctggaatggaggacctgaggaggctgcccaagaattgaggcttgagtgacatctgaagggcaagtgggtctcag

SEQ ID NO: 736685 - DNA, 592 bp, Homo sapiens
taaatacacaattctggggggtagggtgtccagcatacaagcccactagataactctgacatctgctacatcttcagagctactgatttaaaaaacacaaccaagccaggtgcggtggctcacgcctgtaatcccaacactttgggaggccgaggagggcagatcacctgaggttgtgagttcgagaccagcctgaccaacgtggagaaacctcgtctcccaggcatggtggtgcatgcctgtaatcccagctacttgggaggctgacgcagaagaatcgcttgaacctgggaggcggaggttgtagtgagccaagatcatgccattgcactccagcctgggtgacaagagtgaaactccgtctcaaaaaacaaaaacaaaaacaacaacaaaacacaaccaaagcagaacttgcgtcttggtgctcacagtctgggrgaaggagactattcagagcatccctctactacagagacagccgccagagcctgtgaatggggcccagcctggaagccgacctggaatggaggacctgaggaggctgcccaagaattgaggcttgagtgacatctgaagggcaagtgggtctcag

SEQ ID NO: 736686 - DNA, 566 bp, Homo sapiens
gagacagccgccagagcctgtgaatggggcccagcctggaagccgacctggaatggaggacctgaggaggctgcccaagaattgaggcttgagtgacatctgaagggcaagtgggtctcagccacgtgggaggcggtaggaagtgtgtccccgggaggtggtaggaagagtgtcyccaggaaggagtggcccatgggaggggactgaaggggcagggaccgaatgccatggggctggaggcaggagcactgagacaggcacctctgtgcttgggtgtggtgactgtccatccacccctgtgtgtgcacatctcagtcacagacatcccctgcttcatgcacacccagagcctctcctgaccctcagaactgccgggctgactaggctgtgggagtgggctcttccgtgggacaggcagggcacctggccctgagcaacaactttctcactttccccccctgtgaccctgggccagtcacttccaccttcagagcctcagtgtccacatctggaaaatggggcaagaatgcctttgtggaagggctgccaggagaaggaaatgagat

SEQ ID NO: 736687 - DNA, 620 bp, Homo sapiens
tcactttggcataaaagacgtgtctaaaataagaattcggtcttctctgaagttctgcctcttctaaaattaatccctgtgcctaatttttagctgtctaccctctagctgcaggagatgagggtcattttttaaatgttactgagccatattttacatatcatataatttgcctattttaattcacacaccatatacaccattcacacaattcaataatttcttttttagtgaatttaccaggtgctaaatttatatcatcataaaccttttttcgagcatttccatcacttcaataggatcatacatgtccattaacttttagcaagaagttaggaggatcttctcaaactctgttgagccagctatagcttacygctgagcacattcagagagctaatgtacttccacttgaatatgattccagaccagatggagtaaatggaacagccaggggctctatgactgaccagtattagggtaccttcttgagcaaaacaccagcaagtgggtgattgtgagaataatacaggccattgctttcactagaccagtgctattagcggtggtccacaaacacagagatgctcagctactggctcctaaacctgaaggagcat

SEQ ID NO: 736688 - DNA, 617 bp, Homo sapiens
caaattagccaaattatgggcagattttagatttcccagaaatggaaagggcacttgtaaacatttgttctcttggcaggaagtgggtctgaggacccatgcttattgaggacaaagcaggagacggaattggccattaatctcaatgtgtctacagwtttggaagccaagtctcccaggatagccatttaagtgtcttttggccatttcatggaagaaccaatggtaaccccaagaagagccataattttagttaaaacaggatccccttaacatctgtctgcaaagttaatcgttaatttggtagttttactctcagatctgttgtgaaatccactaatgagtcctgcacctcaccctttaatattctaagagtcagacaatttttcaaactgacctttaaacactctctgtagaaacatgaaaaaatgccccctacaccaatataaaacacaacttggaactcatgcagcccctatctaatgtgtctcctcaagccaagggctttccactcattcataatctgtattaaaggcaattttcacaaacatggtcctttctggggttatttcctaaaatgttctaggaaatgaactgtgtccaggaaccaaagcgaa

SEQ ID NO: 736689 - DNA, 606 bp, Homo sapiens
ctaaaactcaccacgttcattcctctcaagggccttgcaaatgctttgccatctgactaagccatgtccctgccccctccacacaagcagcttctgtttctctttcccatatcacctcagtcatcatttccttggggatgccatcttgaccgtctggcctgagtcaggtttctctagtaaatactcttacagaggcacactctttcacaatgctcatctctatctatgattgttcagaaacttgtatgctgctttgattcaagcctgcctcccctgccagcccacagtcccaggagggcaggaagtgggtctctttcaagacaacaatggattcccagcattcagcacagtgcttggcttatatcagcaaacatctgtcaatgamtatctagaccatgtcctcttcacagccactggcttttcaccctaaccataaactggaaactcatggtccaaaagttctgaaataagcacagtggtacaatgaacgataggtaagaaattatgaaagcctcagtcaacgctgaggatttactgatatcaaatgatctttccaaatgaaagaaaacccatcaagttcaaaaattccagaactttagttcatgc

SEQ ID NO: 736690 - DNA, 607 bp, Homo sapiens
tgggaagatctgataaatttattttatattaagttgtatgaaatgttaaataactatatctttcaggggaactttgaggatgatagaaatgatctacatggtactggagtggtggacaatatgattccatgcatttgtcaaaatccatagaactttacattacaaagaaagaacattaatgcatataaactataaaataaaaataatcaaccagaatgttgggagatcccaagataaagtgcaagctgagaacaaagaatgtcactgtattacaaatgtatgatgtaactgtactacaggrgataggggaaaggtagctggcctaagaaactttggaaaatggtgtttagactggaaactgtaagattaaaaaataggaactgtagataaacactataccctagttggtaaagttgtttaacatgaaggtgaagatgaacaattctgaaactgttttacatatatactggagttgaacaaataagtaaatagaaggtggtggtaggtgccaggtttctcatcaccagagaggaaagttgtagataagtaagaatagaaggctacaataacacggtggtacttgattagagacatcaatatgaaccca

SEQ ID NO: 736691 - DNA, 607 bp, Homo sapiens
tgggaagatctgataaatttattttatattaagttgtatgaaatgttaaataactatatctttcaggggaactttgaggatgatagaaatgatctacatggtactggagtggtggacaatatgattccatgcatttgtcaaaatccatagaactttacattacaaagaaagaacattaatgcatataaactataaaataaaaataatcaaccagaatgttgggagatcccaagataaagtgcaagctgagaacaaagaatgtcactgtattacaaatgtatgatgtaactgtactacaggggatagrggaaaggtagctggcctaagaaactttggaaaatggtgtttagactggaaactgtaagattaaaaaataggaactgtagataaacactataccctagttggtaaagttgtttaacatgaaggtgaagatgaacaattctgaaactgttttacatatatactggagttgaacaaataagtaaatagaaggtggtggtaggtgccaggtttctcatcaccagagaggaaagttgtagataagtaagaatagaaggctacaataacacggtggtacttgattagagacatcaatatgaaccca

SEQ ID NO: 736692 - DNA, 624 bp, Homo sapiens
agctcagacttaaggatggcaaacttttgagtttttttagttcatgctgaatttagttaaaaggtcaaaccccctaacttttcctttttgtatgtctcttctgcttctctgacataattcttaaaagaaggcattttagatagtcttagtgcattttctgttgcttataacagaatattgaaactyggttatttctaaagaaaaggagtttatttcttacactttgggggattgagaagccccaggtcaaagggccatatctggtgagagccttcttgctggtggagactctgaagagtcccaaggtggtatggagaatcacagagtaaggggactgagcgtgataatgtaatagcttgagtctgtctttctcttcttataaagccaccagtttccctttcatgataatcccttaatccatgaatgggttaatccattaatgaggacagagtcctcatgatccaatcacctcttaaaggcactccctctcaataccatcacattggggattaagtttaaacatgagttttggaggggacattctaactatatcttaaagtggtgaaaatgtgtgtcttcggatttggttaaaacgtaacaaatgttcagaaatctgtttcatgg

SEQ ID NO: 736693 - DNA, 630 bp, Homo sapiens
gaactcatttcttattttccaagtgtcaatgtgaaaagaaaataaatgctagcactactgactagtcagtatatctccactttaaatgctaaatactttcttgaaataaaatcgcacctcccggccaggcatgatggataatgcctgtaattccagcactttcagaggccaaagcgggaggattgcttgaagccargaatttgagcccagcctgggcaacatagcaagcaagatcccatctctacaaaaagttaaaaaaataaattacacctgccttttgttttgaagacttaaagaatctgctcaaatgatttattttctgagtctcttcacattaacttttatatgatttttaaaaaattattacctgcttatattttttgagtatctgtttcatataaagagatgctgcatgttcactgtgaagtattgctgaattaaattgaaaatgtcagataaaactgatacatgatgtagttataaaaatgctgttatgaagaaaaaaggaatgcttttttcctcggtggcctttgataaaaatatgaatgattgactctcagagttggaggataaactaatcatcttctagcacagccctgttgtgttgcaggagaggaatcaggctaaagt

SEQ ID NO: 736694 - DNA, 630 bp, Homo sapiens
gaactcatttcttattttccaagtgtcaatgtgaaaagaaaataaatgctagcactactgactagtcagtatatctccactttaaatgctaaatactttcttgaaataaaatcgcacctcccggccaggcatgatggataatgcctgtaattccagcactttcagaggccaaagcgggaggattgcttgaagccaggaatttgagcccagcctgggcaacatagcaagcaagatcccatctctacaaaaagttaaaaaaataaattacacctgccttttgttttgaagacttaaaraatctgctcaaatgatttattttctgagtctcttcacattaacttttatatgatttttaaaaaattattacctgcttatattttttgagtatctgtttcatataaagagatgctgcatgttcactgtgaagtattgctgaattaaattgaaaatgtcagataaaactgatacatgatgtagttataaaaatgctgttatgaagaaaaaaggaatgcttttttcctcggtggcctttgataaaaatatgaatgattgactctcagagttggaggataaactaatcatcttctagcacagccctgttgtgttgcaggagaggaatcaggctaaagt

SEQ ID NO: 736695 - DNA, 487 bp, Homo sapiens
actcggtatagatctttggcaagggaaaatagaatgcttctatgtgctcctttagacaggaaaggtcctgtttcaaattataaaacatggacatgtgtggtgtaatagaattgcagacaaaaagaagtgaaggataaaagtacaataaaattcctgggactwtttctcagaaggaaattatcacacgcttgtaaaatcaaactggggaacttgaaggtctaaaagtgaatttatacactcctgagagaaagatacagcttatttatcttccctgaaatgtatttgaaatttcttgatgatctacgataaggagagaaaagatttcaaagaagatgaaaattatttggaaatttttaccatggagaaatacttcattcagtgcaatatggacttacactttgattccacatgggtttgtttcattaattgtttttatcttagcacccatccacactgtctttgtgttgctatatagaactataacata

SEQ ID NO: 736696 - DNA, 584 bp, Homo sapiens
agggaatagtcagagatgggagggagacctgcagttggcagaatttctcaggcctcatgctctctgcctctgggcttttcaaggaagatagagcattttagagtgtatttatacctattatttatctgacattttcactttccttgacttcaactttttcctgctgagcatttgccaggaatgaggaagaacaatatggaatttgccrtgagaggatctttgtataacttggatgacttggataactttgtataacttggatgacttggataacttggatgattagcctatggaactgtgttgtgggactatccaggtggtatattatttaggtcttggctcttccttctctgccctctggcttacctttcagctataatgtcagttttctttctttgcttggaaagtgagcagggaaaataaagaaaggacaatcaggcaatttttttattagtagcttttataatatattttttcatggcaaaatttaaataattgactcctatgatgtttgtgacattttgtgttgctttgacatatgccttatacacacgtatgcacacacagagaggatacctttacca

SEQ ID NO: 736697 - DNA, 611 bp, Homo sapiens
atgtgctggcaagatggctacaagagtctcaatctcacattaccataggttcaagtctgggtgaaaagagagcaagaagctttgccagtagcccctgaaaagtttctgagagttgctgtgattgaactagcttgggtcatgagttggtccctgaaccaatcactgaccaaagggtgagactgtattttgatgggttaggcctgggtcaccagtttacctccagttctaggatagaaccctaccttaaccatktggactgagagtgggtagagggtatgggtcccccacatgaaagtcttggcagtggtactatcaccagaggggatatgaatgtgtgagaagtaaaatgcaaataacccctgtaggggcaaagttgttaaaaacacagaatctggaatcagactgcctgagtttgaatccatcatacactagttacatattctagggtaagttacttaacttgtttgtgtggcagttaactgatctgtaaaataatgccaacctcattgggtttttatgaggactaaatgagttagaacaagagcagtcagttcacaatctaaaaagaaggcaagtaaagatcttctctcaagaattctatttaataaatg

SEQ ID NO: 736698 - DNA, 472 bp, Homo sapiens
cagaatctctgggacatagctaaagcagtctatagagggaaatttatagcactaaatgctcacaagagaaagtgggaaagatctaaaattgacaccctgacattacagttaaaagaactagagaagcaacagcaaacaaattcaaaatctagcagaagacaaaaaataactaagatcagagctgaactgaaggaaacagaggcacaaaaaccattcaaaaaattaatgaatccaggagctgattttttgaaaacawtaacaaaatagaccactagccagactaataaagaagaaaagagagaaccatatagacacaataaaaagtgataagggggatatctccacttatctcacagaaatacaaactaccatcagagaatgctataaacaccgctatgcaaataaactagaaaatctagaaaaaatggataaattcctggacacatacaccctcccgagactaaaccaggaa

SEQ ID NO: 736699 - DNA, 553 bp, Homo sapiens
ctgttgtttcctgactttttaatgattgccattctaactagtgtgagatggtatctcattgtggttttgatttttatttctctggtagccagtgatggtgagcattttttcatgtgttttttggctgcataaatgwcttcttttgagaagtgtctgttcatgtccttcgtccactttttgatagggttgtttgtttttttcttgtaaatttgtttgagttcattgtagattctggatattagccctttgtcagatgagtaggttgcaaaaattttctcccattgtgtaggttgcctgttgactctgatggtagtttcttttgctgtgcagaagctctttagtttaatgagatcccatttgtcaattttgccttttgttgccattgcttttggtattttagacatgaagtccttgcccatgcctatgtcctgaatggtaatgcctaggttttcttctagagtttttatggttttaggtgtaatgtttaagtctttaatccatcgtgaattaatttttgtataaggtgtaaggaagggatccagtttcaggtttc

SEQ ID NO: 736700 - DNA, 553 bp, Homo sapiens
ctgttgtttcctgactttttaatgattgccattctaactagtgtgagatggtatctcattgtggttttgatttttatttctctggtagccagtgatggtgagcattttttcatgtgttttttggctgcataaatgacttcttttgagaagtgtctgttcatgtccttcgtccactttttgatrgggttgtttgtttttttcttgtaaatttgtttgagttcattgtagattctggatattagccctttgtcagatgagtaggttgcaaaaattttctcccattgtgtaggttgcctgttgactctgatggtagtttcttttgctgtgcagaagctctttagtttaatgagatcccatttgtcaattttgccttttgttgccattgcttttggtattttagacatgaagtccttgcccatgcctatgtcctgaatggtaatgcctaggttttcttctagagtttttatggttttaggtgtaatgtttaagtctttaatccatcgtgaattaatttttgtataaggtgtaaggaagggatccagtttcaggtttc

SEQ ID NO: 736701 - DNA, 588 bp, Homo sapiens
aaagatttcttgagcaataccccacaagcacaggcaagcaaaacaaaaatggacaaatgagatcacatcaagttaaaaagcttttggatggcaaatgataatttaacaaagtaaacagacaacctacagaatgggagaaaatacttgcaaattctccatcttacataagattaataaccagaatacatagagttcaaacaactctataggcaaaaaatctaataatccatttaaaaatggacaaaacagttgaatagatatgtctcaraagaagtcacacaaaagtcaaatgggcatatgaaaaggtgctcaacatcactgatcagagaaatgcaaatcaaaactacaataagatattatttgcaccccagttaaaatagcttatatccaaaaaacaggcaataacaaatgttggcgaggatggggagaaaagggaacccttgtgcactctttgtggaaaagtaaattagtacaatcactatggagaatagtttggaagtgcctcaaataactaaaaattgagataccatatgatgcagcaatcccactgttgggtatatactcaaaagaaaaaaaatcaatgtatca

SEQ ID NO: 736702 - DNA, 434 bp, Homo sapiens
ggtaagatggcatttcactgtgcttttctctgatgactagtgatattgagaatttttttgtatttttgtcatcgtataccagaattaactcaagacagattaaatatttaactgtaagacctgaactgatacaaaatcctagaaggcaaactaggaaaaactcttctagatattgacctaggcaaataattcatgattaagtcttcaaaagtgaatgctataaaacaaaaatagacaaatggracttaattcaactaaaaatgttctgcatagcaaaagaaattatcaacagagtaaacagaccacctacagagtgggagaaaatatttgcaaacatgcatctgacagaggactaatatcccaaatctacaaccaacttaaacacctcaccaaaataaaaacaacccctttaaaaagtgggtaaaggatatgaa

SEQ ID NO: 736703 - DNA, 551 bp, Homo sapiens
atgctgtctgagagccagcgtttacagtcaaaaaccgtagcaatttgcctaatgttctattctaccgtagttaagctggcactcagtccacaatataagcttctttccgctcttctgtcttcttttcacaggcagaggagyctctctcttggttacctccaccaccaggtcatggagggtactgccatgccaccaccaacgttcctctaaagcctaagggctcttcaggcagcttgtggtgaatgctgccagacctgggactcactcttcaaggcagtgggctctgggcgggcctagaaatgctgtccaagtgccacagcctgaaattggtgactccaagaggctggttggtgctctgttccccattgtcgagggggatagaggcaggacaaagtccattttactcttcaccctgcttttctcaagcagaaggagtctctcgttgttgccactacagctgggaatgtactgtctcacacctgtagtcagcacatttcagaacacaaggcccacagcatactaccaggatatcactgctggttatttagggc

SEQ ID NO: 736704 - DNA, 535 bp, Homo sapiens
cttctcaaggaagctgtcactcatctgatcacagccattcacaccatatgcatggacacagtgaccatgggcatggtcacagccacggatctgcgggtggaggcatgaatgctaacatgaggggtgagtccttgcaaaatattatcctacttttcractgtgttctaaatcaaccctctgtgtttatttgtattaagttttgggcttctggtatgatatgatttttaaaaagcaatctgtgactaaaagaaaggtctgaagctatcactatagaaaatattcttacctgaatacacataaaattaaatattattcagcctttaaaaagagggacattctggctgggagcatggtggttcacgcctgttaatcccagcaatttgggaggctgaggcgggagtaccacctgaggacaggagttcaagaccagcctggccaatatggtgaaaccctgtgcctactaaaaatacaaaaattagccggacatggtggcaggtgcttgtaatcccagctactcaggaggccgaggcagaag

SEQ ID NO: 736705 - DNA, 546 bp, Homo sapiens
ttataaggtgagagatgaggatccagtttcattcttctacatgtggcttgccaattatcccagcatcttttgttgaatagggtgtcttttccccactttatatttttgtttgcttttttgaaggtcagttggctgtaagtatttggctttatttctgggtcttctgttctgttccwttggtctatgtgccaatttttataccagtaccatactgtttgggtgactatggccttatagtatagtttgaagtcaggtaatgtgatgcctccagatttgttctttttgcttagtttcactttggcaatgtgggctctttttaagttccatataaattgtaggattgtttttctagttctgtaaagaatgatggtggtattttgatgggaatagcattgaatttgtagattgcttttggcagtatggtcattttcacaatattgattctatccatccatgagcatgggatgtgtttccatttgtttgtgtcctctatgatttatttcagcagtgttttatagttttccttgtagaggtcttttacctcct

SEQ ID NO: 736706 - DNA, 569 bp, Homo sapiens
accagcctcataggatgagtatggacttgtattctcctcctctatttttcagaatagcttgagtaagattggtattagtccttctttaaatgtttggtaaaattcatcagtcaagccattgggtcccaggtttttctttgctgggaaastttttattacggcttcaatctcattacttgttattggtctcttcaagtttgagatttcttcatagttcagtcttggtaggttgtatgtatctaggaatttatccatttcatctaggttttccaacttacgtggcatatagttgcacgtaacagcctctaatgatcctttgaatttctgcagtaatccattctaatgtctccttttcatctccgattttatttgggtcttctctctttttttcttagttagtctggctaatggtttgtcaattttcttgatcttttcaaaaaaccaactttttgtttcattgatcttttgtattttcttcattttaatttcatttatttctgctctgatctatattatttattttcttctaaattttgggtttggtttgctcttgcttttctaattcttta

SEQ ID NO: 736707 - DNA, 563 bp, Homo sapiens
aaaaaagtatgcatcaacaatgtttagagtgttacaaacctatagaaaagtagagagaagagtatgatgaactcatatctacccatgaatgagcttcagtggtcaacacattgtcaagtttgtttcatctatgcctccccactccatatcccacaccctgttgggttatttgaaagaaaaactcagccatgttgtaatgtagttaatacacacttcracagaatctctaaaaaatatggcacacttaccctgtttattagtcagttttcacgctgctgataaagacatacccgagactgggaagaaaaagaggtttaattggacttacagtttcacatggctgaggaggcctcagaatcatggtgggaggcgaaagccacttcttatctggcagcggcaagagaaaatgaggaagacgcaaaagcggaaacccctgataaacccatcagatctcgtgagacttattcactaccacgagaacaatatgggggaaactgcccccatgattcaaattatctcccacctggtccctcccacaacaacacgtgggaattatgggagct

SEQ ID NO: 736708 - DNA, 394 bp, Homo sapiens
atggcatttgccatgttgtccaggctggtctggagctcctgggctcaagcgatctacctggcttgggctcccaaaattctgggattacaggtgtaagtcactgtccccagcacaggtgtcttttgataaaatgatttcttttccttgggtagatacctaatagtgggatgctgggttgaatgggtgttctatttttagttctttgagaaatctccatactgctttccataggggttgaactattttacattcccaccarcagtgtacaaacgacaaatttctacttctgcatgaggctgtgtgggtcctcaaagagaatctcaaaacttagaaagcatagtgctgagccacccagctcttttctatcaagtttcttagcaatgcagtatataaa

SEQ ID NO: 736709 - DNA, 649 bp, Homo sapiens
atgacctttgtgggagcactaccctctagaagcctccacatgtgcagctatctagaagctccaaaaacattaaaaaaagttttaaattttaaaataatttaagacccaaaacatttttaaaaatagtatgagtttccatttgtccttccctcacagcttcctcaaaagttaacatcttatcctcaatgtaagaaattatcattgatacaattaactaacctgtagactttattcaaattttgccaattgttccactaatgtcctttttccggtctaggaatcggtcattaacttctccttaacttcttccaatctaggacaattttccagtctttctttagcttctatgaccttaacactttttaagagtgctggcaagctattggttaaatgtctcttaatttgggtttgtctgatatttccttatgactaaattttggtwgtacatttttggcaagaataatacagaaatgatgtgcagtcgtcatatcaggagatatgtcaggttaatgtttcatactggagatgttaactttggttatttgataaagagtttgtctccactgtaaagttactgtttgccgtctgtaattaataaatattataacaatatctttgtaattaacaagtatcatatgaggaactgctt

SEQ ID NO: 736710 - DNA, 577 bp, Homo sapiens
tctttgttttctgttatagcatactcagttctcaaacatattcctaaggtttctgtgatgtagttagcaaaattatgcaattctttcagtatatatgccttctaatattgggactggctttgtgcttgtccccattgaacatgctaggatatgaatctaattagaggtctagaggcaatgagagttggcaaatgaagggcatggagaaaattagcaaccctttgcaatgtaactgtctcagctgaggtcattacagactatgcatgcaaagaggacagtcttattaaaaaggaaaatgagtttgcttctgctgggataaaaaagggctcaattggtttggggattcaagatacaatcacatctgaattcacctagctgtccccattcccattctaaggatactactcyttctggatcaatgctctagcaatttcattaaaaaacatgcagtggttgtgaattcaactttgtaattatttatcaacctgaagaatcagactttttgtctgatttttatctatgtagtcctgtagccgtgggataaaagagatgtttttaaagcaatcattaaaatatt

SEQ ID NO: 736711 - DNA, 523 bp, Homo sapiens
ttaacatctgttgcagtctgaatagggtgagaatttccccaaccatcaagtctgggttcctttttgcttcacagttcttctctcaatctaattcctctcattcttttccctctcacattttactataagcagcaagaaaaaaacaggctgtacatttaaccctttgcctgaaaatctcagtgaaatctcccaagttcattgcttaaaaattctttctacataactacaggacacaattcagctaatttttcttccaccatataaaaggattcccttttcttcagtttccaataatatttycctcatttctgcaccctcaccagcagagactttaacatccatatttctactcacaatctatttaaagtgatgtggtattctctaaggcaacatgtttctccaacatgctcctcacttcattctgagtccttactagcagatttgttaacaccatatttctgctaacactctgtccaaagcaagcgaggctttttctgtcatgcctgtcaaagttcttccagcc

SEQ ID NO: 736712 - DNA, 632 bp, Homo sapiens
ctggtgtcgctcacgtccaccagatgcctggaaaggggtcctcgggcaccgagcagcgacccaatgaggcctccctgctcctcctgcacagccgcaccgccacgaacaggagcaccgagaagaggaagaacgacgacaccaaggccaacgccaccaccaggtagacggtgagcaagtcggcctgggcctgggccggggccgcttcagggaacggcaagtagggcagggagaagccatccaccaggagcacgtgcagcgtggcggtggccgagcgcggaggctcgccattgtccttgaccaggaccatcagcctgtgcttggctgtgtcacgctcgctcagcagcctgtcagtgcattgtgcgcccacacgccgaacagccctggctcmgtggccttgagcaactgctacgacagccaggcgttctggcccgagtcaccgtccaccgccaccaccttggtcaccaggtagcccggctcggcggcccgcccggggcatcagctcggtgcagggcgcggagccgttctgcagcgggaacagcacgaagagtgagctgtcgttggcgtccagcaccagcacgcgcaccagcgcctcgctgctcagcgccgtggagccgcggtctgaagcgcccacg

SEQ ID NO: 736713 - DNA, 472 bp, Homo sapiens
ttgagggaaaattattttcaaactagaattttatacccagtcaaactatcaagcaaatgaaaacaaacaaaaaagatgtcttcacaatgtaaggagacaattttttaaaaatctcttctgcattcgtttatatgaaggtcttgagagatgcrtgccagctgaataagagagtaaactagaaaaaagagtatactggaccttggaaaagtagactcatacaggaaagtattgaagggaaaaagtcccagggtaacagtctatagattaaccagtctaaatgaaacaggaaactcacgatgaaagagctcctgaaaataaatgtcattgacagagtatcttaaaaattggaatatttttaaggagaaaatacattcaaatgaaagatatggaaaaaaacaatagaggtacatagaaaataatgcaagtatgaaataacaattacgaactctaggaaccatacttttcaagtatg

SEQ ID NO: 736714 - DNA, 592 bp, Homo sapiens
tattctgaagcatgtaacaatatagataataaccactaatttaactaagaaactgtgacatctatattggagaataggagaaaaagaatttgcaatgtttgtatatgtttgttagtttggaaataaagctaaaatgcttttctattatagaaagaaatggttcaaatacaaaacaatatcaagatatagtattataaacatattatttataaatattgagatcaattcaagaagaaaccacactgtggtaagggactggcagaacagytaacttaaaaaactataaaatgttagttatatatagtatatattttatatatagtaatataaaaaaactgatgaaacttgtttttcattctaacctttagttcctcttgcttattaaaaatttggtatttaaaataaatttgcaacatataaatgaatatctccagcaatctcaaccacaaatttcaaaatgttttatttttattcattttcaggcagattataattttatttcaattataaggcatagtctgttttatacatcagcaaaagttaacataagaaaatattggccaagtaaaagtagcatgcttaaagataaaat

SEQ ID NO: 736715 - DNA, 617 bp, Homo sapiens
tgcagtggcatgatctcaactcactgcaacctctgctttcctgagttcaagtgattttcttggctcagcctcctgagtagctgggcctacaggcatgtaccaccacacctggctaatttttgtatttttagtagagatggtgtttcaccatcttggccaggctgrtcttgaactcctgacctcaagggatccatctgcctcagcctctcaaagtgctgggattacgtgggtggcatgagccaccatgcccagctgtgttcatttacttgtcatgatcactctgtaggatggttttatcagtgcccttcacagggaaggaaactatagttcagagagattgaacaactagtccaaggtcctttggcttataaatagaagagagagaatttgaaccaggtatttctgacaccagagccctattctctccccgcttcttactgctttcctctgttggggtaggaagggctcttataaagttatttcaactgactggacatgaaagtggttgggacatcttcaaacagtcctcatgactgctctgtactgccgtctctctacttttctagactctgtagtgctgccaactgcactgcctgggctttatggcccatgggctt

SEQ ID NO: 736716 - DNA, 617 bp, Homo sapiens
tgcagtggcatgatctcaactcactgcaacctctgctttcctgagttcaagtgattttcttggctcagcctcctgagtagctgggcctacaggcatgtaccaccacacctggctaatttttgtatttttagtagagatggtgtttcaccatcttggccaggctgatctygaactcctgacctcaagggatccatctgcctcagcctctcaaagtgctgggattacgtgggtggcatgagccaccatgcccagctgtgttcatttacttgtcatgatcactctgtaggatggttttatcagtgcccttcacagggaaggaaactatagttcagagagattgaacaactagtccaaggtcctttggcttataaatagaagagagagaatttgaaccaggtatttctgacaccagagccctattctctccccgcttcttactgctttcctctgttggggtaggaagggctcttataaagttatttcaactgactggacatgaaagtggttgggacatcttcaaacagtcctcatgactgctctgtactgccgtctctctacttttctagactctgtagtgctgccaactgcactgcctgggctttatggcccatgggctt

SEQ ID NO: 736717 - DNA, 405 bp, Homo sapiens
gaagccctggcaggacagatcccaaaatagaaaactcaccagattcacattggtctggactctatgagaggagatttagataaccagcagaatgtgaggttgaattagtggtaagtttgtagaaactaagcaaacgtaaaaatgacaataattaactcaaggggaaaaaaagtgctgaaaagtaaaagtaagcaaagtcagctarctgattgcaccctgaatagtgtttgcagagtaaaaataatgcaaacactgaacatcgctttcaccaaaagtatgctattgcttttaggatgacggggagatgggagaggttcaagtgcatgctgtaggggctggggaagggaaggaagggaggctaagtccccaccctcctgagaggtaagtaaataagtaatgccgaaa

SEQ ID NO: 736718 - DNA, 618 bp, Homo sapiens
caatgaatgaatgaacaaatgagctaattggaaatgttaacaacttggcctctcttcctgccgggatgcctacctctcatctggagtggtgttttttccatactgtcctcttgaaccaaattccctgacacctggtgtcccccccaccgccacttatgttctccttgtttccatccccaacagggaggcgcccagatcagcctggcggaggtctgccggtctggggagaggtcgactcgctggtacaaccttctcagctacaaatacttgaagaaacagagcagggagctcaagccagtgggagtcatggcccctgcctcagggcctgccagcacggtgagctgggaccaggtgtgccaccttcccacaaggccgcacccggatgttggaagggaaagcctctcccagaactggaggtgatcaggcrtcatgagaggagaacaatggggtggaggaagtaggagaagaagacagggaaggagagatctccactaaggggcaggcggctccctttctgcaacttgttcccttccacatctgtgtttcctccttctgtcctttgccctacctaataccacttggctaacgaaaaccttaattcatgattttttacaaatg

SEQ ID NO: 736719 - DNA, 397 bp, Homo sapiens
cttatttttacaaagcaagggaacaggctcaaagtgattaagcagcttgccgagggtcacacgctagtaagaggcagaactgactcataaatgagggttttaggaggcagaggaaaccatgacataggtgggtaggtatagagggaggtgtggggagatgctgctgcctcggttcctcacacctccctgttgcagcccgcacctgcccagcagcaggggccrctattccttgcctgagattcctgtgcttttttccagagccatcttgtatgggcctctgtagccttcgaccagaaagggcctgacttgaagcagaccccttcctgctggaagtagggagggaggcagatgacagatgtcccatggagcaggaggcactaggtgctgcctgggaggg

SEQ ID NO: 736720 - DNA, 532 bp, Homo sapiens
tttctactgggctattctctatgctaaaatgttagttctaggactctccttcaatatctaggtaagcatccacttctatcctagttaaaaaaaaagtgtggaagtttctgtgaaaacgcaatctagagacaagtaggcacatactgartacatagattctaaaacccttgaagacaatgacctggtttgcctgtcttgcctggcacttagtagatattttataatcactattattacatgtttgcatgcatgtagacataaatgtatagatgtaaatattgacatataattttaatcaaccagtcaattcagtaatctcaaatagtaaagctttgcatgtcataattaaatgacaatgccctgcctgtagtatccataaagtaacacaaattaagtatgaactaaagtaaccaaaataattcttttgattaaacaaagaagattgagtgaagtattacttactctaaaattcattctgttctaaagtcaaggtggtttacataactacccaccattgctgaaaagaaaggaa

SEQ ID NO: 736721 - DNA, 637 bp, Homo sapiens
gaggttctctacccagggtctcacagggctggaatgaaggccccagcctgactggagttttacctggaggctctgggaagaatccacttccaagctcattctaattttgcagaatccggttccttgcagctgtgggatggaggtcaccttcttcttgctggttgcctgcttgtgatttcctctcagatcctgggggctgctctcagatcctccccacaagacctcctgcaacttcaaagcaggcaatggggtatgtctcttgcatcaaattcttctcacattgtgaatctctctaacttctgccaccggctggagaaaactctctgctttgaaagaatttatgtgattgaattaggcccagccagacaatctccctatttcaaagtcaactgattaggaacctcaatgacatctgcaaaattattttaccatgtaaccacaggagtaacaccaargggtgagcatcatgaggtcatcttagaattttgcccatcacaccctgttatgcaacctagggtgaaacagcaagtaagagataaactgaagttggtaggttattcatttgtaggtgatggaagaattcaaaagggagttagaattttaaatccacggacaagtttcaaaaaaagatgttcat

SEQ ID NO: 736722 - DNA, 614 bp, Homo sapiens
tgccagctccccagacccttactggtgtcaatgaactttctcagagagcaacatgtaatatttctcttttttcttttaaacacagggtcttgctgtgtcacccaggctggagtgcagtggcacagtcatggctcactgtagcctcgaattcctgggctcacgtgatcctcytgccttggcttcccaaagcactgggatgacaggcatgagccaccatgcccggcctcatttctcttttttataaaaccgtctaccttctcttttttctttggacatactgaagactacttagtctgcatgtatgccccaaattgcaagtcttcctttgccccaaaacattaaatatagagattcgtctctgcgttttaattttgactttgataagtgcaagaagaaagagataaagacggctgccagaatctagggagatggggaagtggtcaggaggttcccatcccatttaaaatcacagccaaccagccatcctccctgcagggtgcatctctatgtcatggccccatttctccttcatgcctaccactcagctgttctctttgctgtgtcgtcacttcagacctaccttctcatcatgtttcatgaccccaaactaactc

SEQ ID NO: 736723 - DNA, 551 bp, Homo sapiens
agctaaggcccccaccccctgctccgtcacaacttgccccctcaaccaaaaagctgctttgagtcaaaaagcacccataagatacctgcatctgccttgaaatcttgcagcatggagtgtcatatgtactcaggagagaggcagggctttgcgggcaggagaaggaagggaggaatgctctgagctgcaaagacccagtactcaagttctgacgygggaggagatgcagtgagacgtctcttgttgcctaaagcctgttcctgttggttttcttagagtgatttctcctagacatgtgcagtaggcccactggggctgctgtgcagtggtgagtaaaagggcagggaaggcatggacagcctggtccttctgcatggacagctcagtccatggcccatcccaggtatagagttcagttaatcccatttgagcctgcagcttaagagatggctcatcctaactgtgaagcaaaatcagccccagaggatgtattgatctgactcactgatgtcaaaattgcagtatttttttagcatttgagatttagcagc

SEQ ID NO: 736724 - DNA, 618 bp, Homo sapiens
gtgcagttggtttgcaattctattataaatactgcatgtgtatctgggtggtttgcaattttaaatcacgagcttgaaccaagatctgaaggatgtgaaagaaaaccaggtgtatgctgggggtggaggatgatggaggaagattctatgtacaatgaacagcatgtacaaaagccttgagatttaggaagaactattcagagwaaagaaagctgaactgaggtaaagaagtgacaggaagaaacaaagatggtgaaggaaccagaactaattcatgaggaagtaggacaagtggaatgtgacgttttaagaaagaagtggggaggttaatagctcaaatgcttcaataaatataagatgaggaatgagaaaaagatattggatttgaaatacagatcactcatgactttcaaagacaaacttcctaagttgctaaaggcttacacagagaattacagaacaagtcatttgtgaagaaaggtgaatagtacatttggaacacttttccaaagacagtaacaataaaaaagaaaaagagagaacacaatgacttgatgggttgccaaactgcaggactactttttagaaagaggtttcacttgctagtatagatggtga

SEQ ID NO: 736725 - DNA, 618 bp, Homo sapiens
gtgcagttggtttgcaattctattataaatactgcatgtgtatctgggtggtttgcaattttaaatcacgagcttgaaccaagatctgaaggatgtgaaagaaaaccaggtgtatgctgggggtggaggatgatggaggaagattctatgtacaatgaacagcatgtacaaaagccttgagatttaggaagaactattcagagaaaagaaagctgaactgaggtaaagaagtgacaggaagaaacaaagatggtgaaggaaccagaastaattcatgaggaagtaggacaagtggaatgtgacgttttaagaaagaagtggggaggttaatagctcaaatgcttcaataaatataagatgaggaatgagaaaaagatattggatttgaaatacagatcactcatgactttcaaagacaaacttcctaagttgctaaaggcttacacagagaattacagaacaagtcatttgtgaagaaaggtgaatagtacatttggaacacttttccaaagacagtaacaataaaaaagaaaaagagagaacacaatgacttgatgggttgccaaactgcaggactactttttagaaagaggtttcacttgctagtatagatggtga

SEQ ID NO: 736726 - DNA, 588 bp, Homo sapiens
aatggaaagttacaccatataaatggatgtgattgttttacaatgtaaagatgtagacttctgcaaattgatctacaaattcaatgcacttcaataaaaattccagcagaatatttgcagggaactggataaactgattctaattaatatggaactataaattaattaattaatatagaacaactaagrcaattttgaaaaagaaggcaaataagaaaactgccctagcagacactaagaaatactacagatattatgacaaattatactagttaaaacaatatactactggtgaaagaacaaatgacaaatacaaaataacagagttacaaaacagtttcgtagggttatacagagtttcagggcaacctttgaagcctcagggcagaaaagtatgtcttcaagtagaacccccaaggcataatccataaagagataaggactgagtttgactacatcaaaataattcaagtttcctattccacaaggaatactacacacaacattaataaatgactcgtagactgggagatcttcacataaataaccgacagaacattagtttctagaatatctaagaaactctca

SEQ ID NO: 736727 - DNA, 726 bp, Homo sapiens
cttacacatgtgaccaggtagaagagaagaagcagatattgatgaacactagcaatgtctactacagtatggctgtgtgtttttctccagtaccatttagctgttcaggtacagaaacaaagcaagtagcagttggatttaatctcagaattaggattctgaccaactastctaatggaggaaaagaatggtgagggaggtaagtgtttgcatagaagtgatttcataggtggaccatgtgctatggtctgaatgtgcaaaataaatttctgtttttttaaaattacttagtgtcaggtattttgttatggcagcaaaaacagactggcaccatggaatctaaacatggtaaggagggaagtaaggacatagagatgaagaatatgaaaaagggctagaactgtggactggaggacttcataaggttgcagaatttctggacttggagaactagagcagctgagctgaatggatgagaagttgtggtcaaagaataggattctggaagtcaagatttcagaggtagtgcagtttgagggatgattagttcaggaatgtgtctctgaaatttgatggctaaggtcagatctggggaagattattagaggtgacagagtcagggaactaagaggccaaggtgttggattaatcatctgtgaggaggttgaagtcacctagaatggtgacaagagtaggggtaggaacgaagagaaggatccaggtaat

SEQ ID NO: 736728 - DNA, 649 bp, Homo sapiens
gggttgaatgaagcttatcatctatgagcatttttcctgctactctaattttcttcagtccagacttctctagtttttcattcacacctgaagctccaggtgagaatcatggctactgagaggacacccctcaagcgtgattgggcaggaggaaagttacaaactcaattgtacttatttccacattttggcaaagaatattcctgccagcaattagttttctattttgaaatagcatttaagcatcttcaggagtttgtaaaatcttttttgtcccttattgtaataagtaataggacaaagttyccctcaggccagaagcatgaatttagtccacaaaaacatatttgtaaatatttttaaatctgagatttagtttttcaatttcataagatccatagaagtttatggtttaaaaagccaaatcatttttacaaggactatagtgagaaacagtcttctaaattcctctccctaactctgttagctgtttcttctgtttccattttttcctaaatagtatgtttatatcattatttctacatttattaatttcaaacattatctgttaacttattacagataagaggacttggcctcctgatgccaccttattccttctctctctcttcactttccttatcctccc

SEQ ID NO: 736729 - DNA, 626 bp, Homo sapiens
cctgggtttaaaaactgatgagaagaacttgatgggcccccaccatggatccttcacagcatcagaaacctcctccaggaagctcgacaagggaaatgcaataagctcctcccgggaagcttggccaagaagggcaaaaccttcctctagtatctgaactttgtgtacagaagttgaaataggaatgggaggtgtgaattacccataattgttttagagactgtaaaaagcagggtcttctccaacccagcctcagctttacttccacagtgcctagctcccaggaattctaaaagaagtaagattgaggatggggagctccagcaaacttgggagctgtgggccacttcactttgtccttctctcctcattccatctcctgaaacaatgatgaatccaacaagatcaagagcctaaatgtcacaagggaaagggaagaacacaaaatgcttstgcatctatctttgtgcgataacatttttagctcttcaagaaacttacatggtttgtgcctttcaggattggattgggtggtcccttaggcttccattgaaaagggcaggagatttggaaagcctaggtctttttcagcagccagtgaagcattaaatagcttgcctgccaaa

SEQ ID NO: 736730 - DNA, 405 bp, Homo sapiens
taacataatataatagtaaaatcatatatacttaacaagttaacatatgaaataaatggaaagaaaagtttaattaatccaaggaatacgagataggagactaaagaaacacaaaacaggtgggtgaaatgagaaaaaaattattaagataatagatgcaacccaacgaaattgtaactttattaaaagaaaaagaactgaaattccaagtacttctctttaaactatgtgggggyatcacatatagttttctgctctgtatccatacccataacttttctttgaaagtattcagtgctcataccaaggcttgcccattcctgaattatttttctctctttgtaccttttatttttaggtcattttgttatcaaaattatctacggacatagttttaaaaggcaa

SEQ ID NO: 736731 - DNA, 479 bp, Homo sapiens
cagcttaaaagttagaagcaagatggagtcggttagttctgatatctttcactgtcataatttcctcagttataatctttgcaaaggcggtttcagggacacacagctagtaaggtgcagaccaggaatttgaactcagaacagctctagagtctacgtgtttaaccgtgatgcaatactgtctctcaaatgggaactacctttataatgagaacaaactgggcaagaatagctcatgaagaaaagtaagaggttttggagaaggcagacagctcgagagctgttcatgctttacgatcataactgctctctgaaaggaacatgtgcagatgtctgacttgcacctagccaatttattaccaagcagatttaatttataaatagtataagcaaatcatttttatgggtcttcttgttgctctattctargatattgcattgggaatcagtgctgtggaatttctttcaggtatgtagtg

SEQ ID NO: 736732 - DNA, 565 bp, Homo sapiens
caaatgttgaaatttaatcaataagccttgattgtgagtcgatttggtttcacttacctttaatgctataaagtgactcaaatcttttggctatagtggaacaatccacataattggctgctgatatggaaattagaaggtgaattagccaggtatagccatacaaactggattagagaataaaatgattgaaagattggcttgagaacacagcaatrcagccaaagttatcattcatatgcaacagattggatctgtaatctggaactacaagttggtggtttggctgctagaagaagctcacaagatgtaagaatgctcatttaacccttcctttcacaactcaggaagctagtatttacagtctaggcaaaaaaaataagaatatgatgaacagatagcctgaactctgattccatgtgaacaaccccagctgaactggaagctctgcagccatatctaccgaaaagttaaaagccatcctcttgaatgacattaggtagaccttttaatattttattttatcctagaaattaataaaaataaaattcatatgtattagggt

SEQ ID NO: 736733 - DNA, 565 bp, Homo sapiens
caaatgttgaaatttaatcaataagccttgattgtgagtcgatttggtttcacttacctttaatgctataaagtgactcaaatcttttggctatagtggaacaatccacataattggctgctgatatggaaattagaaggtgaattagccaggtatagccatacaaactggattagagaataaaatgattgaaagattggcttgagaacacagcaatacagccaaagttatcattcatatgcarcagattggatctgtaatctggaactacaagttggtggtttggctgctagaagaagctcacaagatgtaagaatgctcatttaacccttcctttcacaactcaggaagctagtatttacagtctaggcaaaaaaaataagaatatgatgaacagatagcctgaactctgattccatgtgaacaaccccagctgaactggaagctctgcagccatatctaccgaaaagttaaaagccatcctcttgaatgacattaggtagaccttttaatattttattttatcctagaaattaataaaaataaaattcatatgtattagggt

SEQ ID NO: 736734 - DNA, 565 bp, Homo sapiens
caaatgttgaaatttaatcaataagccttgattgtgagtcgatttggtttcacttacctttaatgctataaagtgactcaaatcttttggctatagtggaacaatccacataattggctgctgatatggaaattagaaggtgaattagccaggtatagccatacaaactggattagagaataaaatgattgaaagattggcttgagaacacagcaatacagccaaagttatcattcatatgcaacagattggatctgtaatctggaactacaagttggtggtttggctgctagaagaagctcacaagatgtaagaatgctcatttaacccttcctttcacaactcaggaagctagtatttayagtctaggcaaaaaaaataagaatatgatgaacagatagcctgaactctgattccatgtgaacaaccccagctgaactggaagctctgcagccatatctaccgaaaagttaaaagccatcctcttgaatgacattaggtagaccttttaatattttattttatcctagaaattaataaaaataaaattcatatgtattagggt

SEQ ID NO: 736735 - DNA, 397 bp, Homo sapiens
actgggtccttactctcatagggctcacagcctagccaggaatttgaacaaggaaaaacacaacaggacatcgaatgaggttttgcctactgtttaggaattttggttgatgccagagaaaaataggagataattatcctgagagtctaaagaaaattgcttgggttttacacatgtaagtaagcacataatatatggtataygaaatcctgtacttcaaagtcaactaatagactcaaatgtctcagaatggcctaaatttttcagaatgtttatacagcttggctttcaaggaataaaatttttatcaagatatttctatctaaataagtcaaatattcaaactagctatacatgtctaggtacagcattatcggtttagctaagtttctgccaa

SEQ ID NO: 736736 - DNA, 590 bp, Homo sapiens
aacccattttctgagaagaaacccaagctggctgcagaaatttgcatgagtaaaaaggaaccaaatgttagtcaccaagacaataggaaaaatgtctccagggcctatcagaggtctgcatggcagcccatcccatcataggcccagagggctaggaagaaaaaatggtttcctgggctgggcccagggccttgctgctttatgcaatcttgggacttggtgccctgtatcccagccatggctaaaaggggccaacatacagctcaggccattgcttcaaagggtgaaagccctagtccttgttggtttccacgtggtgttgggcctgtgggtgcacagaagtcaagaactgaggtttgggaacctctacctagatttcagaggatgtatggaaatgcctggatgtccaggcaggagtttgctgcaggggtraggtcctcatggagaacctctgctagggcagtaaggaagtgaaatgtggggtcgaagcccccacacagagtccccactggggcactgcctagaggagctttgagaagagggataccatcctccagaccccagaattgtagatccaccaacagcttgca

SEQ ID NO: 736737 - DNA, 462 bp, Homo sapiens
ttgtatgcaatgtttgcatattaatcaatactgtatcattctcatgacagatttttggagctgatagagatctcagagtagtgcttttaaacctggggcaactttaccctccaggagacatttggcaacatctggagtcatttttggttatcacaacttgaggagtacactgacatccagggggtagaagccagagatgctgctaaacagcctccaatgcacaggacagcccccacaacaaagaattacctgacccaaaatatgaaaggagaaagaaagaaagaragagagagagagaaagacagagaaagaaagaaagaaagaaagaaagaaagaaagaaagaaagaaagaaagaaagaaagaaagaaagaaagaaagaaagaaagagaaagaaagaaaaaggtgctgaggttaagaaacctgccttagagcaatgatttttcatgggatgcagtactgcc

SEQ ID NO: 736738 - DNA, 566 bp, Homo sapiens
tatcatcctgggcttatcttctcttcccttttccttttagacttagtgcccaagatatgtgtaattaatattttacaggaatgcatgaaatcccctactgcttgggaaaaaacaatgaaacatcagattttaaagaaactcccaaagggctagaatccagttttgaacccagatggaattttccacatggcttagaaaatatataagtatatatattttatatacttgctgttttctgagcatttcttacttgacaatggttacaactgtagcwttctttttgtgagtttgcattaataacattgctttggttttaacttgcttactgtaacaagttattatatttaacttagtccttatcgactggagggttccacctcacctcaccatgtgatactgaagctgagctatttatattgttttaactagacatagtataaaataaaacaggttttcttgtaatttatatcattaaaacatataaattatctttcagcttttaggaaaagaaaaaatcagggcattcgattcaaatgggataattcacagcccgcagattatagggg

SEQ ID NO: 736739 - DNA, 611 bp, Homo sapiens
cctgtgtgtcatatggtctgtctgtgcttttaatttgtgtctccttgattactgatgacattgagcatcttttcagatccttattggcctttcatatatatcttcttttataaagacaaaatcttttgcccatttttcattgagttgtcttgttactgacttgtaagagttcttcatatattctagttagaagtcctttgttggatatatatttgaatagtttctccaaatttatggcttatctgtttattttcttaatactattttgaggaacagagcttcatcttgttgaagtccagcttcttatgcttacactttttgtgtcctaagaaatcttcgcctaatcaagatcatggatattttctcctgttttattctaggcaatttgtagttttaatttttatctttcagcctrtaatcaatcaatctttgtgtatggtatgaggtaagggttcagggtttttgttttgttttgttttgtttttttgcatgtggatttacggttgtttcagtatcatttgttgaaagtatcccttctttttggttgtgtgggtccaggagctggaggaagacagggaggaaacctgtgggtgtggtggatgtattcatta

SEQ ID NO: 736740 - DNA, 442 bp, Homo sapiens
gaccaacctgggcagcaaagtgagaccccatctctacagaaaataaaaaacttagctggacatggtaacacatgcctacagtcccagctactcaggaggctgagactacagtgtagccaccgccccacccacagattgctctttgaggttacggtgagctttgctcatgccactgcactccaacctgggaaacacagtgggaccrcatcttaaaaaaaattttttttttaaagaattagagagatgaagtaatttgcccatgtttgttaacaagtgatagaaccaatatttgaatttgtgtgaattcttctttaacttttaacatttttattttattttggagatgggtctcactatgtcacctagcctggagtacagttgttaccagaaagggatcccgatccagatcccaagagaagggtcttggatctcttccaagaaa

SEQ ID NO: 736741 - DNA, 512 bp, Homo sapiens
ttttcctcaggacctttccctatctgtcatgtcttctaaatccatactcagacttaagtcctggaagatccaaggggaccaggtaaaaactgtgactgatgaggttgtactttaaggttctaaaagaattatgagattttgcaaagtcatataaactgtgtggggatgtttcttatggatgttagattacgatggaagatatacaatcttggattagcttgaattttttttgatatgtgtgtggtaagtagagattctggatttaacgtgttagttgatgtgactgagagtaattctaacagtttgactgaaaactgggcccaatagtggttcatattgagcaaagttgagaygccagacttctttgctacaatgtagtatagagaaaggtatacatttaggaagattggttttaataagatagttatgttcatccacctgttaaatatattccccaagagggcccagagggcattccctaatcaaggctttgaaagatacagtggtgaagg

SEQ ID NO: 736742 - DNA, 636 bp, Homo sapiens
cattcaggagcaagttttttaagtttccatataattgttcattttgacagagcttcttggtattgatttctatttttattgcattgtggtctgagagtgtggttggtgtgatttcaatttttttgaatttattgagacttgctttatggccaagcatgtggtttatcttagagtatgttctgtctgtagaggygaaggatgtatattctttagttgttgggtggagtgagttctatggatgtctattagttcctactggtcaagtattgagtttaagttcagaactttttgttattagctcattttagaatagaattttcaacatttttggtctcagaagagctttacagtcttagcaattattgagtccccacagagctttataattgtgtatatctgtaaatttttgccacatagcatttaagaaccttaaagttatttattaattcattaaaaagtaaagcctttgcatgtgaacatttttagaataaataactgtgtatgaagagcaaataatttagtggcaagtgtagcatttttaaaaatttttggaaccctctttaatgtatggatgaacacaaaacaggcaaattctcatatttgcttctgtgttcagtctggaaaactcttttgtac

SEQ ID NO: 736743 - DNA, 601 bp, Homo sapiens
ttttattttaaccaatgtatttttaaagctctttgaatactgtgagatttttcgttttctttagcctgacaatctctcttttaaccaatgtccttagtccacttaaacataatataattttggccatactgaatttgttttctatttgttccatctcttyttaattcctttgtgtctttttctctggcttctgttggactgagtacactttttactattccagtgtcttctttacttgcttattagctataattcttgctttatatttttaatggattgtctagcatttacagtatgtatttttaacttattacagcctccttacaaattatttataccactttatatataatgtaagctccttaaaacagtatactcctctttttccttcctttttgctattatgcatcttactttcacatttcctattatcagtttaattctacatatattttaaacaccaaaatacattgtaatcattttgcctcagttaattatactaaaaataatatcgatacttttttatacatttaccactatcagcttccttccttccttcacatagacaccactttccatcttgaaccattttatttcagcc

SEQ ID NO: 736744 - DNA, 693 bp, Homo sapiens
taaggttacctagaaacttgtccaggaagcatgtggcaaataacaaccatgcaatagaaacatccggatttgtcatctaataggagatggtatcagcaaggtcatatttggatagaggtggaagatgaaacttcattagcttgcatgccccagctactggggggccattcccatgtgctctggaggagggagactttgcttttatcttggctgggagggcctttgattggtacaggttggaaatgagtaagatctgagattgacgcttcttgtactgaagactgcctgtgggaataaaaagcagagggagaataaaaagacatgagatggggtcgcctctaccctggaagaacatctaatctgtaggatggaygagatgggatgtacacagagaatgacctgagaacaaaattgtttttttaagtttcagaagcaaaataatattccgtgaaggaccagaagggggacaggaagacttcttagtgaaggtggttttaaatcaggtcttgagagacagtgagaacagcagagaatatgggagagaagggatggggtggctggcatggttctgttagcgagtcacatgtgctgaggacatggatgtggtgctgtttactttgatatttcatttccattattgtaggagaaggaaagggagatgacgcctctttatttttataactttagctccag

SEQ ID NO: 736745 - DNA, 503 bp, Homo sapiens
ctctttcaagggtaaatcatctcccagagtttgagaggcacagagatgtactgcaaaatccatgaccatcatcttcttaccttttggaaagatttagttttgagaaatagaggatatcggatcaatttgataattaagaaagtcgactgagctgtgtaatgcagttttttgttccaaacaagtaggacccaaagtaatgtaatatgattttcatgtcaccagtataaactaatacaaaggcaattttaaaagagaagtccccaaattgtcttgatcagtggtggttatattggcataaaagtactgcctctgaagatgactcctttagtgrtgataattttttggatatgttttattaggtttgtggaaaagctcagtatgaccacagcataagctatacctcatatgtacctcaaattcgaacatatagacaactgcatggcttcccttgttgaccattctaagggtttgaaggtaatacaggtggcagaataagattttat

SEQ ID NO: 736746 - DNA, 362 bp, Homo sapiens
tgggagtcattaatgtatagatgacatttaaattcaaaggactaaatgaactcacctagggagactgaacagataaagagaagagatagagacctccaacattcagaggccagtcaaacagaggaaagtaggcaaaggagaatragaaagaataggcagagaggtaggaggaaaatcaggaaagtgtttctaataggaagaagtggtcaagagaatggaataccactgaggtctggtaagatggaaacaaagagatgaccaccggattttaacagggaccttggcaggtataacctcacgggtgtggtggaaacaacgggctgagcagaggatggcaggtaaagaagacatctctttgaaca

SEQ ID NO: 736747 - DNA, 524 bp, Homo sapiens
aaaaggaatcctaggactaatacaagctacttggctccatgctttaaggtagagagatctgggaaaaagtcttcctcctttccctttgctgcctctgtagagaccaaccagacccataaatgggcatgtacagaaatggaaaaagtactagaagcagtcagaagcaaacaaagacattgacgactttggtacctcttaaaaagtaattttttttttttwaattaagaactaagtggtgggttggcagagaaagaatttttgatcttctgtctcctggaagctactggtatataaatgcaggggcttttagagcactgtaaacttaatcccaaatatgaaaacactagggtataggaagcagaaatgaaggccatacaaaggtaggaaaacaaagcactcccttctggggcctccagtggtcatgcagatcatgaccaattactgtcacttcgctttcccttccccaagtggacctcctcatctgcccactttccccacaagtgtacactgtcaatcttgctgta

SEQ ID NO: 736748 - DNA, 579 bp, Homo sapiens
aatgatttgttaagtcagggcctcaaagggttatcgtcttcactgagagtttcctgtggcaagcacaagtttctcaacccactcatttctcatatccttycttatggaatatggctgcagtgatgcttttaatgcagggagtcagttcagccatctggtctccacaataatttgtagaaagatacactttggggaatcacaatctaaaaagtagctgaaactcttagtaattatacctggatatacttcaagcagagggagacagaagacttacctttgaagggtgccttccttacagcccccatctgacatccacacgtatctggtgcctgaagaaatgtgttaggccactggatactttgggcccagagtccagcttgacaggacttttggtgggttctataggtcacccaaggcttgcctaagcctttatttccccctcagtgtatacttgctgagaatagagattcttgggttagttgaactcagtatttagttatttcagatttgggttctctgaagcttctgcatataaaaaatggattgttacacatgagagaactttgacaactgtaaagc

SEQ ID NO: 736749 - DNA, 594 bp, Homo sapiens
gtcagcttgtgaaaagttgttaaacaacatgctaaatgtgacatgtcaaccctcactctaaactttgcctgttcagagcatcagatgaagacttcattgggttttatagtggctttctgattttcggtagtccattgaagaaggtagttaagtttgaaagttgttgtgtactgttaatgactgtctgcccatgttctgcctgaaataccacgactgtttmtggaaagtatctttaataaagctggatacagtttggcttggaaaaaaaaaaaagagtggttgatttgcacagtgggattgcggggacttttttttttcttcttcatacttgtttgtattttccaaatcttccctaaggtcatttattacttttagaatttaaaaattattttataaaaatatgtaaagctctggttttttaatgactatgtaatgactatgtctactcaaaagtatcttcaaaatgacctatttaaaaatctatcccctcaaaacatcctgataaatcctttcatctttttttggactaaaaatacagtgtaataactgaagaacaggttaaaaaatgttaactaaactgtaatttagaattga

SEQ ID NO: 736750 - DNA, 594 bp, Homo sapiens
gtcagcttgtgaaaagttgttaaacaacatgctaaatgtgacatgtcaaccctcactctaaactttgcctgttcagagcatcagatgaagacttcattgggttttatagtggctttctgattttcggtagtccattgaagaaggtagttaagtttgaaagttgttgtgtactgttaatgactgtctgcccatgttctgcctgaaataccacgactgtttctggaaagtatctttaataaagctggatacagtttggcttggaaaaaaaaaaaagagtggttgatttgcacagtgggattgsggggacttttttttttcttcttcatacttgtttgtattttccaaatcttccctaaggtcatttattacttttagaatttaaaaattattttataaaaatatgtaaagctctggttttttaatgactatgtaatgactatgtctactcaaaagtatcttcaaaatgacctatttaaaaatctatcccctcaaaacatcctgataaatcctttcatctttttttggactaaaaatacagtgtaataactgaagaacaggttaaaaaatgttaactaaactgtaatttagaattga

SEQ ID NO: 736751 - DNA, 622 bp, Homo sapiens
ctacagatggttatttctatggtattatttatattacgctaagttacattatgaattaaatcaacttttgaaaggaggaacagaaacctaaagaatatttatcaagttgtgttcaggggaaggaattaagaattaaaatacagatggtaatagtttactgtgtatgatgtgtacagggcaccatggcaagtagtttacatatattctcatttaatcaacacaaagaaacaggtattatcattacttgacacataagaaaaccaaggctcagaaagtcagagctggaagtcaaatgtcattctatctgatccaagtctgtgctsttagctatcacacttcattgttttgtatgtatgtttcaagttttaaatatcattgtaaaatataatcttaatatttcatgaacagttgactgcctctgtgagagagtgtgcgtgtgcatgtgtgtgtatagtgtgtaatgtagctgcaaatagacatttattaaacttgttttgctttttggaatctacttatttaaaatactccatatatttgagaagcaattgaaaatgcatccatgtatgttatttgagcgttactagaaatttatttatacaaatccatattaatgtgctaataa

SEQ ID NO: 736752 - DNA, 622 bp, Homo sapiens
ctacagatggttatttctatggtattatttatattacgctaagttacattatgaattaaatcaacttttgaaaggaggaacagaaacctaaagaatatttatcaagttgtgttcaggggaaggaattaagaattaaaatacagatggtaatagtttactgtgtatgatgtgtacagggcaccatggcaagtagtttacatatattctcatttaatcaacacaaagaaacaggtattatcattacttgacacataagaaaaccaaggctcagaaagtcagagctggaagtcaaatgtcattctatctgatccaagtctgtgctgttagctatcacacttcattgttytgtatgtatgtttcaagttttaaatatcattgtaaaatataatcttaatatttcatgaacagttgactgcctctgtgagagagtgtgcgtgtgcatgtgtgtgtatagtgtgtaatgtagctgcaaatagacatttattaaacttgttttgctttttggaatctacttatttaaaatactccatatatttgagaagcaattgaaaatgcatccatgtatgttatttgagcgttactagaaatttatttatacaaatccatattaatgtgctaataa

SEQ ID NO: 736753 - DNA, 619 bp, Homo sapiens
tagcaatgcagccaacatcagagcacagtgtataaagcaaacattaatagacttaaaaggagagatagactgcaacacaataatagtaggggactttaacagcccactctcagtaatggacatattatccagacagaaaatcaacaatgaaccagcagagttaaagtgcacaccaaatctaataggcctctctgacatttatagaaatttcacccaaatttctatacacgcagaatacatgttattttcattaaaacacgggacattctccaaaatagatgatatcttaggtcataaaacaagtctgagaacatttttaaaaaaacagaggtcatatcagtaatcttttctgaacataatgaaatcaaactagaaatcaataacaaaaggaacctcggagaatacatgaatacatggaaattaaacaaaatgcccccaaattacgaatggatcaataaagaaattawgaagaaaatcaaaagtttcttaaaacacatgaaaatggaaatacaaaataccaaaatctgtgagatccagcaaaagcagtcctaagagggaagttcacagtgataaatggctgtatcataaaagcagaaagaggccaagcacggtggctcat

SEQ ID NO: 736754 - DNA, 620 bp, Homo sapiens
acagtgattacttgtacgctcattaacatatggtgaagcaaatctggccattagcagtttatgccttatgatttaggatctgatgttctacatacaactttgtgaagtatgacatctttatttcattaatttattcaactttctaattatatacttactttgagtgcaaattaagccatcagatatgttcyggtgctttgatttatacagaacatggtgtattttatggatattgagactaatttcacttgttttcaacatagatttacgagcaacacgctagggtgttggggttacagcaatgatgaagacaatgtgtacaatctttgttttccttgagcttacgagtccaatagagacaaataaactgaggttacaaaatgacatactttgccctaacaggcaaagtatagggcacagagaacaaacactacacctacattctggagtcaataaaggattcctagtagaactgatatctaatctgatacctgaaagataaattattgggaataaagcaggatgggggatattcccaccagcaaaagagaacatgaaagggaaaagcagagcagtctactagtaatttaaatttgtgatgatggtggcttgaactagca

SEQ ID NO: 736755 - DNA, 620 bp, Homo sapiens
acagtgattacttgtacgctcattaacatatggtgaagcaaatctggccattagcagtttatgccttatgatttaggatctgatgttctacatacaactttgtgaagtatgacatctttatttcattaatttattcaactttctaattatatacttactttgagtgcaaattaagccatcagatatgttctggtgctttgatttatacagaacatggtgtattttatggatattgagactaatttcacttgttttcaacatagatttacgagcaacacgctagggtgttggggttacagcaatgatgaagacaatgtgtacaatctttgttttccttgagcttacgagtccaatagagacaaataaactgaggttacaaaatgayatactttgccctaacaggcaaagtatagggcacagagaacaaacactacacctacattctggagtcaataaaggattcctagtagaactgatatctaatctgatacctgaaagataaattattgggaataaagcaggatgggggatattcccaccagcaaaagagaacatgaaagggaaaagcagagcagtctactagtaatttaaatttgtgatgatggtggcttgaactagca

SEQ ID NO: 736756 - DNA, 742 bp, Homo sapiens
ttatgcatacctgaagaatgaccctatggtctaagaagaatgtgtgttcagagctccaagctaaggaatctgggagtggccaacccagatatttcatttcttatctatgacgaacttctgaactgctcccacccccagcccatcctgtagaatgcaggccctacgaggcgatcaaagccctttgttttaggttaaatgaaggttgcctggtggaggttgctaggggaaaggtgttaagtaaaaatgttatataaactgcatggtgttttttgtttgtttttgtttttttgagacagagtttttgctcttgttgcccaggctggagtgcaatggtgcaatctcggctcactgcaacctccgcctcctgggttcaagtgattctsctgtctcagcctcccaagtagctgggattacaggtgcccaccaccaggcccggctaattttttgtatttagtagagtcagggtttccccatgttggtcagcctggtctcaaactcctgacttcaggtgatccacctgcctcagcctcccaaagcgctgggattacaggtatgagccaccacgcctggccaattgcatgctttttacaaggagttttggttctcctgcccagcccactgccactggactgccctgtattgtaagtcccctcaataaaccttatgtctcagtttctggttctaggtctcttcttcagcctcttgaacatggtgccatccctactgaagtcaatggggtctg

SEQ ID NO: 736757 - DNA, 576 bp, Homo sapiens
agacggattgcccacagtttccataatagtcctgaaaagaactatgaaagagcagtgaccgtcattcagatcgaagccaaaaaggctgaattacagttaaagcagctggaaatatgaagattaatacctgacagaggagatgggccctagtatgaatatytgttattaaggcacttattgagcattctccaaaatcagctcctgaaaattaatcattcatttttctaaatacaaagtatattttctttagtgaaaaataaattgtaaatatattctcaatttttcctctctgatgaataaaagagcttcttccgttgctctgtttctcaatgttgatttagattaaggcttttgatgggggttttggctttctcttttgggtttaaaatatactaataaaaactggagaaataggaatttgtaaattccaaactttgtggtaactgtgaaaggttagcattgatctgacaaatggaagtttagaagagaagtctaattatgttaagcatctgtaactgtgatagtttttacaaacatctatattatagacatctgtattattgagaaacaactcag

SEQ ID NO: 736758 - DNA, 613 bp, Homo sapiens
tagtgcctctcagacacagattcccatcaaagtgaaatgcagtggggccagagtgaggtgctgtgacttggatcagttctccatcgtttcctgcccacagagttggagcggttttgtagatttagaactttcacccscagaattgctcactaccttttgagattcccatttcaagatacacagttgcaggggtaaaaactgtaggaagagatgaaggtactccccaatgctctggaaagaatcgtttcttttcctagagttgtttatgggggaataccagggcctaaaagtgtgcagtgatggtggctgctactctttttccctccttagccctcctgataacatattactttggatcaaccagtgaaattgatgagttgttcattcatgtaaaaatctctcttggctccttacttgaagccaggcacaatgctattgcagacattgtaagtacggtggtcaaattagggagatgagatgctatttctaatggagcttacctgctaatgagggcaagaaagccaagaaacacacagaaaagcaagcagcagatgatttcagatggcggtgggtgacgtggatggctgggtgatggtgagaatagagagtaact

SEQ ID NO: 736759 - DNA, 505 bp, Homo sapiens
aagggtgtgcggtgagtgcccctcctgggaatgtgctcttcaaactagcacagaaagaagtatgactttcttctttctttttttttttttttttttttttttttttttttttttttttgagacggagtctcgctctgtygcccaggctggagtgcagtggtgcgatctcggctcactgcaagctccgtccgccaggttcacgccattcccctgcctcagcctcccgagtagctgggactacaggctcccgccaccatggtctcgatctcttgacctcgtgatctgcccgcctcgacctcccaaagtactgggattacagacgtgagccaccgcgcccagccggcagaaagaagtatgactttctaatccaaaatcagatttcgccatttagagaagatttgagaaattctgtttgtatttaaatcatcctcatcccaccctcaagcctcaagaaagatgagaaaagtatactatgtgtggggaatgcttttattcaaaagcttgt

SEQ ID NO: 736760 - DNA, 505 bp, Homo sapiens
aagggtgtgcggtgagtgcccctcctgggaatgtgctcttcaaactagcacagaaagaagtatgactttcttctttctttttttttttttttttttttttttttttttttttttttttgagacggagtctcgctctgtcgcccaggctggagtgcagtggtgcgatctcggctcactgcaagctccgtccgccaggttcacgccattcccctgcctcagcctcccgagtagctgggactacaggctcccgccaccatggtctcgatctcttgacctcgtgatctgcccgcctcgacctcccaaagtactgggattacagacgtgarccaccgcgcccagccggcagaaagaagtatgactttctaatccaaaatcagatttcgccatttagagaagatttgagaaattctgtttgtatttaaatcatcctcatcccaccctcaagcctcaagaaagatgagaaaagtatactatgtgtggggaatgcttttattcaaaagcttgt

SEQ ID NO: 736761 - DNA, 571 bp, Homo sapiens
ttatactgtaggaaaggctattcccaaataactgtaataccaagcagactgcgttaagcctcatgaaagacagtttgaatgtgttttcaagttcaaaggaagaaagagtacattcaattaatgctgacaagtttaataacaatcacgagggtttaagaagttcctatttatgcacaacatttgttaaaaattaaattagtaaaagcaaaaagatttagtctctgtgtttatgagcacattatgttttaataaaaacattaagggcataaagaggaatcagtattacacacaaatacaaattaattgttaaaagtagtagcagagaattgaaagtgataaaaatttaatatttctcaagctgtccctcattactttcaagtgatctagagacgtgattcctgcctacatcccagtacagtrgagagtcataaaaaaatgggtaacatgggaattctattctattgagcagccctagcattttgttcaaggagttgttaggactgtggttccctttagcaagatgtggcttcaacatccataattcaacttacctgttcattgaattacagtg

SEQ ID NO: 736762 - DNA, 554 bp, Homo sapiens
attattaaataatggcctcaggctagcaaatgaactacgcactttgccatcttattattatagtttgcttgccttaaataaacttcaatgtagacattcgtgttcttatttggcttggagaagataagtgtatgaatttgcggtgtggcaacctttctcattttcaaaaagaaacaaaaaacaaccccaatgtcgcgatttcaccttttgcatacttcctttaagaacatccagtttcatcacataatctacacactgtcctcctcccacagaaatgacagcagcaattctgtgacagaacatataaacgtgggaaaaacatctgtgtrtataaattcttcctaggtgctcttggactgaacccaagaacatagcaccacagcaggcagatgtaagcctataaagcatggtcacagaagataattgctgttaataattcattaagaactattcctttctctttctggaaacgtattcaccacttcaaccattttcatcaagctttataattggatgtggagaaagggcacacaggattttatgagcaataacaa

SEQ ID NO: 736763 - DNA, 421 bp, Homo sapiens
aattacacatttttactttacaagaaaaatatacatatcaatggcactacattttatcataaaatatgtactaaaatagcacaaatggaaaaagtgttttaaagtagttagtaagagacctattattatacctattaagatgtaatgcaaagaactacattagtctatttatagayatattatagtgcctctttgtcccaaattgatttcctgtatctccaacagtgcctgtcttgaataatatcttgatttatccactcaggtatttaatgggcacccaaagcatacccagtctaaaacactcctgattccccaggcttctgtacccactgtcttctctgccccattgtcttctctacccctgtctacccagcagatcacattaaaaaactgggggtcatccttcagtcttgtatttttt

SEQ ID NO: 736764 - DNA, 619 bp, Homo sapiens
atggaaacacatcccatgctcatggatgggtataatcaatattacaaaacgaccatactgctgaaagcaatctacaaattcaatgcaattcccatcaaaatatcaccatgattcttcactgaattagaaacaaattctaaaattcatatggaaccaaaaaaaagtcagcatagccaaagcaagaccaaacaaaaagaacaaatctggaggcatcacattacctgatttcaaactatactataaggccatagtcactaaaacaacacagtactggtataaaaataggtatataaaaatgggacagaatagggaagccagaaataagcccaaatacttgcaggaactgatcttcaacaatgcaaacaaaaacataaagtggggaaaggacacccttttcaacaaatggtgctgcgatatttggctagccacaggtaggagaatgaaactggatcctcayctctcatcttatacaaaatcatctcaagatggattaaggacttaaatctaagatctgaaactataaaaattctagaagatgacattggaaaaatcctagtcattggctgaagcaaggattttatgaccaggaacccaaaagcaaatgcaataaaaacaaaga

SEQ ID NO: 736765 - DNA, 694 bp, Homo sapiens
ggttagagctataaaccaaaggaccttacaaccattactatcaacacttaatggatgtattcacatataatagagacaacagcttcatgaggatttcagcatatccagaggcatcgagttatgactttttaaaaaaggtcttcacactatccactgaaaactgttgacagagttaaatgtgctaaataatactgttcatatactgcttattacaaaagatgtttagatgaaaaaagtctcctgaaaaagtgacaaaaagaacttaaggcctttaactctggccatcatttgccacacagtggcaattttaggagtagagaattattagaaataatagccttggtcttaagagggatagatgtcaaattacaaatgtccagttacaaaaacacaataagaaagatacaatgagtgctatatgttgtttatagacacatacatagcaaagagataagtttggactrgaaaaatataaatcaaattcttaatcgcaattatttctggagatggagggagaagaatgcaattaggaaaaaaagaggatttgaggtaaatttgacaaaatattaacactcgttaattacaagtgatactcattgctcgctttcttctctgtacttttctatgactttccttaaaaaaatcaatttaaaaattttgaaaataaaaaccttggataagtctatcctagttc

SEQ ID NO: 736766 - DNA, 590 bp, Homo sapiens
gctgtgtatttttttttccttaaataagttaatttctccttagtacatttggttccaagcagagatgaatttcttttcaacatttcttggttctagtcactgaatttaaggtaaaaatagcaaatgcaattcagatggccatgccttcagtcaccaaaatgatttatggagtcagtttcatatctctgcaatatatctatatatatatatatatatrtgtgtgtgtgtgtgtgtgtgtgtgtgtgcgtgcacgtgcatgtgtttgtgtattctctgttatatatattatctccaaaatgctttatgcagtcagtttcatatctctgcaatatgtgtgtgtgtattctctactttatatatatataaaatacatatagcaatatataaataatataatatatataactgatatataagttcttgaacagttaaacttctaatctggatggaattgctcatctcatgacaagtgaattctgatcctgtttggcagctagataaatgaatgaacttaggcaagtcattttattcaaaattaagacaaattagttagaggagagagtttttaagtttcctttccactctaaaat

SEQ ID NO: 736767 - DNA, 545 bp, Homo sapiens
gcaaatgttgcatggtgaaatcaagagattgaaggcttttattgagaaattaggaaatctgtaaaccagtgcctgatacttggtgggaaaaatccactattaagaacttgtaaggattaaacggtattttgtttagtagtcccatttttctttcaggccaagacacagtcctgcgtttctccctaaatttgaattttcagctgcaaaacagtgtgacctggtatagtgttttctttcttgccarcagggcctgtccagccctacattcctctgcgacagtactgtgggtacatacttatgtttcctcagcaacatttcagtgttgctaactggacgccctcccagaagtctttgcagtccctgaggaaggactgctgtccatttcctaaggcccttttatcattagtgaaatgtaatgaggatttccctggttgatgcagatattcccgttcctaaagtacttaagtagcttaattggtttggccatttaatcatctaagaaaaataaaacacatacatttatatttcctgctggaatgcttaag

SEQ ID NO: 736768 - DNA, 574 bp, Homo sapiens
tcaaggaaccagttcaagttctggggcacaatctagatgaaactgtgaggtttgttcaaaaagtaagtgtacaaaatttcatcatgaactggctttattacaactctttaccgtggtttattgaaaccacaatgtatactactttcctccagattctgattctaatgggcacatttgtttgttgaaatgataaatatattttccttgtcaaacatggtgggtcctggttgatatctcctgtttcctgccttgaaaaacatccttgttggtgcctttctcccactttggtacatcactcccaactgaaaacagtctagatataaactttaacaagytggagatctatttctacagcacaactctttcatgtttaaaagcaattatgccgtatcaggtgattgccacatgttggggaaagcagccatcttagagcaaaagtctgccaacccacagtccctgttgatccacatgtgggcattgtctaatgttaacaaaatcagcacttgtagacttactttctctgaacaatctagtacacttctctagtttctcccaacctggagaaaatgtatag

SEQ ID NO: 736769 - DNA, 505 bp, Homo sapiens
atttacaaccagcaccactgacagaggccaatcagtgcaccataaatgtcaggttagtgagattgagcagtaagtaaagtactgacagcacactattggctggaatcaattggccaaggtttaactgagaagagcaatctatgtgtggcgggcttaggsaaagagcatagtgtgcagcctgggtttccaggtagactccatagatttactggttagtgggagcataagggttgggacatcacacacatttgcttcagcgcatccagcatcatccatgttgatgtgatgcacaatccgggagttcagtgtggccgggcctcctgactctgaggcttggtggtaaaaaatggcgcagcattagacaaaaaagagagagagaggaaaactgttacagtacgaggctgtcagaactgggggacacatccagtgcattacagttcaatgacaggtaatttgttcaaattccaaaactgtaacagggatttccacaaagatacagacacaa

SEQ ID NO: 736770 - DNA, 577 bp, Homo sapiens
atggagaacctaccatgcatgaggcatcgtacaggtcacaaggatggaaaataccaactctggctttcaaagatagtaaagtagtagaggatcatgagtaactccagttgggagcagtgtgcaaaaagtgcttttgaggtgcacagaggaggcagaggtgacttcccgccagaaagattagggaaggagggagagtttgacctggagaacatagatggctaattcatggagtcaaggatctgaaggaaagatgcccctgggagagggtcagcctttcattggtggggctccactgtctttccaagcccaggtctgcttcctctgtcagcwacttcatgcaaactaatagaagcacttctgtttctttaccaatgtctcgctaattttcactgctgtgattttgcctgtgctatttatttacccacaagactctcttcttattctggtcaacccatctcttttactattttagagtcacatctcccaagaattccttccaggctaatcccaggtcttcaccaccctttccacactcactttccttccagcatccccttgagacttgttgaggttttgc

SEQ ID NO: 736771 - DNA, 577 bp, Homo sapiens
atggagaacctaccatgcatgaggcatcgtacaggtcacaaggatggaaaataccaactctggctttcaaagatagtaaagtagtagaggatcatgagtaactccagttgggagcagtgtgcaaaaagtgcttttgaggtgcacagaggaggcagaggtgacttcccgccagaaagattagggaaggagggagagtttgacctggagaacatagatggctaattcatggagtcaaggatctgaaggaaagatgcccctgggagagggtcagcctttcattggtggggctccactgtctttccaagcccaggtctgcttcctctgtcagcamcttcatgcaaactaatagaagcacttctgtttctttaccaatgtctcgctaattttcactgctgtgattttgcctgtgctatttatttacccacaagactctcttcttattctggtcaacccatctcttttactattttagagtcacatctcccaagaattccttccaggctaatcccaggtcttcaccaccctttccacactcactttccttccagcatccccttgagacttgttgaggttttgc

SEQ ID NO: 736772 - DNA, 636 bp, Homo sapiens
agcctgaaattctccatcagtcaagctgaatccgttttctctgcactgctcagggctaccctctctgggcaacatcccctgctcactccctctctcttgctgtgcctcccatctaaactccctccaggcataggtgcagtgtggtgctcactatggactcctgtatgtctgaagtcataagtgaactccatgagggcaaagaccatgtaaaayaatcctgagcatacagttgcttaataaataggcatcagatgagttattaatctgtgataatagttttttcccctcaaatcagatggtttgttatgttaattctgagtccagaaacacaaattcttaaaaggttgatttatttgattttttaaaagtatgtgttattgtgcttattttaaaggctaataaaactgttcttctaaactgttgctattctcctagtaaatgtcccttcaacggtaatggaagccatgtgcagacaagacgccctgcagcccttcaacaaaagcagcaaactcgcccctaccacccagcagcgctccgttgttttcccccagactccgtgcagcaggaacttctctcttctggataagtctgggcccattgaatcaggatttaatcaaatcaacgtgaaaaaccagc

SEQ ID NO: 736773 - DNA, 636 bp, Homo sapiens
agcctgaaattctccatcagtcaagctgaatccgttttctctgcactgctcagggctaccctctctgggcaacatcccctgctcactccctctctcttgctgtgcctcccatctaaactccctccaggcataggtgcagtgtggtgctcactatggactcctgtatgtctgaagtcataagtgaactccatgagggcaaagaccatgtaaaacaatcctgagcatacagttgcttmataaataggcatcagatgagttattaatctgtgataatagttttttcccctcaaatcagatggtttgttatgttaattctgagtccagaaacacaaattcttaaaaggttgatttatttgattttttaaaagtatgtgttattgtgcttattttaaaggctaataaaactgttcttctaaactgttgctattctcctagtaaatgtcccttcaacggtaatggaagccatgtgcagacaagacgccctgcagcccttcaacaaaagcagcaaactcgcccctaccacccagcagcgctccgttgttttcccccagactccgtgcagcaggaacttctctcttctggataagtctgggcccattgaatcaggatttaatcaaatcaacgtgaaaaaccagc

SEQ ID NO: 736774 - DNA, 621 bp, Homo sapiens
gttgggcctgaagatttaatttttgaacgtattcctgtttccctggatgaaaccctaggcacataatcaattttaaaattactttttgatcattttcttttattcatattttaaggaaatattgaaaatacaagaaaagggggtttaaaggaatcttgtctacttacagtgtaacttctgtactttctaagggctaactttctataaatttctaggctgaaagagacactgttattatagtggcaggtgaggtacatccttcagttctaaattctatacagaatcagcctctgcaaaggtgtatgtgascaagtattctaaagtcttatttttcaatgtacctaagaatgaaggaatattgctttgcttttagagattaactaaaacaaggtttggtcctatattttggtactagattttcttactctgaattctcaactttttaccaatgcatttaaattttccatattccaatgagcatgtacacacacacacaaccatagaaagctccatgtatagggagctgacttgtagacatgatggagaatagagatcatattggtgatgctgtatcttgggaggcagtgtattgtacagatttcctgggtcatgcacatttgt

SEQ ID NO: 736775 - DNA, 621 bp, Homo sapiens
gttgggcctgaagatttaatttttgaacgtattcctgtttccctggatgaaaccctaggcacataatcaattttaaaattactttttgatcattttcttttattcatattttaaggaaatattgaaaatacaagaaaagggggtttaaaggaatcttgtctacttacagtgtaacttctgtactttctaagggctaactttctataaatttctaggctgaaagagacactgttattatagtggcaggtgaggtacatccttcagttctaaattctatacagaatcagcctctgcaaaggtgtatgtgagcaagtattctaaartcttatttttcaatgtacctaagaatgaaggaatattgctttgcttttagagattaactaaaacaaggtttggtcctatattttggtactagattttcttactctgaattctcaactttttaccaatgcatttaaattttccatattccaatgagcatgtacacacacacacaaccatagaaagctccatgtatagggagctgacttgtagacatgatggagaatagagatcatattggtgatgctgtatcttgggaggcagtgtattgtacagatttcctgggtcatgcacatttgt

SEQ ID NO: 736776 - DNA, 559 bp, Homo sapiens
aggcagtgtattgtacagatttcctgggtcatgcacatttgtcaattacctgaaaacaagaacaagcatgagatgcaagagatcatcatcttcagtccattccccttaccaggcagatgagaagacaggtcagggaagttgagtggcttgtccaaatgccacagctgatcagagtcaggggtcctatctctcccgttctagccccttccattcagtcaacctgagttctgcgaagttttaaaaactgtgccataggtcactgcatccctagcatatgcctctcaagccagtgccaggcaaaggtgatgttttagaatccgatttgccttccattggcgttactttgatataagaattcaacataagcctctctgtggtcatttctgttctcctgtgtgtaaacctttaccacygtgaactattaacataaaaaggatggattgacttctgactgtgagaaataaatcaccccaacttttgacagcagagttagaaaaaaaagaaaagattaattggttttatttagtggcttattgtttattgtgatagccattaaaaa

SEQ ID NO: 736777 - DNA, 534 bp, Homo sapiens
aactgaacactattatattgccctttgatgcctatctatttttagagtgccaggggacaaagacataaacatgaacaaaaatctcatagttcattgtgggttttttcccccccagaaggctttgaatgattgggatgttggcaggaggccactacacatatagactataacaatgcatattaacactgaaaactatgaaacctttcttttctacctttacttgtacttgatgaagttaaaattttgttgtagtaaagagactggggaatttagtcagtgtttttctttttcttgatacttcagtagatataaagtgaattttatctattgttcrgggcatgtgagttgagtgtgctgggatggttcttagagttggttctctgttagaaaaaagacttgctgggtgtatgcttggatgatctacaggatccaactcctaaattcaggacataatctattttttttaattatctgtaacaacagttagaataaggtacatttgggaattgaagggattttaaaactttagccata

SEQ ID NO: 736778 - DNA, 508 bp, Homo sapiens
ttctgaaatttaaaaaaatcatcatattattcacattagaatcagtaagtagaatacattgtaggtctatcggaaatgtttggcaataattgtttaatgactcatgtaataattatccatttcaaaaacttattcttttagatgtcttccagaatagcaagtcaacaaaatgtattaaaaaaattaaaagcagttgaatcatgattattttattttaaaaggcaactgtaatcatttctcttcctcacattttttcaagtcatttgctgatgaagaaawgtctttttatttcaagttcaatactcaggtcctgatggatcttaccagggttacttatctttatttcagtacaataaatggattgctaatcttttcctgtcactatttccaagtagatgatggatttttgtttcagtttacacttcattgtttttagtatggttgtactttattatacacatgaaggcttattacagaaacaatcagattcaccttagttactcctttt

SEQ ID NO: 736779 - DNA, 620 bp, Homo sapiens
tagggtcaagacccatcagtgtgctgtattcaagagactcatctcatgtgcaaaggcacacataggctcaaaataaagggatggaggaaaatttagcaagcaaatggaaagcagaaaaaagcaggggttgtaatcctagtttctgacaaaacagactttaagccaacaaagatcaaaaaagatgaagggcatgacataatggcaaagggttcaattcaacaagaagagtaactaycctaagtatatatgcactcaatacaggagcacctagatttataaaacaattgcttagagaccttcaaagggacttagattcctatgcaataatagtggaagactttagcaccccactgtcaatattagacaaatcatcgagatagaaaattaacaaagatattcaggacttgaactcagctctgaatcaagtggacctgatagatacctacagaactctgcatccctaaacaacagaatatacattcttctaggtgccacatgtcacttactctaaaattgatcacataattggaagtaaaccactcctcagcaagtgcaaaagaactgaaatcataacagtctctcagactacaatgcaattaaattggaactcaaaattaaga

SEQ ID NO: 736780 - DNA, 620 bp, Homo sapiens
tagggtcaagacccatcagtgtgctgtattcaagagactcatctcatgtgcaaaggcacacataggctcaaaataaagggatggaggaaaatttagcaagcaaatggaaagcagaaaaaagcaggggttgtaatcctagtttctgacaaaacagactttaagccaacaaagatcaaaaaagatgaagggcatgacataatggcaaagggttcaattcaacaagaagagtaactatcctaagtatatatgcactcaatacaggagcacctagatttataaaacaattgcttagagaccttcaaagggacttagattcctatgcaataatagtggaagactttagcaccccactgtcaatattagacaaatcatygagatagaaaattaacaaagatattcaggacttgaactcagctctgaatcaagtggacctgatagatacctacagaactctgcatccctaaacaacagaatatacattcttctaggtgccacatgtcacttactctaaaattgatcacataattggaagtaaaccactcctcagcaagtgcaaaagaactgaaatcataacagtctctcagactacaatgcaattaaattggaactcaaaattaaga

SEQ ID NO: 736781 - DNA, 564 bp, Homo sapiens
tctcatgttgaaatgtgatccccagtgttggaggtggggcctggtggaaggtgtttgggtcatgggggcagatccttcatgaatgggttgatgctcactccatggtaatgagtgagttcccactctcttagttcacatgagagctagctataaaaggaatctggctcttcctcctctctgtcgtactccctctctcgccacatgacatgcctgctcctgcttcaccttccaccatgattgtaagtttcctgaggctcaccagaagccaggcagatgctggtgccatgacctgcagaactktgaaccaaataaacattgtttctttataaattacccagccttaggtattcgtttatagcaatgcaaaacagacagatataggaactctagcagcaacgtagattaatagttctaaaagggggtgcttttgtttcccaggggacagttgaccatttctggagtagcattggttgtcatgagagattaggggtcagggagccaatggtatctactaggtagagtttaggggtgcttctaaacttcttataatgtaaaagaaaattc

SEQ ID NO: 736782 - DNA, 633 bp, Homo sapiens
ggcattcagcagctataaattcagtgaaaaacatttgtttaaaatcaatggttatcttacagtgaaacacactagctcatgtagatatgatgtctatagccataaatcattctcatagaagttaaatggccaactatatcacagaagggatttccgcaatcaaaacaaagaagatgacccaaatatttctttaatctaaagaataatttgggatagatatggtagcatttatcagggaacatgaaagccaattagtttagattttagtaactgatgaatacaattagttcttcttacattcctgctcagtgccagatactgtctagtgaaatggtgaatgatataattcactataataaccaattcactagaggaaaccgggaaagaaaaaacaaactctagacttagaagatgctccacgaaaaaacaagtccarggtgaaatagtgttaagaaagtctacatctacttacctttttaataatcattattatttacagaatatgaaacagtttcatggctctgctatgtccttaagtaaatatacttgcttaacctctgaatcatcgagcaccttccaaatttgtctcaaaaaatcatttttttaatccccagaaaacgattatatcaacat

SEQ ID NO: 736783 - DNA, 650 bp, Homo sapiens
ctgctctatcatagaaattccatgctattgatggctaagactaggagactaaaagaaaagactatatgtgttgagtcttgtaagaattgctaaaattgtacatgtcttatttatatccaaagataaattggaaatagaccataatatatacacataccaattatagtagaaaaaacttaaatatctctctaccaaattctgaaatttagataaaattcagaagtttccatactgcttgctatttttatacttattggaatcaagtcagacaaaaataaggatttattcatacatttaagaaatattcatctttcrctttctttgtgatggctctgatctaagcggtggaaatcaaagagaatgaagtcattgctaatacagctcatagtccagtgggggaagttaatccatgcacaggtaaataaattaaaaattgcgaaatattttgctgtgaagaaagtgaaatagtgataggatagagtggttaacagaacagggtggtgtctacattagctagagtggccagagaaatcttcccaaggggccatatatgagcagagacatgaatgctgagctggagccagcaatgcaaaaacatcccaggaactagaatattccaggcagaagcaacagcaaatgcaaagactctc

SEQ ID NO: 736784 - DNA, 608 bp, Homo sapiens; identical to SEQ ID NO: 731512

SEQ ID NO: 736785 - DNA, 568 bp, Homo sapiens
gaagattgtgccagttcatacttccctggcaatgctaaggccaccttcccctctccccacccaagggctaggtttgaaggattaggtgtggccaggccaggaggaagtgtggagccatcccaagagatgcccatggcaggagaacacagatgagacagctggggacagtaacacagacctctcctcaaactaargacttgccgggtgcggtggctcacgcctgtaaccccagcactttgggaggccaaggcgggtggatcacctgaggtcaggagttcaagaccagcctggccaacatggtgaaaccccgtctctactaaaaatacaaaaaattagccaggcatgatggtgggcgcctgtaatcccaactactcaggaggctgaggaaggagaatctcttgaacccaggaggcagatgttgcagtgagccaagatcgtgccattgcactccagcctgggcaacaagagggagactccgcctcaaaaaaaaaaaaatagaaaaaaaaggactcaacgggcgtttgcatcctctgctgttccctgcagcctctgcccacaacggcagaaa

SEQ ID NO: 736786 - DNA, 568 bp, Homo sapiens
gaagattgtgccagttcatacttccctggcaatgctaaggccaccttcccctctccccacccaagggctaggtttgaaggattaggtgtggccaggccaggaggaagtgtggagccatcccaagagatgcccatggcaggagaacacagatgagacagctggggacagtaacacagacctctcctcaaactaaagactygccgggtgcggtggctcacgcctgtaaccccagcactttgggaggccaaggcgggtggatcacctgaggtcaggagttcaagaccagcctggccaacatggtgaaaccccgtctctactaaaaatacaaaaaattagccaggcatgatggtgggcgcctgtaatcccaactactcaggaggctgaggaaggagaatctcttgaacccaggaggcagatgttgcagtgagccaagatcgtgccattgcactccagcctgggcaacaagagggagactccgcctcaaaaaaaaaaaaatagaaaaaaaaggactcaacgggcgtttgcatcctctgctgttccctgcagcctctgcccacaacggcagaaa

SEQ ID NO: 736787 - DNA, 568 bp, Homo sapiens
gaagattgtgccagttcatacttccctggcaatgctaaggccaccttcccctctccccacccaagggctaggtttgaaggattaggtgtggccaggccaggaggaagtgtggagccatcccaagagatgcccatggcaggagaacacagatgagacagctggggacagtaacacagacctctcctcaaactaaagacttgccgggtgcggtggctcacgcctgtaaccccagcactttgggaggccraggcgggtggatcacctgaggtcaggagttcaagaccagcctggccaacatggtgaaaccccgtctctactaaaaatacaaaaaattagccaggcatgatggtgggcgcctgtaatcccaactactcaggaggctgaggaaggagaatctcttgaacccaggaggcagatgttgcagtgagccaagatcgtgccattgcactccagcctgggcaacaagagggagactccgcctcaaaaaaaaaaaaatagaaaaaaaaggactcaacgggcgtttgcatcctctgctgttccctgcagcctctgcccacaacggcagaaa

SEQ ID NO: 736788 - DNA, 589 bp, Homo sapiens
gcggcacttgaggagcccttcagcccaccactgcactgtgggagtccctttctgggctggccaaggctggagcccactccctcagcttgcagggaggtgtggagggagaggcgcgagcaggaactggggctgcgtgcggatgcgtgcggcgcttgcgggccagctggagttgccggtgggcgtgggcttggtgggycccgcactgggagcagccggccggccctgctggccccgggcaatgagggacttagcacctgggccagcggctgcggagggtgtactgggtcccccagcagtgccggcccaccggcgctgcgcttgatttctcgccgggccttagctgccttcccatggggcagggctcgggacctgcagccagccatgcaggagccttcccccgcctccgtgggcacctgtgcagcccgagcctccccgacgagcgccgccccctgccccacggcgcccagtcccatcgaccgcccaagggctgaggagtgcgagcgcatggcgcgtgactggcaggcagctccacctgcaaccctggtgcgggatccactgggtgaagccagctgggctcctgagtctggtg

SEQ ID NO: 736789 - DNA, 589 bp, Homo sapiens
gcggcacttgaggagcccttcagcccaccactgcactgtgggagtccctttctgggctggccaaggctggagcccactccctcagcttgcagggaggtgtggagggagaggcgcgagcaggaactggggctgcgtgcggatgcgtgcggcgcttgcgggccagctggagttgccggtgggcgtgggcttggtgggtcccgcactgggagcagccggccggccctgctggccccgggcaatgagggacttagcacctgggccagcggctgcggagggtgtactgggtcccccagcagtgccggcccaccggcgctgcgcttgatttctcgccgggccttagctgccttcccatggggcagggctcgggacctgcagccagccatgcaggagccttcccccgcctccgtgggcacctgygcagcccgagcctccccgacgagcgccgccccctgccccacggcgcccagtcccatcgaccgcccaagggctgaggagtgcgagcgcatggcgcgtgactggcaggcagctccacctgcaaccctggtgcgggatccactgggtgaagccagctgggctcctgagtctggtg

SEQ ID NO: 736790 - DNA, 669 bp, Homo sapiens
tgcactatcttgatgaataacggcattgagcacttttcctgtttataggttatttgggtatcctcctgtgacaacctattgactatttgtttgtctatctttataatcttcttgactgttgttctttacatattctgaacaagagattttttttcagtcatatatcttctcacatctatgcttatcttttcagtttcttgatcttggttttttaaaataaacaacatttcttaattttaatacaaaattgatcaatcttctatgataatttttttttttcttaaagtggagatggggggagtctcattatgttggccaggctggtcttgaactcctggcctcaagcgatcctcccaccttggcctcccaaagtgctggaattataggcatgagccaccacatccagcagataaatgtttttttatgttgtgtttaaaggagtccttccctaccccaaagatcatgaagacattctcctatattaygttcaaatagctttactggcttgccttatatatttacagcaattcaactgacattcacttttgtgtataatatgaggttggggtcaaatttcacttttttctacatgaacattcctatgtccatttatttaaaaggctagcctttcctcattgctccacaggccaccactgccataagtcagaa

SEQ ID NO: 736791 - DNA, 526 bp, Homo sapiens
tacagccacggcagcgtggtagctggttccacagccaatcacgatgagccgtcggcatcgtcgaatctccttcaagtggtccttcaagccacccaggagcactgcagggcacacgacaaggcgttaatgctgagtctacacagtcaccgcattccctgagactaggctcgggcggaggctccccaccgagtgtaggaattacctgtgttggtttcaaaattcacccgacctctcatagtattgaaaackgattctggctgttcgaagatctccttctgcataaacgcactgaagttacctggtcaaataaacgtctggtcagttttaatttcattatatttcactgcttttcattatgcagcagcgatagtaactcctgtaaagcttactgcagattcccaaaggcatccccagggattaccctgcctgacactcactaccatcagagggaagcaggtcaggaaccaggactatctccaatttacatattggaccctgcagcttgagaaagggagggatttgccca

SEQ ID NO: 736792 - DNA, 569 bp, Homo sapiens
tatccaactgcagacacattaactgtatagccttgttcagtggatcctcatttccagcagcccacttcattctttgatttgaaaagtgaatatttttcaacctgtatagcctgctatgtaatcataacttaagcaaccgttttccaacagacgactatgccttgaccccttcttctgggaaacctggcatttcctggtcctgggtcctgatgcakcttccttggttctaccctagtgggagggtcttacccacataaaacaatgggaatgagagttggaggatggtgaggtcagcaactgggctttccaaactgaaaattggaccacatgaggtagcaaagaaattttgtgacttatgtatatttttattgatctgattctattcatgcattactgttcgccaaaatattggaatttctgggacatttagagggacaaggaggtagaataatatttgtaaatcggagtggcccagaatatatgggagatatacctaggtctgcaggttaaaacccaaatgtctatagggctaggtaggtacctaaattagaaaaaggctagtataagtt

SEQ ID NO: 736793 - DNA, 638 bp, Homo sapiens
tattctcataatggagagtaagtcttatgacatctgatggttattataagggggaatttcctgtacaagctctcttttcctgctgctatccatgtgagatgtgacttgctcctccttgccttccactatgattgtgaggcctcctcacccttgtggaaccgtaagtccaattaaacctcttttttttttcttgtaaattgcccagtctcagctatgtctttatcagcagtgtgaaaatagacaaatacaccctacaattcctctctcttaactatccaaaggagttaaatacttttgattctatctctgaaactttttttcaaattattgccctcttttatctccatattaactagatggaatctttctgatcatcttcctaattttttctatactatctgcytcttcttccactttactccacaatttttggagatataataacaatgcagcaaagaaagaggaggacaaagaaaaatgatcacgaacaagattaatgtatgcagctcatttagccaacaaacagcacaatgctcctgtgaatttattcattctcagaacagtaggttgagaaaggtggagtaaacatacttaattctgcagtgttgacattgagtgggagccagagtcttgagcta

SEQ ID NO: 736794 - DNA, 569 bp, Homo sapiens
aacagttgtttctttcaatttttgaaatttgctttcataggggagggtacttttttgaagatgtatctatggtgttggttgggtcgggcactttgccattgattttggatgtgtgcagcagtgtggtctccatatgatttcttcagctgtaaacatcgtcagtggtgtctgtgatttcctgagtggcttagggtgcaattgttagtggagtggagactgtggcaaagttttgctggatacagcaatgccaggtggtcctatcttcagacctctgtggtggcagcagtgggctgagcatgcctgcccttgggctccagggtggcatatattggcactggtttcagtggttccaggcagtccaattcttggatccccaggtggctttctcaggtgctggtagtagcagagttgggctaggcaagygggtgggttttcaggcccctgggcaatggtcatggcatggatgattgtagtagcagtagatggactaatctctgggtcctacatggtctgtacttgtgttgacagtggctgtgatgtgctgggtgggccagtccgtaggcctatag

SEQ ID NO: 736795 - DNA, 578 bp, Homo sapiens
tcaccatcctttgtctaggattcattttatctcatccagcttaatggtgatcaatttgtcttaggcaagaccattcattgaacctcgggtcatcgaaagtccccaaatagcttctatcaggaaaacaatcttcttttccctgcataattatgacagcataaataaagggtgtaaaatgctacacccataaggatgttcataacaattggtggccactggcaaggtgcaagaggaaggcctggtgtgggattctctgtggrgcttgcctgggaaagtaatcagaagagtagaatctcagcttgtgcctctcaagggaatggagttgagaaccatggagcagagagtccctttgtttaggagtttgttttgaacttgtttagattccaggaagggagatacaactcccaccggaaagaggaaaatattcctagatgttggaaaaccatgtgccaaaaacactgagacacaactttactgcctctagcaggaggaaagagaaaacctttctgggccagctttacccatggacctcacccttcacaggctgccatctgggctgccctcagtaaaattctttt

SEQ ID NO: 736796 - DNA, 632 bp, Homo sapiens
atacattgaattcttcagctccgagatttctgtttggttctttttaaattatatctatctttttgttgaatttgtcagtcagatcatgagttgttctcctgatttcattgaattttctatctgtattctattgtatctcactgagtttccttaagatcattgttttgattactttttgggaaatttgtgaagtttaatttctttagggtcagttaatggagaattatgttcctttgatcatgtcatattttcttacttttccatgcttcttgtgtccctgtgttgatgtctgtgcctctgatgaaatagtcatctccaattttagagtagctttcatagggaaagatttttactggcatatgagtcctaggttggttgtgtgttggctctggttccaggtgggtgcagtagagcagtctccatgaggtttttttcagttgtgattgacatcattgataactgcagctgaatcartggctgaggctccaagagtttgtagcagcagtggtggcagggtcggttgttagagctctcagtggaaaagtctttgcggggggggtcctcttgttttttttttttcccacagtgggaagaagtagctgaggggatccctcttggtgttgggtctgaca

SEQ ID NO: 736797 - DNA, 592 bp, Homo sapiens
cctagtcaagcctcagcaatggcggatccccctcccccagcctcactgcctccttgcagtttgatctcagactgctctgctagcagtgagcaaggctccatgggtatgggaccctctgagccaggcatgggatataatctcctggtgtgccatttgctgagaccattggaaaagcacagtattagggtgggagtgtcccgatttttcaggtaccatctgtcatggcttcccttggctaggaaagggaattccctgactccttgtgcttcctgggtgaggcagtgccccaccttggttyggctcacagtcacgtgggctgcacccactgtccacaagtcccagtgagatgaacccagtacctcagttggaaatgcagaaatcacccgtcttctgtgtcactcacgttgggagctgtacactggaggtcttcctatttggccgtcttggagggcagagctccttgctttttttgtatactcactataggtttttgctttgtatttatcatgaggcttacaaaaaaacatcttatagtcataactggttattttaagctgttgacaacttaacttgattgaaaaaacaaagactc

SEQ ID NO: 736798 - DNA, 592 bp, Homo sapiens
cctagtcaagcctcagcaatggcggatccccctcccccagcctcactgcctccttgcagtttgatctcagactgctctgctagcagtgagcaaggctccatgggtatgggaccctctgagccaggcatgggatataatctcctggtgtgccatttgctgagaccattggaaaagcacagtattagggtgggagtgtcccgatttttcaggtaccatctgtcatggcttcccttggctaggaaagggaattccctgactccttgtgcttcctgggtgaggcagtgccccaccttggttcggctcacagtcacgtgggctgcacccactgtccacaagtcccagtgagatgaacccagtacctcagttggaaatgcagaaatcacccgtcttctgygtcactcacgttgggagctgtacactggaggtcttcctatttggccgtcttggagggcagagctccttgctttttttgtatactcactataggtttttgctttgtatttatcatgaggcttacaaaaaaacatcttatagtcataactggttattttaagctgttgacaacttaacttgattgaaaaaacaaagactc

SEQ ID NO: 736799 - DNA, 602 bp, Homo sapiens
aaaacaaagactccacaatactctacacttttatttcactctcccatttaaaagttttgacttcataatttatatatttttacattgaatatctcttaacattagttattattttcatagtttcactttttaaccttcgtacagaaaatgtgatttacatactgccattacattattagaatattcagaatttgactatgtacttaattttattagtgagttatatactttcagttgtttttgtgttactcattagacttcttttctttcaccttaaagaactctccttaaaattttccgtaagacagatttggtggtgatgaattccctcagcttttgtttgtctggaaaatcttctttcttcctcatttctgagaaacagatttgctgaatacagtattcytgtttggcaggatttttttatttgagcactttgaatacatcatcccactctctcttggtcattagatttctgctgagaggtctggtgttagatatattgggacttctctatatgttgtttgcttcttttctgttgctgcttgcaggatcctctctttgtctttgcctttgactgtttgattataatatatcattgggca

SEQ ID NO: 736800 - DNA, 628 bp, Homo sapiens
aatggtgctgagtaatatcttattatgtggacgtactagagcttatgtttagggctattacagccactataaacattcatctgtggtttttgtgtaaatgtaagtattgatttcactttagtatatatctaagagtgagattgctgggtaaatacttatatggttatacaataagtatacatactgccaaactattttcttatgttacattcccaccaacaaggtatgagagttttagtttctctatatactctttagcacttgctatttttttattttgtttttgttcttttagctttttaaattttgtttttaatgttttagttttagataggtgggtagcaatatctcattatggttttgattttcatttctctaatgtcaaatggtgcagattatcttttcatrtacttgtcctccacatgtctactctgaatttctattcaaatattttgtgccttttgtttaaattgggttgttttcatattacttagttttgaaaccataatttatgtatactggttccaaatcttttaacagatatagagttttttcctaatctgtggtttatctttgctgtttaacagtgtatttctgtctgtgacaatcatgtttttggtattatgtc

SEQ ID NO: 736801 - DNA, 614 bp, Homo sapiens
atgtgagaaagagctcaccattactggtcattagagaaatgcaaatcaaaactacagtgagataccatctcacaccaattagaatgatgattattaaaaagtcaggaaacaacagattctggagaggatatagagaaataggaacgcttttacactgttggtgggagtgtaaattagttcaaccattgtagaagacagtgtggtgcttcctcaaggatctagaaccagacataccatttgacccagcaatcccattactgggtatatacccaaagaattataaatgattctactataaagacacatgcagcactatttacaatcgcaaagacttggaaccaacccaaatgcctatcartgatagactggataaagaaaatatggcacaaatacaccatggaatactatgcagccatagaaaggatgagttcatgtcctttgcagagacatagatgaagctggaaaccatcattctcagcaaactaactcaggaacaggaaaccaaacactgcatgttctcacttataatgggagttgaacaatgagaatacatggacacgaggaggggaacatcacacactggggcctgtaggcagtagggggaaaggggaggg

SEQ ID NO: 736802 - DNA, 630 bp, Homo sapiens
ggtctccatgttgtgattctcatgcctgggaggagactgctgaggagctttaattattcaaaaccccacgaggagtggaatttgctttttctgggaaaaagtgtccacggtatatactaaaaaccaggattaaaggctattttccctaaggtgtcaagtgtaactgggaaagaaaggaaatacagtttctccttctgtcacaaacgatttctggaatcttttagtataatgtgcttcctggaagactctcatattcattaattaaactccacagttctcaaaccttattctttcttttggtgcagcttccaatgtcttgttctaagtgaccggtacagagaagttaaacatagacaagctaccaagaggttgcaaagacaggctcatactgcaagaaataaaggtgtgcattttactgatggacaaattaaatgcttatcttctatactccaaaagtcacagatagagtggcaytgaaaaattgacctaaattttctgtataaaggtgtagttcttagtagaaattctgtatcattttatgtgagtgatttcttcaatgtcagttcagttttcaaggtcttcagtatgttttttgaatccatcctgtacatgtgttgctttagagttagg

SEQ ID NO: 736803 - DNA, 641 bp, Homo sapiens
gagacccgcacgcaggttgaaagatcgttcctttattattattatttaaaaaatcttttctcatttcagtgtgggcatgcaggcactggaaaggatacatttttatttaccctgagttcttaatatttgcgaccttgagaacacagagagctgggcttagaagacacatttaaacttctagcaatttttgggccataaccaaagaacctattccccccaattcagcccctcacttcccccaggtacttcttgacatttgtccttaacaacttgttgagcacctatcctgtaccaggcctgagttctaggtgctagagacaatggtgaacaggcaggccaggtccctgctcttcgggggcttgaagtctagygaggacaatggataacagaccagcagcacgttcacaagatactttaggttgggatgagcgctatggggaaaataaaacagggtgatgagatgcaagacccttgatgtggacagggcttcttcaggcagaacggccaggaaggcctttctgaggagcaggcacatttgctgagatccggatgcccaaaaattgcaacccacgggcaggtctgggggttgaaagcaggaaaaagcttggtgttgcaaaagtgcaaggaagccacagccagtg

SEQ ID NO: 736804 - DNA, 671 bp, Homo sapiens
ggcacctgcttaattcacaggggtttggtgggcatcacgtggacaatgtggttgcacagcagtgggcaatgcaaaggaaaggaagtatgttagtaagtgcccctcccctgttgcacaaaacaggacacatgctgggattgcagaaaagcaataaatgctgcayaggtgaagaaaactattcaaggaccctggccaagtcacaggctacctgtggccctgaggggacagctcatgggttggcattaggggaagcagctctcaaggggcctgtatcctggggattcaactctgtgcctatgtggcattgagcctgtgtgaatgtggtgactgtcatgctgttttgctgtgtgtgcgtctgcatgcctgtgtgtttgtgtgtctctccaccttcgtggggggcaactgtaggtgtattatgagccttgggtctgtctgtgtgtacaatagcaatgtctgtgcggacttaaggacctgcgcccatatgtttgtgggactttctgggcatgcatgcttgtttatgaggccatacatccgggtattctgtgaactgctagcatggtgtgtatctgtgtggcagacagaaaatggctgggtgggattgtagggggcagcttgggcaaaggatcctcagtgtcaatcaaaatgggtctcagtgggaacccaagcagctc

SEQ ID NO: 736805 - DNA, 561 bp, Homo sapiens
cctgactcttttcattgagaatacaacacagtattattacctgtagtcactatgctatacaatagctctttagaacttttccatccagtctacctgaaacttcatagcctttgcccaacgtctccccatttctccgccatccctacaacccagcccacaagatcattgtaatagacacagaaacgcatttggcaaagtcatgttttttatgacaaaaaagaaattaaaaaactaagaatagaaggaaaattcctcaatttgataaagtacatttacagcagacttatagtgaacattattcttattgtcagaggcatttaaaccagagtgactccatcttgtataagggctgtttaaatraaaaaaggctgagacctactaggctgcattcctagtaagtctggtattctaagttacaggataagataggtcagcccaagatacaggtcataaagaccttggtgataagacagcatgcagtgcagaagccggccaaatcccatcaaaaccaagatggggataaaagctacctctggtcatcctcactgctcattacatgct

SEQ ID NO: 736806 - DNA, 601 bp, Homo sapiens
cttaatttcccaagtaccccagatgattcttatcatcaatgatgtttgggaaattttgatggaataacctgctatttcacaagtctcgatggaataaatccacttggtttttatgtttgattgcctatgcatttcatctactttgtgaaaactacaattgaactggaaattgaacctaaaaatggttctaaatgagatgaacttgtakgtttaactcttaaattttatattagatcatcaaaaggcagtacttgaaaaataaattttaaaaatgcaatagcaaagtttcataggttttttcaagaaagactgtggaatcttcttttttatatctttacatacaggtcagctttgaactatcaggagaagtacagaacagaaggcaaaaaatatcattttctatataaactctaaacataccgatacagtatgggataacctccaagtaatactaagtttaaaattaaaggatctaacaatgctaggtattatttaagtggtaaatacataaaactgcctctgtacagacacacaaaactggaatggtggttgtctctagaaatgagaattgtatggctggggtaaaagttatttttaaatg

SEQ ID NO: 736807 - DNA, 572 bp, Homo sapiens
tacatggtggtcccagaattttttctttccctatatacataaatacaaactttccccctgcccagtacacctctattcctgtttccctgattcaataagggctgaaatgagaacccagaagtcagccttgattattcccttttcctcatcctccccatccagttattcaataactgcagtcatttcaacttccagagtatatttggaccctgtcctcctctctccatctccacagcctgatctaaaccaycaccatcaatcactttccagtgattgatccactccacaacaccctctgccgggccctcaacttctcttgttcttctacaattcattcaacatagtagtcatagaccctcaagaaatgtaaatcagatcatcagctgctttatatttgtcatcttctataattctcacaacggtataaagagtctggtatttggccaatattaattttttgccctgccctgttctgattctatttctgatgaggcctcattttctccacgttcagatcttgaagtcacatatccttctccaactcctttctttgctccagaatttaccggctt

SEQ ID NO: 736808 - DNA, 628 bp, Homo sapiens
ccgcctctgatgggctgcaggccggaggtgaaggctctgaagtgggcagatcaaacgccatgtgggttgggccgccgttggggaggctgagaggagacgcaggttcccaggcatgagtgtgcagggtggagaacaggagagccaggccagatggggaccagcaaaggggcccatatgttcacccgtctttataataacacagcttccaattgttgattcattacggccaggtacagggttaattttttttttttttttttttttgagacagggtctcactctgtcacccagactggagtgctgtggtgacatcatggctcactacaggcgtgtgctaccatgcctggtttattatttttaaaaatgttttgtaggctgggtatggtggctcaagcctgtaatcccagcactttgggaygctgaggcggacggatcacctgaggtcaggagttcaagaccagcatggccaacatggtgaaactccatctctactaaaaatacaataattagccgggtgtggtggcaggcacctggagtctcagctactagggaggttgaggcagaagaatcgctttaacccaggaggcggaggctgcagtgagccaagatcacgccactgcactccagc

SEQ ID NO: 736809 - DNA, 526 bp, Homo sapiens
agtctgaatgtccttctttctagaatggaggtaataagccaatctatggcaacatggaattgtgcaatttatccaattgtacttaatggttccaaacttagtgaattgcctcaccattcttctagttgccttggtcaggaacctaggtgccatgattgcctgctttttctttgttcaactctcccacatgtaatgaattattaaatcctctggagtcttatcttctatttcctgactgtgtccaaatagtttcacccatgttgctactaccccaatctgagacaccatcatatcatcatacctgacttgaattacagcaagagcttgttcactgctcttatttcctgcagtcttstttctccccagcacattttccatgtagcagtcagagtgatctttctgaaacataaacatagtaatgacagtactctaaataaagtaagttcccttaggatcaagtttaaataccctaggatgatcatgaacccctttattacctggccttgtgtagcttctacttttgcta

SEQ ID NO: 736810 - DNA, 586 bp, Homo sapiens
tgaggggggaggagcaggaagggaggttggacaggaaggtggggccccgtgcctctgtctcctagcaatgtcaggcctgaccttgggagggcagatactgagccctgtcctgcagcagcatccacccctcatctgtcccaccccagctctacagcgtgcaagacagacagagtgtgtgcgatacatttcaaaggggcattctacatctatcatgtggatgtcataattcagtacratgcacaaacagtaccacaacgacttgacagtctggctggggcaatgagaattagataagcaaaagcaatatccaatttatcacatggacttggagctgagatgaaaacacatatgactgatgatgttcacggagtgacaggatcacacggatatacccagggtcacgtacagtttccatgcctggggctataagagctacaatggcatctctttttctcccacccagtaaagcacagggtacagcagatgtgtgagtgtcatgatataaagacgtactagacacaaagatgtgtgccttctgtaatgtccttaactgtctcctctccccaacgatacccccccacccgaa

SEQ ID NO: 736811 - DNA, 582 bp, Homo sapiens
cagaactggatgacacaactgggaagtcagttgggactatgaccaatgggaagcaggagatgagagacaatcaggtagaaaaacttccttttctctctgtctacggactcctctgagatgctgttccccctggtgagctactgaagcagtgcccccatgctgcaagagcatacctgctgggtgttggcactactgtgaagagaaarctgcagtcatcaccccttgaagtttcctgaatcactttcccttttatcctcaccatcgctgtctcaggctcacactccccttccccaaataaactgtcagtgacttaatcctgccttagtctctgttttctagaggacacaggcttaagtatgacaaagaataaccatacatttgatctaatttgtaagataaaagtaagtcattcacaaacactgatgcttttggaacggtcacaaaattacttgtgacacccttatagcacgtcccagcccacagtatctcacaatgctagggaatggtaggttagaatacagagtactggtgggttgcgattcaagtactcaaaggtgctctcatacctattcattaattcaa

SEQ ID NO: 736812 - DNA, 607 bp, Homo sapiens
ggagggggttgggggtgagtggggatgatttgcaggatgaaactgctccatctcagatcatcaggcattagattctcacaaggagcacccaacctagatccctcccaagtgcagttcccagtggggttcacactcctgtgaaaatctaatgctgccgaagatttgactggaggcagagctcaggtgctaatgctcccttgcctgctgctcacctcctgctgtayggccccattcccaaccagtacctctccatgcaggtgtggggaggcaatgcggtgtggggaggcaatgcggtgtgggggtgttgggaactgctatgataaggaacttgtattcagaatatatgcagaactcttattactcaataataaagagacaaataacccaattgaaaagtgggctaagggtttgaatagacatttctccaaagaagataaacaaatggccaataagcccatgcaaagatgctcaacatcctaatcaccagggatatcagaagggaaatgcaaatcaaacctgcaattaggtattacttcacacctactaggatggctgtagccaataagacagacaataacaagtgttgacaaggatgtggagaaattga

SEQ ID NO: 736813 - DNA, 573 bp, Homo sapiens
gagccagccctgccctccagactcacctccccccaagctgcagccgggggctccacgggtgggtagaatttgggcaggtcccaggctatcttcgtcataaaccacttgaaactcttgcagttaagggagctgcggagctttttctggactgcgacatccccagcggagaggtggcggtattcaggccggcgctggtaaatgtactctgcgtactcatccatccacacttcggccacccgcttaaggttctatggggcaagaagcaatggaggggtcagtctttccaagaagccaaagccaggcagtggggtgaaaagggtcctggcaggtcgaggtcaacccttcttattttatgttscatcaaaaatcccagccccaccgtgagtttaggccttctgtgtttctatttatcattatgcatgttttaagggcttcacagcttatagttggcccataggctgctgttgttttgcctgcccatcttccatcccatcttcttctagcgatagcccccactgattttcctctggggagccaccctgtctccctgtcagctcatgtggcaggaggaaa

SEQ ID NO: 736814 - DNA, 568 bp, Homo sapiens
agatttccatttgcagccagtggccaatttaattgaagcaatgattgatagaaaccattttaaggcaatgaaacagtttgacatgcagaggttttggcagtaagagtagacagggggtgaggagaagagaaagacactgacatttatgaagcccacttcccctccagaaatttagtacgcaagctttcccaaacacaccacaccacaccacctgtattaatatttatctaacatgtttttttacatcacctctggtctaactttgcacctactttagctgtatgctaagtaataatatctgtgaaattacaggttagctacacgaatacacattaatttagaatccacattaacttaaacacatgaacaagaaaacattcctgtgtttgctgcctaagatcgtctcctctgtcacactytgggaaacagtatcacctccttaattctcctggcaatgctgggagttggaaagaattagctctctttaaacaaaggaggaaacacaggttcagaggacttaagcaaccctccccaggtcacatagcaatgaatggttaagtagggattt

SEQ ID NO: 736815 - DNA, 644 bp, Homo sapiens
aatccagtctactattgagattctgactcgcatacttagaccaaacactcagaagatcttgactatgatctctagagctggaagtgtttgggattgtttatctcatccctgaatctttctgcaggtgtgattgtggcatatgtctttgcccataccctgagtgattttagtttcctgcctgagcccagcccatagatggaattgtgacatataccaaggccaagcaccaaggtaatatgactcttctcatctgcctgaacctgtcacttagaagtaattgtgacatatttctgaatccagcacgtrggtgatgtgactctcctcttgtgcctaggccttgcctacaagaaagattgtgtcatatcactgagcccagcacctatgtgatgtacttcttctgccatagttctccccacataagacactgtgacatatttctgggccaattacataagttaaatgagtctttgcttatgcctggatctcaccctcagaagaacttatgacatgttgctggacccagcacctaggtaatttgagtcttctctgctgcctggcccctgccaacagaagggattttaaactattgcttaaactagcacataaattttgtgactcacttcttttgctaagccctgctaacc

SEQ ID NO: 736816 - DNA, 644 bp, Homo sapiens
aatccagtctactattgagattctgactcgcatacttagaccaaacactcagaagatcttgactatgatctctagagctggaagtgtttgggattgtttatctcatccctgaatctttctgcaggtgtgattgtggcatatgtctttgcccataccctgagtgattttagtttcctgcctgagcccagcccatagatggaattgtgacatataccaaggccaagcaccaaggtaatatgactcttctcatctgcctgaacctgtcacttagaagtaattgtgacatatttctgaatccagcacgtgggtgatgtgactctcctcttgtgcctaggccttgcctacaagaaagattgtgtcatatcactgagcccagcacctatgtgatgtacttcttctgccatagttctccccacataagacactgtgacatatttctgggccaattacataagttaaatgagtctttgcttatgcctggatctcaccctcrgaagaacttatgacatgttgctggacccagcacctaggtaatttgagtcttctctgctgcctggcccctgccaacagaagggattttaaactattgcttaaactagcacataaattttgtgactcacttcttttgctaagccctgctaacc

SEQ ID NO: 736817 - DNA, 576 bp, Homo sapiens
cccacacgggctgggcacaggcagaagagacatataacctgagtgctaagtgcggggcctagaaacatgtgacaatgctccatgtaggcagggccaaggcagaatagaataacatcacctatgttctgggtccagtgatatatcacaatttcatctctgggctgagactcaaatcatgctgggtgctgggcacatgacatgtcagtcacacctgcaggtaggtccagggacgagattaacaatcctgcacatgtcccagttttaggtatgagagtcaacactgttgcrggaagtcagggaccccaaacggagggaccggctgaagtcatgacagtagaacgtggattgcaaatatttcatggacacttatcacttccccaatcaatacccttgtgatttcctatgcctgtctttactttaatctcttaatcctgtcagccaagaaggatgtatatcgtctcaggaccctgtaataattgcgttaactatacaaattgtacagcgtgtgtgtttgaggaatatgaaatgtgggcaccctgaaaaaagaacaggataacagcaatagttcagggaata

SEQ ID NO: 736818 - DNA, 576 bp, Homo sapiens
cccacacgggctgggcacaggcagaagagacatataacctgagtgctaagtgcggggcctagaaacatgtgacaatgctccatgtaggcagggccaaggcagaatagaataacatcacctatgttctgggtccagtgatatatcacaatttcatctctgggctgagactcaaatcatgctgggtgctgggcacatgacatgtcagtcacacctgcaggtaggtccagggacgagattaacaatcctgcacatgtcccagttttaggtatgagagtcaacactgttgcgggaagtcagggaccccaaacggagggaccggctgaagycatgacagtagaacgtggattgcaaatatttcatggacacttatcacttccccaatcaatacccttgtgatttcctatgcctgtctttactttaatctcttaatcctgtcagccaagaaggatgtatatcgtctcaggaccctgtaataattgcgttaactatacaaattgtacagcgtgtgtgtttgaggaatatgaaatgtgggcaccctgaaaaaagaacaggataacagcaatagttcagggaata

SEQ ID NO: 736819 - DNA, 576 bp, Homo sapiens
cccacacgggctgggcacaggcagaagagacatataacctgagtgctaagtgcggggcctagaaacatgtgacaatgctccatgtaggcagggccaaggcagaatagaataacatcacctatgttctgggtccagtgatatatcacaatttcatctctgggctgagactcaaatcatgctgggtgctgggcacatgacatgtcagtcacacctgcaggtaggtccagggacgagattaacaatcctgcacatgtcccagttttaggtatgagagtcaacactgttgcgggaagtcagggaccccaaacggagggaccggctgaagtcatgacagtagaacrtggattgcaaatatttcatggacacttatcacttccccaatcaatacccttgtgatttcctatgcctgtctttactttaatctcttaatcctgtcagccaagaaggatgtatatcgtctcaggaccctgtaataattgcgttaactatacaaattgtacagcgtgtgtgtttgaggaatatgaaatgtgggcaccctgaaaaaagaacaggataacagcaatagttcagggaata

SEQ ID NO: 736820 - DNA, 583 bp, Homo sapiens
ccacaggtgcaagagacacataaagcagagatcaaaatttgggtgtacatggtaagacttgcccattccagaaccccaaggatgaagagggggccacagttcaatcccatatctcctctgttctcaagtgggtaactagtgaatcacctacaaatagtgatcagcarcttcccaacaatatctcaagagttgggcgagtggggggaagtaatgcaagacccctgaagtatgacaacatacaaaaccccaagttaaacaccgtgcacttgccttttaagtcacccacttggccctcttctaagtgtactttccttccttttgtttctgttctgtagctttctaataaacttttactgctactctaaatcttgcctgctttatgtctcctgctttatgcccctcagttgagttgtttcttctgaggaggcaagaatcgaggttcctgatgactcatacccacatgaattcacttccagtaacaggtaacaggtaggagaaaagagtaacatcacctaggtgctggtccaggaatatgtcacaataccgtattaggggaggatccaggaaaagagtcatattacct

SEQ ID NO: 736821 - DNA, 587 bp, Homo sapiens
gagaccattctggctaacacggtgaaaccgcgtctccactaaaaatacaaaaaattcgccaggtgtggtggcgggcatctgtagtcccagctactcaggaggctgaagcaggaaaatggcatgaacccgggaggcagagcttgcagtgagccgagatcatgccactgcactccagcctgggcgacagagagagactcygtctcaaaaaaaaataaatgaataaaataaaatggcagcttgaatctgctgaaaccaaagttaaatattacagcagcagagaatgtagtaccacacacaaaaaatagattactattgagaagaaacatgagtaacattctttatctaaaaaaaaaaaaaaaaaaaaaatttcaaacaagatgcattctaagaacatgtttgacatactcccagaatctctagccaagacaattggtttcagatttccaggacaaggctacattatgaagactgtaacaggtagcttttttgatgtacaaattttaattaattattataatgtatatggaatactagggcaacatggcccaatcaaaaaaagtataaaatttttggaaaacaaccataaa

SEQ ID NO: 736822 - DNA, 550 bp, Homo sapiens
tacccaacatataaagagatcctattcttaggagctcctattcatataatagttatataaagactaataatccaatagaaacttgggcaaagggcatatacagatatttcacacaaaagggaataccaacagctcttgaacatatgaaaagatgttcaacttcacatcttaaaaaacaccaattaaaactttggtgagacactgttttttacctttagattgggaaagtttggtgacacactcttctaaggctctgggaaaacaggcactttcayataatgctgctgggaatgtaaactgatgcaacttttgtggactatctgtagaaatttcatatccacatgctcttaacccagcaagttcacttctaggcttttatcttactgatatattcatttatacatgtgcaaaatttcacacatacatggttgcttgttacaggggcgctgtagtatcaagagactggaaacaatataaagggccatccatcaatgggtactggttaaaataagttatgatacattgaaacaactgagtactaggcagtcag

SEQ ID NO: 736823 - DNA, 550 bp, Homo sapiens
tacccaacatataaagagatcctattcttaggagctcctattcatataatagttatataaagactaataatccaatagaaacttgggcaaagggcatatacagatatttcacacaaaagggaataccaacagctcttgaacatatgaaaagatgttcaacttcacatcttaaaaaacaccaattaaaactttggtgagacactgttttttacctttagattgggaaagtttggtgacacactcttctaaggctctgggaaaacaggcactttcatataatgctgctgggaatgtaaactgatgcaacttttgtggastatctgtagaaatttcatatccacatgctcttaacccagcaagttcacttctaggcttttatcttactgatatattcatttatacatgtgcaaaatttcacacatacatggttgcttgttacaggggcgctgtagtatcaagagactggaaacaatataaagggccatccatcaatgggtactggttaaaataagttatgatacattgaaacaactgagtactaggcagtcag

SEQ ID NO: 736824 - DNA, 521 bp, Homo sapiens
ggaggtaattgaatcatggaggcagatttttcccatgctgttctggtgatagtgaataagtctcatgagatctgatggttttattgtagttcccataatccccatgtgtcatgggagggacctggtgggaggtaactgaatcatgggggcgggttcttcccattcatttatgtttcccataaagcagtattgtgtttataatgcattatttgtgtttataaacatataatgcacrtataatgcattattcatgtttataaacattgttcatgttttataacaggtagttagctacatgagatctcatggttttataaagggcagttcccctgaacatgctctcttgcctgctgccatgtaagacgtgcttttgctgtgccttcaccctccaccatgattgtgaggcctccccagccatgtggaactatcaattcatttaacttattctttgtaaattaccctgtcttgggtatttcttcatagcagtatgaacatggactaacacaccttataagaggagg

SEQ ID NO: 736825 - DNA, 626 bp, Homo sapiens
ctgagtcagataggcaaagccagcattattttcatgtatggatgaggaactgatgaatcatggagtttgaatggctaactagagtctaaaagaatgtagaaacccataaaagacaaagagaataaagaaaacaagcagacaagagaattccacacaagtttgaaagataggaccagatggaggtaagtggtttagtaagacagaggaagcaaggatttaagtcacctgaagacaagttaccacaaatgaattagctcattcatcccaatggaaaacctgagatgctcaagatttggagacagcaggtacaatgaagggttgggktgaggtaaggagctaaaaatagaagttgaaagttcgtttgtgaagcagtcatgttcttctctcaccttgcacagtgaggccactagtttcccaggctggggatgaaagagtttttttgtgtgtaatttgaatgggaaaggctttgacttggggctacagagataggggcaacagaggggagggacatggaagtctgcaaacttaaccaacttctcttcatttctccctccctactactcttctccgcctcacttctctaaagaagatatacaaatggctaacaggtatgtgaaaaaatgctc

SEQ ID NO: 736826 - DNA, 631 bp, Homo sapiens
cttagtgccttagcccagggatcccaagatacatgaggtccactccaaacccttcccaggaaggtctctaaccatctatccccaaggatgcccagtgtcatgccccaccccctcgcagtactctcttacttccctcagagatgttcaggcatcagtgaaattctcaataacaactccattttagaggtgtttttcccccagaggaattactatgatggtagccattttgaatgtcaggccatgagggagctacttctgcttacatgggccttgtggccatcattcctggggcatgtgagrtaggatgtgaaagggcatgtgctcatagcttctctttttcttagcacagatgactgaaataagaaaaggttgaggcaaaaattagaagaagtcagcaaagtttctttgggccatccatctcctgttttggttcccttctcccacagtctttcccttcccctttacaggttcccagtgacttcctcctttcatacctcactggaagcaacataggaaagggacagggaaaggaaggacaaaagagaagacagagcccagggacactcagcatggtgcagccaagggaagcatgaagttgagaagaaccaggacaagtgacttttgattgagt

SEQ ID NO: 736827 - DNA, 539 bp, Homo sapiens
aaatttgtgtgggatcttagagggaagaatggcatgtagagaaaagcatcatgagacagggactcaaaatgcaggctctagtctcaaaaaaaaaaaaaaaaaaaaaatgcaggctctagtccccccctgacagtgattagtgtgaactgggataaatcaaatccccattctgggccatagtctcctaagcttggatgataatctttaagattacttccagcttttatgtttcaagagacaatgcattctgtgttcattcccccccgattcaataatttctcctaaagtgctctaaagtaaacgtactcrtcttagcttagacacatgagtgacagagaactctgcctcccagggcatttactccttgttggtcgatttgtggtttcagaatatgcctctctgtagtttcctcccattgatcttagtctggacactagaataatccagaacaagagaccctacctgtccacatgatagcagtttaaatatttaaagacattatcctgacctccattctcaagttaccctctccacttcct

SEQ ID NO: 736828 - DNA, 640 bp, Homo sapiens
agggaaaaatagagaaatacattgtgcaattaagccaatagggaagtaagctacaatgcagttaacagctatacctaaaccctctcagaggacacaagacttttaccccactctcatagaagcaaagtcttaggcagatgatatagttttaaagaaatcactgggaaatctatacttaattgaagcctggaatttgcttctggaatttgtttcctttgtttctcttgcttcctgtttatttcttaagtaatggaagcacaagaatcagcaacattattttctaacctttggagaaataactaaacatggacaaaggagatcctaagaagcccagagtcwaaatgttatcataaactttttggtgcaaagttgttgggagaagcacaagaagaagcaccaaatgttttagtcagcattttggaaatttctgaaacatgcttttaagtgtagaagaacagatctaaacagaaaagaaatttgaaagcatagcaaaggtgaacaaggaccattatgaaagaggaatgaaaattcatatttttcccaaaggagaaagaaacaaaaatccaaataattgtgccgctgaccaaatactagtttgtaactgaaaaacaaagttgtaggaatttcagtgacattctta

SEQ ID NO: 736829 - DNA, 613 bp, Homo sapiens
catggcaaatcaccagagcattcagtgaagaaagggtaaggagagcctttattagcaaaaaatatttacatgagctgcttagaaatggctcattggtcatggagtttctaagccagagttgctgttagttcattgatagaaatgccattactgggcaaatgtttttccaagaacagctcaacttaatcactgcagtcttaaagaatgtcttgtgataaatcttttgcgtttttttgtttgtttgtttktttttttgagatggagtctcactctgtcgcccaggctggatacagtagcgctgtagtgagctcactgcaaccttcacctcctgggttcgagtaattctcttgcctcagcctcctgagtagctaggattacaggcacatgccaccacacctggctatttgtatttttagtagagatgaggtttcaccacattgaccaggctggtctcaaactcctgacctcaagtgatcagcccgcctcagcctcccaaagtgctgggattataagcgtgagccaccgtgcccggccatcttgtgataaatcttatcaaagggtgtatgaaagaagtgaaaggatttttagaaagttcttggaacagttcttatct

SEQ ID NO: 736830 - DNA, 590 bp, Homo sapiens
gaagtgctatggaataagacaatgcagtgattttgccatgcatttgattgcaaagcaatacaaagccaatcagcccattctgtaattagcccatctttcatgagagtcttacctctcagtagcgggtagggacattttcatttcttttaggtagccaaaggcatgcttctctaatccaaacatgcaaagagctatctscccataacttccattagccagccccagaagtacatttcctatctagttattacaaccaaagctctctcatagtgtgaagtaatttctgctaaccccaaaagtcaaaaccattagataaggcaatgcaaaatacaacagagctttagattttgagaaggatttatctgctttcaattccagggtttcatgaggaaaacagaggtttttcccaaaacagggtctgtggtgcctcctctgtttttcccagggagtcccataaaacttgaatatccacttttaaaaagctgacttttaaccatagtactctttaaaaaatctttttaagtctcttattacatgactttagccaggccaaacagccaatatttttgtgctcagagaaaggaaaattc

SEQ ID NO: 736831 - DNA, 550 bp, Homo sapiens
caaggctgtttggagcccttcatgaagggaaattctttttaaatttttattattattttaaaaaaccagaatatttattgcatgactaatggttgaaagttttttttttttttttgagatggagtgtcgctctgttgcccaggctggagtgcagtggcacgatcttggctcactgcaacctctgcctcccaggttcaagcaattctcctgcctcagcctcccgagtagctgggactacaggtatgtgccaccatgaccagctaatttttttttgcatttttagtagagacggggtttcaccatgtcagccagcatagtcttgatctcttgaaccttgtgatccagccgccttgggctcccaaagtgctgggattacaggggtgagccaccgcacccggcctatyggttgaaattgttaagatgactcggatgctgcaacagctgcccttttgtgtttaggtgttgtttcttcacgaaatccatgcctgaatctgtggtatacagcttttaggtgtctcattcgaccagtcccagtggcatttcatctttg

SEQ ID NO: 736832 - DNA, 603 bp, Homo sapiens
ggggactggggaaaatcctaattgggctacatcttcttaaaatcactttttatttgtatatattgaaaatataggccgggtgcagtggctcatgcctgtaatcctagcactttgggaggccaaggtgggtggattgcctgagctcagtagtttsagaccagcctgggcaacatggtgaaaacccgtctccattaaaatacaaaaaataagttggcacggtggtgtgcgcctgtaatcccagctactcaggaggttgaggcaggagaattgcttgaacccaggaggcggaggttgcagtgagccgagattgcaccactgcactccagcctgggtgacagagtgagactctgtctccaaaaaaagaaaaaagaaaatataatagaatgagttcattatgacaagattctcacgccagggctcaaaccttttttaattttttattttatttttcacttatgacaaatacatatgggaaaatgtctgatacaaccaaaaattggggtgcacatacacagctcaaaatacaagtcttagaaggatttgaaaactagctcctcaccacccaggaaaaaagctccaaaaattctatctacaagtcagaga

SEQ ID NO: 736833 - DNA, 603 bp, Homo sapiens
ggggactggggaaaatcctaattgggctacatcttcttaaaatcactttttatttgtatatattgaaaatataggccgggtgcagtggctcatgcctgtaatcctagcactttgggaggccaaggtgggtggattgcctgagctcagtagtttcagaccagcctgggcaacatggtgaaaacccgtctccattaaaatacaaaaaataagttggcacggtggtgtgcgcctgtaatcccagctactcaggaggttgaggcaggagaattgcttgaacccaggaggcggaggttgcagtgagccgagattgcaccactgcactccagcctgggtgacagagtgagactcygtctccaaaaaaagaaaaaagaaaatataatagaatgagttcattatgacaagattctcacgccagggctcaaaccttttttaattttttattttatttttcacttatgacaaatacatatgggaaaatgtctgatacaaccaaaaattggggtgcacatacacagctcaaaatacaagtcttagaaggatttgaaaactagctcctcaccacccaggaaaaaagctccaaaaattctatctacaagtcagaga

SEQ ID NO: 736834 - DNA, 614 bp, Homo sapiens
gaggagtagtcaaatgagattatgaatctaccttgttaagcatatattaagcatccaaaaaagtattggtttttgatattgataagtggctcgtttgaggtcacacagcttctacatggcagagtccaggtctactgactgcaaagccaccagaccatatgtttctctatcatacgaacagcaaattaagtcacctgcaaacccacagcccagtttagcaccatgctyaaatcaaacttccaagaaagttactctgacacacctttagcggtatgcacagtcattgggtcacagcctggaaaattaggctctgccacacctttagcagtatgttactctgccacacctttagcagtatgcatagccattgtgtcacagcctgggaaattaggctctgacacacctttagcagtatgttactctgacacacctttagcagtatgcacagtcattgggtcacagcctggaaaattaggctctgacacacctttagcagtatgttactctgacacacctttagcggtatgcatagccattgtgtcacagcctgggaaattaggctctgacacacctttagcagtatgcatagtcattgtgtcacagcctgggaaatt

SEQ ID NO: 736835 - DNA, 614 bp, Homo sapiens
gaggagtagtcaaatgagattatgaatctaccttgttaagcatatattaagcatccaaaaaagtattggtttttgatattgataagtggctcgtttgaggtcacacagcttctacatggcagagtccaggtctactgactgcaaagccaccagaccatatgtttctctatcatacgaacagcaaattaagtcacctgcaaacccacagcccagtttagcaccatgcttaaatcaaacttccaagaaagttactctgacacrcctttagcggtatgcacagtcattgggtcacagcctggaaaattaggctctgccacacctttagcagtatgttactctgccacacctttagcagtatgcatagccattgtgtcacagcctgggaaattaggctctgacacacctttagcagtatgttactctgacacacctttagcagtatgcacagtcattgggtcacagcctggaaaattaggctctgacacacctttagcagtatgttactctgacacacctttagcggtatgcatagccattgtgtcacagcctgggaaattaggctctgacacacctttagcagtatgcatagtcattgtgtcacagcctgggaaatt

SEQ ID NO: 736836 - DNA, 500 bp, Homo sapiens
acatacacacagaacaggccatgacattaagtcctcaaatcagatcccattcccaccagcctgccttgtgctgaaagacctctggttacagaacatgccagatgatggagttgaaacgttccatcgtaatctgaagcagatcctctgctcggtatggaatgcctttatgtaactgcatatcyatgtatgttcacccactacatcagtcctgagggttcttgctctctctctccctccctccccaaatcccaacctcccgccaccaagattaacaggaactaaatgctaaggaaatctcgactctctattcaatagacttcccatctcaaagtgattaaagattccaaaaagcttcattgtctcctactacctccccctgagcctgctcggtgtctcaaattcccacattggttaggcctttggatagggggtcttaaaaatgcaaacaaattctctcttgggaaaataactagcagccattgattctcaaggctgttaga

SEQ ID NO: 736837 - DNA, 625 bp, Homo sapiens
ttctttcccagattccatgttatttctgccacaaccagttgctttctctccacatcctgggtgggaccaggaccgtcctcccgggcctctgagtggcatgtctggtatctgactccaggaagagggcacctcatgctgatggtgtgtgtcctgggccccatggcagaatagaggattctctgccatagcgctgacattcagtggrgagacagcatgtgcttggcagggcttttgtggtgtgttttatgaatccccgtctatgctgcttctctttgcctactcgccggttgcatctcatgccgcttccccttgctcccccatccccagccgatctgactttctgagctttggccatactcagctcgtccccacctcagggcctttgaacatcttgtttcttcttcctagtttgttgtgaattgctccctctccccatcgctttggcttctctcaacttaagagtcacctgctcagagagggtttccatggtctcctgtgtaaggcagccccctgtgtttcttacacagatcctaaaacatctgagcatgttttccttaattgttcacttgctgtttgtctagtcactcgtctgtgagctccatgagcgcaggagcaatatctgcct

SEQ ID NO: 736838 - DNA, 625 bp, Homo sapiens
ttctttcccagattccatgttatttctgccacaaccagttgctttctctccacatcctgggtgggaccaggaccgtcctcccgggcctctgagtggcatgtctggtatctgactccaggaagagggcacctcatgctgatggtgtgtgtcctgggccccatggcagaatagaggattctctgccatagcgctgacattcagtggagagacagcatgtgcttggcagggcttttgtggtgtgttttatgaatccccgtctatgctgcttctctttgcctactcgccggttgcatctcatgccgcttccccttgctcccccatccccagccgatctgactttctgagctttggccatactcagctcgtccccacctcagggcctttgaayatcttgtttcttcttcctagtttgttgtgaattgctccctctccccatcgctttggcttctctcaacttaagagtcacctgctcagagagggtttccatggtctcctgtgtaaggcagccccctgtgtttcttacacagatcctaaaacatctgagcatgttttccttaattgttcacttgctgtttgtctagtcactcgtctgtgagctccatgagcgcaggagcaatatctgcct

SEQ ID NO: 736839 - DNA, 317 bp, Homo sapiens
tccttctgtactcagtgccccacttaagagttattttttgttagggtcagtgaatgtattattttttgttagagtcagtgagcagtaaagcctttcagatttcatctaaaaatagctttattttcactttattcttagatgatattttagataggytaacagttatctcccttcagtcttttgaagatattatttcattgctgtctagcctctactgttgctgagtattgataggctgtcaaattgccattactttataaataatgtgtcgtttctctctcattgcttttaagatttttcattttgtcattggtgtt

SEQ ID NO: 736840 - DNA, 641 bp, Homo sapiens
tgttagtccaattgcatcgctataaaggaatacctgagacggggcaatttataaagaaagaggtttatttggcgcacggtccttcaggccatacaataagcatggcacctgcatctgctcggcttctggtgaggtctcaggaaatttttagccatggcrgaaggaaaaaggagctggcatgtcacatggtggaagagggagcaagagagagaggaggaggtgccaggctcttttaaacaacaagctctcacataaactaatagagtgagaactcactcattaccatggggagggcaccaagccattcatgagggatccacccccataaaccaaacacctcccattaggccccacttccaacgttggggatcacatttcaacatgagatttgaaggggacaaatatccaaactatctcatgtggtttgtaatttttgactgagaattcaactataaactttttaaaataaaagctttatgtatctttcgtaaaaatatttcctcaaaagtgttttacaaccatttcttccagatgctccagagagttcactaatctaggattgtttttatattaatttgttggctcaggtctcccacaccacataagaactataaattctgactaaacctgggcatagtata

SEQ ID NO: 736841 - DNA, 535 bp, Homo sapiens
ggggagacaggcactgcagatacggaactccaattctcttaccatctgctcagtttttttacctctcggtggccccaggaactgtttcctcatattaaattctgggctattgctggtgatacactcagctatgtatatttgttttggttttctcaggggcagtgaatccagcttgcttctatgccatcattatagaatcaggagctctttatttcatgtcctttagatagatagacattgctccccagtagcaagatttytggatcttatcataattttatttttaatattttgaggaatcaccatattgttttccatagctgctgcacctttttacgttcctaccaacagtgtggaggggttccattttctccacatccttgccaaaacttgttatcttttgtcttttttatcatagccattctaacaggaattaggtgatatctcattgtggcttcaacttgcatttccctgatgattagttatgttgagcattttttcatgtacctgttggccatttgtgtatcttcttttg

SEQ ID NO: 736842 - DNA, 535 bp, Homo sapiens
ggggagacaggcactgcagatacggaactccaattctcttaccatctgctcagtttttttacctctcggtggccccaggaactgtttcctcatattaaattctgggctattgctggtgatacactcagctatgtatatttgttttggttttctcaggggcagtgaatccagcttgcttctatgccatcattatagaatcaggagctctttatttcatgtcctttagatagatagacattgctccccagtagcaagatttctggatcttatcataattttatttttaatattttgaggaatcaccatattgttttccatagctgctgcacctttttacgttcctaccaacagtgtggaggggttccattttytccacatccttgccaaaacttgttatcttttgtcttttttatcatagccattctaacaggaattaggtgatatctcattgtggcttcaacttgcatttccctgatgattagttatgttgagcattttttcatgtacctgttggccatttgtgtatcttcttttg

SEQ ID NO: 736843 - DNA, 528 bp, Homo sapiens
ttaaaattaaaaaataaaataaatattttagagacacaaaatttttaaacttggttcaactggcaagaagaaaaggctatctacaattctgagtctagatattttccattgcctgggaagataatttacataatgtatatatcaatgtwttatttataagatgactgagatcatattaatgggtaaattatcacaaagttagtgaaaatttttaatctcctgaacaaatacaattccatggagcaaattacaatttcctacaaaaagtctactctgtatttacttaagtttataggttataacctttaatagctgctatcacacattgaaatttcaaagaaacaggccaggtgtggtgactcatgcctataatctcagcactttaggagtactaagtgggaggatcacttgagccggggaatttgagaccagctagggcaacatagtgagacctcatctctacaaggtctactttttaaaataatagttttaaaaaattagccaggcatggtggtgcacatgtctggt

SEQ ID NO: 736844 - DNA, 584 bp, Homo sapiens
tgaacttgatacagtttaaataggctcatctgagcaaagtacagaacagccttcatttcccaggttctgtcagtcagcctgctggattgactggtgatgtcttgattgggtatgattccccttgactcatttctctgttgctggtaattaaaagctgtctagttttgttctcatttaacaataagtgaaagggtaatgtctgccagacttttccattcacttggtgtttgtaacagttgagagccttggagcaccatgaattctaagctgaaggtaactatcagtacagatagtgtattggtgttttgcacctgggagctgactataaacctcaaagccaatcggaaaacagtccccagggtaaatggatawattgtcatagatgaccttctcctctcattccagctttgaaaaacagaactttctgtgagtaggtagaataagctgtctgtcatttgcagtttccagcagtctctgagactagtgcatgtgcctaattttacactggaaggagaaaccatgtcgaaacgcagaaggcaaaataagagttaggctctctctaggctcagtatgtttagttctgg

SEQ ID NO: 736845 - DNA, 586 bp, Homo sapiens
ttttttttttttttgagacaggatcttgctctctcactcaggctggagtgtagtagcacgatcatagctcactgcagcctcaaactcccaggctcaaacaatcctctcgcttcagcctccctactagctggaactacaggcatgcaccactatacctggctaagtttttaaattttttggagatagggtctcactatgtggcccaggctggttcccaactcctggcctcaagcgatccttgygccttggcctcccaaagtgctgggatttacaggcatgagccaccaggcccggacccagattcttttttttttttttttgagatggagtcttgctctgttgcctaggctggagtgcagtggtgtgatctcagctcactgcaacctctgcctcctaggttcatgctattctcctgcctcagcatcctgagtagctgggactacaggcacccaccaccatgcctggctaattttttgtatttttagtagaggcagggtttcaccgtgttagccaggatggtctcgatctcctgaccttgtgatccacccacctgggtctcccaaagtgctgggattacaggcgtgag

SEQ ID NO: 736846 - DNA, 617 bp, Homo sapiens
accattttgcattcctaccagcaatatatgtaggtttcaatttctccacatccttgtcaacacttgttattgtctgtcttattggctacagccatcctagtaggtgtgaagtaatacctaattgcaggtttgatttgcatttcccttctgatatccctggtgattaggatgttgagcatctttgcatgggcttattggccatttgtttatcttctttggagaaatgtctattcaaacccttagcccacttttcaattgggttatttgtctctttattattgagtaataagagttctgcatatattctgaatacaagttccttatcatagcagttcccaacacccccacaccgcattgcctccccacaccgcattgcctccccacacctgcatggagaggtactggttgggaatggggccrtacagcaggaggtgagcagcaggcaagggagcattagcacctgagctctgcctccagtcaaatcttcggcagcattagattttcacaggagtgtgaaccccactgggaactgcacttgggagggatctaggttgggtgctccttgtgagaatctaatgcctgatgatctgagatggagcagtttcatcctgaaatca

SEQ ID NO: 736847 - DNA, 589 bp, Homo sapiens
gaattaatgaataggtatgagagcacctttgagtacttgaatcgcaacccaccagtactctgtattctaacctaccattccctagcattgtgagatactgtgggctgggacgtgctataagggtgtcacaagtaattttgtgaccgttccaaaagcatcagtgtttgtgaatgacttacttttatcttacaaattagatcaaatgtatggttattctttgtcatacttaagcctgtgtcctctagaaaacagagactaaggcaggattaagtcactgacagtttatttggggaaggggagtgtgagcctgagacagcgatggtgaggataaaagggaaagtgattcaggaaacttcaaggggtgatgactgcagytttctcttcacagtagtgccaacacccagcaggtatgctcttgcagcatgggggcactgcttcagtagctcaccagggggaacagcatctcagaggagtccgtagacagagagaaaaggaagtttttctacctgattgtctctcatctcctgcttcccattggtcatagtcccaactgacttcccagttgtgtcatccagttctgtggtggcta

SEQ ID NO: 736848 - DNA, 565 bp, Homo sapiens
atccctacttaaccattcattgctatgtgacctggggagggttgcttaagtcctctgaacctgtgtttcctcctttgtttaaagagagctaattctttccaactcccagcattgccaggagaattaaggaggtgatactgtttcccaragtgtgacagaggagacgatcttaggcagcaaacacaggaatgttttcttgttcatgtgtttaagttaatgtggattctaaattaatgtgtattcgtgtagctaacctgtaatttcacagatattattacttagcatacagctaaagtaggtgcaaagttagaccagaggtgatgtaaaaaaacatgttagataaatattaatacaggtggtgtggtgtggtgtgtttgggaaagcttgcgtactaaatttctggaggggaagtgggcttcataaatgtcagtgtctttctcttctcctcaccccctgtctactcttactgccaaaacctctgcatgtcaaactgtttcattgccttaaaatggtttctatcaatcattgcttcaattaaattggccactggctgcaaatggaaatc

SEQ ID NO: 736849 - DNA, 570 bp, Homo sapiens
cctcctgccacatgagctgacagggagacagggtggctccccagaggaaaatcagtgggggctatcgctagaagaagatgggatggaagatgggcaggcaaaacaacagcagcctatgggccaactataagctgtgaagcccttaaaacatgcataatgataaatagaaacacagaaggcctaaactcacggtggggctgggatttttgatgsaacataaaataagaagggttgacctcgacctgccaggacccttttcaccccactgcctggctttggcttcttggaaagactgacccctccattgcttcttgccccatagaaccttaagcgggtggccgaagtgtggatggatgagtacgcagagtacatttaccagcgccggcctgaataccgccacctctccgctggggatgtcgcagtccagaaaaagctccgcagctcccttaactgcaagagtttcaagtggtttatgacgaagatagcctgggacctgcccaaattctacccacccgtggagcccccggctgcagcttggggggaggtgagtctggagggcagggctggctc

SEQ ID NO: 736850 - DNA, 531 bp, Homo sapiens
ctaagtaaagcaaggtaaagggctggacagtgatgaaggaggggattttctgctttagacagggagggcagggagggcttctctaaagaagtgatgttcgtgtagaaacctaaacgaaatgaggaaatgagtcatggaaacatctggaagaagaacactctgagcagaggcaacagcaagtgcagaagcctagggtgaaagtgtatctgtgagttgtaggaatggcaagatggcaggyatggcagagagaggacgaggaagagagagaggaaatgagatcagcatggaagcagggactcactaatgcagagcaatggaagccactgcggcaacctgggtgccatgctacgggagatgagaggccctggcaaggcttgagcaggggtgtgataggatctgacttctgaaaggattcttctagctgctctgtggggaacagattagaagctggaggacccatagtccagcgcagagaagttgttggcatgatctgagtggaggtggaaagctattaagaaatcatggccttaa

SEQ ID NO: 736851 - DNA, 625 bp, Homo sapiens
gccaagcaaggctgcgatggcaaagtcctaggctttgtagaccccttggatcccaaaggggaacaataggctgagttgcaccttggttgtgtgcatcctcatagctgacattcacttgttaatggtggcactggttctgaggggtgtgtgtaaactctcargtacttctggctccttgtgagtgtgcaaaagatgggtccaacactcaaaaggcagtcttccaacagcaaaagtgaaggtgctggcacttgtagacatatgaagaccaggggtgaggggatacagtagactcttaaactcaaaaggcctattgactctgcacttgatttttcttacagaagacacacttgatgcttccttgacatctattcccatactgtcagccaaatatgctcctgacattcttaaactatttcctttagatctgacactctagcctattagagcatgtcatgtgcctatcgacctcccatgactagtgactagttcaggaatgggtgtgcaacctatctacatgggcatgccacaaaaacccaaggagaatattgctggaactggctgtttcaagaagtgcttttagaagaaaagagatgtgatcaacaatagtctagagccttgcggtgtc

SEQ ID NO: 736852 - DNA, 519 bp, Homo sapiens
gtccctaaactggggcagtggtcaaagacaaatgtttgctatgccatgttgctaatttttcaggtaagttcagtccataaaaacattcaaaaacttatgttaaatggtgaattgtaaaacagaaatgaaatgctgctagtagattcagtctgatcttcagacatgttttgttcaatgggtcaaaaatgggtcaaaaatggatcaaagtaaatccatgttcttattctttcaccacagtcagcctagtgacaacaygaatgctctagttcctcagtaagtgagactactaaaatgggagcctgcatctttctccactgtccttttacatgcaattacctgactctacctttagcctgtcaacaggttaaaggtatttggatgaaaatacagtggggccctgaatcacctaagaactataggtgctatcttctgaaaatggaaaaagggggggataggagtgggtgtagtactagagatcctaccaggctaaggacagggatgctacacccttgaggatcc

SEQ ID NO: 736853 - DNA, 519 bp, Homo sapiens
gtccctaaactggggcagtggtcaaagacaaatgtttgctatgccatgttgctaatttttcaggtaagttcagtccataaaaacattcaaaaacttatgttaaatggtgaattgtaaaacagaaatgaaatgctgctagtagattcagtctgatcttcagacatgttttgttcaatgggtcaaaaatgggtcaaaaatggatcaaagtaaatccatgttcttattctttcaccacagtcagcctagtgacaacatgaatgctctagttcctcagtaagygagactactaaaatgggagcctgcatctttctccactgtccttttacatgcaattacctgactctacctttagcctgtcaacaggttaaaggtatttggatgaaaatacagtggggccctgaatcacctaagaactataggtgctatcttctgaaaatggaaaaagggggggataggagtgggtgtagtactagagatcctaccaggctaaggacagggatgctacacccttgaggatcc

SEQ ID NO: 736854 - DNA, 623 bp, Homo sapiens
tgttcctttccatgtttagtgcttccttcaggagctcttgtaaagcaggcctagtggtgacaaaatgtctcagcatttgcttgtctgtaaaggattttatttctccttcacttatgaagcttagtttggctggatgtgaaattctgggttgaaaattcttttaagaattttgaatattgccccccactctcttctgacttgtagagtttctgccaagagatctgctgttagtctgggcttccctttgtgggtaatccgaccattctctctggctgcccttaatatttttccttcatttcaactttggtgaatctgacaattatgtgtcttggtgttgctcttctcaaggagtatctttgtggagttctctgtatttcctgaactttgaatgttgacctgcctttctaggttggggaagttctcctgggtaatatcctgargagtgttttccaacttggttccattctccctgtcaatttcagatacaccaatcaggcatagatttggtcttttcacatagtcccgtatttcttggaggctttgttcatttctttttactctttttttgtctaaacttctcttctcacttcatttccctcatttgatcttcaatcactgatacc

SEQ ID NO: 736855 - DNA, 551 bp, Homo sapiens
gatcatgattgagattgagaaggtatgagcctaaatgtaggactaaattgaattagccttggcctaaggttctcaggtagttgagctataattaaacgcctttggccaatcctttttcaagtatcagagcatcttgggagggttagccctgggcaaaacatctgcttcaccacgccccatgaaggcctagaggctgggatgccctgagaggccacatgagaatgcacaggagggagacgtttactgtagtcctagcctaatcccaagttctattaattcagcaagtgatyttttcaaagggcactctaatattcaaaattctctgcatcttcttatatataccttctgctaaacactatacattttaggagataagaataataatacatcaataaaatgtaaaagtatttttcctctttctaattaaaaatgacatacaagtagttcttgaattagaactactaattccctaatgataataatattattattttctgttacagaatgttttatagacatctagcaagtggcatcacatttccattgaatta

SEQ ID NO: 736856 - DNA, 551 bp, Homo sapiens
gatcatgattgagattgagaaggtatgagcctaaatgtaggactaaattgaattagccttggcctaaggttctcaggtagttgagctataattaaacgcctttggccaatcctttttcaagtatcagagcatcttgggagggttagccctgggcaaaacatctgcttcaccacgccccatgaaggcctagaggctgggatgccctgagaggccacatgagaatgcacaggagggagacgtttactgtagtcctagcctaatcccaagttctattaattcagcaagtgatcttttcaaagggcactctaatattcaaaattctctgcatcttcttatatataccttctgctaaayactatacattttaggagataagaataataatacatcaataaaatgtaaaagtatttttcctctttctaattaaaaatgacatacaagtagttcttgaattagaactactaattccctaatgataataatattattattttctgttacagaatgttttatagacatctagcaagtggcatcacatttccattgaatta

SEQ ID NO: 736857 - DNA, 621 bp, Homo sapiens
tggaatgggagaaggggaggaaaaaaccaacacaattttcgggccacctagattttgttatttttaaggcactcaagagcaaacaatgatttcttacagatatacctaaatactgccagaatcagttttcacactattaagaatcatcaaaaattccctaggagtaaattagctattttrgggatgtgcctcatgccaccaaggcattatttagcaaagagtttgcaagaagcttggagtcctagtttgaaaatagctaaagatgctaccatggtgactcccaggcctcccaccacactgggaggtgtgaccagatagaggattcctgctccaatgatggcccccaggcactgggctgcgatgtagaagacagacttggcgatgctgatcttcctggtgcacaccatggccacagtcactgcagggttgatgtggccaccgctgatatggccaaagcactgcaccatggttgcaatgctgagtccaaagcaaagggagatgagaaccatgtcgaccggtaaaggcttttctgttccaccccagttgatggtggatcccaggctgaggagaacaaaaataagcatggccagaaattccgctgtgactgctttccagaaagct

SEQ ID NO: 736858 - DNA, 549 bp, Homo sapiens
cacagaaggaaatctcagaatctgcccctacacccaaatgaactcctcctgcagattttccagtaagaagctcttgttgggaaatttcaaactggtcttaaatggacagcgactatcatggaaccagagtgaaccaacacacytgaaaggaggcagagctgagtagatgcaaaccacaaagtgaggcccgcctgacagccagttccccaatccacccttcttatccctcaaaacagacaagcaagcaaaactattcatttgaaccttattgatttaaaaataatgtaatctaaaatacattaataaaaacctatcattctctcacagaatacataatctatgatttatagcttggaaactaaatactaaactcacaattagaaagtacacgtaaagggtttctttaagttagacacttaatacggtttctttcaacaaactatgcaatctcatgacatggatttggaatgtaagaaatataaaaaggtgtttaaaaatgaacagaatattcctgatcatttctctgagaattaaaaatatacgttctcc

SEQ ID NO: 736859 - DNA, 618 bp, Homo sapiens
ggcagaggagcggggcaaggcagaaacattgagtccatcacaccacatgaggacaagaaggtctggaaaatttaaatgacttgccctagatcacgttattaaattcaagttgattagtcaaatatttttccttttygccaatctgatatagaattgaacatgaggcagagagaaaagttactttatgtctgcatacagttgctaataaagccttttctttttttcttttttctttttttttttgaaatgggtctctctgtcacccaggctggagtgtagtggtatgatcttgactcactgcaacctccgccttctgggttcaagtgattctcctgcctcagcctcctgagtagctgggactacaggcgtgtgccaccacgcctagctaatttttgtatttttagtagggacagggtttcgtcatgttggccaggctggtctcaaactcctggcctcagatgatcctcacacctcagcctcccaaagtgctgggattacaggcgtgagccactgtgcctggccaattgctaataaagtattttctaatcacaacctatgtaactcacttcatgatgtatctgcaagtggactaaggacccactgaatattcttgtcgag

SEQ ID NO: 736860 - DNA, 589 bp, Homo sapiens
tctctaaggagctaagccacttggccacccacgtgtcctctcccttgggagccaactacggagaagcctgaccaagtatcagccatggggccttctgctcctccaagacagacagctccatcccttctccttcatccctgctcccactgccgggacccctattccccaccagcctcccccagctgacttctacycttctttgaagtcttagtttaaatcccatctcctcagagaagtcctccctgactccccgatccagctacattaggctaactccgttatccttgctcacagccccccgcttttacgcttctcagcacctgtggcagataaagctaaagaactgttcgtgctgctgttttcttaatatctacccccttacccctaattaattcctgagctcccggagggctgggacccctaaccatcctcttgttcactgccagatccccagcccccagctcaaagtttgtggaaggaacaacatgactgaacagccaaatgagcaaatggacaaatgagcaggcgagtcctaggggggctgaaaggcacaccaatttgcaggtgtgagaggtgcccagtgttgcca

SEQ ID NO: 736861 - DNA, 672 bp, Homo sapiens
tgatgatgtggcctgacctcagaaaggaaacctggttggtcaccagggggaatttccccgggtgaggtctcacgtctatgcaaatattgcactgcaattaacctggaccctgggatgggagagagaaaagaggagaggacactgggaaagacagaagggcaggtaataggacctgaacattcccaggtaccaggcactgtgctaggctcctcatgaaattaatctcattttgcctckaaagtatcctccaatgtaggaaaattgagtctgaggcccagtgagagggtgcgttgcccaagcaaaatcagcacattcctaccccaacgggataccaggcctcagggagaagtgatgatggtgacgatagatttggcgctgcggctgctgacaaaggtgacagtaatgaggcttgagtccgggactctagcaaggtttcattttaggtttccatctcactcaaccaggggagttttatcctgggaacggccaaaggcagcaggaaggtagtgaccctgactcaccttgggcaaatcccagcactctggtttttcaaagccctgtgggggcaagggatgtggtagctggcacagttaaccccttcaccaccagtttctagaatgctcctggaaaagtgaacagaatgggatccatacttttgaaggagaatcaatt

SEQ ID NO: 736862 - DNA, 522 bp, Homo sapiens
caaaacagcaatcacaagcctcatcaagcttcccaagacattttacaaaccaccatcaaaaactcattgtttccaaacatctctttaataatcctgacttcctaacaattctggagaggaaaaaaaaattggtagcatgtgtttcaatggcatcaccacatatctgatgaagagcagacagagcaggaagtagaaataaaacttaaatcctaccaaaccccaactttcaaacacatgtactgcaaaagctactgttccatgcaaaccagcactgacatattctttattttctatttgaggattttatattttaactgacatagtctacagttttttaattctctcacaacytgtacttctcgtaagtttacaaatcttgaaaaaaatgtagctgtaaaatcagggccacaaaaaatcgaaatctacgttttcatatccaagaaggcatttatgccaatgttttgcataaaacccttagaaaacataacaagaaggaaaagagggcaggagtttatagtcggc

SEQ ID NO: 736863 - DNA, 622 bp, Homo sapiens
atttttaagtattaattcctcacagaaattgctttctaaagttttaagggtgcaaaaaacattaaaaatctttcagtaagctaaaactttaattaggcccttatataattcttgctaaagagagagaatggaactgagactgtgaaatgaaatgacaatgataatatttcctttgaaatttttaaggccaagttgcattaatgcaactttgaaattgttccaatcacacaaggtatttaattaaagcaaatgaaaggctcttcaattcccataaagatttacatggtaggaaaaatgtttctgttttagcaggtctataacatcatttttaaaaattacaaaaattattgtatctacttttaaagctggacagcaatagttatagagagaatcatttaattttrgagtcaagcagaccaaattcccatctggctccaccagcgtgttccctttagaaagtaacatttaacgcagtttcattgcccttgtttgtaaaaaaggggatcatatttgcctccacagtgccgctgaggggtttaaacaaggtgctgaatctagaacacttacagagagcctgtaataagtactcagtgcttaaatgttacctaaaaacaaaggaaga

SEQ ID NO: 736864 - DNA, 529 bp, Homo sapiens
acaaaaatgttagttgtaaaggataaaaagtcccacagatgagtaatcatcaagcgttcccctttcatgcagtcacaaaggagaaaatgaaaatagttcaacattgaagtttattgaacttaaaaaaaaatctgttccaatcaattaaagtttccagttatataaagatggactctatacctgactcatgactgagtttagtttactttcagttagattatttttgtctaaaatattcaaattgtttgtttcatataatcattttggtcaggctcaaatattacgttttttatgaatctttccygatcacctaaatcaaatagcaactcttcctcatctcaatcactatcggccacataactatcacattaaccaaatgtattatcttcatagtgcttattattatgtgaacatatttatgtttttactggtgcttttctctctccattactacaatataagttacgtgacagaattaccttatccttttggtttgctgctgtatccctaatgtcgagatgagttcctg

SEQ ID NO: 736865 - DNA, 529 bp, Homo sapiens
acaaaaatgttagttgtaaaggataaaaagtcccacagatgagtaatcatcaagcgttcccctttcatgcagtcacaaaggagaaaatgaaaatagttcaacattgaagtttattgaacttaaaaaaaaatctgttccaatcaattaaagtttccagttatataaagatggactctatacctgactcatgactgagtttagtttactttcagttagattatttttgtctaaaatattcaaattgtttgtttcatataatcattttggtcaggctcaaatattacgttttttatgaatctttcccgatcacctaaatcaaatagcaactcttcctcatctcaatcactatckgccacataactatcacattaaccaaatgtattatcttcatagtgcttattattatgtgaacatatttatgtttttactggtgcttttctctctccattactacaatataagttacgtgacagaattaccttatccttttggtttgctgctgtatccctaatgtcgagatgagttcctg

SEQ ID NO: 736866 - DNA, 622 bp, Homo sapiens
tgtagttcatctttcttctgtatttctaaggttcctgtcggatttgttacccacgccgttgaatttgtgactaatttaacttgctctgtaatatgaacctcgactctctgtctcttaatcctagggaactctaagtctaattaaagtacaggttttgatcggcttgttgacttccctttaaaatttgttcagagttcctttcttggttcctggcacattattacaatttagtaagtttgatctttattctagttacaaagatggttctatcaatatttttttgaaggtcccacgtcctttctcttttacctgawtttttttttaagtttttgaataacatgcttgatttctaggattagggagtttgagtatagaaaaaataatacttaggcttgccatgtcattacagtggcacattgatcaatacgaaatgtccaaaatagctaattttcaaataaacactctgtacatttttatcatcgtttttaaaaataaaattttaaatgtaaaaaacgtttaaaacactttactgccaatttcttctgatattagagttcgtagttaacagaccctcaatttttgctgttttctgctttgctttaacattgaaaattacatgaat

SEQ ID NO: 736867 - DNA, 667 bp, Homo sapiens
ttgatacattttcatatttaacattgaggaaattgacctaattcatatgattgaatccataccttgtttcagtcagggttctccatatataaaaatgcaacgttgagctacattcctggcatataatgctgagttgttgctctcagctaatgctccctgtcattccacttattgttaagagagaggtcttttaaagatttcttttaaggaattggctaatatgattgtaaggagggtggcaactccaacgtctgttgggcgggctggcagagtaggcatgcaggtaggagatgatgctggagtgttgagtctgaaatctgtagggcaggtcagcagrctggcaactcagacaggagttcatgctgcagtctcaaggtagagtttcttcttctccaggaacctcacgttttgctacatctacaggttaaccatgtctataggttagcaaaatctacaaaatgcctttacagcaataactagaaaagtgattaaatgactgagtgccatagcctagatgaattgacacaaaattaagcataacatagcttgactttatatgaatggaataccaagttgtgtaggagtcatgggaattaatatataattaaatatagtgaaacatagatatagcactgttctgaagctagataacagaaccaataacttg

SEQ ID NO: 736868 - DNA, 563 bp, Homo sapiens
aaatgaaaatctaaacagacctatattgaataaggagagaaatcagtaaacaaattgtcttccttcaaataaaagcccaaaacctgatgctttcactggtgaattctactggacatttaaagaagaattaacgcctattctactcaaattcttccaaaaagttgaagaacaggagctacatttaagacctgaaactacaaaactcgtaaaagaaaacatagggaaaaagctccttaacattggtcagtgcattttggatatgacaacaaaatcacagacaaaaaatgcaaaagtagacaaaagggactatattgagcttaaatgtttctacacggtaaaggaaacaacagagtgaaaagaaaatctatggarcaggagaaaacattttcaaaccatatatctgataagaagttaatatgcgaaatatataagtaactcatatgattcaatagcatcccccacaaaaaaaaaaatctgattaaaaaatgggctaaaggacttcgatagatttttttttcccaaagaagacatacaaatagccaacaggaatatgaaaaggttca

SEQ ID NO: 736869 - DNA, 563 bp, Homo sapiens
aaatgaaaatctaaacagacctatattgaataaggagagaaatcagtaaacaaattgtcttccttcaaataaaagcccaaaacctgatgctttcactggtgaattctactggacatttaaagaagaattaacgcctattctactcaaattcttccaaaaagttgaagaacaggagctacatttaagacctgaaactacaaaactcgtaaaagaaaacatagggaaaaagctccttaacattggtcagtgcattttggatatgacaacaaaatcacagacaaaaaatgcaaaagtagacaaaagggactatattgagcttaaatgtttctacacggtaaaggaaacaacagagtgaaaagaaaatctatggagcaggagaaaacattttcaaaccatatatctgataagaagttaatatgcraaatatataagtaactcatatgattcaatagcatcccccacaaaaaaaaaaatctgattaaaaaatgggctaaaggacttcgatagatttttttttcccaaagaagacatacaaatagccaacaggaatatgaaaaggttca

SEQ ID NO: 736870 - DNA, 640 bp, Homo sapiens
tgtcagataaataatctgcaaatattttctcctgttatgcaggctgtctttccactctgttgatcatttatttcgctgtgcagagcttttttagtttgatatagtttcatttgtctatttttgtttttgctgcctgtgctttcagagtcttgcccataaaatctttgctcagaccaatgtctggaagtatttctcctatgtttgttccaggagtttcatagtttgggtctcacatttaagactccacctatttgatttcattttttgatatggtgacagataggggtmtagtttcatttttctgcatattgatatccagttttcctagcaccatttattgaagatactgttttcttcccccaatgtatgtccttggcacccttgtcaaatatcagttggttgtgaataggtagatttatttctgagtcctctgttccagtccatctatgtctgtttctatgtcagtaccatgctattttgtgacaacagctttgtagtacattttaaagtcagatagtgggatgcttccagctttgctctttttgctcaggattggtttggctatctgggttctcttgtggttccataaaaatgtggggattgtttttttatttctgtgcagagtgtcattggtattttg

SEQ ID NO: 736871 - DNA, 619 bp, Homo sapiens
cttttgtggttgattcttgcttctgtagcccagaccctaatcatgagttgcatcaatacaaagctatcattcagtgggtgaatatgtgatgtcgttattgcaggttttatggaacataacattttgatggcaaaaaaggagatacaaatsgtgtgcacccaaatccccctgactctgcccccaaggagagtgactatgccatcaaaatcctgtttcataggccaggcacagtggctcatgcctgtaatccagcccttggggaggccaaggcgggcggatcacaaggttaggagttcgagactaacctggccaacatgatgaaaccccatctgtactaaaactacaaaaattagctgggcatggtggtgggcgcctgtaatcccagctactcaggaggctgaggcaggagaattgcttgaacccaggagttggaggttgcagtgagccgagatcgcaccactgcactccagcctgggtgacagagtaaggctctttcaaaaataataataataataataataattctgtttcatagagaaagattctgataacagatttccgtaagttcatctgcatgttgagtaatttggctgggctggatgtggtcttaggcatatgt

SEQ ID NO: 736872 - DNA, 619 bp, Homo sapiens
cttttgtggttgattcttgcttctgtagcccagaccctaatcatgagttgcatcaatacaaagctatcattcagtgggtgaatatgtgatgtcgttattgcaggttttatggaacataacattttgatggcaaaaaaggagatacaaatggkgtgcacccaaatccccctgactctgcccccaaggagagtgactatgccatcaaaatcctgtttcataggccaggcacagtggctcatgcctgtaatccagcccttggggaggccaaggcgggcggatcacaaggttaggagttcgagactaacctggccaacatgatgaaaccccatctgtactaaaactacaaaaattagctgggcatggtggtgggcgcctgtaatcccagctactcaggaggctgaggcaggagaattgcttgaacccaggagttggaggttgcagtgagccgagatcgcaccactgcactccagcctgggtgacagagtaaggctctttcaaaaataataataataataataataattctgtttcatagagaaagattctgataacagatttccgtaagttcatctgcatgttgagtaatttggctgggctggatgtggtcttaggcatatgt

SEQ ID NO: 736873 - DNA, 619 bp, Homo sapiens
cttttgtggttgattcttgcttctgtagcccagaccctaatcatgagttgcatcaatacaaagctatcattcagtgggtgaatatgtgatgtcgttattgcaggttttatggaacataacattttgatggcaaaaaaggagatacaaatggtgtgcacccaaatccccctgactctgcccccaaggagagtgactatgccatcaaaatcctgtttcataggccaggcacagtggctcatgcctgtartccagcccttggggaggccaaggcgggcggatcacaaggttaggagttcgagactaacctggccaacatgatgaaaccccatctgtactaaaactacaaaaattagctgggcatggtggtgggcgcctgtaatcccagctactcaggaggctgaggcaggagaattgcttgaacccaggagttggaggttgcagtgagccgagatcgcaccactgcactccagcctgggtgacagagtaaggctctttcaaaaataataataataataataataattctgtttcatagagaaagattctgataacagatttccgtaagttcatctgcatgttgagtaatttggctgggctggatgtggtcttaggcatatgt

SEQ ID NO: 736874 - DNA, 628 bp, Homo sapiens
atacttactatgggtcaagcactcactatgtaagctttatcttatgtaatcctccaaactttcagtagatgttggtaataccatttttacttgatagataagaaaaccaacgaacagagaggggatataggttgcctagatcagcttgacttcagaatgctttcatttaatttagaaaaaaaggaggctatcatttttgcaamcatggtatgatcttattatcattaaaattaagccatacctcaaaagtcaatgaagaaaggaaaagtgtgtgatcgtccacctcaccacctctccccctgctgaattaaccttgaatattaggaaacatcattgacatctcttgtgcctatatagaagaggaggaatggatgatggacggatggacagatggataaattaacagatgaatgaatgaatagatggatgtatggacatatggataaagctagctagatgatatacacagatagaccaattggtaaagttacacagttacatagacagaaccagccctcttaatgactattctctatggctgaggacacccctcctgttttctgcattacttgggatttgaaggctaagaagggttctgtatgaggtaccaataccgcatactgggaaa

SEQ ID NO: 736875 - DNA, 628 bp, Homo sapiens
atacttactatgggtcaagcactcactatgtaagctttatcttatgtaatcctccaaactttcagtagatgttggtaataccatttttacttgatagataagaaaaccaacgaacagagaggggatataggttgcctagatcagcttgacttcagaatgctttcatttaatttagaaaaaaaggaggctatcatttttgcaaccatggtatgatcttattatcattaaaattaagccatacctcaaaagtcaatgaagaaaggaaaagtgtgtgatcgtycacctcaccacctctccccctgctgaattaaccttgaatattaggaaacatcattgacatctcttgtgcctatatagaagaggaggaatggatgatggacggatggacagatggataaattaacagatgaatgaatgaatagatggatgtatggacatatggataaagctagctagatgatatacacagatagaccaattggtaaagttacacagttacatagacagaaccagccctcttaatgactattctctatggctgaggacacccctcctgttttctgcattacttgggatttgaaggctaagaagggttctgtatgaggtaccaataccgcatactgggaaa

SEQ ID NO: 736876 - DNA, 594 bp, Homo sapiens
tctgttctccaaaagcaggttcctctgctggcccaccaggccactctggccccacccatcagaccaccgtgcagctattaaggggtgccctctcctccccaggagcaatgggacagctgggtgggcagggtctctggggaccgctgtggcagagcacctgtgccagggctsggccgcactgcgtggctgggagtctcacctgatatgacctccaggagcagcatgagcttgagcccgtctcggaagtcctcatcaatgttctcgatctgtgtgcctgccttccgcaggtgggagttgcaccatgccgtgaaggtctggggaagcagaacaaaggacagtgcgcagagtcagcctggctgtcggggctctctccacacacctgcagggccgcagctctgacctcaggagaaccgcagctgccacggagcactcgccgacacacaccgtacatggccgatacacacattgtttctgatccttacagtgaccccgggaggcagatgtgaggaaactgaggctcggggtggttaatgacccatcacaagaccatccaggcggtaagtggcagagcttggatttgaacccaggtctgtc

SEQ ID NO: 736877 - DNA, 626 bp, Homo sapiens
attacacaaatgactcacatttattgagcacttagtgtgtaccagggtttgttctgcgtgctctaattttacagataaggctctgaatgctgggggatatacccatggccacagggctgttaagcagcagagctgggacccccgcaacccccaaactaaactcaagcctcaccaagtctgctttccacktcttgtgtttgctctgttaggccctgtgtgagctacttcacatggttcctctcatttgatctactctaaggaagacacaaaaccaagggcagtcccaggaggtccttggcagattccagcagccacagtgcagcaggccccatgctgagccactgggtgagtcatgggggagggcgggcaagtcaggtgaccgggtgagaatcagagctatgctgaggtggcctggttaccttgacattcctgtgattctgccaaggtaaaaagtaatccaaggagtttgccttatatgggcatgatgacagatttcaacaagacagcatgttaactgaccccataccaaatcggttcccggactgcacaggcaacgcccgataaagctgctctggaaatataggaaataacaatttatgatgggctatcaccggtgactcacaaag

SEQ ID NO: 736878 - DNA, 596 bp, Homo sapiens
ataatagaaccttggcagggtgtggtagctcacacctgtaatcccaacactttgggaagccaaggcgagtgggtcacttgaggtcaggagttcaagaccagcctggccaacatggagaaaccacgtctctactaaaaatacaaaaattagccaggtgtggtggcatgcatctgtggtcccagctactcrggaggctgaggcaggagaattgcttgaacctgggaggtggaggttgcagtaagccgatatcacgccactgtactccagcctaggcgacagagaaagactccgtctcaaaaaaaaaaaaaaaaaaaagaaccacatgtaagaaatactgctgtgtgggccatacgtctggcaggaaagcccactatgagaactcccgccatgttcgtccctaccctaatgtaccttaggtggcacacccagggagagcgagaaactctctcatcctaatcgctgtagtatagcagaataacatgacaggccagcaggacaatgaagtctacgctgcccagctctttttctgggtggaaagccctctttccctcacagaatttccatccatggagagcagtgagcaatgcaaagcatta

SEQ ID NO: 736879 - DNA, 582 bp, Homo sapiens
tgttgaaagctgtcaaacagccagattatataaaattatgaagatatttagcaggaatattctaagatactgctacaaacaacactatttattgaccacaaatatgccagttgctttacatatactcaaccttacaataatcctgctaggtaaatcatctgattttacagatgaggaaagaggttcagagaagttaagcagcttgccccaagtcatagaaatagaattccaaatacagaattcaagaattaaaagaactttccagtcagcactggaatactgtagcgcccttccccctcaacccctccacatttaccccaccctccaatcaacatatgaatggaggaaaagggaagggcagaatttatgcttytaatggacagcttcctttcaagaggcagagggtgttgctgagctgatcatggccagtttttgcttcccaatcctgccaatctattaggtcatcccttcttttgtggaaaagagcaaaggagggacagaaagagtcgggagcattatactagcaaagccatctacacggggaaggacatatcaggaataaagaaaagtacttatctcacc

SEQ ID NO: 736880 - DNA, 633 bp, Homo sapiens
ttctatgttctcctgtcataagccaaattggaacaacatagtcctagattgcaagactgggtttacctaacttgtgtggatctcagcccagcaccacatgttgatagccataaacaggtatttgtttcataggtgtgcatgggaatgctaatactattacctaggtttcctggattttcttctatggggaaaacattttcataaatgttaattgatcatggagaactgcccatgaaaattgcaaggaaatgattaatcatatctaatttgtagatagagaaattgaggcacagagagattaaagtgtctatgctaatagggttaaaaagtaatgaggctaaagagcccaggrtgcctgactctcaggccatccccttcttataactggataatgttgagagagtctccacctatgttgtaaaggtcagaatgctaactaattttaggaatgtgttaccagctttctaggaaaagggctgcttttgttaggactcaagttttggtgggaataagagaggttgcagtcatagtttctttatctacttctacagacagaagttaggagcttctttctctcagtcatcagctatcagccatcatctacctaggatcagaacctccagtgaaagtgag

SEQ ID NO: 736881 - DNA, 601 bp, Homo sapiens
gcaagtgtattgattgaaaatgaccttctcattcaagaaaaatttattgagcacttaccaagtgtcaacaggtgaatgtgaataaaatagatatggtccctgccttcttggagttgaataaaatagcaaacacttattgaatatttattatatgttgtgcattataatattaaccaatgtttattgagttgttattatatgccaactatgccaatcctgtcmtaagcaatttatgtatgttaactaatttaatcctcacaataaatctatgaggtaggtactattatttctgtcataaaattacaaaggcatagagagataatttgtctaaggttccatagagtaagtaggggacccagaattcaattcaaggagtctttttgttctgcatgacatctcaactgctatataaatattatttagttcccagggcaaatttttcaggataatattcttattctctcaattttacagaagagaaaactgcagtgtaaagaggtgaaataactcaccaaaagttaactgacaatgatcctacccactacatcacactgcttaactgggaagacacgcaatttaacaagtaccaaccaggctccac

SEQ ID NO: 736882 - DNA, 515 bp, Homo sapiens
tggccaaaatttcaaatgctaattaaagacatgagttgcgtatatttagtattgtagtaggtaatagctaccaaattagtgtgaacattagagatttgatatttaagatgtttgaataatttgacactagaatattataggcatttatgctgattttaaaaaatgtgatggtgtaatagatttttcatttattgttgtgactatttttttctttaggctacatactcaattttgtaatggaactaggacaataytcattttagtgtgattaaacttctggcttactgatgaaatgaaacagtccattcctgcaaaagcatctcacagtttgtttttaaatgaagtaagacaaacatacaggaaaggcattataagtgtaaccagcacccagataaagaggtataacatcaccagcaccctgcttgctcccaatcactgccccccaccaagtaaactactaccttgacctctcacatcatacattagtttttgccagcttttgaacttcataaaaa

SEQ ID NO: 736883 - DNA, 620 bp, Homo sapiens
tgacagaagacatgaaataacagacattctaactaatcattttggttgcattgttgagaacaagcagtacgggagtagggagagagaaagagaggtcaggtcaattagaaggcaatttcaataaccaagacagaagatggtggtgacttgaaacagtgaagagaaatggtcatagtctggatacaggacttcttgatgtttaggcaaaagagaagtcaagcatgactttcaggctgttggtctaagcaacttgaagaatggagttaccatccactgaggtggaaaaaactgcaggagcaatagaatgggaggtggactgagagttcagtgttggatatgttaagaatgaagtctctactagacttgtaaagtggatatatggagtctggagtttggaaractattctagttggagatatagtgtaggagttgtctgtacatagatggcatttaaaactaggagaatggaaaactacaaaaatagtggaggtagagagagaagaggttcaagatgtgtgcatggagttgtctgcatatagatgacatttaaaactaaaagaatggaaacttgacaaaaatagcaggtgtagatagagaataggttcaagaactgtgcatgc

SEQ ID NO: 736884 - DNA, 628 bp, Homo sapiens
tcatggaaattcccttaataaaatataagttaaaaagaaaaaggaaaactattttaacgtacaatgttaagggtacaaaggaatctcacataacccatatctagaaactggaaccaagaatgagaaagcctccgaaatccatgccaccactcctgcttcactctttccaaacctgcttcattctttgctcttggccagcctgcttgtttgcacagctctacacccacccttcccccaaatccataatttacctgtctgaagttcaagtggctaattctaaattcaaggtagggaatttaagkcggctatctattactggtctcatcagctatgaccagtgaggcaaggccacacaggatagacaggattgctgggtccaagagtgtgtgtgaatgtgggtaaggaactgtgattgggctcctgattctgggctaatagccctcctcttagggaggcagaggtcatgagctgacccctcctctaatagccctgcctcttagggaggcagaggccatgagccagctagacattgccaaagtggttttctcagatttctgctcaatatggccagggctaaaaggatccactctctctgcacattttgtgagcaattccacttcctacaagt

SEQ ID NO: 736885 - DNA, 628 bp, Homo sapiens
tcatggaaattcccttaataaaatataagttaaaaagaaaaaggaaaactattttaacgtacaatgttaagggtacaaaggaatctcacataacccatatctagaaactggaaccaagaatgagaaagcctccgaaatccatgccaccactcctgcttcactctttccaaacctgcttcattctttgctcttggccagcctgcttgtttgcacagctctacacccacccttcccccaaatccataatttacctgtctgaagttcaagtggctaattctaaattcaaggtagggaatttaagtcggctatckattactggtctcatcagctatgaccagtgaggcaaggccacacaggatagacaggattgctgggtccaagagtgtgtgtgaatgtgggtaaggaactgtgattgggctcctgattctgggctaatagccctcctcttagggaggcagaggtcatgagctgacccctcctctaatagccctgcctcttagggaggcagaggccatgagccagctagacattgccaaagtggttttctcagatttctgctcaatatggccagggctaaaaggatccactctctctgcacattttgtgagcaattccacttcctacaagt

SEQ ID NO: 736886 - DNA, 575 bp, Homo sapiens
tcaaacagaaggaaagaggagcagctaaggtgagacaacagaaggaagtcacagagagagatgctggtagtgtaaggaccaaacatcacataccttatgattttggccactctgctatccctgatgtttcactttgaatgtgccaataccatatctctataggtaataaaaattgaaattattacaggttgaatatcccttactcaaaatgcctgaactggacatgtttcagattttggattttttcagattttatgatatttgcatatatgtaatgacatatcttagggctaagactcaagtttgaacatgcaattcatttatgttttatatgcacattatacacatagcctaatgtaattgtatacaatagttttaataatttgggacatgaaacaaagtttgtgttgagtacttatatgtggaaytttccacttgtggcatcatgctggtgctcaagaagtcctggattttgaatcattttggacatggaatttttgaagtagggatgctcaacctgtactggtatctttcaagtagccaggagaaaaaaaaggctagaataatcttagggt

SEQ ID NO: 736887 - DNA, 618 bp, Homo sapiens
aaaaattcaagatgttacttttgtacttatttctagaaagaagtatctcatttaagaacaagagaatggacatgagaatactagcagagataaaggatgtccatgtgacttgagtttaagatcaatacagcaggcaaagtctggaagaaaaggtcttaggaaaggtgcatgtggcccaagctgaaggcatttgctgatgaaatcttagccagagctctgtgtggcattccaaggagtagtatctggctctccagcaaagaggatagggaggagtgaggacactatccttcctatctacaaagccaccatggaaacagtcttcagataatcagagcacagaaatcaaggacattttgtctttctttggttgagacttaaaggtgagtctttagattcatctaaaacagatgaatctaaaacacctgccagaagttcaactatttggacstacatggttaaaacttatgactgtaactgtcacccgtggccttaccaaaataatttggcacttacttttacttcaacttgaggtaaaaggaaatggtttctaaatctgtagtgctgggtttttgctttgttttattttgttttcaaataaactccaggagagagaataaa

SEQ ID NO: 736888 - DNA, 580 bp, Homo sapiens
tattattttagacataattctaatagtctagttaattaatcttgggccctgagtaatcagaagaaacaataatatgaataagaagaccgattcttagaggcaggcatacatacatcagagagaagtgacccatcacagaagtgatatgggaaggatattaaaaacatcccaaaatccaatagtttgtgatctctttattgtatttaaaagatgtctaaaataggtagggacaaagaaatctacatgacccaagaatcccaaagagtctcctggaatacagtaaacattgagattaagtgcagccatagcctgaacttcaatcctgttcagtgccacctggtttcagttctcagtgttctcaactataaaggggggataatactattatstaactcataaaattactctgacagttataagacattataactatgaattcgtatatgacttaatgtgtacctggcacattgtattgtaagtactacgtaaagtattagctatgataattatgcatgtacatataaaccgaatagtctggatcacaataataattacaccataaccttgtatagtgcttcag

SEQ ID NO: 736889 - DNA, 620 bp, Homo sapiens
gggatagaatagggctcatgatataagtggtgggcttggtgcttactgtgtgtcactgtgctgaggactttcctgtgaacctatctcctcctcaccctcccaaatgaagtgtgtcccactgtcctggtaccatacacatccatccgtccttgctctgyccactgtgtccagggttcttgcttcactcaggggagaaaccccccatccttttgatggcctgagaggccctgcaaagtctggtcccctacctttctgcactctttcctcctctctccccctcacttatgctgtccccctacactggcctcctctctctctccttccttctcttcattcattcttcctgtctctctgtttctttcatataacatgtttttatcatccagatgcatcagcttctccaaccaaagttttcgtttacctatatttttctcttactttctattctccaccaaccctttttagggaaacagtaggttgtttgctcacttcgttcacattaagtgggctattttcccttttgcccagggttctcttatatctaggataaaatcacgttaggttaaatatattgtacttttgccatgctaagtttttcttttttcttattctcacactaa

SEQ ID NO: 736890 - DNA, 620 bp, Homo sapiens
gggatagaatagggctcatgatataagtggtgggcttggtgcttactgtgtgtcactgtgctgaggactttcctgtgaacctatctcctcctcaccctcccaaatgaagtgtgtcccactgtcctggtaccatacacatccatccgtccttgctctgcccactgtgtccagggttcttgcttcactcaggggagaaaccccccatccttttgatggcctgagaggccctgcaaagtctggtcccctacctttctgcactctttcctcctctctccccctcacttatgctrtccccctacactggcctcctctctctctccttccttctcttcattcattcttcctgtctctctgtttctttcatataacatgtttttatcatccagatgcatcagcttctccaaccaaagttttcgtttacctatatttttctcttactttctattctccaccaaccctttttagggaaacagtaggttgtttgctcacttcgttcacattaagtgggctattttcccttttgcccagggttctcttatatctaggataaaatcacgttaggttaaatatattgtacttttgccatgctaagtttttcttttttcttattctcacactaa

SEQ ID NO: 736891 - DNA, 576 bp, Homo sapiens
ggacaacaagttaagacaatctttttgttctatagttattatgaaggcctaggaattccaaaaggaacatgtttgtataataacactcagtacaaagtctgtgatccaggaagtgaccagcccgatgtgtgctatgacccctctgaacctcccatttccacagtttttgaaataagattaaggactgaacactggcagggactcataaatgatacaagtaaagtattagccagaacagaagaaaaaggggtgcccaaatgcataatcttaagatttgacgctgtgctgtcattaatagcaataagttaggagcaggatgtggctcttttaattaggaaaaaactacatgaccgaaaataagtacatctgtcatgaatcaggattgtgtggaaaagaatgtgggtactggtcttgtgtcatttaggctacytgggaaaaaaaaaatgaaaaagatcctgttttgctccaaaaagggaaaggaagcctgtcctgcatgagtggaagctgcaaccctttaaaattagtaatcacaagcccctcagacccaaaatagaaaaaaggaaaatacttatctct

SEQ ID NO: 736892 - DNA, 597 bp, Homo sapiens
gaaaactaaatctggagcccctcacgtgacaggaagctgcctatgaataagtctgtgctcggtgtgcagctgtgtggacatccagggcatgaggaaaacagaaacctctgtcaggcagtccagcaaaaaaaaaaaaaaaaaaaaaaaaaaaaaagaaaagaaaaggtcaggaacaagagcccctgcaagagattttaaaactttttggtgtatttcatgcaccatgaggacacatgctgctctctggactgggtctatccaagtccacagagctttctarattaaatctttgttgtatagcaacttctgtcatttattcaacaatatttaccaagtgcgtaattgatggtaggcacttgctggatgctgggtagagcagggaacacagcagaccccatcatttccatcagggagcttatgttctagaagggagagtggcaataaataagtacttaaaataaccgttatatgaattattacagggattagcataatgaaagaaaacgcaaagaatggaggaactcatctaatttggtggtggtggggcagttacaaaaagccttttgggatgaagtgatctttaagttaagacttgaa

SEQ ID NO: 736893 - DNA, 563 bp, Homo sapiens
tacaagactctgtctcagaaaaaaaaaaaaaaaaaaaaaagagctaggcagacaaggcccccgacttcaagagtttacattctaatggaggaaaccaaaaattaagaagaagaaaagataatttagccatgttgaaaaaaacacctggtaacatgatatatgtgatagtgactgaagggtagaaggaacaacatagatttgggtgctcaaggaaggcctgcgagatgactgttgaaatgaagcccaaatgacaaaggaaacytgccatatgaagatctggacgaagagcattccagggagaggaagaagcaaatgccctaagggacaagcttgttatgtttgaggagcagaaacaaggcatgttgggtatttgtggagtggaatgaggtatgaggtaattcagacaggaggagaggctagattctgtatggcattgctggtattagtaaggcattactttttctttttcttttttgagacggagtcttgctgtcttgctgtgtcgcccaggctggagtgcagtggcgcaatctcggctcactgcaacctctgcctcctaggtt

SEQ ID NO: 736894 - DNA, 563 bp, Homo sapiens
tacaagactctgtctcagaaaaaaaaaaaaaaaaaaaaaagagctaggcagacaaggcccccgacttcaagagtttacattctaatggaggaaaccaaaaattaagaagaagaaaagataatttagccatgttgaaaaaaacacctggtaacatgatatatgtgatagtgactgaagggtagaaggaacaacatagatttgggtgctcaaggaaggcctgcgagatgactgttgaaatgaagcccaaatgacaaaggaaacttgccatatgaagatctggacgaagagcattccagggagaggaagaagcaaatgccctaagggacaagcttgttatgtttgaggagcaraaacaaggcatgttgggtatttgtggagtggaatgaggtatgaggtaattcagacaggaggagaggctagattctgtatggcattgctggtattagtaaggcattactttttctttttcttttttgagacggagtcttgctgtcttgctgtgtcgcccaggctggagtgcagtggcgcaatctcggctcactgcaacctctgcctcctaggtt

SEQ ID NO: 736895 - DNA, 508 bp, Homo sapiens
tgttatgcattacaaaaacataaactccaacaaaagtacctttgatgaatgtaaaaattgagaatatctgaaatgtacactctatgtttcataactcaaatttagtatatctcccctaaacattttgttgtcaagaatttttgtttyaaaagtatattttaggttaatctatttatgacttgatgtgaagccaagtgaataattatatacatgaaaagtataaaataattataaataagtttggaaatttgttcccagttcattagcttcagcacatttatcattgtacaatttaattccaacaactgttacatgtaaaccattttgtccagttaatctctattttaaaagtacattcagccgggcatggtggctcacgcctgtaatcccagcactttgggtggccgaagtggatggatcacctgaagtcaggagtttgagaccagcctgaccaacatgtgaaacctcatctctactaagaatacgaccattagcggggtgtggtggt

SEQ ID NO: 736896 - DNA, 585 bp, Homo sapiens
agacggattgcccacagtttccataatagtcctgaaaagaactatgaaagagcagtgaccgtcattcagatcgaagccaaaaaggctgaattacagttaaagcagctggaaatatgaagattaatacctgacagaggagatgggccctagtatgaatatytgttattaaggcacttattgagcattctccaaaatcagctcctgaaaattaatcattcatttttctaaatacaaagtatattttctttagtgaaaaataaattgtaaatatattctcaatttttcctctctgatgaataaaagagcttcttccgttgctctgtttctcaatgttgatttagattaaggcttttgatgggggttttggctttctcttttgggtttaaaatatactaataaaaactggagaaataggaatttgtaaattccaaactttgtggtaactgtgaaaggttagcattgatctgacaaatggaagtttagaagagaagtctaattatgttaagcatctgtaactgtgatagtttttacaaacatctatattatagacatctgtattattgagaaacaactcaggattttaag

SEQ ID NO: 736897 - DNA, 610 bp, Homo sapiens
tagtgcctctcagacacagattcccatcaaagtgaaatgcagtggggccagagtgaggtgctgtgacttggatcagttctccatcgtttcctgcccacagagttggagcggttttgtagatttagaactttcacccscagaattgctcactaccttttgagattcccatttcaagatacacagttgcaggggtaaaaactgtaggaagagatgaaggtactccccaatgctctggaaagaatcgtttcttttcctagagttgtttatgggggaataccagggcctaaaagtgtgcagtgatggtggctgctactctttttccctccttagccctcctgataacatattactttggatcaaccagtgaaattgatgagttgttcattcatgtaaaaatctctcttggctccttacttgaagccaggcacaatgctattgcagacattgtaagtacggtggtcaaattagggagatgagatgctatttctaatggagcttacctgctaatgagggcaagaaagccaagaaacacacagaaaagcaagcagcagatgatttcagatggcggtgggtgacgtggatggctgggtgatggtgagaatagagagta

SEQ ID NO: 736898 - DNA, 504 bp, Homo sapiens
gggtgtgcggtgagtgcccctcctgggaatgtgctcttcaaactagcacagaaagaagtatgactttcttctttcttttttttttttttttttttttttttttttttttttttttgagacggagtctcgctctgtygcccaggctggagtgcagtggtgcgatctcggctcactgcaagctccgtccgccaggttcacgccattcccctgcctcagcctcccgagtagctgggactacaggctcccgccaccatggtctcgatctcttgacctcgtgatctgcccgcctcgacctcccaaagtactgggattacagacgtgagccaccgcgcccagccggcagaaagaagtatgactttctaatccaaaatcagatttcgccatttagagaagatttgagaaattctgtttgtatttaaatcatcctcatcccaccctcaagcctcaagaaagatgagaaaagtatactatgtgtggggaatgcttttattcaaaagcttgttc

SEQ ID NO: 736899 - DNA, 504 bp, Homo sapiens
gggtgtgcggtgagtgcccctcctgggaatgtgctcttcaaactagcacagaaagaagtatgactttcttctttcttttttttttttttttttttttttttttttttttttttttgagacggagtctcgctctgtcgcccaggctggagtgcagtggtgcgatctcggctcactgcaagctccgtccgccaggttcacgccattcccctgcctcagcctcccgagtagctgggactacaggctcccgccaccatggtctcgatctcttgacctcgtgatctgcccgcctcgacctcccaaagtactgggattacagacgtgarccaccgcgcccagccggcagaaagaagtatgactttctaatccaaaatcagatttcgccatttagagaagatttgagaaattctgtttgtatttaaatcatcctcatcccaccctcaagcctcaagaaagatgagaaaagtatactatgtgtggggaatgcttttattcaaaagcttgttc

SEQ ID NO: 736900 - DNA, 566 bp, Homo sapiens
ttatactgtaggaaaggctattcccaaataactgtaataccaagcagactgcgttaagcctcatgaaagacagtttgaatgtgttttcaagttcaaaggaagaaagagtacattcaattaatgctgacaagtttaataacaatcacgagggtttaagaagttcctatttatgcacaacatttgttaaaaattaaattagtaaaagcaaaaagatttagtctctgtgtttatgagcacattatgttttaataaaaacattaagggcataaagaggaatcagtattacacacaaatacaaattaattgttaaaagtagtagcagagaattgaaagtgataaaaatttaatatttctcaagctgtccctcattactttcaagtgatctagagacgtgattcctgcctacatcccagtacagtrgagagtcataaaaaaatgggtaacatgggaattctattctattgagcagccctagcattttgttcaaggagttgttaggactgtggttccctttagcaagatgtggcttcaacatccataattcaacttacctgttcattgaatta

SEQ ID NO: 736901 - DNA, 525 bp, Homo sapiens
ggcacagtggctcatgcctgtaatcccagaactttgggaggccgaggctggcagatcccttgaggtcaggagttcaagaccagcctggccaacatagcaaaaccccatttctactaaaaataaaagaattagccgggtgtggtggtgcatgcctataatcccagctactgggaggctgaggcaggagaatcacttgaacctgggaagtggcagttgcagtgagccaagatcacgccactgcactccagcctgggcaacagactgagcctctgtctgaaaaaaaaaaaaaaaaaattgccgggcatggtggtggtggtgcgtgcctgtaatcccasctactcgggaggctgaggctggagaatctcttgaactcaggaggaggaggttgcagtgaactgagatcatgccactgcactccagcctgggtgacaaagcaaaactccatcttaaaaaaaaaaaaattaaaaaagaaagaaaagtaggttgatgatcttatgatggatcctgtgtagcgtgaagctgcta

SEQ ID NO: 736902 - DNA, 442 bp, Homo sapiens
tatccatctatctttactaataattacacatttttactttacaagaaaaatatacatatcaatggcactacattttatcataaaatatgtactaaaatagcacaaatggaaaaagtgttttaaagtagttagtaagagacctattattatacctattaagatgtaatgcaaagaactacattagtctatttatagayatattatagtgcctctttgtcccaaattgatttcctgtatctccaacagtgcctgtcttgaataatatcttgatttatccactcaggtatttaatgggcacccaaagcatacccagtctaaaacactcctgattccccaggcttctgtacccactgtcttctctgccccattgtcttctctacccctgtctacccagcagatcacattaaaaaactgggggtcatccttcagtcttgtatttttt

SEQ ID NO: 736903 - DNA, 601 bp, Homo sapiens
tgctgcttctctgttaaccttttgttctgtgttcactgggagtcctgccataaggtttgcattaggtcagctttctggcttcttggacaaataaataaaaaacaagaggaggtaggagtaggaatatatggaaaaaaatatctctatacatctgagtagaaatttttatagtccagatggggtttgtgaagtctctgagcttagaaattctttttcagtcaatatcttccagggagaaaaagttgtcagatttttagaaggattcaaacattagtgccttgcctcagggcgacagaaaccaaaccttggcttctctgcttccaacagaaaactagaggcaggttataatttccctcttgcctggaactgaggcagtgactggttttgtatgtccaaacccatcctcrttactttttgagacaagattgacgtcagtttcaaaaccatgaacaagagagaaccatgagtcctccaacgacctgggaagatttggatgacaacctttaagtcagtcatgacctgtcagtaaatcttgaaacttaacatgatccactttcacatttactactcactgtcagagattttggaagattataaaggg

SEQ ID NO: 736904 - DNA, 608 bp, Homo sapiens
ttcccctttataatcttccaaaatctctgacagtgagtagtaaatgtgaaagtggatcatgttaagtttcaagatttactgacaggtcatgactgacttaaaggttgtcatccaatcttcccaggtcgttggaggactcatggttctctcttgttcatggttttgaaactgacgtcaatcttgtctcaaaaagtaaygaggatgggtttggacatacaaaccagtcactgcctcagttccaggcaagagggaaattataacctgcctctagttttctgttggaagcagagaagccaaggtttggtttctgtcgccctgaggcaaggcactaatgtttgaatccttctaaaaatctgacaactttttctccctggaagatattgactgaaaaagaatttctaagctcagagacttcacaaccccatctggactataaaaatttctactcagatgtatagagatatttttttccatatattcctactcctacctcctcttgttttttatttatttgtccaagaagccagaaagctgacctaatgcaaaccttatggcaggactcccagtgaacacagaacaaaaggttaacagagaagcagcagccttct

SEQ ID NO: 736905 - DNA, 585 bp, Homo sapiens
aaggatattattttttcagtacctcagtttctcatgtttgaaaacaagaagttacagggaagctatcctgcacactgccaaatgtgtagcagcaacctgggcctctacacactagataccagtagtaaacctcatcctatagtttttamaatgaaagatgtctccagacaatgcctaatgtcctctgggagaaggaaatgaccctgttttgagaaccactgaaaaatactaaataatctctggtatcttttttgttctctcatattccatcacttgaatggtagggtctaccttcaaccaagaggataggcttttcaccactatggggtaactgcctagtgaacttttctctatttccgttttagaactatctgaagctctgcaggttcagtttgtataaaacctcctccctctaggtcttaactttatcatttaaatgcaaattggtataaaaaatagggtagatgaaagtgaagagatcagatgttatcttattaagtcagcctttcattatgcaattgatttagactcattttgaagtcctatgagatagcattatttgtttgtttatttatttatttattc

SEQ ID NO: 736906 - DNA, 585 bp, Homo sapiens
aaggatattattttttcagtacctcagtttctcatgtttgaaaacaagaagttacagggaagctatcctgcacactgccaaatgtgtagcagcaacctgggcctctacacactagataccagtagtaaacctcatcctatagtttttaaaatgaaagatgtctccagacaatgcctaatgtcctctgggagaagraaatgaccctgttttgagaaccactgaaaaatactaaataatctctggtatcttttttgttctctcatattccatcacttgaatggtagggtctaccttcaaccaagaggataggcttttcaccactatggggtaactgcctagtgaacttttctctatttccgttttagaactatctgaagctctgcaggttcagtttgtataaaacctcctccctctaggtcttaactttatcatttaaatgcaaattggtataaaaaatagggtagatgaaagtgaagagatcagatgttatcttattaagtcagcctttcattatgcaattgatttagactcattttgaagtcctatgagatagcattatttgtttgtttatttatttatttattc

SEQ ID NO: 736907 - DNA, 636 bp, Homo sapiens
cttattttatcttcttataaagtaaaaactagtgttatgtgataatgttatatgataatgtgataatgtttgatagaatgggattcctaatcaggtaaacctgggtttaagtcccaactacacctattcctattttattattaagtcccaactatactattcctagttgcaagagaatctatgctgttaatttctctaagcttttgtaagtctaatatgggcctaattatactaccctaatgagatcgtcatgaggattaaatacagtaatagacttgaaatgtttagtatgataccaaacacataacagcctttagctatatctttatattatttatataggtcatcttctaaacaggtatttttttctgtttkgtctgtttttttttttttgttttctgtatttgtgtgtgtgtgtgtgtatgtttcctttcacagatggatacacaactgatgacattgagttttactggcgtggcgatgataatgcagtaacaggagtaacgaaaattgaacttccacagttctctatggtagattacaaacttatcaccaagaaggtgttttttccacaggttgtatcatggaaaagtgttaagggaaaataatcttcaccgtattttgttaaacatgttc

SEQ ID NO: 736908 - DNA, 571 bp, Homo sapiens
gttttgtcatataggcttgtatgtaatttttctaacataccatcactatatacagtgcaacaactgctggcattgttcttatccatccatcatccattcctccatcaatccatccagcacttattgaatgtctactatgtgtcaagtggggattcttagaaccatgtagaaaagagcttagttccacactagttgggagagatagatgatagataagaaaacaaattagcaagatatttactgatcatgatgagagttatggagttaataaaatcaaataatggtatgcagyatgaggaaaggattgcgataagacctctctgaagaggtgatgttgagctcagataagaaagtgtcagccaagcaaagatgaagagatggacattttttcagaaagtcctgaggaaacaataaatgcaaagggcttagtgtggagatgaggtctctgcatttaaaaaacagaaggaaggtcagcatggctggaccatgatgagtgagaaagaagaaaacttgagaagaggtagaagattcacctcctctttgaagctttcatctaactgcagtggaagat

SEQ ID NO: 736909 - DNA, 540 bp, Homo sapiens
tgaagaattttctgtccattattataaaatgttcctctttatctctgataatgctttttgtctttaagtcatttttttctgatgttaatatagccttgcagctttttatgcctactgtttgcatgacatttatcctcttagttttaacttatatatgttgttatacttaaagtagatttctttttttttttcttttgagatggagtcttgctcttgtcacccaggctggagtgcagtggtgccatctcggctcatggcaacctccatctctggggttcaagcrattctcctgcctcagcctcctgagtagctgggattacagatgcccaccaccaggcctggctaatttttgtatttttagtagagatggggtttcaccatgttggccaggctggtctcgaactcctggcctcaggtgattcacccgcctcggcatccaaagtgctgggattacaggcatgagccaccatgcccggccagatttcttgtacacagcttatcttataactgggtcttctattaaatccaatctaaccatca

SEQ ID NO: 736910 - DNA, 540 bp, Homo sapiens
tgaagaattttctgtccattattataaaatgttcctctttatctctgataatgctttttgtctttaagtcatttttttctgatgttaatatagccttgcagctttttatgcctactgtttgcatgacatttatcctcttagttttaacttatatatgttgttatacttaaagtagatttctttttttttttcttttgagatggagtcttgctcttgtcacccaggctggagtgcagtggtgccatctcggctcatggcaacctccatctctggggttcaagcgattctcctgcctcagcctcctgagtagctgggattacagatgcccrccaccaggcctggctaatttttgtatttttagtagagatggggtttcaccatgttggccaggctggtctcgaactcctggcctcaggtgattcacccgcctcggcatccaaagtgctgggattacaggcatgagccaccatgcccggccagatttcttgtacacagcttatcttataactgggtcttctattaaatccaatctaaccatca

SEQ ID NO: 736911 - DNA, 634 bp, Homo sapiens
tttccatactgggcactcattctattccttatcatgtgtgttgaattcagttattctttcttgtgctctttgacattgtgctgggatttggccttccccatatatcactttgaattttagcaaatacaatgccttatattttaaaaatgcttttaagaaccatatttagacctaagtagatagagttctctttaaaaaaaaagaaaaaaaataccctgggtcattcagcctagcagaaagagaaaaacagttatacctgttaacttgttttcattcttgtactagcaagaaagaatgagagtaagattggtgtcccttccaactttcttccctagagatgattttctggggggccctaytgaagaactgaaaaagtctgaaagctgaaccagaagtgatgcaaaattagccttgaataagtcttatacttaagcccacctattattgaaaatatgaaacttaaagcaaaatattaaaatacaaattaatttcaaaatttcaaattaatgtattcagttccttagtctaaaaccaacataaaaccataattacatattaatgaggtgaatggattttaaactacaacaaagaatattatatttacaagcagataaacctatttgagatgaagcca

SEQ ID NO: 736912 - DNA, 576 bp, Homo sapiens
ctagaaggccctagtgtgtgttgttcccctcaatgtgaccatgtgttctcattatttagctaccacttataaatgagaagatgtagcatttgattttctgttcttgcattagtttgctaaggataatggcctccagctccatccatgtccctgcaaaggatgtaacgtttttcttttttatagctgcatagtattccagagtatatatgtaccacttttttaaaaaatttagggccaggcgcggtggctcaagcctgtaatcccagcactttgggaggccgagatgggcagatcacgaggtcaggagatsgagaccatcctggctaacacggtgaaaccccgtctctactaaaaatacaaaaaaattagttgggcatagtggcgggcgcctgtagtcctagctactcaggaggctgaggcaggagaatggcatgaacctgggaggcggagcttgcagtgagccgagatcacgccactgcactccagcctgagcacagagcgagactccatctcaaaaaaaaaaaaatttagtctatcactgatgggcatttagttgatttcatgtctttgctattt

SEQ ID NO: 736913 - DNA, 531 bp, Homo sapiens
gtacgtggccgacaacttccccttctacaacaagagcaaggccggctggcagaactccatccgccacaacctgtcgctcaacgactgcttcaagaaggtgccccgcgacgaggacgacccgggtaaggaggctttgagtgtggggggtgtccccaaggaagactcacttccttcctccccaagaccccattctagaaagttctgactagggctgtgccccccaagactgggggatgctaccaggcaggacagaggggagctcagcagtgaaggagagcatgggcctgggggaagatttgggtttcagccctggctgtgctcctgcccagtcagtgacctctggcaggttagacctcagagcctcagttccctcatsggaaaaccagggatagtgacagcatctgctttgcaggctgcagtggaggtgatgagataatgtacacaaggttttaggtgttatcaagcgcttaatcgcctgcagtaattacgattcatctgcatctccagcacccagcacatagaaagtctttg

SEQ ID NO: 736914 - DNA, 655 bp, Homo sapiens
atagaatgtttccatcattccagaaggttcagcagggtcctttcccaaactattttcacctttgcccccaccccagccccagacaactactgatttactttctgtcactatagatttattttgcttactctggaattcaatgtagatggagtaatacagaatgtactttttgtgtttactttgttttacatagcatgatgtttaaaaattattttttgatctaataagacttgttttatggctcagcacatggaggatataccatataccctcaaaaagcatatgcattctgtactgttagatgtagtgttctataaacactaggtcaagatggttgctagtgttgttcagattctctgtctttactgattttttgagctatttttgttctgttgattggtgagagaaggatgttaaaatctccaagcaagtatgtgaaattgtctacttctccctttcattctgtcaattttttcttcatgtatttaaagyttttctgtttatgaatataggcccacctgatgaattgatcatataatcattatgaaagtctctttttggctctggtaatactcccggacttgaggtcgattgcacttgatgttaacatggccacttctgccttcttatgttactatttacatcctcaacctgt

SEQ ID NO: 736915 - DNA, 627 bp, Homo sapiens
actgggtagatgttccatttcccaaatagacacaaatgcctggtaaggctgctgttctgtcctgtaaattgtttgggtgacttcccaagaaagaaaggaaaatatggttgtggtgaactataccccatggccccagtgaaacatgcttcccagtactcaggcccttgtgtgttcccctcccccattgatgctaggcttggtcatgggacttgttttagccaatggagcattagcaagtatagcacaagcagtggtttgataagcccatgcccagggtggcttgtcttacaacaagccagcccttgtaaagaatctcagctaggatgctgaatgttgagaggctgtgtaragagaaaccctggaggttgagaggcctcttgtatttccagcctagacaagctcccagctaagtgcagctgcataagtgattcagctatgtggagcagaagaacctcccagctgagctttgttagccacaaaatcacgagaaataataaagtgttgttgctttaggccacgaagtttcgaggtggtatgttacccagtaataactaaaataaaggggctgaggaaggatccaggaacttttcacaccatttttagcttatctgcaggagagtaatcaat

SEQ ID NO: 736916 - DNA, 516 bp, Homo sapiens
aaataaaatacaaaatgtgattttgagaagtaaataactcattactgagttatattcgcatttctctgaaagagaaatttagaaaatttagaatcataaagggatcgttctaagtaagctacagatagttccctctgattccttcatcagcctgccctgacctaatattttatttgataayatgagggaatctctttgaaaaatgtatgaccaccacaccccatcccagttccatcaacctaggatgacaatttttgtactggtcagacactgtggtttatatttaaagaaagcattcccactctgtcttttttcatttaattatagatacagaatcccatgcagatttcttgtatcaatattaatacctttggatgtatgttctacttgttgataaagtttctgaactagagtaagaattattcatgcaagaaaaactgcttttaatgataatcaagtttctctactttagagccatagaaagtggatgaatactccgtaagtgagcacatcttt

SEQ ID NO: 736917 - DNA, 603 bp, Homo sapiens
ggagtcaaggagaggtagcatagtggtgaccaagagtctgagttctggagccaatgacctgagcttgatcatccactccatgccttcatcgttatttctgtatttctgatagcccgtttcatcatctgtagaatagagatgacaataccttcttcaaaggattttcaatatggagtgaaacattatcagtaaagtgttcagctcatgtttgctatgtagtaaatgccctgaatgtgagctatcattattaaccaggatggccatttcagaagtgcatgcagtggtacaaactactttttgtcagtgacctgtcctttttcagccatgtgctatcaggaaacagtaaagaggtctgtacttcccaacaggtatgcccagagttggaggacagctattctgggtcttttctcmctttgcaccttccccctaaactatctcattcgctctcatggcttcagttgcttttcagatgactctctccacactatccctgagcccactcaacacctccatttgggtatctcatgggaaacttcgaactcaacaagcctaaaactcatctgtctaaattagatcctccttcagtcttcatctgaatagact

SEQ ID NO: 736918 - DNA, 557 bp, Homo sapiens
ataaaaagcataacaaaaagacaaaataatagattggactttgtagtagtctgttttcacattgctgataaagacacacccaagagtgggcaatttatgaaaaaaaagaagtttaataaactcacagttccacatggctggggaggccccaatcatggccaaaggtgaaaggcacgtctcacgtggcagcagacaagagaagaatgagagccaagtgaaaggggttttcccttacaaaatcatcagctcttgtaagacttatccactaccacaagaacagtatgggggaaaccgccccatgattcaattatctcccactgggttcctcccacaacacaagggaactatgggagctacaagtcaagatgagatttgggtggggacacagccaaaccatatcwgacttcatcagaattaaaaatgtttgctctctgaactatactactaagagaatgtgaacataagccacagactaagagaaatatttacaaatcctatctcttaaaaaggaattgtatcctgaatatataaagaactctcaaaactcaacaacttaa

SEQ ID NO: 736919 - DNA, 599 bp, Homo sapiens
tgtgtgtgtttgcctaaaggcatcttaaaataaaaataaaaatgattcttatattctagggttgtagagaagattaaatcagtgaatgtactgaaggtacttagaaactaggacatagtgagcacttaaaaaatactggctacctattttatggagagggagacttcatctgccaacgacgtagaggatggcttatgtgttagtcagtttttgcattgctctaaatacttgaggctgggtaatttataaagaaaagaggcttaattggctcacggttctgcagattttataggaaacatggtgctggcatctgcttctggtgaggcctcaagaagcttacaatcatggcagaaggtgaagcaagggcaggtgtgccacatggtggcagcaggagaaagagaagagagagagggaggaaatgccacacactttgaaasgaccagatctcaaaagaactcactatcgtgaggctatcaccaagtcgttcataaaggatccccccttatgacccaaacacctctcaccaggtcccaaattcaacactgggaattacatttcaacatgagatttggaagagacaaacatccaaagtatatcgg

SEQ ID NO: 736920 - DNA, 658 bp, Homo sapiens
ggtacatttctggagagagatgggggtgaagagtgctcaagggaagaattgaatcaatgctcccagcactccaccctgcccatgggaagtcaggttgcacagaggctaacctgaaaactcagtcacaatgctccctggatctgatcatatttagggtatactttggggtgcctgggcccctcagcaggtgggtctggacagaggctgcacactgcaggttcctcccatgtttttcttcctaaggatggaaccactcacatgcatgatactcacacacatgacactcacacgcatgccgtctctccttgggatacctgacggtctgagctttaaagtaatttacctttatttacctgtaatgaacattcgtccygctttcttcttgtccagtgcttcaaacatcttttctttggggagctcctgcctcctcagtccctgactgtctagaggagccagaaactctatttctcagacaggagggtgcaggcatgtgaccaaactcaccatacagatgtacctgcaccagactcagattcagagccaggggctccaggacgaagcaaggtcccatgggctccaccctggcggggaggcgacattggaagcccctttgcagttgccctactcagggcaggctgccgtgttgtttcctggagct

SEQ ID NO: 736921 - DNA, 539 bp, Homo sapiens
cggtagtatttcggagcccagaacagagaggaatcagtcatttaaagatggcaaggttgaatgaaaaatttcattctttgatgatgctagaaaaagaagtgttcacaatggtttctcttctcaatgtgcgtcatgcaaatgagtagctggtccctccatgtgacttgtttggttccatgatctgtctcttttttctcgtggcaaaataacccactttattagatccatctcaggagctttaccagtgggtaaagtcttagagccgggattcttgtttgctttctcctgtcagccaccccaaattcttttgggaagtaggtggagtataaatgaaaaattggtaaacaaaattctttctttggtctcctatggacagacctcrgtctctttgggctacttcatggctcccaagctgtaattattggttgcttttttcagtgtccctctgaactgagtctttagttgttctaaattcatttgggctccttctggacccaggaattaaaggtgactctttattcctgtaagtcagagacggc

SEQ ID NO: 736922 - DNA, 524 bp, Homo sapiens
tttttcaagtttcttagcttcctttcattgggttagaacatgctcctttagctctgaggagtttgttatgacccaccttctgaagcctacttctgtcaattcgtcaaactcattctccatccagcttgttcccttgttggtgaggagttgtgatcctatggaggagaagaggcattctagtttttggaattttcagcctttttgtactggtttctctccatctttgtggatttatctacctttggtcgttgatgttggtgacctttgratggggtttctttgtggacatgctatgccttctatttgttagttttccttctaataggcaggcccctctgcctcaggtatgctggagtttgctggaggtccactcctgaccctgtttgcctgggtatcaccagcggaggctgcagaacagcaaagactgctgcctgttctttcctctggaagctttgtcccagaggggcacctgccagatgccagccagagctctcttgtatgaggtgtctgtcagcccctactgg

SEQ ID NO: 736923 - DNA, 482 bp, Homo sapiens
ttttaattttttctttgacccatgaatcttttaagatgccatattaattactttttagatatttagttattttctagttatctttctgttatttatttctaatttaattccattgttgtcagaaaacataccttatatgacttgaatcttttaaaatctctttcgacttgctttatggcccacaatatgctctatcytgaaatgtattctctgtgtactgaagagaacacgttattctgctggttttggatattaatgtcaattagataaaattgtttaagagtttcattcatctatattattactaaatttaagtctgcttttttgcttgttctataaattgttgtttaattttagtaagggtatgaaactgtaactataattgtggattactcttcctctttgcagttctatacatttctgctttatgtattttgaagatgtattactaagacatgcaaatgtttcggattgttattttc

SEQ ID NO: 736924 - DNA, 534 bp, Homo sapiens
taaatctagaggcttgatctgatgtgacaaggatcctttacaggtaaagtgaatggcacttttatcaagagaaacataatgtctcattgtctctctttttgtgttgttagtggcaatcactgatccttgcctatatctcttatttagttcggggtttgcaaaagggtaatataatttcttcttcatttattttagagaagtcttccatcacctgtttagtatctgmggtgcagttctacaggaaagaggtctggatgcttggttcttccctttatttaccagtttccagggtaacgtattggtcccccagaagctccaaggaggacaatgaatattggttttagtatctttatgaacgcatggatttttgacatatttgaagtgttttaatctcttggtttgatatgatttatatcaatgttcagttcatcccactttagtcagtagaagcctcattgagttgactcctgactttctaacatgactctcaagctctgacggtgttcttgccgtcagtgtgacaagacattccag

SEQ ID NO: 736925 - DNA, 559 bp, Homo sapiens
agggccttgctccaaaatcctagaggcctccactgtgattcacctgtgggggcctgtaaaaggctccaaacagcatccctatctgccactgacacctcaagcaccattggatctgctgggtcatacggcccaaggggcagagcaggttgcacagaagcccggacctgtttcagagccctctcgttttctggaccccactcaaaactggcagccttttgggtcactcaacaaatgggctggaataacacacccaaatgagraatgtgttgcctccaaaatccaaataggcccactaggcattgagcctctttcttggttgtaggaggggccaaatgcagcaacttatccttctccttagaaggcatatctcggcatgccccacaccattggaccactagaaatttgactgaggtagaaggtccctgaattttagttggatttatctcccatcccctggcacacaaatgtctcaccaataagtccaatctgtttgctacttgttgatcactggatccaatcaagttgacactcaatattaaccatcacaaacataaaacaa

SEQ ID NO: 736926 - DNA, 559 bp, Homo sapiens
agggccttgctccaaaatcctagaggcctccactgtgattcacctgtgggggcctgtaaaaggctccaaacagcatccctatctgccactgacacctcaagcaccattggatctgctgggtcatacggcccaaggggcagagcaggttgcacagaagcccggacctgtttcagagccctctcgttttctggaccccactcaaaactggcagccttttgggtcactcaacaaatgggctggaataacacacccaaatgaggaatgtgttgcctccaaaatccaaataggcccactaggcattgagcctctttcttggttgtaggaggggccaaatgcrgcaacttatccttctccttagaaggcatatctcggcatgccccacaccattggaccactagaaatttgactgaggtagaaggtccctgaattttagttggatttatctcccatcccctggcacacaaatgtctcaccaataagtccaatctgtttgctacttgttgatcactggatccaatcaagttgacactcaatattaaccatcacaaacataaaacaa

SEQ ID NO: 736927 - DNA, 663 bp, Homo sapiens
gcaaataccgaatccccaaagatccattcttttctcatgctccaataaagctgataatctcatatatatatatatatatatatatatatatacatatatatgctttataattttatgaggcatatttatatctactagtatactggtagaaaacaacattaaaaagagaaacctccaaaccctatctcagtttcaaatctgccctgtaagttctttcctccttattgccatagcccaaataagaggatgggcatctgatttcttcagccattcagttgctgtccttggcatttgtcagagggagaagttgactttggaagcgtaataatagaaacatagtctattgtaagtttgggaagtaaacattgacaagattagaggaacagaaaaggcgtgttctgcaatccrtctcacacaggtgtgtcatggccagagcataggaaacttggctttgagtctcagcctgatgctaaccagctttatgctcttgggcaaaccacattaatctgtctgagcctagattcttcacctgcaacacgggagggacagcactggcctcttggtgctgtgaaagcttaataacgcttgtagcagtgtttggtgctcctgtgtgaaacgtgttcgtctctcagagttttcaacaccatcctctcttgcattttg

SEQ ID NO: 736928 - DNA, 664 bp, Homo sapiens
ggcctgacctcagaaaggaaacctggttggtcaccagggggaatttccccgggtgaggtctcacgtctatgcaaatattgcactgcaattaacctggaccctgggatgggagagagaaaagaggagaggacactgggaaagacagaagggcaggtaataggacctgaacattcccagggtaccaggcactgtgctaggctcctcatgaaattaatctcattttgcctckaaagtatcctccaatgtaggaaaattgagtctgaggcccagtgagagggtgcgttgcccaagcaaaatcagcacattcctaccccaacgggataccaggcctcagggagaagtgatgatggtgacgatagatttggcgctgcggctgctgacaaaggtgacagtaatgaggcttgagtccgggactctagcaaggtttcattttaggtttccatctcactcaaccaggggagttttatcctgggaacggccaaaggcagcaggaaggtagtgaccctgactcaccttgggcaaatcccagcactctggtttttcaaagccctgtgggggcaagggatgtggtagctggcacagttaaccccttcaccaccagtttctagaatgctcctggaaaagtgaacagaatgggatccatacttttgaaggagaatcaatt

SEQ ID NO: 736929 - DNA, 543 bp, Homo sapiens
catttaggaggcaaatgcagcgcaccttttgggaagcaatttgtcaacatgcaccaaaagccttaaaaaagtttctgtcctttaaccaaattttttctttctttttttttttttttttgttttttttctttttttgagacattggctcgctctgtcacccaggctggagtgcaagggcrctatcatggctcactgcagcctcgacatcctgggttcaagcaaccctcccacctcagccccctgagtagctgcgactataggcacgtgccaccacacccagctaattttttgcacttttttttttggagagatgggtttctgtcaagttgccaggctgatctcaacctcctgggctcaagcgatccttggcctcccaaagtgctagtattacaggcgtaagccaccacgcctgaccctcattgctagggatttatcctaagaaaataaagatggatgtgggcaaagatatagctacaaggatgttcattacaatattgattataatggcaaaaagttgtaaataacttaaatgtcctaaaatag

SEQ ID NO: 736930 - DNA, 620 bp, Homo sapiens
ctacttttgagaaacagcgcttaccctgctactgggtcttagtagtgactgaatgcttaaccatgggccaccaagttaccatgtgacctaagctggccatcatgaacagtgtgttatctgacccatcaagctataaagttgggcatgatcagcagcactccrtcatcaaatggaaatagtatatatgagatgaacccaagcaggccctaaaggcacaagtaagttacaggaagaggtagcccacatgccatagtccctaatccagctacactgccttctctctcccagtctgcacctatggccccatggagagttccctatgatcattctgacagaggtttacgatggttctacatgatatacaggtattaactggaagtgcacagctgcagtacactgtccctctctgggatatctttgaagcaaagtggtgaagagaaatcctccctgtggacagaacttcaagcagtacatttgattgtaaactttccttggaaggagaaatggccagacatgtgattacacaacaattcaggggctgtggccaatggtctgaatggatggtcagggacttggaaggaatacgacttggaagaccatgtcttccaagaatacctaca

SEQ ID NO: 736931 - DNA, 564 bp, Homo sapiens
gggggcagatatgcccaaacaccaaaattccacgtgactcaacagatcctgaaaacatgttgcatgtccaagaagttcaaagcactgttttactgtaagaggaaaacttactactagttgaattaagaccaattattctaaaatttctatcgcttcaaactaaaaatgtgacctctcaagacatttatatttcatctaagctaatgactattcttgttttttttgtttgtttgtttgttttgagacacagtctcattctattgcccaggctggagtgcaatggtgcaatcytggctcactgcaacctccacctcctgggttcaagtgattctcctgcctcagcctcccaaataactgggattacaggcatgcaccaccatgcccggctaatttttgtatttttagtagagacagggtttcaccatgttggtcaggctggtctcgaactcctgacctcaggtgatccacccgcctcagcctcccaaagtgctgggatcacaggaatgagccactcttgtacttctttaaccctaacgtataatgagtaacacaatgaaacctaga

SEQ ID NO: 736932 - DNA, 619 bp, Homo sapiens
cactccagcctgggcgacagggcaagactccatctcaaaaaaaaagtagccgggcatggtggcgcatgtctgtaatcccagctattcaggaggctgaggcaagagaattgcttgaacctgggaggcagaggttgtggtgagccaagatcatgccatcgcactctagcctgggcaacaagaacraaactcctctcaaaaaaaaaaaaaaaaaaaaaattgaaatagcctatagtgcatccacctaaaaatatggcagagtggctccaatatctattaatgataaaaaactttcagtaagctagtaatagaggatatcttgataaagaatatctacaaaaagcctacaactaacatcatacttaatggtgagaaatttgaagcttccccagtaagatcaggaacaagacaaggttgtccccttttaccacttcttttcaacatcatactgaaagttctagctgcatgcaaaaagacaagaaaaggaagtaaaaggcagaaagactgggaagaaggaacaactgcttttcttggtaggtgacccaattcagaaatccagatattttcccaaagtcctacttctctcttaccacccaaatcttccataactagccaattcccc

SEQ ID NO: 736933 - DNA, 619 bp, Homo sapiens
cactccagcctgggcgacagggcaagactccatctcaaaaaaaaagtagccgggcatggtggcgcatgtctgtaatcccagctattcaggaggctgaggcaagagaattgcttgaacctgggaggcagaggttgtggtgagccaagatcatgccatcgcactctagcctgggcaacaagaacaaaactcctctcaaaaaaaaaaaaaaaaaaaaaattgaaatagcctatagtgcatccacctaaaaatatggcagagtggctccaatatctaytaatgataaaaaactttcagtaagctagtaatagaggatatcttgataaagaatatctacaaaaagcctacaactaacatcatacttaatggtgagaaatttgaagcttccccagtaagatcaggaacaagacaaggttgtccccttttaccacttcttttcaacatcatactgaaagttctagctgcatgcaaaaagacaagaaaaggaagtaaaaggcagaaagactgggaagaaggaacaactgcttttcttggtaggtgacccaattcagaaatccagatattttcccaaagtcctacttctctcttaccacccaaatcttccataactagccaattcccc

SEQ ID NO: 736934 - DNA, 631 bp, Homo sapiens
tcattcattaaacctcagggagttttcctggagtatattatttaaggggaaagaggtaagaaaacataataatagttaattgatttcttattcaataaacagaaaatgattctaggaaataaaattaaggttcactgttcatcaggtagactgccatacttcaaattactcaaatgccaaatataacttctgatgtctccctgattaattatagattttgattctaagatactatacgtacttggatattcagctagggtttttcgtttttgttttagaatttgtttctaatcaaatcatttgaaaatttaagtaggaaaataataatggttcagaaatgtacttaaaaaattaaaactcacttatgtaaccttcatactattgtttttaatctccaggcaagtaacactaaatagactttgctgtaattgctcaactgttagactctgcaaatatgatcatatggaaatctctagamcggcagaagtttttcaaggtaaattcactgattagaacctatccataaattatttacactgtggcaattcattaatttgaataatgtgcttgcttttttccccttaagatctgaaatttctatttgaaaataaagtggttttttcaaatacaa

SEQ ID NO: 736935 - DNA, 624 bp, Homo sapiens
  misc_feature 4, 7, 8: n = A,T,C or G
tcanganntttaaaatgtaaacatacatctctagtcccaacagtctctttaattttgcaatgttatgtagaaatgtccccttgccggcagctagcccaatcttcttttcacagtcacccgttccagaggttatgtttatagctagaaccagtgtattttggcttttgcctttatttattctttatgagaactgggaactatggtgacccagcaaaagcctgggtgaccatggaagtagtctgtattagcgcctggacaccagagaaaagggaaaatgtgatcctcattcagccctggttgayagagatcatgcctttaaatggtcagtctcaaagacattcagttgtcacaagtgcagatttaccagttggcagttcagattgttactgtacagtgagtgtgagggtctttagaactggttttagtaatgtagcatatatacaggaatcttaggggatgtgtcatactgttttcaatagtcagggatagcatattggttaatcccaggcacttctgacacatatggttctgattgtgtaggcagaatgggcatgacaaggagggaaccttatcagctctttaaactaagtctgggttacattatacagaccatccaattctttg

SEQ ID NO: 736936 - DNA, 493 bp, Homo sapiens
attctatcagatatagttcacaaagagagtgaaataattaaaaagaataaaaattctggagatgaaaaatgcaatgggcatactgaagaatgcagcagagtcccttgacagcagaactgatcaagcagaagaaagaatcagtgagcttgaagtcaggctacttgaaaatacacaatcagaggagacaaaagaaaaaaaataaaaaacaatgaagtatgcctayaggatctagaaaatagcctgaaaagggcaaatttaagagttactggccttaatgaggaggcagaaagagataaaagtggaaagtttattcaaagggataacaacagagaactactcaaacctagagaaaggtatcagtatccaagtacaagaaggttatagaacaccaagctgatttaacccaaagaagactacttcaagacatttaataataaaacttgcaaaggtcagggataaagaaaggatcctaaaagcagcaaaagaaaataaa

SEQ ID NO: 736937 - DNA, 618 bp, Homo sapiens
cccagtgtcggtggttcccttggttgtgtccacgtgcgttgttacttagctcccactcataagagagaacacatgcagtatttggttttctgttcctgtgctagtttgctaagaataatggtcttcagttccatccatgttgctgaaaaggacatgatcttgttttttatgactgcataatatttcatggtgtatatacactccattttctttacccagtctgccattcatgggtgcttgactccatgtctttgctattgtgaatagtgctgcaatgaacatacatgtgcatatgttttatggtagaacgatttatattccttggtgtatatacccaataatgtgatggctgggtttaaaagtagttctaagttctttgaggaattgccacactgatttccacaatgggtgaactaatttacactccyaccagcagtgtataggtgttccctcttctctataacccctccagcatctgtaattttttgatttttaaaataatagccattctgactaatataagatatcacgctgtggttctgatttgcatttctctaattattactgacgtacagcattttttcatatgcttgttggctgcatgtatgtcttcttttg

SEQ ID NO: 736938 - DNA, 619 bp, Homo sapiens
ggccaaaagaatgaaagtgcactaaagaagagtgataatactagaagtgaaacttgcattaaacataaatggagcaaatgaaaaaaaagctgcctgtgggaacatgctgattgtggcaacaatgacactgccgccatttgagacattctagatatgcagactgaggaaatcagtgaaggtgaacttatagacataaatgaggaaaagtgattgtgatgaaaggctgatgatgtgtcagaggaagtgacastggcaaaaaaaacacattaaaggaactctcagagatatttcacaacattgaaaacgtaatggataaaatgttggaaactaatatttaaatttctccagaacgcagaactcataagcaactgtgttctccaagtaaatatcttcacaggttcctcaattaatgtgggcaaaattaaaagtacaacttgcttcttccctttggaaaaccctctctcagagtatattaccaacattcaacttcttatacaaggcatagatctgggaatcattattcattcttctctttttgtcattcacgtatccactcaatttccatggcctgttgattctatttctcagacgttgttcaaatctctccactatctttatt

SEQ ID NO: 736939 - DNA, 531 bp, Homo sapiens
ctaaatttggcctaaggatgcctccatacttgagtccttatggaacaaactgcaacctaacttagtacataaattaactaaaagcctaacttaggagtatacttttggagctaatatctgagtctcagccaatcatagcagcccagcttcagtcagtcgcagcccccagctgaggagaccatgttcaaataaggcaaatgcccagctgtaatcaatagagctgtctctgtacctccattttctgtccataaaygctgcctgaccatattgcaggctagagctctctgaacctgttttggttttgaggattgcctcatttgtgaattgttttttgctcaaataaactctgctaaatttactttgaagtttttcttttaacagattggcatcggaagtgggatccaaagtaaacctccattggcagagtgtgatggctcacatctgtgatcccagctctttgggaggctgaggcaggctgatcccttgagggcagaagtttgagatcagcctggcaaacgtggcgaaacccca

SEQ ID NO: 736940 - DNA, 596 bp, Homo sapiens
acaggctctttgggctgaggctaatccacaactggactgtatgcaggatcctgtgcagaaaagctgatgggccccaaaacctgggtttctggattaccaacaaagacaagtacgtaagtatcaaaggacttttctgtatcccagagagctacaaaggcacatagaggtatagatgtgccagcaattaagctcatgccaaagtcatgacctacaaacatgtatggccttgagataagagaccaagatgttgtcccacaatggcctcatyacccccacaggagactggggttcactctaattcaaacgtagtattccccaaatgacttgatatacccctgggcagagagaggcacttgatagttaacaggactaaaaagagggctgagacaggggtttgagcatggtaaaaaataaaatcaaaaataaaccaaaacccaacttcacagctaataagaacagaaaagtgtctcccaccctctcataacccatacatcaggaaaacttgaggttgtccaatttcgaagtcatctaacctggcatttctgacttctgaattcaatgggcttgaaaagattttcccaaaaaagtggtgttgg

SEQ ID NO: 736941 - DNA, 542 bp, Homo sapiens
actatagaaacaatgggggaaatgggagagcatatgcaaaaaatactgtttagtgttttccataatcatatcagcggtagcattagtattgctattctgatattgttgtgtgtataacatgggtaagacaagaatctaattctactacctcctgtatccttgaaaaccagggctcttgctataaagaaaggagctacagaaatataatagagaaaaaattcaacagtctttaatttatatatttatgaactcacagggtattttctctttaaatgtaaataaaatacaactataaacatatttataatctcctccccctgtccaatytcaaggcaagaaacaagcccagtagcaaagagcattcctaatgcccaatttgtggtcttaaaataccatttccctctaaaagaaaccaagcagtttcttagagaaatgatgaattccaggtctggtgtagggaatgtgccagatggatctggaatatcttaatgcagcagagagcaaggcagtcatcaaagactactgaggtcatgtcacaagga

SEQ ID NO: 736942 - DNA, 542 bp, Homo sapiens
actatagaaacaatgggggaaatgggagagcatatgcaaaaaatactgtttagtgttttccataatcatatcagcggtagcattagtattgctattctgatattgttgtgtgtataacatgggtaagacaagaatctaattctactacctcctgtatccttgaaaaccagggctcttgctataaagaaaggagctacagaaatataatagagaaaaaattcaacagtctttaatttatatatttatgaactcacagggtattttctctttaaatgtaaataaaatacaactataaacatatttataatctcctccccctgtccaatctcaaggcaagaaacaagcccagtagcaaagagcattcctaatgcccaatttgtggtyttaaaataccatttccctctaaaagaaaccaagcagtttcttagagaaatgatgaattccaggtctggtgtagggaatgtgccagatggatctggaatatcttaatgcagcagagagcaaggcagtcatcaaagactactgaggtcatgtcacaagga

SEQ ID NO: 736943 - DNA, 545 bp, Homo sapiens
tgggggagagggagagagagtgataaaacagatgtggagaatgataacagccaatgtggataaaggatatacaggatcctctgtaccagccttgcatctttcctattagtttgaaattattttacaataaaaagttttttaaaaaatgaataaaaatgaataaatgaggaaagggatgccaggaggaggaggacccctcagktataaaggcaggagggcaggaaagggcttggtccctttggggaacttgcaggtaggctgtgtggttggagggtggccctggggctggggagggaagagcaggggatggagctggagcccccactatggactctctggagggagtgcagtattgaactgttcagtcaacgttcatctacactttcccctctctttttcccttggtgatttttgaccaaaagtctgattgcatgaagccagtgtgtctcaggtcttccatctgatttctcttttgtcttaacaatagagaaaatctcatccgtgtatgcaggttactccttctgctgtgaaactgtgactttcct

SEQ ID NO: 736944 - DNA, 577 bp, Homo sapiens
ggtcatgaaagcatgtgtgatgatgagagagggtgaggggggaggagcaggaagggaggttggacaggaaggtggggccccgtgcctctgtctcctagcaatgtcaggcctgaccttgggagggcagatactgagccctgtcctgcagcagcatccacccctcatctgtcccaccccagctctacagcgtgcaagacagacagagtgtgtgcgatacatttcaaaggggcattctacatctatcatgtggatgtcataattcagtacratgcacaaacagtaccacaacgacttgacagtctggctggggcaatgagaattagataagcaaaagcaatatccaatttatcacatggacttggagctgagatgaaaacacatatgactgatgatgttcacggagtgacaggatcacacggatatacccagggtcacgtacagtttccatgcctggggctataagagctacaatggcatctctttttctcccacccagtaaagcacagggtacagcagatgtgtgagtgtcatgatataaagacgtactagacacaaagatgtgtgccttctgtaatgt

SEQ ID NO: 736945 - DNA, 577 bp, Homo sapiens
ctggatgacacaactgggaagtcagttgggactatgaccaatgggaagcaggagatgagagacaatcaggtagaaaaacttccttttctctctgtctacggactcctctgagatgctgttccccctggtgagctactgaagcagtgcccccatgctgcaagagcatacctgctgggtgttggcactactgtgaagagaaarctgcagtcatcaccccttgaagtttcctgaatcactttcccttttatcctcaccatcgctgtctcaggctcacactccccttccccaaataaactgtcagtgacttaatcctgccttagtctctgttttctagaggacacaggcttaagtatgacaaagaataaccatacatttgatctaatttgtaagataaaagtaagtcattcacaaacactgatgcttttggaacggtcacaaaattacttgtgacacccttatagcacgtcccagcccacagtatctcacaatgctagggaatggtaggttagaatacagagtactggtgggttgcgattcaagtactcaaaggtgctctcatacctattcattaattcaa

SEQ ID NO: 736946 - DNA, 619 bp, Homo sapiens
ggcaggacaacaggcagcctaaattacatcattcatttaacaggtctaacatatggcaactattaaatctccaaaacaaatgcaaagctaaccagcactctcatagaaaagacactttcattcttgatttttctaataaaatgcttcagtctaagttactgccaatttcaaaacaataataacatatatttctaaatccaataacaatataggacttgctaaaatactaatagccatctgataatatataaaatgttaaatattcttgtttttatatctttcacaatttttttcaggagctctgtaggaataatttaatgctttaaagcaacaattagattctgtaatacataaatcagctcataattattttcagaatgaaggacccacaaatkcattatattaaagctggccttggcttaaaacaagtgaaacacatcttcaattctgtcattttccagttaatctcacttgctgatgcaaaaagcataggagaaaactccagtgatcttttagggaaactaattttactcttgttctacacagtcttcaaataattaccctataccctgatgtgattattacacattgtatgcctgtaccaaaatacatcatgtac

SEQ ID NO: 736947 - DNA, 619 bp, Homo sapiens
ggcaggacaacaggcagcctaaattacatcattcatttaacaggtctaacatatggcaactattaaatctccaaaacaaatgcaaagctaaccagcactctcatagaaaagacactttcattcttgatttttctaataaaatgcttcagtctaagttactgccaatttcaaaacaataataacatatatttctaaatccaataacaatataggacttgctaaaatactaatagccatctgataatatataaaatgttaaatattcttgtttttatatctttcacaatttttttcaggagctctgtaggaataatttaatgctttaaagcaacaattagattctgtaatacataaatcagctcataattattttcagaatgaaggacccacaaattcattatattaaagctggccttkgcttaaaacaagtgaaacacatcttcaattctgtcattttccagttaatctcacttgctgatgcaaaaagcataggagaaaactccagtgatcttttagggaaactaattttactcttgttctacacagtcttcaaataattaccctataccctgatgtgattattacacattgtatgcctgtaccaaaatacatcatgtac

SEQ ID NO: 736948 - DNA, 573 bp, Homo sapiens
tattgtcttctctggcctcagcactgctgaaggtactgggatacagtgccacatgagtcagaggaggttcctgcttccaaggaggctgagcctcagcttttggggtacatggtgtaacagacctgggatgaagggattggatatggcaaagaggaatgttccaggaaacaaacatcaaaattgttttaaggggaatgttggctgtagaacctatacctcttaaaatgtcagagatsccatagaacaaatattagtttttctatcatgcttctacctatagtttttcactacagcattgaaatatgcagagctcctatttaagtcaaaagctattgtataatcttttctgaatgaaggcagtaattactccttataatatggtttattataagaaactgataaaatgttagatctcaaaacaatatgcacaataaaatcctgatacaacatagttaatctatactttgggggtttctttcaattatcattataaaaaggtttcactctaacaagaagagcagattaatttgtaaaagaattagatatgctggtttagttcaataaagaaaaaca

SEQ ID NO: 736949 - DNA, 579 bp, Homo sapiens
tgtgcacaatcaacaacgcaccacagaagagctctgtcaagaatgtcattcattatatcacacaatgccatttctattaagacttcagaaaatacctgcctgtccccagcctcaggaatacttctgtatctccaaagccacaaatatgtttgtatcttttgtacacctcaccccttgcttcattctaatatccatgcctttgtattgttgtcttttattttcctttaacattatgttattttactctctcttattctctctctctcacacacacacacacgtgcgtgcgcrcacacacacacacacacacatctgtaaacattagacctgtctggaacaacgcagacagaagaaaggaattataaattctctaagtccaggatttattatactagccatttgttaacttatgccctaatgactgcacatatttttcatctatgattcttcctctccttatttcccaattccccccccccagttttatcataaacactaatcagtggcttatccaatattcagtgatttttttaaagaaatgcatctctttacatctgctagttatttaaaagttgccaa

SEQ ID NO: 736950 - DNA, 568 bp, Homo sapiens
gagccagccctgccctccagactcacctccccccaagctgcagccgggggctccacgggtgggtagaatttgggcaggtcccaggctatcttcgtcataaaccacttgaaactcttgcagttaagggagctgcggagctttttctggactgcgacatccccagcggagaggtggcggtattcaggccggcgctggtaaatgtactctgcgtactcatccatccacacttcggccacccgcttaaggttctatggggcaagaagcaatggaggggtcagtctttccaagaagccaaagccaggcagtggggtgaaaagggtcctggcaggtcgaggtcaacccttcttattttatgttscatcaaaaatcccagccccaccgtgagtttaggccttctgtgtttctatttatcattatgcatgttttaagggcttcacagcttatagttggcccataggctgctgttgttttgcctgcccatcttccatcccatcttcttctagcgatagcccccactgattttcctctggggagccaccctgtctccctgtcagctcatgtggcagga

SEQ ID NO: 736951 - DNA, 563 bp, Homo sapiens
agatttccatttgcagccagtggccaatttaattgaagcaatgattgatagaaaccattttaaggcaatgaaacagtttgacatgcagaggttttggcagtaagagtagacagggggtgaggagaagagaaagacactgacatttatgaagcccacttcccctccagaaatttagtacgcaagctttcccaaacacaccacaccacaccacctgtattaatatttatctaacatgtttttttacatcacctctggtctaactttgcacctactttagctgtatgctaagtaataatatctgtgaaattacaggttagctacacgaatacacattaatttagaatccacattaacttaaacacatgaacaagaaaacattcctgtgtttgctgcctaagatcgtctcctctgtcacactytgggaaacagtatcacctccttaattctcctggcaatgctgggagttggaaagaattagctctctttaaacaaaggaggaaacacaggttcagaggacttaagcaaccctccccaggtcacatagcaatgaatggttaagtagg

SEQ ID NO: 736952 - DNA, 597 bp, Homo sapiens
cccaacaccacttttttgggaaaatcttttcaagcccattgaattcagaagtcagaaatgccaggttagatgacttcgaaattggacaacctcaagttttcctgatgtatgggttatgagagggtgggagacacttttctgttcttattagctgtgaagttgggttttggtttatttttgattttattttttaccatgctcaaacccctgtctcagccctctttttagtcctgttaactatcaagtgcctctctctgcccaggggtatatcaagtcatttggggaatactacgtttgaattagagtgaaccccagtctcctgtgggggtratgaggccattgtgggacaacatcttggtctcttatctcaaggccatacatgtttgtaggtcatgagtttggcatgagcttaattgctggcacatctctacctctatgtgcctttgtagctctctgggatacagaaaagtcctttgatacttacgtacttgtctttgttggtaatccagaaacccaggttttggggcccatcagcttttctgcacaggatcctgcatacagtccagttgtggattagcctcagcccaaagagcctgt

SEQ ID NO: 736953 - DNA, 599 bp, Homo sapiens
gaattaatgaataggtatgagagcacctttgagtacttgaatcgcaacccaccagtactctgtattctaacctaccattccctagcattgtgagatactgtgggctgggacgtgctataagggtgtcacaagtaattttgtgaccgttccaaaagcatcagtgtttgtgaatgacttacttttatcttacaaattagatcaaatgtatggttattctttgtcatacttaagcctgtgtcctctagaaaacagagactaaggcaggattaagtcactgacagtttatttggggaaggggagtgtgagcctgagacagcgatggtgaggataaaagggaaagtgattcaggaaacttcaaggggtgatgactgcagytttctcttcacagtagtgccaacacccagcaggtatgctcttgcagcatgggggcactgcttcagtagctcaccagggggaacagcatctcagaggagtccgtagacagagagaaaaggaagtttttctacctgattgtctctcatctcctgcttcccattggtcatagtcccaactgacttcccagttgtgtcatccagttctgtggtggctactcagaaagc

SEQ ID NO: 736954 - DNA, 577 bp, Homo sapiens
acattacagaaggcacacatctttgtgtctagtacgtctttatatcatgacactcacacatctgctgtaccctgtgctttactgggtgggagaaaaagagatgccattgtagctcttatagccccaggcatggaaactgtacgtgaccctgggtatatccgtgtgatcctgtcactccgtgaacatcatcagtcatatgtgttttcatctcagctccaagtccatgtgataaattggatattgcttttgcttatctaattctcattgccccagccagactgtcaagtcgttgtggtactgtttgtgcatygtactgaattatgacatccacatgatagatgtagaatgcccctttgaaatgtatcgcacacactctgtctgtcttgcacgctgtagagctggggtgggacagatgaggggtggatgctgctgcaggacagggctcagtatctgccctcccaaggtcaggcctgacattgctaggagacagaggcacggggccccaccttcctgtccaacctcccttcctgctcctcccccctcaccctctctcatcatcacacatgctttcatgacc

SEQ ID NO: 736955 - DNA, 634 bp, Homo sapiens
tattaggatccccctccataatatggcataacagtagtgccacccccaatctccagtttaacttctaagctggcccctgcctcaccctctgatttttttttaagattgagatataatccacttaccatgaagtttatccttttaaagtgtacaattcagtggtttttagtatcttcacaaagttgtgcaacgatttccactaattccagaactttttttttttttttttttgagacagagtytcactctgtcacccaggctggagtgcagtggcgcaatctcagctcactgcaacatccgcctcctgggttcaagcaattctcctgcctcggcctcctgagtagctgggattacaggcacccgccaccacgcctggctaattttttgtatttttagtagagacgggatttcactgtgttggccaggctggtcttgaactcctacctcgtgatctgcccgcctcggcctcccaaagtgctgggattacaggtgtgagccaccgcatctggcccagaacacttttatcattccaaaaccaagggtcccccccagcagtcactctccattctccactcccctcatcccctggggccattcatttactttttgcctttgttgattttcctcttctgga

SEQ ID NO: 736956 - DNA, 582 bp, Homo sapiens
acttatgtaatgcatcttttactttttccaaactaaatctaaatactttaacggcattttgtcaacagtcctttgagtatgtgaaagtggtttcagtgcgaaatctgatgtttcctcaaatgttctcttttagcagatccataaaataatgttaatcttttttattctaaaaattgacataattctaggcacagttataactatgtctcctagtaacaaatttaaactatgtgcyatatgtggtagaaaaaatacccctggattttcagctaaaagttaatgccatttccacgggcttgccctgacagtcttttaaataaattcctcaagttgaaagttgatttttttttttccagttctcctttatatgattgtctttgtcttttctcttacccaagtgcctccacagctcaaactgctccacagttccagggagcgctcatacctgatattagtggtggcacaatccacaaacctttcctgttcttagatgcagtagcattttgtctcaaggatgcacacaagagattaaaaagattccacgggggcctgaatggtgtgtcgcagagcagatgtttagga

SEQ ID NO: 736957 - DNA, 611 bp, Homo sapiens
agcctgttttctacttatagcacatcacgattcagattagcggctcatcaagttctcaaaagccacatgcagctggtagctgccatattggacggcacagctctgtaacctaaaacatctggacatgcacttggaaaagtcaagtttttaaaaacttgggttttggtgaatttgttttcctactcatcccagaataactgaccgaaagagctgcrgctgggtcaccagtcgctggctggctaagggcagaacccatctgtccctggcttgttagacccttcgtaagccacccaccctcctcagggagactgagcctggaacagacagtgaaccctgttgttcttttctggggagacaaagctgcaggccctgctacctgcctgacagggccattgtggctagaggagaaaagggctttgtcaggaagcagccgagaagactgcagttcaatggggccctttatgtctacactggcaagatgctctgatgccagccctgttgaggcccagcccccttttagaacagatggggagcctgaggcccagtgaggttgtgaaagtccctgcagtggatcctagcctccttcccctcatgccactgccctaaaacat

SEQ ID NO: 736958 - DNA, 541 bp, Homo sapiens
cattgctgcagatttaagacaggcccctgggaagactgaatgccatgggaaagccgcagagcaactatctgatctcatatctactaaaaatacaaaaattagccaggtgaggcggggggcagtggctcacgcctgtaatcccagtactttgggaggctgaggtgggtggatcacctgaggtcagaagttcaagaccagcctggccaacatggtgaaactccgtctctactaaaaatacaaaaattagstgggcatggtggtgcacacctgtagtcccaggtactcgggaggctgaggcaggagaatcactggaacccgggaggcagaggttgcagtgagccgcaattttgccactgcattccagcctgggcaacagagtgagactccagctcaaaaataataataattagccaggggtggtagtgcacacctgtagtcctagctacttgaggggggtgaggcaggaggatctcctgagccttgggaggtcaaggctgcagtgagccatgactgtgccctgcactccagcctgggaattcca

SEQ ID NO: 736959 - DNA, 581 bp, Homo sapiens
ttcattttctcacagttctaaagcctagaaatccaagatcgatgttctggctgattcggtttcttgtgagagctctccttctggcttgcaaatggccactgtctcactatagtctcacatggtgtttccctgcttcctcttttacaagaacattgatcccattgcatcaggaccccacactcatgacttcattaaacttagttacttccaaaggccccatctctaaatactatcacattgaggcctagggttccaacatgtaaatttttggaaagcacaatttagttcataatagctaaatgctggtatccagggaatagctgaagtgactgaagtcagacaggtagaggtaagtccaggataactttccaagcatcctccyctgctcagtgttttttcactggagggtagccctctggctgaatttgtcaaagaggactcttcttttgtttacctgttaggtattctgaagatctgtataagaattgcccttgcttatgagcaaaacaagcaactaactacccagaagtatttggtgtgtacaaactaccctaaaatatccctgattcttgcctgaagct

SEQ ID NO: 736960 - DNA, 639 bp, Homo sapiens
gcttggagctgaatgaaggaagatggaaaaaaagatgggaaataatatcaaagaggtaggcaaggcccttatcccatgtatgatttacaaacattttctcccaatctgtgggctgtctcttcatgctgttgattgtttcctttgctgtgcagaagctttttagtttgaggcaatcccatttgtctatttttgttcttgttgcctgtgcttttggggtcatatataagaaatctctgctcaaaccagtgtcgtggagcttttcccttatgttttctttcagtagtyttacagtttcagatcttaagtttaagtctttcacccgttttaagctgattcttatatacatggtgagatgaggatcaattttcattctgcatgtggatatttagttttaccaactaaagggaatgaagagaatgttatttccctgttgtgtgttcttggcacctttgttgaaaattaattggccacagttgtgtaggttaattttggataaggagttaatatccaaaatatacaattaactcaaactactcaataacatgaaaacaaataactctattttaagggcaaagaagctgaataaacatttctcaaaaggagacataagaatggccaacagatatattaaaaaatgtt

SEQ ID NO: 736961 - DNA, 639 bp, Homo sapiens
aacaaagaatagttttataagcaaagaggaatggaaaacagctattttatatataggcgaccaaccatgcttgcacagtagctcaattccctgctgaactattttaaaattctttataatactgagctgaaaactgcttattaatgatatatctccctagccattgattctagatctactctgatggctcacacaaaataaacacaatatgtttccatatggtaacttaaaacatatctgaaaactgaccattctatcaacatgtccagttttttcaatccttcagcatagtacagaactctagaggcagactggctgggttcaactcccagttctgctaggtggccctgggaaagttactttaatctctttgtaccagattcctcatctggtacaaaggaccagctagacggtcctgggaaagttactttaacctctttgtaccagattcctcacmtgaacaataaatacaatagcagtgcttacctcatagagcagttataaggattaaataagttaatatatatgaaacacttagaacagtacctggcacaaagttggtacatttaagtgcccactattacataataattcaacatttttggttgctttctgctttcttctgtcagcattccattt

SEQ ID NO: 736962 - DNA, 629 bp, Homo sapiens
taaagtagaaatattttagctgatatctcaaaaatgtccactatctgttaaaacagagtgaaccatgctagacttttgtttagtggtgtgtgtgtgtgtgtgtgtgtgtgtgtgtataaaggtagacaccagtgaaaagttagggggtaattatgtaacaatttaggggcaggagtgacgaatagttggcataatgccattatcccagtgggcgtttctgatgcccaagggcagacattgctaatcgatcatrtcactcatttttatgatcatatcactcctttcacgcagggctccaggcagccactaaaaaagccatgatgaaatctatttgtctctcctagtctgaagcataaaaccgataaccctagtcttatcagcaacattctctaacccttgggatatttggagggtgttctcatttgaatattcactcattcaacacatatttttaagtccctacacacacacacacagtcctagccaaccatagttgtaggtaatggtgataagtagaggatgaaacaaacaaaactctcatggaattttcatcctagtggggcagaggaagaaggagaataaaatgacatacaaagtacagacatactttaccttattgtgctttatgt

SEQ ID NO: 736963 - DNA, 573 bp, Homo sapiens
atgaaatcatgtctttgcaaggacatggatggagccagaagccattatcctcagcaaactaatgcaggaatagaaaaccaaacaccacatgttctcacttacaagtgagagctgaatgatgagaacacagggacacagggaggggaacaacacatactggggcctgtcaggggagtggaaggaggaagaatagctaatgcatgctgggcttaatacctaggtgatgggtcgatgggtacagcagaccaccatggcacatatttacctatgcaacaaacctgtacatcctgtacctgtaccccagaacttaaaatttaaaaaatcaaataaaaaaakctagattgaaaataaatacacatacatacctttctagtagttaaaattaataggctttgccattctggaatttaaaatatctgacattctaaaatttgtgagtataaacttgtcagtatctttctggagacaaaaatatgattagttgacatttttaaaacttaagatagatagtttggaagaataaaaattattaaacaaaaagatgattcattgacatgatttttaaaacttagg

SEQ ID NO: 736964 - DNA, 590 bp, Homo sapiens
ttgtccaatctttcacatacaggtgccaagccagcgctaaccctggcaccctggcttccttcttgggactcttactaaaataaattgtgtttatcaataagataattaagagacagtgaacaaatacctagaaaagttgtatatggcacatgtgcaggaaggacaaagctgtgtttctaccgaagattgtgaatgtacaacaaaccagaacatagatgtcatttacagttgtcagagcgaggtgttatctracagaaacctggaaaatgaagacaggactttcaatctagatggctggcaaatcacttttaggaacagcaagtgtggtattcagcaaaattcctgcaaaagtatttttctagatttttaaaccaaatagtagaaatttgaggaacagtcttacacaaaaacagaatagagtgtcagtgatctatttatccaagaaagtagagccacttttaaaccactgatgacaaaaaggaatttctattcttttaaagatccccagagtggaactgcctttgagaatttgttccaatgtttgaccacacataaatcgtaggaatttttaaacccaaaatatcacatga

SEQ ID NO: 736965 - DNA, 601 bp, Homo sapiens
agacactgacagcataaacaataaaaaaaactagtaaaagctctaccctttaactccatacccttgctttttaactttttgttatttctatttatactttattatactaagtcttgaaaagttattgtatttattattagattggttcatcttttagtcttcctattcaagaaatgagtagcttatacatcataattacgtgctataatattctgcgtttttctgtgtacttactattaccagtgagttttgtaccctcagatgatttcttcctgttcattagtgttcttctgtttcagattgaagtacactgtttagctttcttatggaacaggtctgatgtcgataaaatcctttagcttttctttgtctaggaragtctttatttttccttcatgtttgaaggatattttcactggatatattattctagggtaaaagttgtgtttcttttttttttttcccttcagcactttaaatatgtcatgccactttctcttggcctgtaaggtttccatggagaagtctgctaccagaatattggagctcccttgtatgttatttgttgcctttctcatgctgcttttaggatcctttttta

SEQ ID NO: 736966 - DNA, 587 bp, Homo sapiens
ctagctagaaatcaagttctgaccactgggttaggcaattcttctctagctagggctggtctaaaatgcttcctccatgagcacaggcagaattctggtccatgttgttttctgctctgatgggtagcactgagttccaatgcaaagttccacaactgctgaactctccctccccaaggcacacagattctctctccaaaccatgcagccactgccgggggacagtggcagtgattgcatggtgtggagggaygatgtcgggtgtcattaattgaagactgtcttttctacccccttctttgcctctttccttgataataaagccaggtactgtgatctctcatctgatttttggtttttgtgaaggagctttcttgtgtgaatagttgttcaactggtgttcctgtgagaaaaaacattactggaggagtctatctggccattttgttctacctccctcattagcattaatcttaaggggcacccgccattgccaaggcttgagtaggtaaacaaagcagccaggaatctcaaactgggtggagcccaccacagctcaaggaggcctgcctgcctctgtaggatcc

SEQ ID NO: 736967 - DNA, 615 bp, Homo sapiens
ttttcctttcatacttcctttttaaaagagatataattccccacccttaaatatgggctacacttagtgacttgcttctaaagtacaatgtagaaatgggggaaaatgtgacttttcagtggcaaaaactgacaaacactcttagccaggcaatcaggtaaacaccatcagtgggaattcacattgatagggatcttccctttataagcaaggttgagaatggtaccttatctctgtgattgtattctaaaaaaaatccttatccccagtgtaaccatatgaaaatcatcaggaaaacaaaatgaaggamcttctccaaaatacttgaccagtatgcctcctgtcaatgtcataaaaaaaaaattgagaaacagtcatagcctggagtaatataaaaagacatagcaactaaatataatgtgatatcctgtattggatcctgggcaaatgaatttagcaaaaactaatgaattacaaataaagtatacagcttaatcaataaaggaaaaagtaacaaactactaatacattcaacatagatgtgtcttatctgaaactctagaaaagttgtaaccgcaggaacagaaaatagaataaggattgctaggggccaga

SEQ ID NO: 736968 - DNA, 513 bp, Homo sapiens
ttgtcaaagtcaccttgtaagagagtaatgtagatgtcgttcctgacatcccctgaggcagagggagagagagacaagagttagtgtggattacagcaggagagacgctgactaactagaggggatggagggtgagaagaagctctcccacctggattggtattaattaaaatcagaattgcttagagaaagcatttttccctcatcagggaggctggagaagtaggtaacacggggatgaagggatgctaggaaatcagttgcaaaaagggaagtagggacactcaaaattggccatgtttttctcgacattaaaartcatttaattttcatcctctagtgacaccttctgggaaggcaaaggaaagctccaattgaattgatcctgtcccatgaaaacaaccaaacatatacatctgccgatatttcactgtgtaggagcagaatagagcaactttccatgtgtcctagggacacagggttaggagggagctgcagaggatcttcaggaag

SEQ ID NO: 736969 - DNA, 547 bp, Homo sapiens
atgcatagaagtttttggatatacagacatcatttttagttgttaccttcagggacagaaatggagagaggcagtaaaaaaggaaggagttgactctttagaaggaaaatgaattagacaagctgaattggcccctatgtccccaggggaaggtcagagcagctgtgtctcacctggcatgatgatctctgggaatcccagcttcctggccaccacggtkgtcctgtccaccaggtgtggatagtccttgcgaatctgaatgatgtcacccaccagcatcttcatggtcacccagaggcctgcaaaggaacagctcaccgtgaagagcccacttttgcaagtgacccctcagtcggccctcccgccacctctcccctctgtctttctggagatcactgggaacagagtcatacagccacagatgcagccacccagcccacagggcctctggaacaggcgatctctgggtctgaatcccgctaatgatttctagcggtgtcagcctctggcaaattatcccacttctctaagcccaaagtgaggatga

SEQ ID NO: 736970 - DNA, 583 bp, Homo sapiens
aacttattaaagtgcccccggaacaccggagatattcaggatgtatcaattcctctctgcttttgggcaccaggacatgcctccaattttcttcagaaaatgtgacttatccctgtagatcatatgttcccattcttcccagtggtctgtctggaaggaaagctaagtatyccagggttcaggattttgattcatttgctgaagagttaggggctcccaagctggagcaggctcagcccactggcatattggcactttaccttgccctccactgtcccccttggaggctatgactttgcccagcaggctgtgtaggaagtcattctcagctgtaaccctggaaaggaaaagagagcatgaaatgtccacatcgtgtcctccttgcgtttcaaggggtcccatgaatctccccagcccctccacacgcctcaggtgaaaagtgagtttgcatatgtcagcccagggtatatacatgccatcaagaggtacctcactttttatcacaaagcaatgtggctctgaaatttgggaatatcaatgctacaggtagaggccatttcttattctccaggaagatgcttat

SEQ ID NO: 736971 - DNA, 555 bp, Homo sapiens
tctgaaacctttccttaaatcagccactaaaggtcccaaaaccaaggtaaagaactcctacactagaatggggattatagaagtgggagtgtaggagagggtctgagaaaagctactccaatcaagctcataccctagttacagaaaatacgtcaaacactccaggcactgggcagggtgccattaaaattgcttgggtaataatcaaccactgactgcatctagatagagaggggagtcagagagcagacaggaggagaaaccgagcatccattctctctaactgactctcctcatccatcctcagggctgtgattagggcatgggcaatttccctttggctccaaagttattcataggacctggtagatcagataatcatctctccctgcccagagtaaagaytatggagatgaggacgtgacctatattaaagctcctggggcttctgctgaaactaatgggaaagaggtacattctttccactggttgctaagttggtaggatgcaagcttggaacagctggctgataatttgccaactagttggacagcc

SEQ ID NO: 736972 - DNA, 629 bp, Homo sapiens
atgggcttcacccctctgccctcatcactaagttctcttcacatggtactgctttccatatttgaacataactttaaattcttctttgataacttttcaacagccatacacataggtggaaagcatcattggttttatgaaaatccctgaggctaaatttggcccttagagcaaattgaaaaagagatgaagcccctttctatgtctctgaggtggaaatctatgggaagaaaccagcataatcyggcccaaatcacaaggaaaacaaggcatttctaacacagctacccggacaagaagaacctgggtaaaaagacttatgccaaaaccataataatcatatgagttctctaatcctaatattaggattattctgagtgttgaaaacacaatgattagtgtgtcttcaactaataatcatttattagttgatgcttaatagatatctgttgaattaattaatgtataacactagggatacgtcttaaggtttctattttattgatgagggaattgaagctcagacagttgaaacagcttcctccaggcaccattgctgagaagtgggatggctcagattcatatctgttcctgcctggctctaaagaccatactcactaccacggcat

SEQ ID NO: 736973 - DNA, 523 bp, Homo sapiens
atatgaatgcccgtggttgatgttcctggttcaaacttttcacatccagctgggtagcggcttatgttggaaaccctcttttgtgaccaatttaattgtgagtagagcagatctggttcaaatctcagctgtgtccactgttaactctgaaacctaagcaagttattgcccatctctaatgctcacccagcttttgtgagttgctttctgtggtttttcttattgttctgagtcggcgtggcagcagctcaccaagaccacggagaattgaaagccagtwgttcagaggaaaggagcaataaaaacactttctgctgatcaggtacctaccatgttccagacatggaactgggatcttcatatacagtgttttaaatcccaccagagatcttcaaggaaccactatcctcagtgttcataggaggctcataaagttaaatagttcatcccaaattacatgtattcatagtgctggagctaggatttgaatccatccaggtcatctgcctccaaagcactattc

SEQ ID NO: 736974 - DNA, 523 bp, Homo sapiens
atatgaatgcccgtggttgatgttcctggttcaaacttttcacatccagctgggtagcggcttatgttggaaaccctcttttgtgaccaatttaattgtgagtagagcagatctggttcaaatctcagctgtgtccactgttaactctgaaacctaagcaagttattgcccatctctaatgctcacccagcttttgtgagttgctttctgtggtttttcttattgttctgagtcggcgtggcagcagctcaccaagaccacggagaattgaaagccagtagttcagaggaaaggagcaataaaaacactttctgctgatcaggtacctaccatgttccagacatggaactgggatcttcatatacagtgttttaaatcccrccagagatcttcaaggaaccactatcctcagtgttcataggaggctcataaagttaaatagttcatcccaaattacatgtattcatagtgctggagctaggatttgaatccatccaggtcatctgcctccaaagcactattc

SEQ ID NO: 736975 - DNA, 624 bp, Homo sapiens
aaattctttgattgcgaacccttttcccctacagaatacctagcaccatcctatgggacaagaggctccaatagaacatagtttcagagacaatggctttggaatgttgttttatcttataatctacatttaaaagaataaagaataaatctctagatacaaaatccaataaccataaagtaaaagtctgacaaatatgacagcctgcaaattaaaatctttctatgcaatggaacaacaggataagtgggagaaaattcttgtaaaatatgttactgtaaaagggttamtattaatgatgcatgaaaaattttaaaaaccaataagaaaaaaatacccaaaataagaatagaaaaaggatatgaacatgcaatttagtaaatatagatgttcaataaatatggaaaagatgctcaaccatactagccaccaaaaagttgcaaattacacatcagatcaacaaaaatctacaagattgtatgtccaatggtagcaaggttatggggaaatggtcaattaaaggaaattggttactgtatcttccaaggtaattgacaatctctcctaaaatgtatatgtctatatgttttcatgcactaattcttctttgaacaatctatccta

SEQ ID NO: 736976 - DNA, 553 bp, Homo sapiens
catagtatatgagtcaatgttcttttttgcataagctggtttaaactgagtttccatcacatacaaatgaaattatccccaataatacattaactaaaacataattctgccaggaaatggaaataagaattttgtgattaagaatgctaagtctggccgggcgcagtagctcacacctgtaatcctagcactttcggaggccaaggccagtagattgcttgaggccaggagttcaagaccagtctggccaacatggcgaaactccttctctaactaaaaatacaaaaattagctggacatggtgtcacttgccggtaatcccagctactcaggaggctgaggcatgagaattgtttgaacctggaggctgcagtgagctgagatcctgccactgcattccarcctgggtaacagagcaagactctgtctccaaaaaaaaaaaacaaaaaataaaaaaagggctgagtcatctcagcccgatgatatatctgctgttctgcttcttctatagacaacatgttgggagtctaatgagcttggacaccgtggcaga

SEQ ID NO: 736977 - DNA, 619 bp, Homo sapiens
aactttgcatatagtatcttctgtcttaaaaatcttttaaactctgatgtggtctaaatattctaaaagctaatttaaggcatggataaatctgcttatataatactgattttaccacataagtttcttttttcttaaaatggctgcttttctttaatgtatgaacaaaaatttccaattatatactaacatcaagttcaaatcaattccattaaaatttagactttctttacaagctacctacctccactagttttatgcaaaaatagtgagtagtaaaaccatttggttttcacagaattttaagatgacaccatttatttatggaccaagagctatgttcttataaactctactatttgtyctactggaatagtctatataactaggacaaatattattgtctttttacttctgcccttcatgagttttatccatctcaagaacacttaattttctccaggctataggcacaaatgttcaaactcattaaaattaactaggttgtgtatgaattttaaaaatactttgatcaaagaaggaaaaagagtcattagcttttggggggaaattctgacctggggaaattttcaagtgttttaaaaagttctttaacaca

SEQ ID NO: 736978 - DNA, 557 bp, Homo sapiens
ttggggagttttctttggtgggtttaccttaagcaggcacaatttccaggaggtaacactgtgactgagaggtggtcattatggcatatctgtacagcccacaacgggatgtgaggattagtgggttcatctgcaggctgcatctagctgtcccatcaagaagtggtcaccagtgagcagttgtataaagcagatatctagctcaactacatttgttgagtcgtaggggtggtatagractgaaagctgtgacaagggtgactgagctctgcttctggtatgtgaaagtacaacatacacttaaaaggatggtaaggcggccaggcgcggttgctcatgcctgtaatcccagcactttgggaggccaaggcgggcagatcacaagatcaagagatagagaccatcctggctaacacagtgaaaccctatctctactaaaaatacaaaaattagatgggcgtggtggtgcatgcctgtaatcccagctactcaggaggctgaggcaggagaatcacttgaactcgggaggcagaggttgcagtgagctgagatcgcgc

SEQ ID NO: 736979 - DNA, 599 bp, Homo sapiens
gtttacactgataatctctgatgctaactaaacactgtaacgtttattctagtgttccctgttccatgttcataattccattctccaacagtgaaaaacctgactttcatgactctcagtctatttacttattatttattaaatcagtttaccctgcatgtagtcaaatacctggacgagtcagcccaaaggtgaaccctcagacactggcagccctcccccaccggcccccacttctttcaggcatgcaaaacaagagctccaaaaagaagggaaaggaataaggaaggaaggccagttagatagctcagccctgggcatggatgctgtccatttgagatggcagcccagggccaggacccggacatccataagcgcaggtcaaaatctcacatccccacaaaggagatggagagctagaataagaactgcataattttaatgtawacaaattgatcaaaattttcctttatggtttctggttttttacatcttgtttaagtaagctctatgccggagaacattaagatagtctcaaatattgtattctaaatgttatatattgttaccttttatgttaggtcttttaatgttcctgg

SEQ ID NO: 736980 - DNA, 598 bp, Homo sapiens
ctcaaaatcccatagttggctaagactatagaattactaaactcaagatgccctaacttctagaaccatcaccaatccactctcctgcctatgttccttacagactcttctccaagatttggaactttgggtgtataaataaaaggtataggggtggaggtagggtgaggtaccttatctctttaaacataaatcacatttataaatggtcacctgcttttgctcatgacattgcccaatggttccagccaaagagatcaaattgatggcagcccatgttagcatagtgaaacctggaccaacgcygccccttccagctaacaagccagtgtgaaatgaaagcaacttttgttgatagcgttgacagaaggtgccacatacaaattacaatcagttcaaaaattaattgccagattattaatttgaaggaaatgtacacagtgttgtttccctcttctggatctctggctgagtttcttttctgttgatgctgatctccctgctttcccctgctccccagcacaacactggagactctgaaggccttctccagtagagggtcaggcttttgctcttttgaatttactagtgggtcttg

SEQ ID NO: 736981 - DNA, 633 bp, Homo sapiens
aaaatcaagaatctgttaaaaaaacagcaccatgaataaagttaataaaatgagagaagatctttgaaatgtatacacctgacaagggactgatatctagaatcattaagacactcctacaaatcaacaaaaagaatgcagctctaaggaaagctgggaaaggataagaacagtttccaygagtggaatttatttctaataaattaacaaaaaattacaatgttggaaatttcaaatggtagtggggtggagattgttaccactcttctgaagagcaatgggcagttcttattcaaattcagtgtataaatgttcggtatatagcatacatgtatatatatatattcagtatgcagcatatatgtataaatattcatcatgtatatactgtatgtgtgtgtgtgaatgcaaacatatactttcaccaagcaattgcagtgctgagtttatgctctgaagattttcccaaccaaataatgaggcatgtttagaagcatactcatcacaatattggaaattaagtatctattccaatccaagtatctatctctgagcatcagacaggtgtccagtggtggacgtattccatgaagcacaacgaaggcattaaagaacccataaaaaaggccaggc

SEQ ID NO: 736982 - DNA, 633 bp, Homo sapiens
aaaatcaagaatctgttaaaaaaacagcaccatgaataaagttaataaaatgagagaagatctttgaaatgtatacacctgacaagggactgatatctagaatcattaagacactcctacaaatcaacaaaaagaatgcagctctaaggaaagctgggaaaggataagaacagtttccatgagtggaatttatttctaataaattaacaaaaaattacaatgttggaaatttcaaatggtagtggggtggagattgttaccactcttctgaagagcaatgggcagttcttattcaaattcagtgtataaatgttcggtatatagcatacatgtatatatatatattcagtatgcagcatatatgtataaatattcatcatgtatatactgtatgtgtgtgtgtgaatgcaaacatatactttcaccaagcaattgcagtgctgagtttatgctctgaagattttcccaaccaaatratgaggcatgtttagaagcatactcatcacaatattggaaattaagtatctattccaatccaagtatctatctctgagcatcagacaggtgtccagtggtggacgtattccatgaagcacaacgaaggcattaaagaacccataaaaaaggccaggc

SEQ ID NO: 736983 - DNA, 608 bp, Homo sapiens
ctagaaaaattctcattataaaacttatttcatgttttcctgaatccaagaatgaaatatatttaattataaagttaaagcttccctgtgctttagagagataagccttcctttcttttaatactccaattgggactacttctttcttgygtcagctaaaattcaagaactgttgatttctctgccatcaggtggccagttgaaaatgatcctctgaacccaaacacaatttaatattactcattgctatcagaataattcagtcaccagcacattctctgcctcatatcatcatttttgttgttgttgttgttgttttgttttgttttgttttggacagggtctcgttctattgcccaggctggaatgtgcagtggtgtgatctcggctcactacagccttcgcttctggggctcaactgatcctcccaccttggcctccagagtagctgggatttcaggcacgcaccaccatacccagctaatttctgtattttttgtagagatggggcgtcgccatgttgcccaagctggatattatcactgttttcctcaattttcatcacatactatcatatctctctccatcccctccatcccttctaggga

SEQ ID NO: 736984 - DNA, 608 bp, Homo sapiens
ctagaaaaattctcattataaaacttatttcatgttttcctgaatccaagaatgaaatatatttaattataaagttaaagcttccctgtgctttagagagataagccttcctttcttttaatactccaattgggactacttctttcttgcgtcagctaaaattcaagaactgttgatttctctgccatcaggtggccagttgaaaatgatcctctgaacccaaacacaatttaatattactcattgctatcagaataattcagtcaccagcacattctctgcctcatatcatcatttttgttgttgttgttgttgttttgttttgttttgttttggacagggtctcgttctrttgcccaggctggaatgtgcagtggtgtgatctcggctcactacagccttcgcttctggggctcaactgatcctcccaccttggcctccagagtagctgggatttcaggcacgcaccaccatacccagctaatttctgtattttttgtagagatggggcgtcgccatgttgcccaagctggatattatcactgttttcctcaattttcatcacatactatcatatctctctccatcccctccatcccttctaggga

SEQ ID NO: 736985 - DNA, 571 bp, Homo sapiens
aaactcaagtcagcaagaaaaaaaacaaagaatcccatcagaaggtgacctaagaacatgaatagacaattcccaaaagaagacacacaagtggccagcaaacatatgaaaaaatgcttaacatcattaattatcaggtaaatgcaaattaagatcacaatgagataccaccttactcctgcaagaatggcaataatttaaaaatcaaaaaataatagatgtygatatggatgtggtgagaaaagaacacttttacactgctggtgggaatgtaaactagtacaaccactatggaaaacagtatagagagttcttaaagaactaaaagtagaactaccatttgacccagcaatcccactactgggtatctacccagaagaaaagaagtcattatatgaaaaagacacttgcacacatgtttatagcagcacaattcacaattgcaaaaatgtggaaccagcctaagtgcccatcagccaatgagtggataaagaaaatatggtaaatatacctcatggaatactactcagccataaaaaggaatgaaataatggcattctcggcaacttgg

SEQ ID NO: 736986 - DNA, 554 bp, Homo sapiens
acatgtttatagcagcacaattcacaattgcaaaaatgtggaaccagcctaagtgcccatcagccaatgagtggataaagaaaatatggtaaatatacctcatggaatactactcagccataaaaaggaatgaaataatggcattctcggcaacttggatggagttggaaaccattattctaaatgaagtaattcaggaatggaaaaccaaatattgtatgttctcacttataagtgggagctaaactatgaggacacaaaggcataagaatgatataatggactttggggacatggggggaaaggagtgcaaaggataaaagactagcatgggtacagggtacactgctcaggtgacaggtggaccaaaatctcagtaattcctactaaaaaatyttatccaaataaccaaaaaccacccattctccaaaaactactgaaataaataaaataaaataaatccatgaaatagtaaaaaaaaaaaaaaaatgcagacatgtcagcccccatccccagagcttctgattcagtaggtctgacgtgggcccaaggta

SEQ ID NO: 736987 - DNA, 623 bp, Homo sapiens
ggtcagggcagggctagccatgtctgagctcagactccttgggcaggtcttgctgcagctgctgtgggggatgggggtgagagtcccaggtcactggagttgtgtacctcggaggattatggctgcctctgctgaggcatgcaggttgtcagggaagtgggggaaaaccagcagtcacaggcctcacccagcacccacaaactgtagagccagcctcactcccactgtgctccccgccccaacagccccaagtctgtttccaggcagtgggtgagrcaggcttgagaacttgcctcagggtacctgcctccctgaagtgagagaaaagggcttggttcttcccccacctgtgaagtctgcacaccggattttcaccctctcccgagttctggccaggaggcttctcaccctgctcaaatttttacaaagttcagctagagatttccttttccctttggaggtctacccctgactcctctggctgccctcccaatggatccctgtggtgctgggcaggaatgggctgcctggggacccagcgagctcccagggcctttctgctgctttctctgcccatgtgttttgcttggctctctaacttgactcagctccaggtaatgttg

SEQ ID NO: 736988 - DNA, 599 bp, Homo sapiens
ctgtaatcctagcactttgggaggttgaggtgggtggatcacatgaggccaggatttcgagaccagcctggccaacatggtgatacccagtctctactaaaaatacaaaaattagccatgcacagtggtgggaacctggaatcccagctacttgggaggctgaggcaggagaattgcttgaacctggggtggaggcttcagtgagccgggatcatgccactgcactgcagcatgggcgacgagcgagactcagtctaagcaaaaacaaaacacaaaaaacccaacattagccaggtgtgatggctcrtgcctgtgggtcccagctacttgggaggcttagtggggaggattgcttgaacctgggacatcgaggctgcagtgagacatgatttgccgctgtactccagcctgggcaacagagtgagacccagtcacaaaaagaaaaaaaataaataaataaaaggaggcaaccaggtaggtatctcccatggcatggtgaggtaggggtgagctatggtctcaatgtctgtgtcccccaaattgatatgttgaagcttaatcctcaacgttgacagtgttaaaagatgtgaggcatttgg

SEQ ID NO: 736989 - DNA, 599 bp, Homo sapiens
ctgtaatcctagcactttgggaggttgaggtgggtggatcacatgaggccaggatttcgagaccagcctggccaacatggtgatacccagtctctactaaaaatacaaaaattagccatgcacagtggtgggaacctggaatcccagctacttgggaggctgaggcaggagaattgcttgaacctggggtggaggcttcagtgagccgggatcatgccactgcactgcagcatgggcgacgagcgagactcagtctaagcaaaaacaaaacacaaaaaacccaacattagccaggtgtgatggctcatgcctgtgggtcccagctacttgggaggcttagtggggaggattgcttgaacctgggacatcgaggctgcagtgagacatgatttgccgctgtactccagcctgggcaasagagtgagacccagtcacaaaaagaaaaaaaataaataaataaaaggaggcaaccaggtaggtatctcccatggcatggtgaggtaggggtgagctatggtctcaatgtctgtgtcccccaaattgatatgttgaagcttaatcctcaacgttgacagtgttaaaagatgtgaggcatttgg

SEQ ID NO: 736990 - DNA, 599 bp, Homo sapiens
ctgtaatcctagcactttgggaggttgaggtgggtggatcacatgaggccaggatttcgagaccagcctggccaacatggtgatacccagtctctactaaaaatacaaaaattagccatgcacagtggtgggaacctggaatcccagctacttgggaggctgaggcaggagaattgcttgaacctggggtggaggcttcagtgagccgggatcatgccactgcactgcagcatgggcgacgagcgagactcagtctaagcaaaaacaaaacacaaaaaacccaacattagccaggtgtgatggctcatgcctgtgggtcccagctacttgggaggcttagtggggaggattgcttgaacctgggacatcgaggctgcagtgagacatgatttgccgctgtactccagcctgggcaacagagtgagacccagtcacaaaaagaaaaaaaawaaataaataaaaggaggcaaccaggtaggtatctcccatggcatggtgaggtaggggtgagctatggtctcaatgtctgtgtcccccaaattgatatgttgaagcttaatcctcaacgttgacagtgttaaaagatgtgaggcatttgg

SEQ ID NO: 736991 - DNA, 574 bp, Homo sapiens
ctgtcacccaggctgaagtgcagtggtgcaatcactgcagccttgaactcccaggttcaagccgtcctcacacctcagctttttgagtagttgggaccacaggcaccatgcctagctaatttttttttttttttttaatttgtagaaacgaggtcttcctgtgttgcccaggctactcttgggctcctgtgctcaagtcatcctcccaccactccagcctgggcatcaaagaaagaccccatctcttaaaaaaaaatttctggccaggcatggtggctcacacctgtaatcccagcacttcgggaggctgaggtgggccgatcatgaggtcaggggtttgagatcagcctgaccaacacggtgaaaccccatctctactaaaaatacaaaaattarccaggcatggtggcgtgcacctgtaatcccagctactcaggaggctgaggcaggagaatcacttgaacccaggaggcagaggttgcagtgagctgagatcacgccattgcactgcagcttgggcaacaagagcgaaactccgtctcaaaaaaaaaaaaaaaaaaaagaaatctataaa

SEQ ID NO: 736992 - DNA, 418 bp, Homo sapiens
agggctggcaccaggctcactagcagtgggtcccatctcccagtgggggctggacgagggcagcgggccccaggctcagctgtctgtgttgggccctgcagagcgttgagggtgagcagcatgagaaggcggtggagctgctgaaggcggcccagggctcggtgaagctggttgtccgttacacaccgcgagtgctggagragatggaggcccggttcgagaagatgcgctctgcccgccggcgccaacagcatcagagctactcgtgagcccctgggtcaccacacccctggggcctccacgggctccctttaaccccaggctcccaaaccaggccagtgcttcctggatcttccagccctggcccctcctctgggatcctgacccttgacccttggcccaggctctcaccccaggc

SEQ ID NO: 736993 - DNA, 480 bp, Homo sapiens
ggagtatcgctctgtcgtggaggctggagtgcagtggcgcgatctctgctcactgcaagctccccctcctaggttcactccattctcctgcctcagccttccaagtagcttggactacaggggcccgcgaccaagcccagataagtttttgtatttttagtagagacggggtttcaccgtgttagccaggaaggtctcgatcccctgaccacatgatccrcccgcctgggcctcccaaagtggtgggattactggagcgcagcaccacgcccagctaattttggtattatcagtagagatgttgtttcacagtgttggccaggctgctctcaaactcctgacctcaagtcaaacacccgcctcagcctcccaaagtgctgggactacaggtgtgagccatagtgcctgacctgtagttgttgaatatttattattaatctacaagttgggtgtgatgcaagtcctttatatggagtcccc

SEQ ID NO: 736994 - DNA, 587 bp, Homo sapiens
gttacaaattgttatttgtatatgacctacagatatgttttttgttgtcattttttgtcttgcaaaatgatatatgttttaataatttagcaggatgtaaacatcaggaggtttcatacacatatgtacatatgtatacatatacacacatacatatatgaatgaataratgcattgatggatgtgtggatggataggtggatggattttgattttgattttggcttcttgtgaacaaatttgaggatgtagcaaaaaagtgtctgcatttcagcatagcaacagttagccagaactcaggagtgggttccacttcagcctgagagggctttctccaactcacgagtccttaccctccctcttgtcctttggtgctgggacagattatctgctgccatgtattattgtattcatatgctttgtttgtcttctaagaaccccaattgcttgcacaattgtggtactgacatttattcaatattatttaagtacttactacatgccagctatggagaatgatgaaaaaaccccctttttccccacttaaagctctcaagcttatgtgagagatacagatatcaaaattt

SEQ ID NO: 736995 - DNA, 587 bp, Homo sapiens
gttacaaattgttatttgtatatgacctacagatatgttttttgttgtcattttttgtcttgcaaaatgatatatgttttaataatttagcaggatgtaaacatcaggaggtttcatacacatatgtacatatgtatacatatacacacatacatatatgaatgaatagatgcattgatggatgtgtggatggataggtggatggattttgattttgattttggcttcttgtgaacaaatttgaggatgtagcaaaaaagtgtctgcatttcagcatagcaacagttagccagaactcargagtgggttccacttcagcctgagagggctttctccaactcacgagtccttaccctccctcttgtcctttggtgctgggacagattatctgctgccatgtattattgtattcatatgctttgtttgtcttctaagaaccccaattgcttgcacaattgtggtactgacatttattcaatattatttaagtacttactacatgccagctatggagaatgatgaaaaaaccccctttttccccacttaaagctctcaagcttatgtgagagatacagatatcaaaattt

SEQ ID NO: 736996 - DNA, 539 bp, Homo sapiens
gagaaagaaagaaagaattacaagaaaacatggtaaatgtcccaataaagatatgcgcaaattgctacactgagaataaaggaagaaataacaggctctggctatggagctgaggaagactttagaggaaagggaacatctgagttggttcttaatggatgaggaagagttgaccaggcagttctaggaatgaatgaatttccgaccaaggcatggaggtgtgtatggacaggtgtgtacaggcaggtgtcaaaggcgaggtgtctagacaggtgtgggagggcaggtgtggagaggcaggtgtgaagaaacaagtgtggattcgtaggtatggatggggctcaagcgaattggtatyggtaatggaggaagcctcactgacaaagaacactggtatcactctataacagtgattgaatgctacgccaagaggtttggaatttttccaataggcaatagagaattttctcatagagaaggagcctgaagggaatcaggcttagtttatgaaagttaattccagcagttaacactagaga

SEQ ID NO: 736997 - DNA, 503 bp, Homo sapiens
ggaaaatgagccctgttttagaggtggggaaatggaggtctcagggagcttaaggaaatcactggcaactaagcactgagcttcagccctcatgtaggcacagtttatagaacaaagcagatatcagtgacaaagggcattgagataagttaaaacagcttcagactgcaagtaataacaaaaaagactccaagtgggacaaaagcttttttacttaacaagtatgcagggctgtaacacaacatccaagtgtttggggacgtgagtaggaagttgtctctgaaccatgactctaagaagtcgaggacaagaggctgagcggttgccatcagtcaagatcttttctaagaagaatgaggtgcttyttttctctgcccccatacacaggtgcacttgactaggggctgtctagtgccaaccaaacctcagtatttttatgggaaagtcaggaatccgaagagggtttgagaatgaagttaccattacatctgaccttcttctcc

SEQ ID NO: 736998 - DNA, 589 bp, Homo sapiens
catttggagaaactcaaaaacttccaagcagaattttttaaaaaagattctgaaatctaacacaaataaaaaatatttagggcaaccataagaaaaaacatccactgttttcaaagaagaaataagctttataggttacttttcaggagaaactatcaagctagatggcaatggaatgactacttacaagtgctaaggggaaccatctgccaacttagtgtcctataccaagcaaaaaatattcttcaatattatgggaaaatgcaaaaattttcacacaaacaaaaataagaatttgtcaccaacagaagaatgttcaaaaaaacactaaagttatttatactgccrtacggaacatgatcgcagatggaaacatgccaattcaagaaataaagaacattgaaaagggtattacatggttaactataaattattattgagatttgaaaacaataataagtttctgtgtatttaaaatacgtgtagaactaaaattcatgacaaaatagcacaaaaggaagtggggatgtgaagacagtaaagtaacataaggttctaaaagtacagagagttataagtgtaccatttt

SEQ ID NO: 736999 - DNA, 589 bp, Homo sapiens
catttggagaaactcaaaaacttccaagcagaattttttaaaaaagattctgaaatctaacacaaataaaaaatatttagggcaaccataagaaaaaacatccactgttttcaaagaagaaataagctttataggttacttttcaggagaaactatcaagctagatggcaatggaatgactacttacaagtgctaaggggaaccatctgccaacttagtgtcctataccaagcaaaaaatattcttcaatattatgggaaaatgcaaaaattttcacacaaacaaaaataagaatttgtcaccaacagaagaatgttcaaaaaaacactaaagttatttatactgccgtamggaacatgatcgcagatggaaacatgccaattcaagaaataaagaacattgaaaagggtattacatggttaactataaattattattgagatttgaaaacaataataagtttctgtgtatttaaaatacgtgtagaactaaaattcatgacaaaatagcacaaaaggaagtggggatgtgaagacagtaaagtaacataaggttctaaaagtacagagagttataagtgtaccatttt

SEQ ID NO: 737000 - DNA, 589 bp, Homo sapiens
catttggagaaactcaaaaacttccaagcagaattttttaaaaaagattctgaaatctaacacaaataaaaaatatttagggcaaccataagaaaaaacatccactgttttcaaagaagaaataagctttataggttacttttcaggagaaactatcaagctagatggcaatggaatgactacttacaagtgctaaggggaaccatctgccaacttagtgtcctataccaagcaaaaaatattcttcaatattatgggaaaatgcaaaaattttcacacaaacaaaaataagaatttgtcaccaacagaagaatgttcaaaaaaacactaaagttatttatactgccgtacggaacatgatcgcagatrgaaacatgccaattcaagaaataaagaacattgaaaagggtattacatggttaactataaattattattgagatttgaaaacaataataagtttctgtgtatttaaaatacgtgtagaactaaaattcatgacaaaatagcacaaaaggaagtggggatgtgaagacagtaaagtaacataaggttctaaaagtacagagagttataagtgtaccatttt

SEQ ID NO: 737001 - DNA, 676 bp, Homo sapiens
attttaatcctaagggttgcagagggttgaaaatccatcttctgtaacttcttcatgctgaataggagcaatgatattcttgcttaactatgagagtctcttgtatttcagggtagagaggagctcagtcagaaagcatcagtatgggcgagggcaaattcataactccgagttttgacaaaaggtgatatctggaagattcataagtgtgctcagaattagaatactgatttagatttttacattacccatccctcttgtttcttctgagcagcagtcagatgtcactagttggttcagaggaataagcagggttagcctaaattgcagaaacaaacttaaaaacaactgatgagactagaatttaataacaagtgtaccacagtttctgaaacataatttctctctccagtttcccatttttactaaagacaaatmacggtaagactgatttgctttactataattggcctgattagttgtataaagtgcaatgagaataattattttttacataaccactttttaaattggttttgatgcaactttattccatagaaagaatctcagataagactttttcagagctgagccctgccataggtttgtaccctcaaatacctatgagatgagtaaattcccctcctcttggggtcccaagataacctggggatcc

SEQ ID NO: 737002 - DNA, 676 bp, Homo sapiens
attttaatcctaagggttgcagagggttgaaaatccatcttctgtaacttcttcatgctgaataggagcaatgatattcttgcttaactatgagagtctcttgtatttcagggtagagaggagctcagtcagaaagcatcagtatgggcgagggcaaattcataactccgagttttgacaaaaggtgatatctggaagattcataagtgtgctcagaattagaatactgatttagatttttacattacccatccctcttgtttcttctgagcagcagtcagatgtcactagttggttcagaggaataagcagggttagcctaaattgcagaaacaaacttaaaaacaactgatgagactagaatttaataacaagtgtaccacagtttctgaaacataatttctctctccagtttcccatttttactaaagacaaatcayggtaagactgatttgctttactataattggcctgattagttgtataaagtgcaatgagaataattattttttacataaccactttttaaattggttttgatgcaactttattccatagaaagaatctcagataagactttttcagagctgagccctgccataggtttgtaccctcaaatacctatgagatgagtaaattcccctcctcttggggtcccaagataacctggggatcc

SEQ ID NO: 737003 - DNA, 676 bp, Homo sapiens
attttaatcctaagggttgcagagggttgaaaatccatcttctgtaacttcttcatgctgaataggagcaatgatattcttgcttaactatgagagtctcttgtatttcagggtagagaggagctcagtcagaaagcatcagtatgggcgagggcaaattcataactccgagttttgacaaaaggtgatatctggaagattcataagtgtgctcagaattagaatactgatttagatttttacattacccatccctcttgtttcttctgagcagcagtcagatgtcactagttggttcagaggaataagcagggttagcctaaattgcagaaacaaacttaaaaacaactgatgagactagaatttaataacaagtgtaccacagtttctgaaacataatttctctctccagtttcccatttttactaaagacaaatcacggtaagactgatttgctttaytataattggcctgattagttgtataaagtgcaatgagaataattattttttacataaccactttttaaattggttttgatgcaactttattccatagaaagaatctcagataagactttttcagagctgagccctgccataggtttgtaccctcaaatacctatgagatgagtaaattcccctcctcttggggtcccaagataacctggggatcc

SEQ ID NO: 737004 - DNA, 557 bp, Homo sapiens
gaaacagatttgataaaggaagatgggtattttatatttgcatatggacatccttgtgtttttatgagtctggagtttaccagagaagtcatcagtgtatagatggtatttaaagccatgaaactgatggagattggcaagagaggacaggcaatggtaagcctgagttgtggtgcattttaacattaagagtttgacragatgagaaggaaccagcagaggcgaaggaaaaggattggctattcaattaggagaaaaaacaagagtgtattcttttggggaaagccaagtacagaaagtatttcaaggaaggagtgatcacttttgtcagttgctactgagatagtatatacgatacaaatatgtatagtaaattgtgaaatattagaatctaagctaaaaaggaaggacaaaggttttttagaaatttgggggaaagtgaaatgacttcctattgggaagaagtttcatttggactgcattttgaaggatgtatgggatgttttggaacataaagctctgaaaattggatatagcagaatagcaagaaaatcgac

SEQ ID NO: 737005 - DNA, 614 bp, Homo sapiens
agccattctaagaggcaggtagtgatgtatcattattgttttaatttgaagttccccaatgacatatgttgagcattttttcaaatgcttatttgccatctgtgtatctttttcggtgaagtgtctgtttgggttttttgtcctttttaagttggcttttttttcttattgttgagttttgacggtttttgttgttgttgttttgttttgttttggataccagttctttgtcagatttaaaaaaaatacttcttacagtttgtggcttcttcttataayagtgtctttcacagagcagagtttttaattttaatgcagtccaacttaacaatttttctttcctgtatagtatttggtgctgtatctaaaaactcatcacctaaccaaaggtcatttagattatctccagtgtaattttctgtctgctttatagttttgcattttatgcttatgactatgatccattatgaattaattttatgaaaactgtaaggtctttgtctagattcatgcttttacatgtggatgtccagtcgttgcagcaccatttgctgaaaatactttcttttctcaattgaattacctttgctccgttgtcaaagatcagtttatac

SEQ ID NO: 737006 - DNA, 630 bp, Homo sapiens
cgtattgtattattttaactattcaagtctttggaatccagatgaataattcagttgtttttattctctttgatgatagacagagtttgcttaatactttgcctcgttttcccattcagtaatttggaaatgtaaggacctgctggttgattcagtaattaattgtgtgattaaacactgaaaataatccataatttttgaagtaaaatggcatttctgttttgtacttaygatctgcaatagctcttatgaatgtgttatctttatttcaagtagtttttaactcctcctcaaccagaaactattaactttcattttaatcttggtgttatatactcatcctttcctctctcttctcctttttttggtgccatttggccacatgaacatatatactccccttgcttactttttcactacattttacctaaggtttcatgaagactgattggaatctgatcagatgtattttgttttcagattcttgccagctctcattactgcagttctgaccaatcatcttgcctgggttccaacagtcatgccaaatggacaaccacctataaaaatatttttagaaaagcattcctctcagagtgtggacatgttggcaaagactcatccatataa

SEQ ID NO: 737007 - DNA, 611 bp, Homo sapiens
gcctcaaggaagtctttaaaaaaaaaattgtgggaagaacatgagatctaccctcttaaatttttaagtgtacaatgaattgttttctacatgtacagtgttacactatagatttctagagcttattcaaattgcttgactgaaatttaatgccattgattagtaactccccatttccccctcacccyagcccctggtaactaccattctactctttgattctgtaaatttggctattttaaatacctcatataagtggagtatttatcttatcatgcagtatttatctctttgtgactggcttatttcatttagcctaacgtccttaagattcatccgtgttgcgtgttgcagaattttcttctttttgaaaactgaatagtgtttcattctatgtatttattatatttcatttatccatgcatctgtcagtggacatttagggttattttcacatcttggctattgtgaatagtgctgtaatgaatataggagtgctaacatctctttgagatcctgattttaattattttggaaaaatgcccagaagtggaattgccagatcacatggtagttctatttttaatttttggaggacttgccatgttgtt

SEQ ID NO: 737008 - DNA, 650 bp, Homo sapiens
tatcacaataagacctttatttcctcgttataaaatatttttaaattgccctttaaactgccacttagcttatggagtttatgacagttttttgttttatcttcaaactgaagcactgaactgacaatagtcatgggcttgttgaatttagatttttctcaactactattgtcgatgtcaagtaacctctacaagtgtgccaagatgcttagttctgttgcctgcaggttaactgtatgggtcccagagtcttcaagactcagggaaatctgtgattgtaagaaacaaccacccccacaaaaaactttcccacctggaggacttctaactgaagagtgaaaagtatatctcttagggactaggggagaagggaccaaagcaactaagagtggaratacattttaagactatcttattgtataaatcaacatgaggttttacacacataactggagttgaatatatgactacccacctgtacctctgaatccatctatttgttgcctatctgcagagctaccacccttgttcaaatactttcttggagaatagcaatagtctcctagctgttctcccgacaccaaccctactctcctatactccagtgttcacacggcagccaaagtaatctttgaaaacacagaactaat

SEQ ID NO: 737009 - DNA, 625 bp, Homo sapiens
ctaatacccagcattacacacaccttacaaataagcttaggcatcatttcctcaaatttccatcatttgcttatcactgtcatattatttgtcatagctctttaccatctttactattatttactaaatattttttcttaaaattgactcaattttttagactgcaattgacttattttaaaaagaaaatattacatattaaaatggaaaatcagtatcaatcataaatagaaggttagtagtataggtattagaattagcagacaaggacattaaatgttttgacaaatatatcccatttttaaagatgtcaggtagaatcaaaaataaatgtgtatatacatatgtgtgtatatagatgtatatatgtgtgtgtgtgtgtgtgtgtgtgtgtgtgtatatatatatatatatatatakagagagagagagagagagagagagagagaaagagagagagagagagagacagagtctcgctctgttgcccaggctggagtgaggtggcacaatctcggctcactgcaaccttcacctcccaggttcaagtgattctcctgcctctcctgtctcagccttacaagtagctgggacacaacctcctcaagccagtctataaaacccc

SEQ ID NO: 737010 - DNA, 625 bp, Homo sapiens
aacttagtttctaagtctcccactgggctcagcttcaggattgagcaaatgtcttcaagaagtaactagctgtgtgttaaggccattgaaatcaccagttgggtcacctccttactgcatacctgctccagtctctgctgttttctccttccctcgcaacagcggccctttgctggagccaagaaaggcttctcagcctcatagccacacctagaactaggcaaataccccctaggaaaagctgcaaaagatcccttcctcacccctctgggattttcccgtctggaattttagcccatctagtcctcattgcttttgcagctctctgatgccttgaaacagatgtgttttttgaatttgatctagcttttttttcagttgtgttcccgtgggagtgttaagctgccataaaccactctattctaagtggraagccccatctgcacttttgaaatggcagccaatgcaggacccaggttgctggtgggaaggactcttctgcatgatgccagccatagtgttgaatccatcttgcccccagaatagtatccattttgtgtccaatgaaactaaaaggatagaattgggactcaagaagattgccaaacaggttctagactgtttg

SEQ ID NO: 737011 - DNA, 701 bp, Homo sapiens
ggctactgtgtgtgtttctgtcttcgtttttaacaataaaaaaagaagttcaaaaagtaaaaaaataaaaagtaaatttttaaaatagaaaaagtttatagaaggataaagaaatatttttgtacagctgtataatgtatttgtttttaagctgtgttattataaaagagtcaaagagttttaaaaaggaaaaactttgtcaaataaaaaagttacagtaagctaaagttcatttattattgaagaacaattttttaaatttagtgtagcctaagtgtacggtgcttttaaagtctacagtagtgtacagtaatgtcctaggccttcaccttcactcaccgttcactcactgactcrcccagagcaacttccagtcctgtcagctctattcatggtaactgccctatcctggtgcaccattatcttttatactgtatctttattttaccttttctatgtttagatacacaaatacttaccattgtgtcaccattgcctacagtattcaatacagtaacatgctgtacagatttgtagcctaggagcaataggctatcccttacagcctaggtgtgcagtgggctacaccatctaggtttgtgttaatacactctgtgatgattacatgaagattaaattgcctaataaggcatttctcagaatgtatttccattgttaagcaatgcatgactgtgtgtaca

SEQ ID NO: 737012 - DNA, 511 bp, Homo sapiens
agttatcttcacttctatgcttattgcagcactatgcataatagccaagacttagaagcaaactaagtgtccattaacagacaaatggataaagaaaatgtggtacatacacacaatagagagctattcagccataaaaragaatgagatcctgtcatttccaacaacatggacggaaccagaggtcattatgttaagtgaaacaagccagatacagaaagacaaacatcacatgttctcacttatctgtgggagctaagaatgaaaacaattgaactcatggagatagaggtagaaggatggttaccagaggctgggaagggtagtcagtggggatagttaatgggtacaaaaaaatagaaagaataaataagccctagtgtttgctagcacaacagcgactatagtaaaataataataataattgttcatttttaaataactaaaagaatagaattggattacttgcaacacaaaggataaatgtttgaggtgatggataccccattta

SEQ ID NO: 737013 - DNA, 600 bp, Homo sapiens
ggatcccattatttccaaacaaatattctgtcatattaacgccgtccatgttgatagaactaacagaggtaaaagatgaaaatgaaattggcttacaaattttgaagtttagtctcttagtaagaccaattgctttgttgtttgtttttcactgttaaacttaattagtgtcttctcttttgacaggaaactttattctcttttttactgaatgctccatcctgggctgtcacttgctacctttgctaacatataataagcccctgctgatgccattgagctctaaggttccttgaagtcatagacactcttacatgaataagaaacaaccgcagatttcatcctctcgtgctaagtcctggaggcagtactctgtactgcagggtaggcaaatgcatgacacatacaccctcctctctgaacccagggaagacattattaattaatcrtggcatttttttttccaattgagcccagtgctcaccgagtattcaccatccacattcttggaagccattattaatttgtcagaattgacaggcttgataaaacccattttctgcccttgccttaatggttgaaagcaatggctttggatga

SEQ ID NO: 737014 - DNA, 447 bp, Homo sapiens
tgggcggatttaatatgtgaagtaagaattttccatttgtgcagaacacttttaactttttaaagcatggtgcatttggcaacatatttggtctccccagtgacactatgagtaggtagagtaggaattattgttctcaattgacagatgaggaaactgaggattggagagttgtccaagaatacagagccagctaaaaggggcatctggacaaaaaacaaggttttttttttttgtttgtttgtttttgttttgytttgttttgttttgttttgactccttgcctataagttgtcttctctaacctacaatctcctcccctcctctcttccggcagcccttcaaaggtggctatttgaaccccagaagcattcctccgaagtgatctgctaaaagaatgctgctggctactttgaagctcatgcattccgacagggacagaaagaa

SEQ ID NO: 737015 - DNA, 596 bp, Homo sapiens
tattcaaggtctttgtaccatctgggaaaagggtgtaagtggcaattacaataacatttgatatgccaagaatgaatgttgcaatcatcagtgtaagcactagaagaacagttaaggggtgcctaatattcaaattaatacaggagtaaaaagtcaaaaaaatttaaaatttagtaaatctgaaacaagccaagaaaayagtgatgtggttaagtctatctttagagagaaatgcaaggctttacaaatgcatatattagaaaagaagaaaagatatgaaaaaaatcaatgaaccaagcatccattttaagaagtcaggaaaaagccctgcaaattaaacatagaaaagaagaagtaaataaagtgtagaagttaatgaaataaatgtacaatagacaagataaacaaagtcaaaaccaacccctcaataatttgagagaaaatatgagagcaaccaagcaaaaaatccaccaatgtcaatagtatagaaggtgagattataaatctacccagaggaaaacaagtcattatatgaaaaagatacttgcacatgcatgtttatagcggcacaatttacaattgcaaaaatgtgaaac

SEQ ID NO: 737016 - DNA, 558 bp, Homo sapiens
caagcaaaaaatccaccaatgtcaatagtatagaaggtgagattataaatctacccagaggaaaacaagtcattatatgaaaaagatacttgcacatgcatgtttatagcggcacaatttacaattgcaaaaatgtgaaaccaatgcaaatgcccatcaatcaacgagtggataaagaaactgtgattatayatatatatatatatatatatatatcttttgtgatatgtttatatcattcttttaaagaatgggaagagggagcactgccttattttcctcctgaggtcagcataacctgaataccaaattgaacaagggtattgtaagaaaagaaaattacacatactttattatttcataatcaggatgaaaaacatcttaaagtactaacaaactgaataaggagatattatggtcaagttggcaaggaaaaaataatactctcattacccataaatgacatgactgtattcacagaaagaaaaactgtagaaaaaagtgaatttagcaaggtcacgagacataaaatcaatataaaattaatcatttgtattt

SEQ ID NO: 737017 - DNA, 625 bp, Homo sapiens
tttattttatctgttaattacaaacgatcccagagcctttaatatgggaattcactttgcaatgtgcaagagggaaagcctcgaaagcatttcccatgtttatttgaccaggatattttccaggtggggcccctattggggaagtgtttgaggaacaccagtctgtacaacactttgmcatttacaaagttttttccatgcatgttctcatttgcctctcccagtgatattatgaaggagctgaggaatagatgaagctcctcactctccttttggggatgaggaatcagattctcaaagagtgtaacttgcccacagtccctctgctaaggaataacggggccagttgagattcagactcatagctatatgccctttccatggccccactgcctcatgatgggatcaaagccacgtggctggaaaatggcaagatcagaattccaacctggttttctgaacccagctcctgtacactgtctgctataccaagcttctttgtgagtgtgtgtgggcgagaaagagaaagttgtatagtaagccatcaattaattgacttgtttcctttgtcaactagcaattctgatgttatcatgcagaaaatttgaaaccctttatgagttgt

SEQ ID NO: 737018 - DNA, 618 bp, Homo sapiens
tctcttcccaactcaggccttcaccaagcagtgacagtttgtgtcacgcccataacctagagcatatgaaagagcgagcgctgtgacgccgactgggttaccatcttcactccaccagttggtaccggtgttccattaagtatggtccatacactctgaccctcagtttcttcatctgttaaaagggcacattaatactgtctgggtcataggacggttgtgcctgtgagggtaatgaatacacacaaggccctctggaacagaatagttactctagatatcttagcactctgttgtcttctctccattaagtcttcattatcttgaaaacattttgttatggaagatttcaaacataagcaaaagtagagccataatagaatgaacttcaatgtacctctaccattcagctttagtgatgatcaactcagagctaattacttctattactattayatctatcatctattacttccactcaaagtcctgtacccccatacccagattatttgaaaaacattttagatagcatatcgtttcattcataaatatatctctaagatataaggactcactttttaaaaacatatgcacaaaaatttaaaatctgaaaaaatt

SEQ ID NO: 737019 - DNA, 517 bp, Homo sapiens
gaaatatactcacttaaattctcttaacaacactgagatgtagaaagcactgttccccattttgcagataagtaaacagaggcaaggagcgtctttcccaggggtacacggctaatgagagggaagtcagtgtgaccrctgaactcttgaccaccactgtctgcagcctgtgaagtcttctgatttctccctattcttcctcctggaagcaatggggatctgaagacttctcctaagttaatgatagactgtctcacattcgtgccctgttggtaaacatccaacatcctcagggccgcagtggaactgacaggaaggggttaactgtttctacgcatgttcccagggaagtcagaactcacaccagggcacaggaaaggactttgcactccggcaagttaacagccatttgctgaacaagatagaatgcatgtaaaagtcaattcctctctcaggcaagagagactcgtgatggtgggattgagctgatgatgaaatttatgcagcttgatggaaa

SEQ ID NO: 737020 - DNA, 584 bp, Homo sapiens
ctgtttatctttaaaatatatgtcatatatattctagtaccacttctttttttatttttattttttctgagacagagtcttactctgttgcccagactggagtgcagtggtgtgatctcggctcactgcaacctcccccagttcaagcgattctcctgcctcagcctcccgagtagctgggattacaggcatgaaccgccacacctggctaatttttgtaattttagcggagactgggtttcaccatgttggccaagctgatcgggaagtcctgacctcaggtgatccgcctgccttggtctcccaaagtgctgggattacaggcatgagccactgcactyggtcccaggatcacttttaatgttacctgttccaaagtcagttgtgctgcatacaaatgaacataaatgaagtagctgtgtttcatgagcactttgtcagaaattggagctagtatttgatgcatgtataaaatgcaacactgaattgtgtttagtcattacaatcaaatgaattctaagcagaaaggagataatggattaaaaaaaatctattgttgccaattgtataggttactcaataga

SEQ ID NO: 737021 - DNA, 601 bp, Homo sapiens
  misc_feature 565: n = A,T,C or G
ttgttatggatgacaatattttaggcatttgtgggggcaaagtaaaagaaaagctcatcaaagccttcaaggatctcatattcattctttcattcattatttcattcaactgaaacgtatttaatgccattatagtgagggaatccaaaaatagctctactgtaaaaactggatgaagtctaaagagcaaaccagtaggtactaaaataaaaacaatattctgtaacaaaaagaaaaaatatgtaaaatgtaataaaacatacttactatgaatgtgtaaaatcagaagtgctgatttagagtggaaactacagaagactttgttgagaagttatatttgagctgaaattttaagttaatcatgccacatgggggcatttagaaaataacttttggaggaggacaaggtggccgattagagcagccaggtgaaacagctcccatcaaggkaccataagaactggcgtgctcctaacagatcttcagagggaaggcaccaagagtggataaagggaagacacaaaagctgggctgaagggggagaaagctgggaatgctgcatggngctaccaaatactgggacttatttctggcccccaat

SEQ ID NO: 737022 - DNA, 610 bp, Homo sapiens
gagagaaggggcaggtcacctacaaagggaaccccatcaggtaaacagaaggcctttcagcagaaactctgtaagccagaagatattgggggcctatatccaacattcttaaagaaaggaaattccaaccaagaattttatatacagccaaactaaacttcataagtgaatgagaaataagatttttttcagacaagcagttgctaaggaaattcactaccacaggacctgcctcacaaaaggtccttaagtgagggataaatatggaaagaaaagaccattaccagccaccacaaaaacatacattgacactctaaaacaaccacataatcaagtatgcataataatctgctaacaacaagatgacagggtcaaacctgacatatcaatattaaccttgaatgtaaataaatgacccaattaaaaggcacagagtggcaaagaagcaagacacaactgtatgctgtctacagygtatgcatctcatgtgcagtgatacccataggctcaaagtaagggaacggagaaaaatctaccaagcaaacagaaaaaagaaaaagcaagggtagccattctaatttcagacaaaacagactttaaaccaacagtg

SEQ ID NO: 737023 - DNA, 524 bp, Homo sapiens
ctcaggccattgcttcagagggtgcaaaccccaagccttggggaatttcatgttatattcagcttgtgggtgcacagaagtcaagaattgaggtttgggaacctccatttagatttcagagaatgtatggaaatgcctggatgtctaggcaaaagtctgctacaggggtggagccatgatggagaacctcagaattttgagaagagggccaccatcctccagaccgcagaatggtagattcacttacagcttctgttgtgcacctagaaaagccacagacactcaacatcagcccatgaaagtaggcgggaggggggctgtaccctgcaaagccacaggggtggcacttsccaaggccatgggagcccatttcttgcatcagtgtgatgtggatgtgagacatggagtcaatggagattattttgggactttaaggtttaaggctgccctattggattttggacttgcatggggcctgtagcccttttgttttggctaatttctctcatttggaatgggtgaat

SEQ ID NO: 737024 - DNA, 540 bp, Homo sapiens
cttttaacatctggagcagtgccattttaagtattgtaactctctcctgggatacaaggactaaaaattctcacgagtgtagacaagtatgttattgactcattgtatatgaaaactggtcttcacaatataatgccaagccatttaacaaaatggattgcaatatgttaaactcaggagcataatatacaagtcatctgactgatacatgtgctctatagaatacgatattgcaacattcttaaagtttaccaactgaataagtgtggacttcatkggaatttacctataaataatttcgagtatattttaaacaaaatttaagaggttcaagtgcaattctgttacatggatatattgcatagtggtgaactctgagcttttagtgtaaccatcacccaaacactgtatgttgtacctgttaagtgatttctcagcatctttaaaaatgttcctgtgacatgtatttcctatttcatgacatgtcttttatatcatttgcctttttttcctactcattacttgtcattttatttctaa

SEQ ID NO: 737025 - DNA, 625 bp, Homo sapiens
tgttgattctccttatgaatttacatgtctcaatttcattgagttcagccctgattttagttatttattttcttctgctcacatctgagttgttttgctcctgtatttctagttcctctggatgtgatgttaggttgtttatctgagatctttctaacatttggatgtaggaatttaacactataaactttcatcttagcactactttagctatgtttcagagattctgaaatgttgtatctttsttttcattactttcagtggatttcttgatttctgtattaattttattctttaccttaaataatttaggaggcagttctttaacctttttccatttaaaaaaaataagtgcagctcactgtctgcaatcatttaattttacataaacatgctctttgagtttgaagcaaatctgacagattttctatatgaaaataaaatataaaaactgctcttggagtaatttctaaacagaagtaacatcaaaatcacctgaatcatcggagtcatttattttttaaaaaaatggattcatcaaatcaatctttggccaattgttttagaacaatgttaatatcatgtgtagggatactatgttttctaggatttgatattttcagct

SEQ ID NO: 737026 - DNA, 477 bp, Homo sapiens
ctttatgaagccggatcctcctctgttggctgcatatgtatttaggataactatcctaaataccgacagttaggtcttcttgttaaattgaaccattaccattatgtaatgcttttctttgcctttttttatcttggtggtttaaattctttttacctgaagttagtacctctacttttttctgttttctgttgcttggtgcatttttctccatccctttattttgagcctataggtgtcattgcatatgagatggctcttgaagacagcatacaattgggtcttgcttctttatccagtttgcctcagtgcccattaagtggggcatttagcctgtttacattcaagattaatatttatatgtgataatttgatcttgtcattgtattgttagctggttgttttrtggacatgattgtacagttgctttataatgttagagtactatctacttaagtgtgtttttgtggtgacaga

SEQ ID NO: 737027 - DNA, 567 bp, Homo sapiens
ggccatttctagggccttttcagtcttgaaaacattgatctctccagttttgcctggaggacttctgaagttagaccaccaaagttctgaggtgcttaacctctgtatcctcatctgtaaaaggtggttaataacaattcctaattggtaaagagagttaaatgagatctacgtttaaagtgctcagaaaatgcatcacacatagaaggccctcaggaaatgtcagcatttattttcacctgaataggctaattattatttatttatttactttttttgagatggragtctcactctgtcacccaggctggagtgcagtggcgccatcttggcttactgcaacctctgcctcccaggttcatgcgattctcctgcctcagcctcccgagtagctgggattacaggcacgtgtcaccacatccggctaatttttgtatttttagtagagatggggtttccccgtgttggccaggctggtctcaaactcctgacctcaggtgatccttttgccttgacctcccaaagtgctgggattacaggtgtgagccactgtgcctggcctatttt

SEQ ID NO: 737028 - DNA, 513 bp, Homo sapiens
aagagacatgtcctatgctgaccttttgggtaagccacaaagacttcaccttaactcttttgttcccttgtggtttttaaccaccaaaatactttacttttccatgtatgttgttttcatgtttcagctcatgtataaaattttgtagaggccattatgacacactgctttgaaagtgtttcacagaggcatattgttaaactctacatcaacgcctttcccctctcctcaccccagccttatctcccaaggctaagtcactattctgttgggtctacayatatgcacatctcaatgtgcaggttttttgcttgcacaccatttaaaggatgcatcatggcacacagagcaattcacaagaatgttaattattacctatggagagaaactgtaacattttgattcatttgtgttttcaactgaatgtggtatttatcaactgtcttttgtgtttaattctagataatagagcatggcaaattggagtcttcaattaagcacacggaatacatg

SEQ ID NO: 737029 - DNA, 633 bp, Homo sapiens
ctggtaagaggggcaaataatttgaatatttctccacttctatctccctcctttgaaggtggatgtgatatgtggagctgcatcagacatccttagacaatgaggcaggaaacctaaggaaataaaaccaaagtgctgggaatggcaaagtggagatgggaagagccagtgtcctggatggcatcactgagcagcagaaacgatgccagggttgccaaccttggacatctagctagtaaggtcaggaaatcaagcctcaatataaaccactgttagggtttttttttttttttttttttttcagttgttcttgataacttacagctgaaaggtatccctaactgaaacactgccttggctgagcatcctgaraaggactttggaattgccccctcaccttcagtttttttttttgtttttttttttttgagacagagtcttgttctgtcacccaggctggagtgcagtggcatgatcatggctcatggcagaatcaacctcctgggctcaagctatcctcccacctcagcctctgaagtagctgggattacagctgtgcaccaccacacctggctaattaagaaaaatatttcttgtagagacaggggtctcattatgttgcccaggctggtc

SEQ ID NO: 737030 - DNA, 633 bp, Homo sapiens
ctggtaagaggggcaaataatttgaatatttctccacttctatctccctcctttgaaggtggatgtgatatgtggagctgcatcagacatccttagacaatgaggcaggaaacctaaggaaataaaaccaaagtgctgggaatggcaaagtggagatgggaagagccagtgtcctggatggcatcactgagcagcagaaacgatgccagggttgccaaccttggacatctagctagtaaggtcaggaaatcaagcctcaatataaaccactgttagggtttttttttttttttttttttttcagttgttcttgataacttacagctgaaaggtatccctaactgaaacactgccttggctgagcatcctgagaaggactttggaattgccccctcaccttcagtttttttttttgtttttttttttttgagacagagtcttgttctgtcacccaggctggagtgcagtggcatgatcatggctcatggcaraatcaacctcctgggctcaagctatcctcccacctcagcctctgaagtagctgggattacagctgtgcaccaccacacctggctaattaagaaaaatatttcttgtagagacaggggtctcattatgttgcccaggctggtc

SEQ ID NO: 737031 - DNA, 565 bp, Homo sapiens
atctggaaaagatggccataaaatccccctcagattgattcaactttagacaggcttcttcctaaggcctctgacctcctttttaaaatgtgtttcctttagaaaactttccattataaattcttgctctgctactttaagacataaatattctacaacccaggaatgtctttctcaagaacctgggagccatcccttttgacatgtaatcaagaaagatagtaccctctcagcctctgtaggagagtgggagcctaacttcaataagcaccagtggcccaatcatgttgatcagccctccgctaacatcctcccgcaattttccaccagctcaccccagtgcttagaaactcctccccctttggtttagtggagttgagttcaatcyttctcctctattgcaattttcttgaatgtcttttttttttttttttgcccgtttagctagtctagtgcaatttttcttttacacatcaagtgccagaatgaggaccttaaactgtgtctctactgcctgtgaaggtatgtcagcagagtgaggggctcagaaacccatgtaaggtgc

SEQ ID NO: 737032 - DNA, 602 bp, Homo sapiens
tcatcattcatattcactgttttcctgtatgcaaatgctccttgacttacagggtcccaataaactcactgtatatcgaaaatatcataagtggaaaatgcatttaatgctggcaacacagccaacggtcctcaatttacaagtggtttgacttgtgattttttgattttacaatagtgcaaacatgatatgcatttagtagaaatcatcagtttgctatgggattttgccctgataaacccatcataaagtaaaaaaaatcktaagtataggactgtctgtatatcatatctttgtttcatggttccttttaagattttctctttatctttggtttctggcttttgaggatatgcctacctttggttctctttgcatttaccatgtttgctgttcagtaagcctcttgaacctgtaatgttctttaccagctttggaaaatgccttcctcttacatctgtaaatattttttctgcccatttatcactctccactccctctgagacatatattccatttatgatagccttcttgatattttcccacaagttgttaagactgttcctttttaccagttgcttttctctctattcttcagattg

SEQ ID NO: 737033 - DNA, 646 bp, Homo sapiens
tcagaggtcaaaaggtagtcagccacaggacagtagtctagcccaaataatttttatagttcttaataagggatttaaattagtttttaatggtttaaacatcagggaatggcacctaaaatccagatttccagcttctctggaaaatttagaggattggacaatactggggctttcattctggacatgggtaactatgacctccctggtacatgaacttgacgcaaactcttaggtccgccacaagccttgctggggatctagtcccatgggtggtttgagtctgtgaccttkgggtcattcattcataaaaacacatcttgtgcattcactacatgccagatactattctaggccatttatataggctctcacttctcacgacactgtcactttcattttatagatgcagaaatggaggttcagaaagtcaaaatgggggtcacgtagcaggtaagtggcagaaccagatttaacccaggttgtatctcaggtcctgtagtcactgcatccgtcgttacctactttaagaggcccgtcctttcctttttaatcacagctcaacctggcatttatgcttatagtataatttaaaacggccaaaccacgtcatgacatagaaagacagcaatttgtataagtttcc

SEQ ID NO: 737034 - DNA, 595 bp, Homo sapiens
acttcagatggctctgcttgttcaaaagttctttatattgattgagtagtaatatgcccttttaactgccaacattctacaagatgtttcaatagcactttctcttctctaagataaatccttaatttcttcatattcaccttctggcacgaatagctaaaatggtgaggggttcccaccataccacctcacgtgagtaataaatggaagaaatgtagaaacttagctgtaaagacaaggactcaygggcccataataacttaccaagtgctggtatggaaaggaacaattagatttattctgtataattccatcggttagaatgagaaccagtgggtaaaatattcctgacagactgcagctcagtgatgaggatatcgaaagccacagggattattgagttatttaagtcagacacgagtcagtactacacatctaagagagctttctgaggcagtgaaaatgtgctaaaactgcactgcctaaaaggtagccattggccacatgtggttactgagcatttgaaatgtagttggtgagactgaggaactaaatttttacttttatttacatctaattaatttaaatgtaaact

SEQ ID NO: 737035 - DNA, 540 bp, Homo sapiens
tcaaaagaagatacacaaatggccaacaggtacatgaaaaaatgctcaacataactaatcatcagggaaatgcaagttgaagccacaatgagatatcacctaattcctgttagaatggctatgataaaaaagacaaaagataacaagttttggcaaggatgtggaraaaatggaacccctccacactgttggtaggaacgtaaaaaggtgcagcagctatggaaaacaatatggtgattcctcaaaatattaaaaataaaattatgataagatccagaaatcttgctactggggagcaatgtctatctatctaaaggacatgaaataaagagctcctgattctataatgatggcatagaagcaagctggattcactgcccctgagaaaaccaaaacaaatatacatagctgagtgtatcaccagcaatagcccagaatttaatatgaggaaacagttcctggggccaccgagaggtaaaaaaactgagcagatggtaagagaattggagttccgtatctgcagtgcctgtctccccaacc

SEQ ID NO: 737036 - DNA, 540 bp, Homo sapiens
tcaaaagaagatacacaaatggccaacaggtacatgaaaaaatgctcaacataactaatcatcagggaaatgcaagttgaagccacaatgagatatcacctaattcctgttagaatggctatgataaaaaagacaaaagataacaagttttggcaaggatgtggagaaaatggaacccctccacactgttggtaggaacgtaaaaaggtgcagcagctatggaaaacaatatggtgattcctcaaaatattaaaaataaaattatgataagatccaraaatcttgctactggggagcaatgtctatctatctaaaggacatgaaataaagagctcctgattctataatgatggcatagaagcaagctggattcactgcccctgagaaaaccaaaacaaatatacatagctgagtgtatcaccagcaatagcccagaatttaatatgaggaaacagttcctggggccaccgagaggtaaaaaaactgagcagatggtaagagaattggagttccgtatctgcagtgcctgtctccccaacc

SEQ ID NO: 737037 - DNA, 512 bp, Homo sapiens
ttaaaattaaaaaataaaataaatattttagagacacaaaatttttaaacttggttcaactggcaagaagaaaaggctatctacaattctgagtctagatattttccattgcctgggaagataatttacataatgtatatatcaatgtwttatttataagatgactgagatcatattaatgggtaaattatcacaaagttagtgaaaatttttaatctcctgaacaaatacaattccatggagcaaattacaatttcctacaaaaagtctactctgtatttacttaagtttataggttataacctttaatagctgctatcacacattgaaatttcaaagaaacaggccaggtgtggtgactcatgcctataatctcagcactttaggagtactaagtgggaggatcacttgagccggggaatttgagaccagctagggcaacatagtgagacctcatctctacaaggtctactttttaaaataatagttttaaaaaattagccaggcatggt

SEQ ID NO: 737038 - DNA, 584 bp, Homo sapiens
catcctctagaaggccctagtgtgtgttgttcccctcaatgtgaccatgtgttctcattatttagctaccacttataaatgagaagatgtagcatttgattttctgttcttgcattagtttgctaaggataatggcctccagctccatccatgtccctgcaaaggatgtaacgtttttcttttttatagctgcatagtattccagagtatatatgtaccacttttttaaaaaatttagggccaggcgcggtggctcaagcctgtaatcccagcactttgggaggccgagatgggcagatcacgaggtcaggagatsgagaccatcctggctaacacggtgaaaccccgtctctactaaaaatacaaaaaaattagttgggcatagtggcgggcgcctgtagtcctagctactcaggaggctgaggcaggagaatggcatgaacctgggaggcggagcttgcagtgagccgagatcacgccactgcactccagcctgagcaacagagcgagactccatctcaaaaaaaaaaaaaatttagtctatcactgatgggcatttaggttgatttcatgtctttgctatt

SEQ ID NO: 737039 - DNA, 609 bp, Homo sapiens
aagaaggctgctgcttctctgttaaccttttgttctgtgttcactgggagtcctgccataaggtttgcattaggtcagctttctggcttcttggacaaataaataaaaaacaagaggaggtaggagtaggaatatatggaaaaaaatatctctatacatctgagtagaaatttttatagtccagatggggtttgtgaagtctctgagcttagaaattctttttcagtcaatatcttccagggagaaaaagttgtcagatttttagaaggattcaaacattagtgccttgcctcagggcgacagaaaccaaaccttggcttctctgcttccaacagaaaactagaggcaggttataatttccctcttgcctggaactgaggcagtgactggttttgtatgtccaaacccatcctcrttactttttgagacaagattgacgtcagtttcaaaaccatgaacaagagagaaccatgagtcctccaacgacctgggaagatttggatgacaacctttaagtcagtcatgacctgtcagtaaatcttgaaacttaacatgatccactttcacatttactactcactgtcagagattttggaagattataaaggg

SEQ ID NO: 737040 - DNA, 588 bp, Homo sapiens
gacaaggatattattttttcagtacctcagtttctcatgtttgaaaacaagaagttacagggaagctatcctgcacactgccaaatgtgtagcagcaacctgggcctctacacactagataccagtagtaaacctcatcctatagtttttamaatgaaagatgtctccagacaatgcctaatgtcctctgggagaaggaaatgaccctgttttgagaaccactgaaaaatactaaataatctctggtatcttttttgttctctcatattccatcacttgaatggtagggtctaccttcaaccaagaggataggcttttcaccactatggggtaactgcctagtgaacttttctctatttccgttttagaactatctgaagctctgcaggttcagtttgtataaaacctcctccctctaggtcttaactttatcatttaaatgcaaattggtataaaaaatagggtagatgaaagtgaagagatcagatgttatcttattaagtcagcctttcattatgcaattgatttagactcattttgaagtcctatgagatagcattatttgtttgtttatttatttatttattc

SEQ ID NO: 737041 - DNA, 588 bp, Homo sapiens
gacaaggatattattttttcagtacctcagtttctcatgtttgaaaacaagaagttacagggaagctatcctgcacactgccaaatgtgtagcagcaacctgggcctctacacactagataccagtagtaaacctcatcctatagtttttaaaatgaaagatgtctccagacaatgcctaatgtcctctgggagaagraaatgaccctgttttgagaaccactgaaaaatactaaataatctctggtatcttttttgttctctcatattccatcacttgaatggtagggtctaccttcaaccaagaggataggcttttcaccactatggggtaactgcctagtgaacttttctctatttccgttttagaactatctgaagctctgcaggttcagtttgtataaaacctcctccctctaggtcttaactttatcatttaaatgcaaattggtataaaaaatagggtagatgaaagtgaagagatcagatgttatcttattaagtcagcctttcattatgcaattgatttagactcattttgaagtcctatgagatagcattatttgtttgtttatttatttatttattc

SEQ ID NO: 737042 - DNA, 633 bp, Homo sapiens
attatatatttgtttttgcacttcagaaatcttaatggtaaagaaaagagaaactactgagacatgcagatgaaacttagcactcaggaaagtgaaagtataagggtaagcgtgaaaggagaaggggagcagtttctcagagactgggagggggaagaaggacagcagggctccatagcagtagagacatgcaatctcktcaatggtagagacctggggaatggcaggcctcagagcagatggcacagtgacatttagtgtgccaggccctgggcaccgccccaggcatactgctaaagcagcagagtcctgggaacacagggcaagaatcaaacaggctgggactcctcagcagaaaggaaatgtggcatttcctacacagtttcatttaagaagtgaggctcatcactacacttccatctgggacctggtgggtccctggtctctccaccccaggaagtgatatgagaaacaacaagatggactcgatatcagaatttaatatgctattcctagaaatagatatccaagagtgtagaggtcatggctccagttctgaaagatagaaggctaatgagacccaaaatttgagtagaggattaatatagcccattatcctatgtcttgcaaacc

SEQ ID NO: 737043 - DNA, 563 bp, Homo sapiens
gggtaaccctgggctccatctggatcctggaactccctttgctttccctttcctccctcccttccgtctgtcttgctctgagcgccactctgattgcagtggtgcaatcatagctactgtaacctctaactcctgggctcaagtgatcctgcggcctcagcctccggagtagccgagactacaggcgygtgccaccacgcccagctaattaaaatttttttcgtagagacagggtctctgtgctatgttgcccaggcttgtcttgaattcctggcctcaagtgatcttcccgccttggcctcccaaagtgctgggattacaggtgtgacccacctcgcccggcatgacttccttttctatttccagcccaggcctcccaagttcaagacccttgtatcaggccccctaatgaggcccaggtctgcccagtcagtgtattccctgtccctgaccacagtgatagtgacacaaacagggccaatgaggacccttgggaggagaagctcctttttccccaggattgcccgtgagaaggaggctgggagcctgcagcctcggcaatg

SEQ ID NO: 737044 - DNA, 679 bp, Homo sapiens
ctctgcctggttgaagattctctctttctgccaagagaaacccaggtgggtgagtggaaatcgcaagagagatacagcagttcattctgaggagccactttgtgattgcaggcccaaaactctcctcccctacccaaagactcagatatagtgggcagaaacaacaaggaggatccagctatagcaagcctcctgatctgggaagcctgggcagtaaacaagttaaaaaagaaaggaagaaagaaagaaaagaaaagaaaggcaactaacaacaaccaaaaaatggccaggtgtggtggctcaygcctgtcatcccagcattttgggaggctgaggtaggtggatcacctgaggttgagagttcaagaccagactgaccaacatggataaactccgtctctactaaaaatacaaaactagctgggcatggtggttggcaccgtaatcccagctactcaggaggctgaggcaggagaatcgcttgaacccgggagatggaggttgtggttagccaatatcgcaccattgcactccagcctgggcaacaagagcaaaactacttctcaaaaaaaaaaaaaaaaaggcaacaactataaaaagcaataaaattatgaaatgcgtgaagaaaatgattagacattttaccgaagaggacacacaaatggcaaataagtacatc

SEQ ID NO: 737045 - DNA, 513 bp, Homo sapiens
aaaaagcaataaaattatgaaatgcgtgaagaaaatgattagacattttaccgaagaggacacacaaatggcaaataagtacatcaaaatcaaaagattttcaaaatcattagccaccagggaaattcaaattaaaaccacaataagatatcactacacttctagcagaatggcaaaaatgaaaaaatataggaccaccaccaaatgtgggcaagaatatagagaaactggatcgcctgtgcattgctggtgagaatgtaaaatattacagcctctctgataaacagtttgttatgttctcataaaactaagtatgcaactaaataggtcccagaagttatacccttgcacttttgtcccagagaaayaaaaacctatgtttacacaaaaatgtaaacatgaatgttcatagtaatttcatccaaaatagcctcaaactgaaatcaacccgtgtatcattcaacaggtgaatggttaaacacactatggtacattcatagtatggaatatatt

SEQ ID NO: 737046 - DNA, 586 bp, Homo sapiens
tgtgtggaatacaactttctctaaaacaaacaaaaggccggacccttattcaagtactgtgtgttgtccttagttccacaacaacacaggaacacagaacttaatgtggattatgtggaaaggccacaccattaaactgtgggcagtaagaactctgaaaacatggagaaaagggtgataattcarttcagggtagagaaggctgagtgtggagtcatttagcagaaaattttgtggatatgaatgtttgatttttttaacacaaggaatgtttgaccagctctcctcatcctctcttaatgcagacaaagagcaaagcagtaaaatggagcctgagggtattaatttcacaataaggaatacaatttgttgatgatgagagtcatttgatgttagaaagtgttgtgaagaaaggctgggaaatcttcccaaaagaattttaagaaagagtcagaagctcatccatctgaaatattctaagagagggctgctgggagcaggagcacagcccttgggaggtctaggccctggcatcgtgtgcgtcatgtgtatatacatacttagttgtgcttgtgttgcacaaata

SEQ ID NO: 737047 - DNA, 620 bp, Homo sapiens
aacactctgcaggatattatccaggagaatttccccaatctagcaaggcaagccaacatttagattcaggaaatacagagaacgcaacaaagatactcctcgagaagagcaactaactccaagacacataattgtcagattcaccaaagttgaaatgaaggaacaaatgttaagggcagcccgagagaaagggcgggttacccacaaagggaagcccatcagactaatagctgatctcttggcagaagctctacaagccagaagagagtgggggccaatattcaacattcttaaagaaaagaattttcaacccagaatttcatatccagccaaactaagcttcataagtgaaggagaaataaaatactttacagacacgcaaacgctgagagattttgtcaccaccaggcctgccctaaaacactccggaaggaaacactaaacatggaaaggaacaamcagtaccggccactgcaaaaacatgccaaattgtaaaaaccatcaaggctaggaagaaactgcatcaactaatgagcaaaatcaccagctaacatcataatgacaggaccaaatacacacataacaatattaaccttaaatggaaatgggctaaatgctcc

SEQ ID NO: 737048 - DNA, 620 bp, Homo sapiens
aacactctgcaggatattatccaggagaatttccccaatctagcaaggcaagccaacatttagattcaggaaatacagagaacgcaacaaagatactcctcgagaagagcaactaactccaagacacataattgtcagattcaccaaagttgaaatgaaggaacaaatgttaagggcagcccgagagaaagggcgggttacccacaaagggaagcccatcagactaatagctgatctcttggcagaagctctacaagccagaagagagtgggggccaatattcaacattcttaaagaaaagaattttcaacccagaatttcatatccagccaaactaagcttcataagtgaaggagaaataaaatactttacagacacgcaaacgctgagagattttgtcaccaccaggcctgccctaaaacactccggaaggaaacactaaacatggaaaggaacaaacrgtaccggccactgcaaaaacatgccaaattgtaaaaaccatcaaggctaggaagaaactgcatcaactaatgagcaaaatcaccagctaacatcataatgacaggaccaaatacacacataacaatattaaccttaaatggaaatgggctaaatgctcc

SEQ ID NO: 737049 - DNA, 620 bp, Homo sapiens
aacactctgcaggatattatccaggagaatttccccaatctagcaaggcaagccaacatttagattcaggaaatacagagaacgcaacaaagatactcctcgagaagagcaactaactccaagacacataattgtcagattcaccaaagttgaaatgaaggaacaaatgttaagggcagcccgagagaaagggcgggttacccacaaagggaagcccatcagactaatagctgatctcttggcagaagctctacaagccagaagagagtgggggccaatattcaacattcttaaagaaaagaattttcaacccagaatttcatatccagccaaactaagcttcataagtgaaggagaaataaaatactttacagacacgcaaacgctgagagattttgtcaccaccaggcctgccctaaaacactccggaaggaaacactaaacatggaaaggaacaaacagtaccrgccactgcaaaaacatgccaaattgtaaaaaccatcaaggctaggaagaaactgcatcaactaatgagcaaaatcaccagctaacatcataatgacaggaccaaatacacacataacaatattaaccttaaatggaaatgggctaaatgctcc

SEQ ID NO: 737050 - DNA, 607 bp, Homo sapiens
gatcttacaccatatagttcttaactctaaggcatggtcctttagggatttaactcaaaagcccaagctacttggtaatctgccctaacttaatgaggattgtaccccagactcttttcccagcaccagagaaccattaaatttttagctctttcactcctaggttttgaactccttgaagcttcaccctmtgcatgtatacagctcaggaatacatcaaagattttgtcaggcctctgagcccaagctaagccatcatatcccctgtgacctgcacacacacatccagatggccagttcctgccttaactgatgacattccaccacaaaagaaatgaaaatggcctgtttctgccttaactgatgacattatcttgtgaaattccttctcctggctcatcctggctcaaaagctcccttactgagcacctcgtgaccccactcctgccctccagagaacaacccccctttgactgtaattttcctttacctacccaaatattataaaatggccccaccccatctcccttcactgactctcttttcggactcagccagcctgcacccaggtgaaataaacagccttgttgctcacacaaagcctgtt

SEQ ID NO: 737051 - DNA, 607 bp, Homo sapiens
gatcttacaccatatagttcttaactctaaggcatggtcctttagggatttaactcaaaagcccaagctacttggtaatctgccctaacttaatgaggattgtaccccagactcttttcccagcaccagagaaccattaaatttttagctctttcactcctaggttttgaactccttgaagcttcaccctatgcatgtatacagctcaggaatacatcaaagattttgtcaggcctctgagcccaagctaagccatcatatcccctgtgacctgcacacacacatccagatggccagttcctgccttaactgatgacattccaccacaaaagaartgaaaatggcctgtttctgccttaactgatgacattatcttgtgaaattccttctcctggctcatcctggctcaaaagctcccttactgagcacctcgtgaccccactcctgccctccagagaacaacccccctttgactgtaattttcctttacctacccaaatattataaaatggccccaccccatctcccttcactgactctcttttcggactcagccagcctgcacccaggtgaaataaacagccttgttgctcacacaaagcctgtt

SEQ ID NO: 737052 - DNA, 613 bp, Homo sapiens
gtcctggcattagatagcggtgatgattgcacaattttgttaacagaccagaaactactgaaatttatattttaaaaacatgaattttgactctctctctctctctgagggtacaaaaagccatgaattttatgctttgtaaattatttcccattaataataataataataataagacccattcaggatcatgcattrtcatgttcttcagtcttcttcaaggcataacattgaaacagtgctttcttggttttggaagttatagaccagtgattttgtagaatgtttctgaatttgagtttgtctgatatctcataatgattatattcaggttgtgcatttttgttagagaaatcgaaacgttattctgtgttctgcatattgtatcttttcagccagtatatatgatgttgatttgcctatcattaatgatgtcaactttgatcacttgagtaagggcagtgtctgaatgatttttctactataaagttactcttctttcataattaataaactttatgacgagattctttgagattatgtaaatatctcattttatgttgcaaacccatactattgagctcaataggccatgttttaatgggataaacta

SEQ ID NO: 737053 - DNA, 613 bp, Homo sapiens
gtcctggcattagatagcggtgatgattgcacaattttgttaacagaccagaaactactgaaatttatattttaaaaacatgaattttgactctctctctctctctgagggtacaaaaagccatgaattttatgctttgtaaattatttcccattaataataataataataataagacccattcaggatcatgcattatcatgttcttcagtcttcttcaaggcataacattgaaacagtgctttcttggttttggaagttatagaccagtgattttgtagaatgtttctgaatttgagtttgtctsatatctcataatgattatattcaggttgtgcatttttgttagagaaatcgaaacgttattctgtgttctgcatattgtatcttttcagccagtatatatgatgttgatttgcctatcattaatgatgtcaactttgatcacttgagtaagggcagtgtctgaatgatttttctactataaagttactcttctttcataattaataaactttatgacgagattctttgagattatgtaaatatctcattttatgttgcaaacccatactattgagctcaataggccatgttttaatgggataaacta

SEQ ID NO: 737054 - DNA, 656 bp, Homo sapiens
agtgcttccggcatggcgctttagtgtcaggtgaaagaacagcaacccgccccgcttctccacccctgacaagccttccgaaatgccacgctgaacatggctgccgcgcttcgatgcttcttcacacacacaatatggacacgggtttgaggctccagccccggatgacaacactccggaaatatgcgagcggcggcggaagcggaagtgcctcagcggtaggggccggggaagtgtctgtagcgtccctccctctcaaccacaataacaggcggagggtcggcgtaggtgaggcggcggctgagtgggcctggggaccgggagcggggtggcaaagcccggagtgcgtgcggcagggctgaggtagctgggtggggattctggaacttccgaccgcttaagctcggcctctggcccccttggggcctagagctccytgagagatcaggggttgaatttgtagttcctggccttctaggccgtgcttgcgggggttgcctgcttgtctgaacctggccccaaaatccagcataaagaactctctctgggccccagtttcctcaatgaaatgggtgagggtgttggactggacagcttctgtgactgtctcccaccccgggcgtcacgaatttcatgattttaatgttaagtcggtg

SEQ ID NO: 737055 - DNA, 620 bp, Homo sapiens
tctatcttgtattgtagattttctattttttaatttttcagtggttttactctgatgttcttataagtggttttctttgtgtttatcttgcttggggtttgtagtgctccttcactctgtgacttgatatatttcactcatttttttaaaatgttcatttattagctctttaaatatcgcttcattatcattatttatctctttcttttctgagactccaattatacatatgttcaaacttttcatcgtgtctcatatgtctcttatgcaagcttatctgtgattccattctttttttttctttttttgagatggaatctcactttgttgcccagcctggagtgcagtagcacaatctcggctcactgcagcctccaccccttgggctcaagtgattctcctgcctcagcctcccaagcagctgggactacaggcgcrcaccaccatgcccagctaattttcatatttttagtagagacgggatttccccatgttggccaggttggtctcgaactcctgacctcaagtgatcccccgcctaggcctcccaaagtgctgggattacaggcatgagccactgtgcctggcctgtgatttcattcttttctctcttgtgcatc

SEQ ID NO: 737056 - DNA, 568 bp, Homo sapiens
tttgtttctttgtttatttttgatattcaaaacaaagatacacttgtcctgtcccagtcctcctcatgcccagggttgcactctcctggttgttacgcctggcccgaatcatttccagggctcatttcagccccacccttcactcctgagctcccttggattcattcactcacctcccaattttccctccgtgtgccaratgccagtgttaaggaccggggctcagacagggctctcagtcaaggagtgagggacagggaatgaacatgccatggcacagggcaggacctgctgaaagacagacaggcccagcagcgtagagaagcggtgagcagctgctgtcaaggggagggagtatggggctgaggcaggtgtgtgatgggtgtggggaaggaggggtggtggggcacatctgtgtatgtgagtggtggtatttgggagggaatacgggggtgtgtgcatgtggaggggaaggggtttatgggtgtacgtgcatatgttatatgcgtgtgactgaatagtgtatatggtacgtgtgtcttgtctgtgtgtacaactacatgtctat

SEQ ID NO: 737057 - DNA, 568 bp, Homo sapiens
tttgtttctttgtttatttttgatattcaaaacaaagatacacttgtcctgtcccagtcctcctcatgcccagggttgcactctcctggttgttacgcctggcccgaatcatttccagggctcatttcagccccacccttcactcctgagctcccttggattcattcactcacctcccaattttccctccgtgtgccagatgccagtgttaaggaccggggctcagacagggctctcagtcaaggagtgagggacagggaatgaacatgccatggcacagggcaggacctgctgaaagacagacaggcccagcagcgtagagaagcggtgagcagctgctgtcaaggggagggagtayggggctgaggcaggtgtgtgatgggtgtggggaaggaggggtggtggggcacatctgtgtatgtgagtggtggtatttgggagggaatacgggggtgtgtgcatgtggaggggaaggggtttatgggtgtacgtgcatatgttatatgcgtgtgactgaatagtgtatatggtacgtgtgtcttgtctgtgtgtacaactacatgtctat

SEQ ID NO: 737058 - DNA, 599 bp, Homo sapiens
acaggcaccaccgtcaccaccaacactgggggtacacgtgcgtctgcctagcctccgagagccagagaagtgcttcactaggtttagaatgctttttaatcttataagtatgttgatagtgactaggcacagtggctaatgcctgtaatcccaacacttggggaggccggggcgggcagatcacttgagcccaggatttcgaccagcctgggctctactaaaattacaaaaattagccaggtgtggtggcgtgtgcctatatacctaggtactcaggaggytgaggtgggagggccacctgaacccaggaagttgaagatatggtgagccgagattgagctacttgcactccagcttgtgcgacaggagtgagaccctatctcaaaaaaaaaaaaaaaaaagaggttgatagggctcctgctgttccaatttaggacaatgtgaacatcaaaaagaaaaatgtagatggaatgatatgatttttaaaacttccttttcaacccccagtataataatttattcagaaaaggatcatccatggatgcaaagccattgagctaaaggttgttgagaaacaggatattcacaaagtgtgccct

SEQ ID NO: 737059 - DNA, 515 bp, Homo sapiens
gtattcttgccattttctactgacatatagcatgttaatgctggaaaatccttagcatttactacatttagtcattaccacaacaccagcaaattgaacgggtgagagaaaaaccctggcttcttgaatttcaggccacttttcttctagtgctctactctgtcaacctctccttttagggaattgtatgcatccacttaaggttggatcaagacatgtgaaagttaggagacattaactttgcacctcagcaggtattatttaaataagcrtttttctcggcatttattttagggttaagttcaggagcagattaagagcctaaaaaggagaattagaagtgataataattaacctctatattgtcccacacgatggagctgtagtcacaggcttacctacaccactcagcaaaacaaagaccttagaaggccatgaacctggcttaacaaggagacattttagtaaacatttagggtatgagcctgtttcctaaaggttttactccacactaa

SEQ ID NO: 737060 - DNA, 632 bp, Homo sapiens
ctctcaagagctccaccactactaacatggtataaaccagcatcatctcttctgtagacaactgcaatagctaactagctgtccagcccttgcctccctgcagtgttttcaataggtatcaggcaaagttattcctttaaaacataaatcaaatcatattagtcttctcaraaccttcattcagaatattaggcaaagtctttaaaattgtctacaaaaccctttataacatggcctcccattagcttcctgacttcctcttctacagctgaggtagctctatttcaacaacactaaacgctttgctatgttttctctctggaatatgttctcctcagatatacctacagaatcaatacccttaggtcttgatgtaaatgtcaccttctgagagagttattctctgtatatgtcacttaaaattgtatcccctcccctccccatctcagaatttactgtaccatttttttctgccttatttcctccttggcattattttttcatttattcatattatttattgtatctgcttttccaatatactatgaacttcatgtagtgagcgctatctgttttgtttatggctattaacctagcatacgtaaataatgcctggaggccgggcgcggtgg

SEQ ID NO: 737061 - DNA, 632 bp, Homo sapiens
ctctcaagagctccaccactactaacatggtataaaccagcatcatctcttctgtagacaactgcaatagctaactagctgtccagcccttgcctccctgcagtgttttcaataggtatcaggcaaagttattcctttaaaacataaatcaaatcatattagtcttctcagaaccttcattcagaatattaggcaaagtctttaaaattgtctacaaaaccctttataacatggcctcccattagcttcctgacttcctcttctacagctgaggtagctctatttcaacaacactaaacgctttgctatgttttctctctggaatatgttctcctcagatatacctacagartcaatacccttaggtcttgatgtaaatgtcaccttctgagagagttattctctgtatatgtcacttaaaattgtatcccctcccctccccatctcagaatttactgtaccatttttttctgccttatttcctccttggcattattttttcatttattcatattatttattgtatctgcttttccaatatactatgaacttcatgtagtgagcgctatctgttttgtttatggctattaacctagcatacgtaaataatgcctggaggccgggcgcggtgg

SEQ ID NO: 737062 - DNA, 660 bp, Homo sapiens
catgtagcacttgtttgtatagaactttccatcagcaccgtgcactgggtcattctctctagggcagatgagttcattgttccttatatagtttcgaaattcactgcactcatcctagaaaatgagaaagggaaagtgaacatggctttgtccctttttggcttagtgatttyttcaaacttggttttaggaagtcctctcttagctctgggctcagactcactgtactcatcctggcaacagaggccaaggaacgcccaggttgtctaaattttgcatcctccgcttcattctgaacctgtctgcactggtcctgaaaaatgtagggaaacataaaacaacacttgatagaccttcctgtttttttctcccgttcatccatccttcctttccccattttccccatgaagcatgcttttgacaaaaggacaattgctcagggatctaactctacaaatgtgattgttactgttaaagaattgaataaagatgtcttctttgtagtcttgaaaaataaatagaaaagaaagcatcacgcatgcacactgctgattctttaatgctgatagaatcatctggtgaaaacagaagggaagctaaaagggagacttagattggtttatattgcctgaattattaaaataaacatcagcaagctac

SEQ ID NO: 737063 - DNA, 583 bp, Homo sapiens
caacaaatacaaatacacaatatattaaacaatgatcttcaaggttgtggacatcagtcttttgaaatgaagaaaagtcatacacgagatagtaaacaaacaagctaaaccctaaaattgctccagtttactggcctgagaaaatgtctaagccayagagcacggagaagaagctcaggcacaggcacacagctctgattcccagaagaccaggctgcggctcagtagtaggggataattagccataggttctactttaaaacatttaacagcaagacccaaaaagattatatggtttccaagtaacttatctgtgtcccagggcaaaactttatatttacagaaatacaaaaagcattcactactcaataatgtaaaattagcaatgtctggcactcagtctaaaattactaggcataccaagaagcaaggacatatgattcacaagtaggataaatgactcaaaactgttacggatgttagaattatacttaagaacattaaaacagttattataactgtttcataaattcaaaaatgtaaagcagagacaaggaataaaaacaaaacataatctgaatct

SEQ ID NO: 737064 - DNA, 583 bp, Homo sapiens
caacaaatacaaatacacaatatattaaacaatgatcttcaaggttgtggacatcagtcttttgaaatgaagaaaagtcatacacgagatagtaaacaaacaagctaaaccctaaaattgctccagtttactggcctgagaaaatgtctaagccatagagcacggagaagaagctcaggcacaggcacacagctctgattcccagaagaccaggctgcggctcagtagtaggggataattagccataggttctactttaaaacatttaacagcaagacccaaaaagattatatggtttccaagtaacttatctgtgtcccagggcaaaactttatatttayagaaatacaaaaagcattcactactcaataatgtaaaattagcaatgtctggcactcagtctaaaattactaggcataccaagaagcaaggacatatgattcacaagtaggataaatgactcaaaactgttacggatgttagaattatacttaagaacattaaaacagttattataactgtttcataaattcaaaaatgtaaagcagagacaaggaataaaaacaaaacataatctgaatct

SEQ ID NO: 737065 - DNA, 611 bp, Homo sapiens
taatctgtactaattttatacttaggtgatttcagagttttaaaagagaaccacactgataatattttgatcatttcggatggcatatttctgtacaagttgaaccagcggtgacaacaggcttcttaaaacactctcttcatattttgagattattaaatttacaaaaataaattctactttgcatggaaagctgggctcacttggtccttacaaaagttgattgtttccaccaggtgtggcrgcttacatcggtaatctcagcactttgggaggccaaggtgggtggatcacaaggtcaggagatcgagaccatcctgaccgacacagtgaaaccctgtctctactaaaaatacaaaaaattagccgcgtgtggtggtgggcgcatgtattcctagctacttgggaggctgaggcaggagaatggcgtgaacccaggaggcggagcttgcagtgagccgagatggagccactgcactccagcctgggcaacagagtgagactccatctcaaaaaaaaaaaaaaagaaaagaaaagaaaacttgattgtttctttacagaactggcccaggtattgcagcatatgtggttgcctccacagtatttgaaag

SEQ ID NO: 737066 - DNA, 524 bp, Homo sapiens
gtgcagaaaggggtgtttaccccaggaaatatgtgagcaaagcagtcacacaaaggatgattcatactagtttaaattccataatcaccaaccgtaagtgggcatttagcattatctggtaatcttattgtatttatataattcccctttataatttatagaaattcccctttctcaccatccacttcaacttttatgygctgagccaggtgcggcagcatatgcctgtagtcctagccactgcataagctgaggtgggaggatcaagtcatgtacttagaagcatttggtgcttctgccctactctcttgatgttatcattttcataaagaattcagaagtttttatctcttgctaaacctataaagagacccacatttatactcatcctatcttcccacctattacagatgaaatgtcctagtcttttaatcttcagtgacctcattctatcattttgttttctcataatttgaaacctttttactggaatttttccaatcaatattaaaacatgttaatgt

SEQ ID NO: 737067 - DNA, 609 bp, Homo sapiens
gcagaaccaactcaagcaacaggaggaagactttagaaaacagctggaagatgaagaaggaaggtaatctatgattagaacctcagtgccttgttaactcagttacgatgtgattttttaaataactatgtttttctcaatttaattcttccatgcagaaaagctgaaaaagaaaatacaacagcagaattaactgaagaaattaacaagtggcgtctcctctatgaagaactatataataaaacaaaaccttttcaggtttgtcagttaggagtaaacttacttgtgtttattttagggactcactttgttccctattataatgaggacagtgactcgggttttctgcaagatcattttgctctgcacttacagtgccaatttagctcactattaaaggtttatacattttattaaattatgcataattttttcccacattattgaagtataattgacaaatttaattgrcataattttttcaatggaccctttgtggtttaaaaaaaaactttgtaatgtggaacttaaaagtttggctcagagggcttgcctggtatgagcttttgataattaacctattttaatttgtgatatgacttattgcaa

SEQ ID NO: 737068 - DNA, 618 bp, Homo sapiens
gggtcaagacccatcagtgtgctgtattcaagagactcatctcatgtgcaaaggcacacataggctcaaaataaagggatggaggaaaatttagcaagcaaatggaaagcagaaaaaagcaggggttgtaatcctagtttctgacaaaacagactttaagccaacaaagatcaaaaaagatgaagggcatgacataatggcaaagggttcaattcaacaagaagagtaactaycctaagtatatatgcactcaatacaggagcacctagatttataaaacaattgcttagagaccttcaaagggacttagattcctatgcaataatagtggaagactttagcaccccactgtcaatattagacaaatcatcgagatagaaaattaacaaagatattcaggacttgaactcagctctgaatcaagtggacctgatagatacctacagaactctgcatccctaaacaacagaatatacattcttctaggtgccacatgtcacttactctaaaattgatcacataattggaagtaaaccactcctcagcaagtgcaaaagaactgaaatcataacagtctctcagactacaatgcaattaaattggaactcaaaattaaga

SEQ ID NO: 737069 - DNA, 618 bp, Homo sapiens
gggtcaagacccatcagtgtgctgtattcaagagactcatctcatgtgcaaaggcacacataggctcaaaataaagggatggaggaaaatttagcaagcaaatggaaagcagaaaaaagcaggggttgtaatcctagtttctgacaaaacagactttaagccaacaaagatcaaaaaagatgaagggcatgacataatggcaaagggttcaattcaacaagaagagtaactatcctaagtatatatgcactcaatacaggagcacctagatttataaaacaattgcttagagaccttcaaagggacttagattcctatgcaataatagtggaagactttagcaccccactgtcaatattagacaaatcatygagatagaaaattaacaaagatattcaggacttgaactcagctctgaatcaagtggacctgatagatacctacagaactctgcatccctaaacaacagaatatacattcttctaggtgccacatgtcacttactctaaaattgatcacataattggaagtaaaccactcctcagcaagtgcaaaagaactgaaatcataacagtctctcagactacaatgcaattaaattggaactcaaaattaaga

SEQ ID NO: 737070 - DNA, 543 bp, Homo sapiens
tctcatgttgaaatgtgatccccagtgttggaggtggggcctggtggaaggtgtttgggtcatgggggcagatccttcatgaatgggttgatgctcactccatggtaatgagtgagttcccactctcttagttcacatgagagctagctataaaaggaatctggctcttcctcctctctgtcgtactccctctctcgccacatgacatgcctgctcctgcttcaccttccaccatgattgtaagtttcctgaggctcaccagaagccaggcagatgctggtgccatgacctgcagaactktgaaccaaataaacattgtttctttataaattacccagccttaggtattcgtttatagcaatgcaaaacagacagatataggaactctagcagcaacgtagattaatagttctaaaagggggtgcttttgtttcccaggggacagttgaccatttctggagtagcattggttgtcatgagagattaggggtcagggagccaatggtatctactaggtagagtttaggggtgcttctaaacttc

SEQ ID NO: 737071 - DNA, 631 bp, Homo sapiens
ggcattcagcagctataaattcagtgaaaaacatttgtttaaaatcaatggttatcttacagtgaaacacactagctcatgtagatatgatgtctatagccataaatcattctcatagaagttaaatggccaactatatcacagaagggatttccgcaatcaaaacaaagaagatgacccaaatatttctttaatctaaagaataatttgggatagatatggtagcatttatcagggaacatgaaagccaattagtttagattttagtaactgatgaatacaattagttcttcttacattcctgctcagtgccagatactgtctagtgaaatggtgaatgatataattcactataataaccaattcactagaggaaaccgggaaagaaaaaacaaactctagacttagaagatgctccacgaaaaaacaagtccarggtgaaatagtgttaagaaagtctacatctacttacctttttaataatcattattatttacagaatatgaaacagtttcatggctctgctatgtccttaagtaaatatacttgcttaacctctgaatcatcgagcaccttccaaatttgtctcaaaaaatcatttttttaatccccagaaaacgattatatcaac

SEQ ID NO: 737072 - DNA, 652 bp, Homo sapiens
tactgctctatcatagaaattccatgctattgatggctaagactaggagactaaaagaaaagactatatgtgttgagtcttgtaagaattgctaaaattgtacatgtcttatttatatccaaagataaattggaaatagaccataatatatacacataccaattatagtagaaaaaacttaaatatctctctaccaaattctgaaatttagataaaattcagaagtttccatactgcttgctatttttatacttattggaatcaagtcagacaaaaataaggatttattcatacatttaagaaatattcatctttcrctttctttgtgatggctctgatctaagcggtggaaatcaaagagaatgaagtcattgctaatacagctcatagtccagtgggggaagttaatccatgcacaggtaaataaattaaaaattgcgaaatattttgctgtgaagaaagtgaaatagtgataggatagagtggttaacagaacagggtggtgtctacattagctagagtggccagagaaatcttcccaaggggccatatatgagcagagacatgaatgctgagctggagccagcaatgcaaaaacatcccaggaactagaatattccaggcagaagcaacagcaaatgcaaagactctc

SEQ ID NO: 737073 - DNA, 644 bp, Homo sapiens
tgagaaggaatcaatatgtaagattggaggaaaagcgttccagggacagggcatagcatgtgcagaggcgcagcatgtgcaaaggaaaactggctggtgtgactggagagtagaaagcagggggagagagtaggataaatgacattagacaagcragcaatggcttggttatgtaggacctggcaggttattgtaagaaactgagatttcattttaagtgtggaacaaagcccctggagggatttaaagccagacaatgatgtgatatgatttataagctttctgccactccagtccaattgcatgtacttattgcaaatttaaagttctggaagaaaaattagctccaagtgagagctgcctgtgtacaaactgtattaaactctacagatttttttctctgggagaatggggaaattcttttctaacagccacatcttgacaaggcaagtgctttttgaaagggttttgcagtattgaaattgccaaagactcctggaaattttacccttgatgttatggttaagcagagagtttctgaatgacttgctgagcttcagtgaaaagcaacagccaggaaaggcaggtgacctttctttgcgaatggagataaaccaatgcatctgccaagggctgtgaattgt

SEQ ID NO: 737074 - DNA, 616 bp, Homo sapiens
tttcctctctcttccatgccctctcccccagtggcataaattaattctagggcggatcaaagaggtaacttctgacaagcccagcttttgcagccttatgtgagcatgggagagtgagagtgtgggagttctgcttctattccttgtgggaacaactatttctacacttacataagggatccaggctggcattmtctgtgtcctcagctaaagaaccgttccttgaatggtgatgaaagtgaataaaattcacttatagagaggaaagaacaggtatctgttattctataatctttccccatcttttacttctctaataccccttccaggtcctaatagtaagtagcagaggtgaaggagaggaaaaaaaatcacagaacaatgatcatcatgatggtcatatattaagcacctaacatattccagacctattctattattttcttgcttcatttaatcctcacagtaaatacatgaagtagtgctgtctccattttccagataagaaaaactaagatctgaagatattaaataacttgttatggctacatagctagttatggttacagctagcatttgaacctagatgtggctcatcccaaagccccttaactta

SEQ ID NO: 737075 - DNA, 609 bp, Homo sapiens
gtcagggaaatgaataaatgctgttggtatgatttattagaaggcagcaaggatttcaatacaactacaaagagtgagagacaagtagggcaagataaagctgatgccaaattggacatccttactttgcctcctaccttttccttatatttcatgatcctaatggtgatggtgatgaggagaagaaagatattgctttctatttacactaagatttgcacttcatagcatatttccatggtaattatttaattcacccttccaagcaaatatattcacagaataatgttttggtcaacaattaaccacayacaggatggtggtcttttaagcttataatgccataattttacagtaccttttttatgtttagatacacaaatacttgccattgtgttataattgcctgcagtgttcagtactgtaacatgctgtacaggtttgcagcctaggggcaataggccatactatatagcctaagtgtacaacaggctatcccatctaagtgtttgtaagtacattttatcatgttcgcacaacaatgaaatcatcaagtaacatatgacagtatatgacaaatatacaatatgtgtgtcttgtccccatttt

SEQ ID NO: 737076 - DNA, 499 bp, Homo sapiens
  misc_feature 498: n = A,T,C or G
aattcctggataaaggaaatgaaataatccctggagctcatacacggtggtcatagtttgtgttcccaccagccacagcgggaagaactttgtaatacatggacatcaggtattgttctgcctctaaggatgtagaacaaaattagccctaaactaaaaagttacctttgtcctacctagcaaagcttaaaagmaattccttgaaaggataaaattatttctaaataaattgtgtcccagaataaagcatatgaaatttaaaggaatataaaatgtttgaccaaacaaaataaagtctacaatgtctggcatccaataaaaaattccaggtagacaaaaaagtgagaaaatagcacccataatgaggagagaaatcaatcaatgtaaataggctcagaaatgacacagatgatagaattagtagaaaaggacattaaaacagttattataaatacattccatatgttaaagaaggtagaggaaggcaggaggacatant

SEQ ID NO: 737077 - DNA, 601 bp, Homo sapiens
aaaatataaagagacccataactttacttcttagagttgataaatatcattagacagaaactgacactgctttagaataaatgcagtgttctcagtaccctcagaatctgaagctcaaaattctcttgaaaagtctgtgggaaggtaaattcctttacgcaggcacagttttctaacagactaaagattagtgactagtaagcctgtctcctatagaagtttagaaattcagtatcttgcctaacaaccactgttactgaggactatgctacaccctttaattstcaaggtatccttagagagtcaggcttcattactcccattttacagatgaggaagctgaggagaagttggtaacttgcccagtctcactattagaaagtagaaaatttgaaacttcctgttctctagtttgtgtttttaattattctagtctgcctcttgtggaaatactttacctgggtcaccatagatttttcatgcagaagtaccctgaacatctatctagacagtgtacgttttttgttttgatgttctaaacccaagttctacttcgcaagtttcatggtaccaataaggcattgttgtctgacctactgat

SEQ ID NO: 737078 - DNA, 643 bp, Homo sapiens
taaaatgaagcttagacaggttcaacaatttgttccatgcctatctggttccaaagaccatggtttttccaacatatcctgttgccattcagataaagaatatactttgaaacctatcaggattgataaaaatagatacagcaatcccactactgggtatcctctcaaaggaaaagaaatcattatatgaaaaagatagacgcacaaccatgtttatagcaacacaattcacaattggaaaaaatatggaaccaacctcagtgcccatcaatcaacaagtggataaagaaaatatgrtatatatacaccatggaatgctactcagccataaaaatgaatgaaataatgtcttttgctacaacttggatgaagctggaggccattattctaagtgaagtaatttaggaatggaaaacaaaatatcctatgtcctcacttataagtgggagctaagctgtgaggatacaaaggcatgagaatgatataatggccttttgggacttgggggaaaggatggaagggggtgagggatagaagactacatattgggtactgtgtatacttctcaggggacaggtgcaccaaaatctcagaaaccaccactaaaaaacttattcatgtaaccccaaaccacctgtactcc

SEQ ID NO: 737079 - DNA, 652 bp, Homo sapiens
ggaaaatacaaaggtaaagtgacaggacccgcaagtgtcagaggacctgtgctacccccaaactgagcagtgaagcccatgatcatcccggagacttgatcaagtataaagtatagtatttacacgggtggattctactgtcagacttgataactccagcctcgggcaagtaatgtaacccctctgtgcctcagtttctttatttgtagatggaaaactctagtaccagcctcacagggttgtagttgtggtgagttcatgcacktaaagtgttcagagaggtgcccatcctaccatgtggtgagcgctcagtaagtgctggctattattgtgcttattcttgtcatcattatcattccccaaagagcactctggacagtgtcagcagagagtggggaaatgcaggatatagaaaatatgtccttggctgggtgcggtggctcacacctgtaatcccagcactttgggaggccaaggcgggtggatcacgaggtcaggagttcgagaccagcctggccaacatggtgaaaccctgtctctactaaaataaaaaaaattagctgggcatggtggtgcacacctgtaataccagctactcagtaggctgagggaggagaatcgcttggatccgcgaggtggaggttgcagtgag

SEQ ID NO: 737080 - DNA, 437 bp, Homo sapiens
acaaagcaacctgcagtgagaagccttggaacagtatttttctgtagcggatttgaagttggcattaagaagaaggtaccaggtggcagatgaggtgctagacatcaccactcccatcttcctggaaatattcagggcacagtgggccttccagggctacacaacaagtctcatggcccactggctttcctatctcttctcctggtgtttactacatttggtgggttcttcagcacctgattttcctattgatcacaggtaataaaatyacaatgtctattaaagggccctctgttctggttaacaggagtctccagcccatttttaaattcagcaaggtccccatgtttcccctgccctgtagccaggctggtggtggcccaggatatagagatgaatgggattagaggtggcctcatcctccgtgggcgcctcct

SEQ ID NO: 737081 - DNA, 437 bp, Homo sapiens
acaaagcaacctgcagtgagaagccttggaacagtatttttctgtagcggatttgaagttggcattaagaagaaggtaccaggtggcagatgaggtgctagacatcaccactcccatcttcctggaaatattcagggcacagtgggccttccagggctacacaacaagtctcatggcccactggctttcctatctcttctcctggtgtttactacatttggtgggttcttcagcacctgattttcctattgatcacaggtaataaaatcacaatgtctattaaagggccctctgttctsgttaacaggagtctccagcccatttttaaattcagcaaggtccccatgtttcccctgccctgtagccaggctggtggtggcccaggatatagagatgaatgggattagaggtggcctcatcctccgtgggcgcctcct

SEQ ID NO: 737082 - DNA, 642 bp, Homo sapiens
gagaccacaagatcaaaaccattttcttttttttttttttgaggcagagtctcgctctgtctcccagcctggagtgcagtggcacaatctcggctcactgcaaccttcgcctcctgggctcaagcaatcctcctgcctcagcctcctgagtagctgggattacagacacacatcaccatgcccggctaatttttgtattttttagtagagatgggattccaccatgttggccaggctcatctcaaactcctgacctcaggtgatctgcccacctcagcctcccaaagtgctgggattacagacatgagccaccgtgcctggccaaaaccattttctaataatactaaaatgttatttgcctttttcattctcatgagcgtasagtagagttttctagaggatacatgatatgtgatattgcaacagattgaatgcaaaagcagataagagaatctagctccattctgtcaagccagatgttaatgagatctgcaaaaacataaaacaatttcactcttcttactaaatgtttttgttttaggaagtgtagttctttctaatgaaagtattacttatattaacatgtaatgggttggatactattgttttaaaatcagttaatattttaaattttcctcagct

SEQ ID NO: 737083 - DNA, 629 bp, Homo sapiens
ataccggggctcagttccctccccttctgtcactttttctgtgtgatcttggacaaatgatgtcatatctctgtgcttcatgctccattaaagtaaagagaatgaaagtacctacatcataagatggctttagagatgaaatgaggttttgacagataaagcacctggctaataatgacaagccagcatattgggtatgcccgttattattgccactccgtgctagtgggttcaggaaggattaccttcaaaacagagaacccaggctastactctctgaaccttattcatctatttggcatctacagctgagttgctgaatgtagctggagaaaaatattcaactatgcttgatgagccttatttgacatacatgtccaacaacgtcaagtgtcccctggtgccttccagaaatctgacactgtttctcaaccctttctctctcctgctcactcttagttgataaccatgctggctgctttcactggaaaagagaaaccaggaaagaatcgccacatactccaggacagcacctttcacctcagagtctactcgacagctccacatgtagacatctctaaaccattgtacccaaaagtgaacatggtacctactccttccacttgctc

SEQ ID NO: 737084 - DNA, 566 bp, Homo sapiens
tggttttcttatcaatgaacacttgaaaccccttgtcagggaatgcagtgtgacctgtcttcccaaggtctcaccttttagccattgcctgactaatttcatctgcctccacgatagggctcacaaaaccaggctgggcaaagtctgatccatagaattctatttctctatccattcaagacacttattcactaacaaagtaactcaaatggaaaagctttggtaatatgcaaaaataaaaaacaatctcctctcagggttcagagcctcctgggagagaagcataccttatcaatgtcacagacctccatttgaaaagctagcagatcccagtcaggggcataagctcaactgccagagccagggcaaagtgcaatgggccatcrttaatgcagtcacaactatcagatcagtaaagctccagacaggcatggtgactgattttaaaaataagatctttcttttcaaattattcttgtacgttaaagctgtcctccccaaagactcgtacaataatgtaaaacttgggagacaacctgaatgtccatcaatagggaaatggcaaa

SEQ ID NO: 737085 - DNA, 614 bp, Homo sapiens
tcacagaagtgatgttgtgcccttctcggtgcatcatgttaagaatccctgacgtcaatatggcattactggtgaagttaactttggtcacttgattctgtggtagttgacaggtttcatctctataaggctactgcttttccctttgtaactaaaagtatcttatggggagatactttgagatcatgcaaatgccctgtttcttaacacaacttctctcagtactattagtgtatattgattcctgtctttgctaatggtgactttccatttccatcctgccttctatatttatttatttatttttatttttattttattttattttttttttttgagacagagtctygctctgtcgcccaggctggagtgcagtgggtgatctcagctcactgcaagctccgcctcctggttcacgcctttctcctgcctcagcctcccgagtagctgggactacaggcgcccgccaccacgcccagctaattttttgtattttttttagtagagaaggggtttcaccgtgttagccaggatgatctattccttctatatttattaaagaagagctggcccttcgcttcattaatttatttacttattcatttacttgttta

SEQ ID NO: 737086 - DNA, 614 bp, Homo sapiens
tcacagaagtgatgttgtgcccttctcggtgcatcatgttaagaatccctgacgtcaatatggcattactggtgaagttaactttggtcacttgattctgtggtagttgacaggtttcatctctataaggctactgcttttccctttgtaactaaaagtatcttatggggagatactttgagatcatgcaaatgccctgtttcttaacacaacttctctcagtactattagtgtatattgattcctgtctttgctaatggtgactttccatttccatcctgccttctatatttatttatttatttttatttttattttattttattttttttttttgagacagagtcttgctctgtygcccaggctggagtgcagtgggtgatctcagctcactgcaagctccgcctcctggttcacgcctttctcctgcctcagcctcccgagtagctgggactacaggcgcccgccaccacgcccagctaattttttgtattttttttagtagagaaggggtttcaccgtgttagccaggatgatctattccttctatatttattaaagaagagctggcccttcgcttcattaatttatttacttattcatttacttgttta

SEQ ID NO: 737087 - DNA, 599 bp, Homo sapiens
tgggacctccttcgatatggctcctgtgtcattttcacatactccatcattttttagtacttccttagtttctggcaccacaaaacgttcaggctcatcttatatatttcctggaattgattatttctctaaagaacactttacttatttgctcaatcctaatacatacataaagtagtctcagagttgctaacccatgcctctgtctgtggaaacaaatttaccaactagagtatatatttttgtacagttctttatgtctttagctttatattgtacggtcaaaatactgttttccaaacttagttggttcttccccaactctttaagtatggttatgatattcatttgtagtacagttagatccacttgttaccctttgcattctaaytgggctcctcccatatcctgtagattttaattatttggacagggtagggggcactttgtggttcattccctggttctaagagtcagagatatacaagaagtttatctagtccatgtcaccccacaaccactaccccattccacttcttctttccatctcattctcaaactctgaataaccaaatctcactgcacctatttttgtaaac

SEQ ID NO: 737088 - DNA, 627 bp, Homo sapiens
catttctgagaaaaaaaaactcaaaaattaatatctaataaaaatcagttttagaagtaagttttaatttagaaaacactatttatattaaatcataattaacatttaaaagctacttaatgagccaagggggtaaataccaggagagtcattacagcattatttttagtaggaaaaaaataaaaaacaacttaaatgtcttaaatgtctattcaaaaaggaactagctaaataaaatattatatactattaacaattaatgttaatatatagagagcagccattaaaaggaatgctgctgctctctatatattaattttttaaatcttcaagatatacctgaaaaatagaagcaaatggcagatacatatgtagtataaaatcatttgtgtttttaaaaataggcctgtatgaaaatccatgagacttctctggaaagatacacaataaacagatcatcgtgatttcctccagggagggaaaytttatggctgggaaaaggagactttctccactaacagtcctttggccctttgggatttttgtaccatttgaattattcagtcaaaatttttaaaaagaaaagatcggctaggggcggtggctcacgcctgtaatcccagcaat

SEQ ID NO: 737089 - DNA, 486 bp, Homo sapiens
ttcatatcagtatggacccatgggttcttattttattcagttgtttgtaattttttattagcataatttatcgctcaaattatggtgctagtggaagcccctttcaagctcaacttcccactttttgagatccatactgtcatctggatccttactgctacctgtttgtatgctattctccttccttcctaaggggaagacatgccagctaaagctaagctaagaaatatacagcattgctgccactctgtctgttgtcctcttttgtgctcatactctgtcacaaatatatattttttattaatttgtatatgtacaygtctccagaatttctttatgcacatacaaggacatgtaaatatatatatattcatatccctcccaacacaaaaagatagcacactgagccttagattttgttttgtttttccagttaactttaagccttcctgatcctttcacatcagggtgtagaggagacctttg

SEQ ID NO: 737090 - DNA, 486 bp, Homo sapiens
ttcatatcagtatggacccatgggttcttattttattcagttgtttgtaattttttattagcataatttatcgctcaaattatggtgctagtggaagcccctttcaagctcaacttcccactttttgagatccatactgtcatctggatccttactgctacctgtttgtatgctattctccttccttcctaaggggaagacatgccagctaaagctaagctaagaaatatacagcattgctgccactctgtctgttgtcctcttttgtgctcatactctgtcacaaatatatattttttattaatttgtatatgtacatgtctccagaatttctttatgcacrtacaaggacatgtaaatatatatatattcatatccctcccaacacaaaaagatagcacactgagccttagattttgttttgtttttccagttaactttaagccttcctgatcctttcacatcagggtgtagaggagacctttg

SEQ ID NO: 737091 - DNA, 546 bp, Homo sapiens
agaaatcattgcaggaacagaagagaagtcacatgacattccagcatcaacaggaaacaggtagaaaacagaagagatcggattagtgttaattctagagcacacaaaaagagccaaacatatttcatgggattaagaagaaaaatataaatgcaacctctatgataaattgagacataaaaagacagtgaacttcaaaatccagtaataagatttggtagtggattgtaacactttatattatataaaaggttttaaaatattagtgtgaaaattacgctatgaagtatactggtttatcaagtcagaggtaaaagtaaaaaaccttaccttatcaaaataaggattgcgctccatggaagactytttggaaatctgaggccgagaaccagggcctttcccgaccgttcgattgtaatcaccaatatttaggctatgtttatctatctccattcgtttgtcttgtaacattcctaataaaggcaggagactgttatcaaacaggaagacaacccaattggtttcagataaatttacaacaaaagc

SEQ ID NO: 737092 - DNA, 601 bp, Homo sapiens
tgtcaaatccattccctgacaatcagttttttcttttcaaaactctgtactcacttggcgtctgaaaaattattctactctaacttgtcccacttctgcttaggatcactcccctaaatgccattattccccaggactgtcttcggtccattatcctccaactctctctagtcaaactattcctatagcttacaytatcatccacatctaattaattacacttcatatcaccagccccatctattctgagcttcacatccagattttcgactgtttactggaccaggtggttttcagagcaccttcaaacgcagtatctatcaagcctgctattcctgtatttcttaactcaaataatgaccatttattgatttattgtctctcagctccaaattcaccctttttgactgctctatgaaaatatatctggactctttacattttttccttagccagctggtactgaggctttgtcagaagagggagctcgagagacagggcaagaggaagggtgttgcttcctgggccagcatgtggacttggtaggcatgggcagcccttgcagcttctccattgcctggtgggtcagcagcactctgtg

SEQ ID NO: 737093 - DNA, 602 bp, Homo sapiens
catggatctcatgaaagagttttgaggagcctcctagggatcctgtcctcaggtaaacttcgagaaccattgctacagaatatgcacacacgggatgcaactgaatatatggttctggagttcaaaaaagtttggattaaaaatatggatttaagattcaacatacaggtgagaaaagagttgtagaggaagaaatgacaaaacctaagaatgggtttaagcagcagatagaaggagggaagtaaaggcaagaataagtcataactgccagagtgaygggagagaaacttcattttaggtaatggcttaactatctatgtagttactcaagcaggaatttcttcctcaatttctccctactcccctgtatctagtcagtcaacaggcccaacagaatacctcaaattcaaatgcatcctgtgtctccaacgccacttctttgatttaggccctcaacaatttactctcacaaaaacctcctaatgggactgcaggcctggctcaagtcttgatccctgccccacccactttcacgcatcccgaaatctatcatctacctgccccaagttatctgtatcataaaaccacttttggaactcctt

SEQ ID NO: 737094 - DNA, 635 bp, Homo sapiens
agcatgttatgttatgacaaccagattgccctcctctattctgatgaaactcttacaaatcccttacaatgcagtcaatgtgctctgtaagtgctggtttcttatttctccttcactttatcactagcatttcctgaaccaagcaaagcaaatgctggttgaatgaataatccaggaattgccaagcatacacaaagtgactggatctatrcaaaacaagatagaacaatactgaggattaaacactgtggaatatcaatattcaagaggtgcaataatgaagaaccagtaaagaaaagagaaagaatgatcaagaggaagagtaagtaagaatgatggtcactggttagtatgctgctgaatgcatcaatagttttaaataaatctctgctctaaaaaacacctacagctggcatggagagagcaggacaagaccagccactgagatcattaatgtgagaaggttctctaattagccctgagactgccctggtccatatcaaaaaagattttaatggaaaagagttacatttagctaggataaaacatagatatctagtaaagagctctatttttagggtttttttttttttttttggtcatactgtgaccccacccatctatttcacagtttt

SEQ ID NO: 737095 - DNA, 602 bp, Homo sapiens
tttaaaaataagaaaaaacataaacataatacctgaacattcaagtagaagttagttcccactgagtttttaattccctaaagttatataataaagaaactgtcattaaatcactgaagatataaattagttaagaaatacagaatggttagttgattttttaaattaggaaaaaagtcccaaatatacagtataaaaataaacttcagctaaattaaacaattaatactataaaatgctagagattttaaaagcttttrcaaaacatgggcaaactattttctaaatctggaaaaatggtatgttttctcagcatagcaattagtcaagaactttaagaataaaaaataaatttgataaaatagataaaatactgatgtgtattttttcaaatgtgtatattccaatttaaaagggaaactggaaaatacctgtcctttagaacaaattaaagggatccattctgttccttcccaaccctcctcacctcgactttccctaatctaaggaaagatatgttttagtttaaggatactaaatctaatacagagaagcattcaacacactagagtttaggactgaagtccaagctaatagtacaa

SEQ ID NO: 737096 - DNA, 612 bp, Homo sapiens
atctccctgatgttatcttatagtccttctctcttgcctaccatgcctcaggcaagcctgctcctcctcatctttcccctctcaatccaaatgtaacttcctcaggactttcctgaccagcacctgccttaactcaaaaggtctccctcccagttatatattctaaagacatcctctacaccttcatagcattcatcacatttctaatgaaatattactgtcgcttgtttaaatttttttttttttttttgagacaaggtctcactctgttgcctgagcttsagtgcaatggtgcaattatagctcactgcagccttgaactcctgggctcaagtgatcctcctgccccaacctcctgagttgctgggactacagacggacactaccacactcaactaatttttatttattttttatttttttaatttttttgagatagggtctcattctgtcacccaggctagagtacagtggcatgactgcagctcactgcaacctctgcctcccaggttcaagtgattctcaccctcagcctcctgagtagctggcattacagggacctgtcgccacacccagataatttttatatttttagtatagatggggtttcac

SEQ ID NO: 737097 - DNA, 607 bp, Homo sapiens
aactctaatattaatttttttaagttaaaaaaatgtggggaggaggttaagaacccttaaggggattaacatttttggtggctctggtcctactagaatttcaccagtctccagccatctcctcatcacttgccatggaccaatctgagttcccggaaaataggcttcctctgaattctaggtttygccgcggttggtgggatggaaggactgaaggagaagtacttcttggccctggctagcaaccggagtgagaacagcagctgcgggctgccccgggaagatgccttccatattttccgagatccgctgacatctgatctcccgtggccgggggtcctatttggaatgtccatcccatccctctggtactggtgcacggatcaggtacaggacagtggcctgagcaagtttttccttctctttgcttctttccttagggtggctgaagtcggtgcttttttcttcctccatctcttctctcatttgcgttttccctgcttccttgactacttcctcctttccattgctctacatgctattttatttcttcctctgtgaatgggaatgacaaatccaaagctgctgatatttgcaaaggggaaaa

SEQ ID NO: 737098 - DNA, 559 bp, Homo sapiens
aatgtggggaggaggttaagaacccttaaggggattaacatttttggtggctctggtcctactagaatttcaccagtctccagccatctcctcatcacttgccatggaccaatctgagttcccggaaaataggcttcctctgaattctaggttttgccgcggttggtgggatggaaggactgaaggagaagtacttcttggccctggctagcaaccggagtgagaacagcagctgcgggctgccccgggaagatgccttccatattttccgagatccgctgacatctgatctcccgtggccgggggtcctatttggaatgtccatcccatccctctggtactggtgcacggatcaggtacaggacagtggcctgagcaagtttttccttctcttygcttctttccttagggtggctgaagtcggtgcttttttcttcctccatctcttctctcatttgcgttttccctgcttccttgactacttcctcctttccattgctctacatgctattttatttcttcctctgtgaatgggaatgacaaatccaaagctgctgat

SEQ ID NO: 737099 - DNA, 536 bp, Homo sapiens
tcctttccattgctctacatgctattttatttcttcctctgtgaatgggaatgacaaatccaaagctgctgatatttgcaaaggggaaaactcaacacactctgccttttttttttttttttttttctgagacagggtctcactctatcacccaggctggaaggcagaggcacgatcatagctcacagcagccttcatctcctgggctcaagagatcctcccatgtcagcctcctgagtagctgggactacaggcmcatgccaccatgcccagctatttattattattattattttttagtagagatgcaggtctcactacactgaccaggctgctctcaggctcctgagttcaagtgatcctcccgcctcagcctcccaaagtgctgggattataggtgtgatccactgcagctggcctaatacactttgcttaatgtatgagaatatccagtaagcaaaggagatgataccttttaaatgggggtaaaactcctattggacatcatttgttcaacaaatacacactgggtgtcc

SEQ ID NO: 737100 - DNA, 536 bp, Homo sapiens
tcctttccattgctctacatgctattttatttcttcctctgtgaatgggaatgacaaatccaaagctgctgatatttgcaaaggggaaaactcaacacactctgccttttttttttttttttttttctgagacagggtctcactctatcacccaggctggaaggcagaggcacgatcatagctcacagcagccttcatctcctgggctcaagagatcctcccatgtcagcctcctgagtagctgggactacaggcacatgccaccatgcccagctatttattattattattattttttagtagagatgcaggtctcactacactgaccaggctgctctcagrctcctgagttcaagtgatcctcccgcctcagcctcccaaagtgctgggattataggtgtgatccactgcagctggcctaatacactttgcttaatgtatgagaatatccagtaagcaaaggagatgataccttttaaatgggggtaaaactcctattggacatcatttgttcaacaaatacacactgggtgtcc

SEQ ID NO: 737101 - DNA, 602 bp, Homo sapiens
ctgcctggtgaacccttgcctagcaacccgatccgtatctcaagtgaggtcaggtccagctctgggatctacaggacaactacaccaaaatctaagaccccttcatcccaggacccagggaatcacccccacccttcaggaccctgccagaccttcacccagcctgcctttcagggcactaagcctttccatgcccaggtcaatcacagtcgcacaaggaaagaacaaggaagtggtcagactcacagcatccttatcggcagaccatcctgcccactttacaaggaaggggactgaggctttcacttyataaggtcactgggtgctatagtttggtttatgtgaccccctccagatctcaggttgaaatttgatctctgctgttagagatggagcctaatggaaggtgtttgggtcatgggggaggactcctcatgaatagatcaatgccctcccttgtgtgggacgagggtggaagtgagttctcactctattcgtttctgcaggagctggttgttgaaaagagcccggcacctccctccgtctcttgcctcctctcttgcatgtgacctctgcacacagcagctctcctttgctttcct

SEQ ID NO: 737102 - DNA, 545 bp, Homo sapiens
tgaccctacagtagcccagcttggcacagatcagctggatccctttacagggaagttccttccggccaatcacccagccgctgtccgaggtgctgaaagcctctctctataggactcacaggtccgcccaaagccaactgtctgkctgcccaaccttgacctctgccctccagaaagaaaggaagcttgaagagtggtggaaaatgaatcagggatggcgctaagaaatcgggctttggaaacctgtcagctagtgacactctcatcgctcttctaggtccacaaatctctaccatgagagggcttcagaggtgtcatcacatatgggaatatctgtttactggttttctcctcatcttgcctttgaggcatgtgtcacaggaggacaaaggccagctctgctttccctcacagttgcatccctgcatcagcatggtcccaggcacagcgttgaaagcacgtgtctgcagaatgagtgaacggtggagggctcaggaggaagggcaggcttgagtgggacggacccgtatggagggaagtttgtg

SEQ ID NO: 737103 - DNA, 545 bp, Homo sapiens
tgaccctacagtagcccagcttggcacagatcagctggatccctttacagggaagttccttccggccaatcacccagccgctgtccgaggtgctgaaagcctctctctataggactcacaggtccgcccaaagccaactgtctgtctgcccaaccttgacctctgccctccagaaagaaaggaagcttgaagagtggtggaaaaygaatcagggatggcgctaagaaatcgggctttggaaacctgtcagctagtgacactctcatcgctcttctaggtccacaaatctctaccatgagagggcttcagaggtgtcatcacatatgggaatatctgtttactggttttctcctcatcttgcctttgaggcatgtgtcacaggaggacaaaggccagctctgctttccctcacagttgcatccctgcatcagcatggtcccaggcacagcgttgaaagcacgtgtctgcagaatgagtgaacggtggagggctcaggaggaagggcaggcttgagtgggacggacccgtatggagggaagtttgtg

SEQ ID NO: 737104 - DNA, 528 bp, Homo sapiens
ccttgtcagaaggaatcatttccaactcatctgaattaaaaagagactttttggtgagttactgcacctcctgaattagaggagactaaatgaatgaggctttcctgctgccgtgattacttcctggcttggactcacaccaggaaacccacagctgtaaatctctccttgtggtttctggaatctcccaactcctgaaactataaatggaattcccaaccggtgtggtcaggtgggtatggttcctccaggccccaaggaaatcttggagaacactggaaatggggggatgttggccagggrgccagagctgggctgggtgtggtgctccccagaacttagagcaggaagagctgtcatgactcctagccctgccctgtgctagtccaaactgaggaagctgaattctgttaagtccaggagtgttgagtccaggggggctaagaattaagagacaatgtcaagtgcatcacaaggtgagcccagaggaaagcagagccaggaaagtgaaagagagagccgagcttc

SEQ ID NO: 737105 - DNA, 528 bp, Homo sapiens
ccttgtcagaaggaatcatttccaactcatctgaattaaaaagagactttttggtgagttactgcacctcctgaattagaggagactaaatgaatgaggctttcctgctgccgtgattacttcctggcttggactcacaccaggaaacccacagctgtaaatctctccttgtggtttctggaatctcccaactcctgaaactataaatggaattcccaaccggtgtggtcaggtgggtatggttcctccaggccccaaggaaatcttggagaacactggaaatggggggatgttggccagggagccagagctgkgctgggtgtggtgctccccagaacttagagcaggaagagctgtcatgactcctagccctgccctgtgctagtccaaactgaggaagctgaattctgttaagtccaggagtgttgagtccaggggggctaagaattaagagacaatgtcaagtgcatcacaaggtgagcccagaggaaagcagagccaggaaagtgaaagagagagccgagcttc

SEQ ID NO: 737106 - DNA, 633 bp, Homo sapiens
cacatagttacactttttgtgtgtgtgtggcaagagcacctaaaaatctactctcatcaaaaatctcaaatacaatacaatgtcattaactatagtcctcatgttgtacattggatctctagacttattcattctacatgtctgaaactttgtatcctttgacctgcatctccccattttctccctgacagtccctggtaactaccattctgtatgctatttctgtactttttttttttttttacattctacatataagtgagatcatgcagtatttctcttcgtctcccttatttcacrtagcataacgtcctccagtttcatgtctgttttgtcaaatggcaggatctctttcttttcaatggtgaataatattcatttatatatatcacaatttcttcatctgttcatccatcagtgggcacataggttattttcatgtcttggctattgtgaataatactgctttgaacatgtgagtgcacatatcttcatgaggtagtgatctatttgtaatttagagtgggccctaagaagctgtatgctatatattttgtatgttgattgttagacttttatgggtacttagttccctccacttcttaagtttttctggggttctgcagcataaac

SEQ ID NO: 737107 - DNA, 612 bp, Homo sapiens
ctgccatgagattggatgttttgaatttggggccagagggaagtgaggtgcccgtaagtcatcacagggtgctgggaaggcttctacatcgcaaccacacacatatctcagggcagccccactttcaatccacccaaccagctccacagggaatgggttctgtgttctgcaagaagggagattgtaggacatgatgtgagagtttcaagatctactaggaaaaataaaacagtttcctccttttttcatttttaatttttctatttgtcttatttacygatttattttattgagacagcgtctcactccgatggtccacactggagtgcagtggcgtgattttagctgactgcgggctccacctctgagtcgcaggtgatcctcccacctgagcctcctgagtaggtgagaccacaggcatgcaccaccatgacccactaatgtttagtatttttagtggagactagctttcaccatgttgcccaggctgctctcaaactcctggactcaagcaatcctccgaccttggcctcccaaagtgctgggattacaggcgcatgccgtcatgcccgacaaattccttcctcttctcctgctgtgattcgaatccta

SEQ ID NO: 737108 - DNA, 535 bp, Homo sapiens
gggacgcctgcggggtgacctgcctgtgggatgtgtgggtgtgtgttggagagaggggaagggaaaagggtgcatgaacctgccatgagattggatgttttgaatttggggccagagggaagtgaggtgcccgtaagtcatcacagggtgctgggaaggcttctacatcgcaaccacacacatatctcagggcagccccactttcaatccacccaaccagctccacagggaatgggttctgtgttctgcaagaagggagattgtaggacatgatgtgagagtttcaagatctactaggaaaaataaaacagtttcctccttttttcatttttaatttttctatttgtcttatttaccgatttattttaytgagacagcgtctcactccgatggtccacactggagtgcagtggcgtgattttagctgactgcgggctccacctctgagtcgcaggtgatcctcccacctgagcctcctgagtaggtgagaccacaggcatgcaccaccatgacccactaatgtttagtattttta

SEQ ID NO: 737109 - DNA, 603 bp, Homo sapiens
aagatggaagggccttcaatgtcgttccacagtgtctagagagaggaactgtgacccattctttcaatgggatgcagttcagcaatgaataggctgggattgttgttggtaaattcagttctaagaatgagtagtgaagaacttgtcgaaacacttgaaggtatgtttggactcttacgctatgtgagacttctcctgagattgtaactctcatgaaattgacatgcacatcaagcatgtgtgatcgacgttcagtttccaactgacgtttgctgtaaaacacatactagattttgcatctgagaatgaagkattgtagcatgtatcttagtcatcactgtgacatcaattgtattggtgttgattatatctgtattccttgggttaaataaaaatgttaaaatgagtttcgtctatttgcgtttcttttctttaatgtgtttgctcaaaaatctccatttctgggccgtgcatggtggctcatgcctgtaatccgagcacttcgggaggctcaggcgggtgcatcacgagggcaggagatcgagaccgtcctggctaacacggtgaaagcccgtccctacaaaaaaaaaaaaataaatgcaa

SEQ ID NO: 737110 - DNA, 635 bp, Homo sapiens
agaggatcccccactccacagatgacagcacacacacaaacacacagtcacactctcacacaatcacaagacacatttaagtatccatttacacccccaccacaggtcatcttcagatttccctgagtgattctcaaatgcatgagtctgcacttctaacgagtcttttacgaatagatccccagaggtggtctgtttggacaattaagggggaatcacgattagcaactctctcctaacaccttgtatatttgtatatttccctttacttccttttctttcttttctatttggttatttatttattatttgagacgaaatatccactgtgctcggcatamttcccttttctaggagtagaaacaaattatggaatgatgggtaacaatccccgaaagagtccctataaaagtcaattcaatttttcttgctatggaagcatttataagacacattaaaaaagaatcatttcagccaatggataaggaggctatagcagaaagtgagaatcactcttatgccatgactactggaatgggtaggaatggggcagggctctcctcgcccaccaggaagcaccaagactggccactcaaatggtcaacaaacagccttctttttttttttttttaatt

SEQ ID NO: 737111 - DNA, 635 bp, Homo sapiens
agaggatcccccactccacagatgacagcacacacacaaacacacagtcacactctcacacaatcacaagacacatttaagtatccatttacacccccaccacaggtcatcttcagatttccctgagtgattctcaaatgcatgagtctgcacttctaacgagtcttttacgaatagatccccagaggtggtctgtttggacaattaagggggaatcacgattagcaactctctcctaacaccttgtatatttgtatatttccctttacttccttttctttcttttctatttggttatttatttattatttgagacgaaatatccactgtgctcggcatacttcccttttctaggagtagaaacaaattatggaatgatgggtaacaatccccgaaagagtccctataaaagtcaattcaawttttcttgctatggaagcatttataagacacattaaaaaagaatcatttcagccaatggataaggaggctatagcagaaagtgagaatcactcttatgccatgactactggaatgggtaggaatggggcagggctctcctcgcccaccaggaagcaccaagactggccactcaaatggtcaacaaacagccttctttttttttttttttaatt

SEQ ID NO: 737112 - DNA, 586 bp, Homo sapiens
gaggatcccccactccacagatgacagcacacacacaaacacacagtcacactctcacacaatcacaagacacatttaagtatccatttacacccccaccacaggtcatcttcagatttccctgagtgattctcaaatgcatgagtctgcacttctaacgagtcttttacgaatagatccccagaggtggtctgtttggacaattaagggggaatcacgattagcaactctctcctaacaccttgtatatttgtatatttccctttacttccttttctttcttttctatttggttatttatttattatttgagacgaaatatccactgtgctcggcatacttcccttttctaggagtagaaacaaattatggaatgatgggtaacaatccccgaaagagtccctataaaagtcaattcaattttycttgctatggaagcatttataagacacattaaaaaagaatcatttcagccaatggataaggaggctatagcagaaagtgagaatcactcttatgccatgactactggaatgggtaggaatggggcagggctctcctcgcccaccaggaagcaccaagactg

SEQ ID NO: 737113 - DNA, 635 bp, Homo sapiens
agaggatcccccactccacagatgacagcacacacacaaacacacagtcacactctcacacaatcacaagacacatttaagtatccatttacacccccaccacaggtcatcttcagatttccctgagtgattctcaaatgcatgagtctgcacttctaacgagtcttttacgaatagatccccagaggtggtctgtttggacaattaagggggaatcacgattagcaactctctcctaacaccttgtatatttgtatatttccctttacttccttttctttcttttctatttggttatttatttattatttgagacgaaatatccactgtgctcggcatacttcccttttctaggagtagaaacaaattatggaatgatgggtaacaatccccgaaagagtccctataaaagtcaattcaatttttyttgctatggaagcatttataagacacattaaaaaagaatcatttcagccaatggataaggaggctatagcagaaagtgagaatcactcttatgccatgactactggaatgggtaggaatggggcagggctctcctcgcccaccaggaagcaccaagactggccactcaaatggtcaacaaacagccttctttttttttttttttaatt

SEQ ID NO: 737114 - DNA, 634 bp, Homo sapiens
gctcttccggcttgtctcgaactcctgggttcaagcgagcctcctgcctctgcctcccaaagcactgggattacaggcatgagccaacactcccacaccaagatattcatacagtaaatatgaactcctatatcagattccatatctaataatgattgctggcagtaaggatgctcacaagttacaagggtaatgataatggaatcaccacgatcttggcgatgcagcatctcaacctcctgccttcttcaattgttatcatagagatgaagagcacatgaaactcttacacattytctttcaagatttcgcctagaagtgatacatctagaatccttgattttagaatgactgtttttaaaatcgaggagatgagtacaacacggtcttctgtgtccccagagtgagatgagaaatgtataagtgactcaggcagttattcaattattcttctattcaccaatttttcttttacacacaggaaggaaggacagaaggaagaggggaaggggaagggaagaaggcaggaaggaaggaaagagggaagggagggaggaaggatggaaagagggagggagggagtgaggggggggaaggaggggggttaggatcgagggagggagaaagcaaaaaa

SEQ ID NO: 737115 - DNA, 615 bp, Homo sapiens
tgtcccattggagttttgacaactctgtgtattctgagtatgagcagtccttgcacgtatatgagatttgcaaatattttgtgccccaatctcaaggttgctctttgatacaaatcaagagcatctgaggcagagcaaaggttcaggtgagaggacggagcatttctccacctctccagcatgcgcagcatctctctcctccgagatgccgagacatgtgtgcagggagacaccatgaaaaagcaggtgtgcttcattctgaatagagcgtctctgattcccgtctggtgcctgagggtscatggcccatgagccttagaagagacgtcttcgggccttgcacgttggcctccatagaaacttgtggcaaattctgggctccggactgggtgatggaggtagaggtctgagggcagaggtgggcaggggctccaggccgtggagatccaagtggaattcttcaggcagagcctgtctccagggactaggcttgggcatttgggatgagccctgggggacggccgctctgtagtcaggtttgaggtagaggacacgccaggaagaagggctgactccatgcacaaggtttgctgggggtcccatcaggggcaggaa

SEQ ID NO: 737116 - DNA, 630 bp, Homo sapiens
aagcggctgccatgcagggtggagacgtggatgggaatgcactgcccagctggctgccaggctaggaaagcccagaggtgcggatcccacttccgtcccccttgcctcgggccattttggtctctgcagtagtgaaaggggccctcagctcagcccccctcatttacctgcccacgcagaggcattacaaaagggatgggacacccagcctgggcagtacagcaagacctcatttctacaaaaaataagcttcctgtggtgtacatrcctgtagtcccagctactcaggaagctgaggtgaggggatcgcttgagcctgggaggttaagtctgcagtgaaccgagattgtaccactgcactccagcctggacaagagagcgagaccctctcaaaaaaaaagaaagagagattggcatggctagactggctcttactctccttaacattccccactttgcagccagaaggtgaacaaaggttttgaagtcaatggccttgggcaacctgctgtctctgaaaaggtggtgtggattcaacaggtttgttttcagaacagcctcgcagccccttggagacagtgaccggaggaaactcaggccagccttgtgtccagcactttccaggccaag

SEQ ID NO: 737117 - DNA, 603 bp, Homo sapiens
atctgggctgcttctggccatgaattatagcagagcaaggtatgtgggtggggactgcccaggaatcaggcagggtttgagggacagcacctgctggggtcaccacccaaaaaggcccacaaaggaagggacttaatgtctttgatggggaaggagtgctcattaaccaaggatgggacagggtgggtgggaagatggcccctggtgtcacagaggggagggggggacaggaggaggccggatggctggactcttggatcttggagaagacagggacgggaggaggagcaggggccccctgaggaaacccaaagaactagggtgggcctcttggccaaagagatgaaggaaggtccccctaggagtcagaagagaggggctctcaggtgccagggtccctgaagtcaccatgggccaaggaagcagatggcagggcactrgaggctgatgggatttggggagctgacggagaaggcaggaggacgggccccagtagacagttcatggggatgaggccctggaatcaagtgaggaggcagctgggcctgggggcccaaaacaggcaggggactagcagatagggccaacatggcaggtcccacc

SEQ ID NO: 737118 - DNA, 644 bp, Homo sapiens
tgctcatacctttgtcttaatttttccttccaaacagtaggtcctcaggacaaggaggtggggcaaagtggctgcagaatttctgggaattggctaggagagaggcggtcggacctacagtcaggtctgcatggaaggttcaatgtttttagttagattggatgtgtactgggaatacagctgacccttgaacaacaggggtttgaactgcaggtccattgagaggcggacgttttttcacccaaacaccggtggaacatacagtatacgaagggcggattttcctacatccgcgggttccgcagggcccactgctggacttgtgtatgcccagatcttggtatctgcgaggttcgtggaaccaattccccgcggactccgagggacccatggactttggggtctgatggagayggggaaggggccaaggttccccccaaaaccattctttggcgagcaccacgctcatgaggcacaggaagtggggtcctctccaattccccgcactcccgacaggacggtgtagccgaggaagaacatttgaaggcaggagaggatggcatcccggcacggaacacacacaggcagccagcaggcagagatttatttccacagcccctgcctccaagggtctgttagtctgg

SEQ ID NO: 737119 - DNA, 574 bp, Homo sapiens
atgcccaccttgcgtcccgtacttttcctctgcgacactcaccaccaccgtaattagtatgcactcgctcagtgaatgaccatctttcgcactagaatttaagctccatgagggtaaagatggtgatctagggccaggcgtgacagctcatgcctgtwatcccagcactttgggaggctgaagcaggaggatcacttgaggccaggagttcaagaacaacctgggcaacatagtgagacccccatctctacaaaaaataaaaaccagccaggtgtggtggcacatgcttgtagtcccagctacttgggaggctgaggcagaaggactgcttgagtctagaggtttgaggctgcagtgagccgtgttcatgtcactgtactctagcccaggctgggggacaaagcaagaccttatctcaaaaaaaaaaaaaaaagagtgatgtgtgtttctgtttcttggtgaatcctcaccatcaagcaaagtatcttgtatacagcagcttttaataattgctgtgaaatgaagagatgacagtgaatgtctttggtgaattttatgagatttttatttggaa

SEQ ID NO: 737120 - DNA, 555 bp, Homo sapiens
caggcaaaaactccgcgggagcctggcccgctttttacctgggcctcagtttccccatccgtaaaatagaacgggttggatctcccgagcgctaacattccagaactcggatggggcgaaggggagggagggatgggccacccacacgtgacctccccgcgtggagccccgcctaccactgatccagggggtggcagctccggccgggaygagcggggtgggcgggtcctaggaaaccctacccggccgcccttggcagcgcctaaggcggagcgcgcggctctgcagcctgcttgccccggagttggcacccacggaggatggggaccgcaccctcagcttcgcagggagccaccgtggaggccagggcggtgcagagacacgacgtgtgactcggagtgcgcctggggaggatggacgagggagcgggggaccgctaacggggctccctctgcgcgccccgtccgcagaggcgcacgtcgagggtcccgggcgggctccgtggacgttggcggtagcgccgagcgagtcacggaccatgaagagcgttcgtgc

SEQ ID NO: 737121 - DNA, 544 bp, Homo sapiens
tacccctggggaaagctgggagagggtttggggatttctctgcacttggagggagagtccccatgaagagtgaactcacctgagtaaaagcaacagcagaacatgcgtgcagcttccctggggggttttaggtacctggaaggagacccttgagcatctgttcataagctcctgccacgggactcaggggcccagatagcagccaaaacgctaatcatgggacacatctctgctcgcttacctgccacgcagggagctggcacccgccctaggctaatgagtcycaccatatcttggggaatacctattcacagacatgcagtacagtaattatctggctgagaaatcgagaactttcctgagggaaaaaggaagaatttgctggccaggagcagtggctcacgtctgtaatcccagcactgtgggaggctgaggcaggaggatagcttgagcctgggaggccgagaccagtctgggcaacacagaaaggctgagtctctacaaaaagaaacaaattagccaggtgtggtggtgcatgcctgtg

SEQ ID NO: 737122 - DNA, 592 bp, Homo sapiens
gggcagccctgctcgtctcggccgctggcacaatgccaccagccatcacagcgctgtggctctgagaagcagccctggtcgcccaggctgcccccgtcactgtcactactgctcccgcacggctgctcccaggggaggcaatagcccttcacctggtaggtggcattgaagccgtggccggcgctgcgggcgcgcgcgtggtaggccacrgtgaggcggccctgggcggcctccaggctcacgggccggtggttgctgcggtaggacagcgtctgcagcaggcggtccccgcgctcgcccaggccctcgtatacctgcacgtagtcgtcatagcccagccgcagttccagctgcagcagcacccgccgggagtcctgtgtgtccaccagccacgtgcagtgaaggtctgagggcccgcgagcggcgccgaacaggtctggggaggcaaaggagccgtagaagctgcccagccgccggccgcacgccaggtcggggcagcccgcctcatccgagccgtcgccgcagtcctgcaagccgtcacagcgccgctccacaggcaggcagcgcgtggagcgcgccccgctgcatggga

SEQ ID NO: 737123 - DNA, 572 bp, Homo sapiens
gatgagagatggagtgtctgagaaacgtgcatgggtcccagcccgttgtgcccccaagcggagggacgacaggatctagaaccacgcaccaacctccggaagtggggcagctcccagttcacgcaagggcgagctaggctggggccacgtggaaggcaggacagcagctcccactcagggtgggcattgcctgtggctcctcgctgggtctggaggctccttcaggaagactctgggggtgagggagcgggggcgggagtcaagggaccwgagaggcacatgtcaccaatttcagttctgccccagctggcctgaggcagctcgggacttcccagggtggaaggataggtccgggggccaggctacttggaggcagggccaggtcttgaggaccccctccccagcccagctgtctgccggggaggcagctctgggttcctggagtgggctggctacggaggtgtgtgcctccctggcggccctcatctctcccggagccctagagcaggtctttctaagacttcccactcatcagccccggcccaagattatcactacaaaagacgtccttg

SEQ ID NO: 737124 - DNA, 601 bp, Homo sapiens
tgcttctgtctcagtgtaagagaagtgagtcatcctgtatttgttcatcccctcatacaagaggtgtctttggttgatacacagatgacagtttctccagtttcctggtacttggataataaacaaggaaaagatctggagacccaaatagataaactagttgcttccatttcatgtagtcgttaaaaaaaaaatgaagaagtcatggttcctacaatccagaaacttttaatctagactagcaactgggtaaataattaaattaagcatcatatggttggtccaacaaagagatgtgtccaaaatcttgggctttatttaggccactttctttatattgctgtgacttctgttggctacacctgtagggatattcatgaacagaattgttattaaatatatatgtgtgtgtatgtatgtgtgtrtatatatatatatatatatagagagagagagagagagagagagagagagagatagtctcactctatcacccaagctagagtgcaatagcagaaactcggctcactgcaatctctgtctcctgggttcaagtgattctcctgcctcagtctcccgagtagctggggttgtaggtggc

SEQ ID NO: 737125 - DNA, 579 bp, Homo sapiens
ttcaccatgttggccaggctattcttgaacttctgacctcaggtgatccacccacctcagcctctcaaagtgctgggcttacaggtgtgagccacagcatccaactggaagttactttttatctcactattcacaacgtttcatatcaatacaaagattgacacatctacatatatacataggaagacaaaaacccacatagagaattatataaatatttctatctaaatatttatgtatacaaaacatattccccagagatatttttaaccttttagcatgctctaaagaygctaatgtagaatcaatttttccttctttagctaaataacatttcagaatggaacatatcaacaaagctctatcttcaagggcaagtccacagaaataagctgaaaataaagtcatgtaacacatctgtccaggacagtatttcagcgccctgcatttggtacatgttccgttcacatgcaccatttggcgcctgtcttgacaaagtcacagtcaccatttagataattggatgattggatccacctggactgagctccttggctggttgaaatcaccaaggctgtg

SEQ ID NO: 737126 - DNA, 492 bp, Homo sapiens
ctctgcctcccgggttcaagtgattctcctgcctcagccccctgagtagctgggattaaaggcttgcaccaccacgcctggctaatttttgtatttttactagagacggggtttcaccatgttggtcaggctggtctggaactcctgacctcgtgatctgcccacctctgttgtagcaggatgagacacagacaagaacccctcagacacygagttgcagaaggaaagggctttattcagctggcagcattggaagactcacatctccaaaaactgagctccctgagtgagcaattcctgtccctttcaagggcttacaactataacggggtccgcctgaaaaggtcatgattgattgagcaagcagagggtatgtgactgggggctgcatgtaccactagtcagaacagaacagaacaggatagggattttcatgatgcttttccatacaatgtctgaaatctatagataacacaagcagttaggtcaggg

SEQ ID NO: 737127 - DNA, 624 bp, Homo sapiens
agagaattaaaaaaaaaactattctaaaatttatataaaacaataaagagcataaatacccaaaacaatcttaagcaaaaagagcaaagccagagacagcactctacccaaatttaaactatactatatggctacaggaaccaaagaagcatattactggtataaaagcagacagagaccagtggaacagaatacaaaactcagaaataaagctacacacctacagccatataatttttgacaacattgacaaaaataagcaatggaaataagactgtctatttaataaatggtgctgggataaccagctaaccgtatgcggaaaaaaatactagataatactgaacccctacaatttgccatatacaaaaattaacacaagatgaattaaggatttaaatttaagacatcaaactataaaaatcctacaamaaaacctactaaatatcttttttgacattggccttggcaaagaatttttgactaagtctccaaaagtaagcaagaaaaacaaaaagtgacaatttcccaacttcctaactattctaaagagcttctgcacagcaaaagaaactatcaacagagtaaacagacaacctacagaatgagagtaaatgtttgcaa

SEQ ID NO: 737128 - DNA, 627 bp, Homo sapiens
catctctactaaaaatacaaaaaattagccaggcgtggtggcgggtgcctgtagtcccagctactcgggaggctgaggcaggagaatggcgtgaacctgggaggcggaacttgcagtgagccgagattgccactgcactccagcctgggcaacagagcgagactccgtcttgaaaaaaaaagaaaaagaaaaaggaaaaagaatgtttgcatattgttggtttgagtgtaaatgagaacagcctttataaaaataaaataggccgagcacggtgcctcatgcctgtaatcccagcactttgggaggccgaggcaagtggatcacctgaggtctggagctcgagaccagcctgaccaacatggagaaaccctgtctctactaaaaatacaaaattagccaagcgtggtagtgcatgcctgtaatcccagctactcgggaggctaagggaggagaattgmttgaacctgggaggcagaggttgcggtaagccgagatcatgccattgcactccagcctggcaacaagagtgaaactccatctcaaaacaaacaaacaaacaaaaataaataaataaaaaatagagaagtctcaaaaaatttaaaactatcatataatacagcaattgta

SEQ ID NO: 737129 - DNA, 398 bp, Homo sapiens
ccccgagtatctcctgggcatcctggcatagccagatgacttccgtgcccctgttgcaataaccactgcttccaagtctctatagaccaccccttgggtatatctaatgtaagtgatatttattttatttattttttgagtcagtctcgctctgtcacccaggctagagtgtgctgatgtgatctcggctcactacaacctctgcctcctgggttcaagcgattctcrtgcctcagcctcccaagtggctgggactacaggcatgcaccatgacgcgcagctaatttttgtatttttttcagtagaggtggggtttccccaagttggctgggctggtctcaaactccccacctcaagtgctttgcccgcctcgggctcccaaagtgctgggattacag

SEQ ID NO: 737130 - DNA, 606 bp, Homo sapiens
atactttgttgaacctaagcttaaaaatggacaattgcccctgtatctttgggtcttcattccgcaggctcccatgtcacataaagcgatgatcaaatagctgtatatgccttttcccctactcatctgcctcttgtcagtgattttcagcaaaccttcagagggcaaaggggaagttttcctttggccgctacatcgtgttaggaaaactaggtaacctcatataaaaaacaaacaaaaaaaactaaagttggatctctgcctccttctttagctcaaaataaattctaaatgaaccaaaggttaaaatgtaaaatagggaccataaaagcactaaaataaaacatgggtggatgtctttgtagtcatgagagggagaggcttgacatgaatactagacacttctcataaacrgaaggattgatcatctgaaccagagaaaatacagaatgctaaatgacgagttgatgggtgcagcacaccaacatggcacatgtatacatatgtaacaaacctgcacgttgtgcacatgtaccctaaaacttaaagtataataataataaataaataaataaataaataaataaaaagaaaatacagaacacg

SEQ ID NO: 737131 - DNA, 426 bp, Homo sapiens
ggagagaacatcaccaacgtgcatctgtgtacagcgctagtgcgcacttcagctcttttttttgtaatcactctgtgcttcctgattcatgcttccttcttgcctttggagacctaagatcaatagcctttggtctcttacaagatcatgagaagaattttggcttgcttttccatataacttattaacatttaggcatatcactgtttttyccaaatatgtacatgaataattggcaatgaaagcctagagggtttgagaaagtgctgtctccacgtgatcaggtcaatgcttcctggattcttccagaagcatccttccccacaggctggttttcatttgctacatgtcaagacgactgttttgaacatccctgatctggcccctgaaatggggatgctctggcactgcttctagatgcccaga

SEQ ID NO: 737132 - DNA, 423 bp, Homo sapiens
ccggactgtacagaggattagtttgtctgaccacccaactgacactcatggggcactgagccaagtcctgggaataactgatgaacaagaagacatggtccctgccctcatggggcttaaaatccagtgggaaagagagagaacaagggcawgtgtggtaagttctacagagaagttcagggtattgtggggcatgtgaaacaggcttctgactccctttagaatggagtccaaaattctcagccgtctttatgatctttctcaatcttgaagcacgcacctcctgccacccgagccccagccacactggccttcccagctcttccttcagtgtgccctggctgagatcatctgttccctaggtagtagggtctcctcctcacggcccaactgaaatcctgttcacattctgaagtgctttca

SEQ ID NO: 737133 - DNA, 448 bp, Homo sapiens
ctctaacatagagtcagtactgctgttacccgttgcagggcctaggggacttagctggacgcctacctggcttttgttacccaatgcaatgcctccatgacatagctaaattcctactcagatttaactctgcttatttttagaaarcaggttgtctgtggtcataggttccttcttagcttactcgacctctgaagaacctctagcttcattctaatccaacttcagtactaaatgacattcccactggttgccatgacagttgacaatcaccgtgatgacccgaagagaccaaaaaaaggacaaaaaaaggggcagctccttgattccaggaaaatctacctcccttcccaagaaaaaacatgaatattcctcctcttgttcttaatttttattttttttagagacagggtcttaccatgttgcccaagctggtctccaattcctg

SEQ ID NO: 737134 - DNA, 448 bp, Homo sapiens
ctctaacatagagtcagtactgctgttacccgttgcagggcctaggggacttagctggacgcctacctggcttttgttacccaatgcaatgcctccatgacatagctaaattcctactcagatttaactctgcttatttttagaaaacaggttgtctgtggtcataggttccttcttagcttactcgacctctgaagaacctctagcttcattctaatccaacttcagtactaaatgacattcccactggttgccatgacagttgacaatcacsgtgatgacccgaagagaccaaaaaaaggacaaaaaaaggggcagctccttgattccaggaaaatctacctcccttcccaagaaaaaacatgaatattcctcctcttgttcttaatttttattttttttagagacagggtcttaccatgttgcccaagctggtctccaattcctg

SEQ ID NO: 737135 - DNA, 652 bp, Homo sapiens
gattgctcatcctttgaagacctgtgcagttatcttggtagtcattggtgttagtgtcattacaggaaccagtgaaagatgtccacgtggccagaggcttttcctacagaaagagtgtgcatcagattcctgcccaaagggacytctaccgggatttcaggaaggagaatgttgggaacgtggtctccctgggtaaggattccttccctttccaaatataagacttggagctttctaatgtattcatttctactgattagaagataggcagatagaaatgttaacacttaaaggatctctaaggattgtctagtgtaatcacttagccaggttctcttccctcacccactcctccttccagtaaaaaaataataataataatttagtgattaaaacattggagaggagttacatatgactatcatatttgtattacataaaatggtgtagtacagtaaatggtattattccttaggaaactgaggcttagagagcttaagaaacttcccctggtcaaagtaaagtaagcaatgtagctaggattcaaattacgacatgttcatctcttttgtatcataagctggcaaattctcaatttgctttctgttcttaacagctctttcctattaacctcaccaaaatgtcttcagaa

SEQ ID NO: 737136 - DNA, 513 bp, Homo sapiens
cgcagtatgtgtacacacacacgtctacatgtgtgtgtagatctgtatgtatgtattacaaacactgtgatttttgtaacttaagctgctttttctctctttgttctggctgctggaaagttcaacaaaacttacagcccacytcaaccaactaccccaacctatatttatttaatttcatcttatttccttgtaaattgtgtcaaatcctgtttttgaaaagcagcatagactgacaacttttcactatcatcttatcgaaggcattttggaaactggggtcgtatgtcccacctaggcttgctttgttactgccacaaatacctccagttcttaccagtgatgttattatgcattcaacctaattcattcatctggaaagaaacagttttttaaaaagggaaacctcacacgtaaatggctcagggcagcctggccttggtggaatgagcatgagactggaagctgaaagaagcaagttttaatcttgtcactaaatgagtgttgtttgac

SEQ ID NO: 737137 - DNA, 586 bp, Homo sapiens
atgatattttttatttgaaactatcagaatgtattgtgtaaagacaggaactcttttttttttttttttttttgagacagagtcttgctctgtcgcccaggctggagtgcagtgatgcgatcgcggctcactgtaacctccacctcccagttttaagtgagtctcctgcttcagcctcccgagtacctgggagtataagcgtgcaccaccactcccaggtaactttttgtctctagtagaggtaggtttcgccttgttggccaggttggtcctgaactcctggcctcaagtgatccgactgcttcagcctcccaaagtgctgtgccyggccaggaactcttattttaaacatagcttcaatatcatcataagctcttctcaattgtatcaacaattccttaataccatttaaagaaacagctaatttgggccaggcatggtggctcattcctgtaatctcagcactttgagaggctaagggggggatgattgcttgaggccggaaggtcaagaccagcctgggcaatatagtgagatcctcatctctacaaagataaaagttaagcaggtgtggtggcacacacct

SEQ ID NO: 737138 - DNA, 613 bp, Homo sapiens
ccagtggttgacaggcagaaaatgtggtgggctggacatggtggcctatgcctgcaatcccaacactttgagaggctgagtcaggaggattgcttgaggccaataccatcctgggcaacataatgataaaaataaaaataaaaaattagccaggtgtggtggcatgcacctgtagtcccacctactagggaggctgaggtgggaggagcacttgaacccaggaagtggaggctgcagtgagctgtgatggtgctatgatggctggtggagtgggaccctgtctcaaaaaagaaaaaaaaatgtggcagrtctataacatggaatattacatagccataaaaaggatgaaatcatgtcctttgcagcaacatggatggagctggaggcaattatcctaggtgaactaaacagaaaatcaaatactgcatgttctcacttataagtgggatctaaacaaaggttacacatggacataaacatggagagaatagattttggggattcctaatatggggagggtgggatgggggtgaaggttgaaaaattacctattgggtacaatgtctggtatttaggtgataggtccactagaagcccaacccacaccattatg

SEQ ID NO: 737139 - DNA, 613 bp, Homo sapiens
ccagtggttgacaggcagaaaatgtggtgggctggacatggtggcctatgcctgcaatcccaacactttgagaggctgagtcaggaggattgcttgaggccaataccatcctgggcaacataatgataaaaataaaaataaaaaattagccaggtgtggtggcatgcacctgtagtcccacctactagggaggctgaggtgggaggagcacttgaacccaggaagtggaggctgcagtgagctgtgatggtgctatgatggctggtggagtgggaccctgtctcaaaaaagaaaaaaaaatgtggcagatctataacatggaatattacatagccataaaaaggatgaaatcaygtcctttgcagcaacatggatggagctggaggcaattatcctaggtgaactaaacagaaaatcaaatactgcatgttctcacttataagtgggatctaaacaaaggttacacatggacataaacatggagagaatagattttggggattcctaatatggggagggtgggatgggggtgaaggttgaaaaattacctattgggtacaatgtctggtatttaggtgataggtccactagaagcccaacccacaccattatg

SEQ ID NO: 737140 - DNA, 593 bp, Homo sapiens
ggtccagcaatcctacttctggatatttatccaaaataatcaaaattaggatctcgaagggatatttgcactcctgtgttcattgcaggcttattcacaacagccaatatatggaaacaacctaaacattcatcagtggatgaatggataaagcaaatgtgttctacacatacaatgaaatagtattcagctttatgaagaaaggaaatcctggccacgtgcagaggctcacacctgtaatcccagcactttgggaggccgaggcaggcagatcacttgaggccaggagtttgacaccagcctggccaacatggtgaaaccccatctctactaaaaatayaaaaattagccgggcatggtggtgcgtgcctgtagtcctggctacttgggaggctgagactggagaattgcttgaacctaggaggcagaggttgcagtgagctgagatcatgccactgcactccagcctgggtaaaagagtgaaactctgtctcaaaaaacaaaagggggagtggggggaagaaaggaaaagaaagaaagaaatacctgacactgggtaatttataaagatagaggtttagttggctcacagt

SEQ ID NO: 737141 - DNA, 593 bp, Homo sapiens
ggtccagcaatcctacttctggatatttatccaaaataatcaaaattaggatctcgaagggatatttgcactcctgtgttcattgcaggcttattcacaacagccaatatatggaaacaacctaaacattcatcagtggatgaatggataaagcaaatgtgttctacacatacaatgaaatagtattcagctttatgaagaaaggaaatcctggccacgtgcagaggctcacacctgtaatcccagcactttgggaggccgaggcaggcagatcacttgaggccaggagtttgacaccagcctggccaacatggtgaaaccccatctctactaaaaatacaaaaattagcygggcatggtggtgcgtgcctgtagtcctggctacttgggaggctgagactggagaattgcttgaacctaggaggcagaggttgcagtgagctgagatcatgccactgcactccagcctgggtaaaagagtgaaactctgtctcaaaaaacaaaagggggagtggggggaagaaaggaaaagaaagaaagaaatacctgacactgggtaatttataaagatagaggtttagttggctcacagt

SEQ ID NO: 737142 - DNA, 630 bp, Homo sapiens
aaagcctctctcgtcctgtggtagtgcatgctttgggctggcagcccacgatgggaaagaagggcttgggcatctctttctgtttcctggtccaggtttctccttttcttttttttttgagacagggtctggctctgtcgcccatgttggagtgcagtggtacaatctcagctcactgcaaccatctcctcctgggttcaagtgattcgtgtgcctcagcctccagagtagctgagactataggtgaccaccactccttctggctaatttttgtgtttttcatagagatggggttycaccatgttggctaggctggtcttgaactcctgacctcaggtgatccgcctgccttggcctcccaaagtgctgggattacaagcgtgagccaccacgcctggcaaggcttctcctcctcttgccttactcatccagctgcctccaaattctccaaagctgcatcagaaagagagggagtgcctaaaggatagaaaaattcttttactttaacactgcaatctggacaataaatgatatcgattttctggctcacgaaatttatcttcatatgtgtttgtcctgccctttgctttatttgttgttgttggacttttaattttggcaactatttct

SEQ ID NO: 737143 - DNA, 581 bp, Homo sapiens
tattccacaaaactatttttttaagaggtggagtctcaccatgttgcccaagctggtcttgaactcctgggctcaagggatcctccctcctcggcctcccaaaatgctgggattacaggcatgagccaccagtgcctggcctattccacaagactatcaagtgcctcttctatgtcaagaatttttatgtttgaaaacccccagctcagtgcctaagatagcagatgctcagttagtgataagatttttgagtcaaacatatctgggtttgaattctggccctgtaatttactagctgtgtgactttgggggaaattatttaatttctctaagccccaacttccttattgttattattattaatattattatttttagagaaagagtctcactctgtcacccaggctggagtgtagtgatgccatcatarctcactaacatctggaactcctaggctcaagtcattctcctgtcttagcctcctaagaagctgggattcgatttccttattagtcagggggaatttagagtctttatgagatggtaagatccttgaagacatctgtgttttgctcactact

SEQ ID NO: 737144 - DNA, 603 bp, Homo sapiens
atgcctgtaatcctagcactttaaaaggccgaggtgggtgcatcacttgacctcagctgttcgaaaccagcctgggcaacatggtgaaaccctattgctacaaaaaatacaaaaattagccaagcatggtggcgcatgccttgtagtcccagttgcttgggaggctgaggtgggaggatcacctgagcccaggaggtccaggctgcagtgagccatgcttgccccactgcactccagcataggtgacagaaagaaaaattgtgtaattaccaaacgcctgtctgcctggctgtaagtgtaagttccatgtgggcagtgactgtgtgtttgtcttgctcattgctgaatctccaacacttagcctacggcttagtacatagttggcaccaaatgcatacttgtaaactgagtagaagaaaaactaccagctaccagctgaaaagaaaataaatacccgagtgtcctgggcactgactagacttgctgggtgtgtaagaaggcctgcccagacacagatacaaagaatgctggaacagcttggcagggcggtttgcaaaccaaaggataactgaatatacctaygcaagttcttttttttcccct

SEQ ID NO: 737145 - DNA, 574 bp, Homo sapiens
aggagactattggtgaggatgtggagaaactggatccctcgcataccacagtaggaattaaaaattgggcaatcactatagagaacagtggggaggttcctcaaaaaattaaaaatagagctaccatatggtccagcaatcccacttctgggtctgtatttaaaagaaacaggccaggcgcagtggctcacagctgtaatcccagcacttcgggaggccgrggtgggtggatcacctgaggccataaattcgagaccagcctggccaacatagtgaaaccctgtctctactaaaaatacaaaaaattagctgggtgtggtggtgggcacagctacttggaaggttgaggcaggagaatcgcttgaacccagaaggcaggggttgcagtgagctgagattgcaccattgccctccagcctgggcaacaacagcaagactctgtctaaaaaaaaaaaaaaaatcagtatgtcaaagagccgtctgaactcccctgatcactgcagcactattcgcaatagctaagacgtgaaaaccatctaaatgtccattgatagaataattgatatagaaaatg

SEQ ID NO: 737146 - DNA, 545 bp, Homo sapiens
tagtcgtggggatccgagcggcctcctccacccggcgtcctcctttgccttcgcccagcctgcgggacggccaggtgctcccgggacctcaggcctcgcgtctgatgcctgtctctgttcttgagacccgtctgggagtcctctgtccagcccccaactcctgaccttacctctaatctcccttctgccctggggctcctcttcctgtgtccccgccaygatccctcgtctccacccacgccctgtgtcctgtttaagttaagcctttgcgtttctagggcttttccccagctccagactcccgttcctatcccgtcaactcgtgagaattccggttctcctgcgggattaattatcctacttatcagttactctctctcgggagtttaggctcctgaatccttgctccggagacactccacttttcttccaattctctctgtaccccactcttaattcgttgaacatgttttgggtcttctttggcattcccaaagctttatgtccagacacccaaccaaggtgatcccttttctctcccagcc

SEQ ID NO: 737147 - DNA, 520 bp, Homo sapiens
gcacttccctgggcccttccttttcacagtcctcccgctgttccctaagtcagatccagggcttaggtcggtcaaagagctccccagtggcctggattgcctggctccccactgagaatgggtatcatgtggtctcataacttccctctcaggcackggaagttcactcatggttttctgccaggtcttgctgcatgagctgctgcctgccttctttttagcagtatctgagatttccttcactttcatattcaactcctgtattagtccattttcaggctgctgataaagacatacccgagaccaggtaatttataagaaaaagagatttaattgactcacagttccacatggctgcagaggcctcacaatcatggtggaaggtgaaagcaacatctcacgtggtggcaggtacagaggaaatgagagccaagcaaaaggggaaaccccttataaaatcatcagctcttctgagacttattcacgaccacaagaacagaatgggagaaactgcctccat

SEQ ID NO: 737148 - DNA, 634 bp, Homo sapiens
cacatactcatgactcatgacaaaaatcctatatgatctgacttctatgtggtatgtaaaatactcaaactcgtagaatcagagagcagaatggtggtttccagggagcccagaagaagcaggagagaggattgagaagttactggtcaagggtacaaagtttcagctatgcaagatgaatgaactctggagatttaatggacagtatgatgaccatgattcataatactctatagtgtagagtagccccccattatctgcaagggatacattccaagacccccaatragtaccttaaaccattcatagtaccaaaccttatacacaacgtgctgtttttttgatacatccatacatatgataaagtttaatttctaaattaaacacaagaagagattagcaacaaaggctaataataaaataaaaatttataccaatatgctgtaataaaagttgtgtgaatgtggtttatctctctttctttctctctctctctctcatatatcttatatatcttgttgtactgcctcatctgttttcagaccccagttgaccatgagtaaatgaaacttcaaaaatcttttaaaagctttgccttttctggaactgcctataaatgaaatcatgcaatatg

SEQ ID NO: 737149 - DNA, 507 bp, Homo sapiens
tttttagagagagtctcgctgtgtcacccaggctggagtacagtggtgctatcttggctcactgtagcctccacctgccaggttcaagcgattctgctgcctcggcctcccaagtagctgagattagaggtgcacaccaccacacccagctatttctgtattgtagtagagacgaggttttgccaggctggtcttgaactcctgtacctcaggtggtccacccacctcggcctcccaaagtgctgagattacaggtgtgaggcactgtgctaggcctcaggcagccttttattagcacataaaatgtacatgttaccatctgttatcttggaatcartgaaataagagtaatatcagaaggaggaattaatgattagtgagagtccatttgaggagaaatacaactctcaaggaaaaaatctgttgctgagatgacaattaacattgacatatccgatgcagtacaaaatggcaagtctgtgtgccattgtagtccttcctaccttg

SEQ ID NO: 737150 - DNA, 588 bp, Homo sapiens
tttatctcaatagtatattataaatatctttctgggtccagcaaatatagacctagaaaccaatctttatggcttcacattccattttattcaggtaatgactttttttctgagttaagagagattaagacatttttgaaaaactaagttttcgaaagatttcttagcatgtttgtgcatttaggtccagaatacaaaaatatacatgagacgaaaagctgtgggatgattactcyccgaagtccagcttaggtttaggaactcacagggtgcgattgcttcccctttcctcctcagacccgatactgagcagagtaagaattccaccaccctctgttcagtgggattttctagttaaccttctcatttgtctatcccctgccactgactggtggcctttcatctgtcctcccacctcaatgtgccccagggtttgtcttctcctttgccctaaaattgtatatgatttcctaaaactgagctctaggctgccaaagtttgctcgacttcacctgacctaacatgaaagcgactcccctgggtgcatgcgtgccttctgaaactcagtgacttccttattgttttttc

SEQ ID NO: 737151 - DNA, 588 bp, Homo sapiens
tttatctcaatagtatattataaatatctttctgggtccagcaaatatagacctagaaaccaatctttatggcttcacattccattttattcaggtaatgactttttttctgagttaagagagattaagacatttttgaaaaactaagttttcgaaagatttcttagcatgtttgtgcatttaggtccagaatacaaaaatatacatgagacgaaaagctgtgggatgattactccccgaagtccagcttaggtttaggaactcamagggtgcgattgcttcccctttcctcctcagacccgatactgagcagagtaagaattccaccaccctctgttcagtgggattttctagttaaccttctcatttgtctatcccctgccactgactggtggcctttcatctgtcctcccacctcaatgtgccccagggtttgtcttctcctttgccctaaaattgtatatgatttcctaaaactgagctctaggctgccaaagtttgctcgacttcacctgacctaacatgaaagcgactcccctgggtgcatgcgtgccttctgaaactcagtgacttccttattgttttttc

SEQ ID NO: 737152 - DNA, 532 bp, Homo sapiens
taagggaaatagattgtaacagtaacttttaactttcattttagatgctgcaactaaaaagaaaaacggactttcactggctgactgattgtctggaaaccgttttgggatttctttcctaagcttcttaattagaatctttacattatagagaaaatgattttgagagttgagtgtggtctgtggagtgtcctattagtaacgacttctgagtaggtttaastcacctcttttattgaaatgtgaaaaggtgtgacatttataatagaaaactctttgaaagtcgcaccgttcattttagaggaattttaaatgtcaccccaaattttacgattttaattaattttaattaatttccaaattttaaccaataggcataatattcaagatcttatctaaaaattattacatggcaatattttgtccttgttaattaaaaaataacactgaaaacacagtcgtcttcctttaaggtaaaaacctgtccaatagtaacaatctcaatgatggcagaatgaaatcagaatctgat

SEQ ID NO: 737153 - DNA, 663 bp, Homo sapiens
tcatcaaattatccactaacttatttcgaaaggcatttctaatatgaataaggtggacttgttacaatgatcatattcatgcaacctatagatacaatttaacctcatcaggtggccaaacaagtttccccaggaaattttgatttgggaaagaaagtagaataaaagtaaaagtgaataatgtgtttaagtgtttgcagtcaaagggcagagggagtctgtagtgtgtgtctttgctgaactcctggttcttctttgcacagtggatatgacsttcgatgtggacacagccaacaactatctcatcatttctgaagacctgaggagtttccgaagtggggatttgagccagaataggaaggagcaagctgagaggttcgacactgccctgtgcgtcctgggcacccctcgcttcacttccggccgccattactgggaggtggacgtgggcaccagccaagtgtgggatgtgggcgtgtgcaaggaatctgtcaaccgacaggggaagattgagctttcttcagaacacggcttcttgactgtgggttgcagagaaggaaaggtctttgctgccagcactgtgcctatgactcctctctgggtgagtccccagttgcacagagtggggattttcctggatgtaggtatgaggtccattgcctt

SEQ ID NO: 737154 - DNA, 617 bp, Homo sapiens
tttgggaaagaaagtagaataaaagtaaaagtgaataatgtgtttaagtgtttgcagtcaaagggcagagggagtctgtagtgtgtgtctttgctgaactcctggttcttctttgcacagtggatatgacgttcgatgtggacacagccaacaactatctcatcatttctgaagacctgaggagtttccgaagtggggatttgagccagaataggaaggagcaagctgagaggttcgacactgccctgtgcgtcctgggcacccctcgcttcacttccggccgccattactgggaggtggacgtgggcaccagccaagtgtgggatgtgggcgtgtgcaaggaatctgtgaaccgacaggggaagattgwgctttcttcagaacacggcttcttgactgtgggttgcagagaaggaaaggtctttgctgccagcactgtgcctatgactcctctctgggtgagtccccagttgcacagagtggggattttcctggatgtaggtatgaggtccattgccttttacaatgttagtgatgggtgccatatctacacattcatcgagattcctgtttgcgagccctggcgtccattttttgctcataaacgtggaagtcaa

SEQ ID NO: 737155 - DNA, 574 bp, Homo sapiens
gtcatgttgttttctttggggcttatgtttatatttctgttcaataaatattttgaaaattcagattcatttgccaatcttttctattttctgcaagattagtttactatgtgttatggaagttatgaacgaaataataatttgaatgtkacccaacacagtaactgaatttcaaatgataaggacctatgaatacggcaaaattatatatgttcatgtattcagtttaacccaataactgaacactgacattcatttcaagtgcacactgagtgtttgccacgaatatgtgtggtcttagagagaactcgttagctttaaaattgaaatacaatacaccctctcctatgacggcaacagagtcaaattggaaatcaataacaggaagaaatccataaattctccacatatatgcaaattaaataaccacttctaaataaaatgatcaaatatgaaattacaatggaaattacagctatcctgagttgaatgaaaagcacacatttacaaaatttctagatgcggttgaagctcagtgagaaactcataataggaagaaaatatcgtaatcaat

SEQ ID NO: 737156 - DNA, 513 bp, Homo sapiens
tattaggtacagcaaccagatgcttagcaatggggcattgtaaatacagtgtcagggttggaaacattatcagaggatgcccagttcaactccctcttctgaaagaaggtgaaaaggagacgctttttctgaggccacacatatctgacatttctccacagcttagagaagtcacccttcatcccatggaacacacacaagtttgtgagcggagctggctaagagcaggggagatasggaaatgaatgccagttacggtgttaggtagatccgggaagaacatggtgcagcaggaatacgaagtcaggagggaaggtgagatgaggatttcatttcgaaggattcctagggacaccttctaacaactctccctagaccaaaacaaaaacaaaaacaaaaacaaaaacaaaacccagaaaaacaaaaacaagaaacaaaccatgaaaggatcatagtttctttagtgttactccaccgtgcccactgatgaaacaatcatgcttcacagctttt

SEQ ID NO: 737157 - DNA, 513 bp, Homo sapiens
tattaggtacagcaaccagatgcttagcaatggggcattgtaaatacagtgtcagggttggaaacattatcagaggatgcccagttcaactccctcttctgaaagaaggtgaaaaggagacgctttttctgaggccacacatatctgacatttctccacagcttagagaagtcacccttcatcccatggaacacacacaagtttgtgagcggagctggctaagagcaggggagatacggaaatgaatgccagttacggtgttaggtagatccgggaagaacatggtgcagcaggaatackaagtcaggagggaaggtgagatgaggatttcatttcgaaggattcctagggacaccttctaacaactctccctagaccaaaacaaaaacaaaaacaaaaacaaaaacaaaacccagaaaaacaaaaacaagaaacaaaccatgaaaggatcatagtttctttagtgttactccaccgtgcccactgatgaaacaatcatgcttcacagctttt

SEQ ID NO: 737158 - DNA, 513 bp, Homo sapiens
tattaggtacagcaaccagatgcttagcaatggggcattgtaaatacagtgtcagggttggaaacattatcagaggatgcccagttcaactccctcttctgaaagaaggtgaaaaggagacgctttttctgaggccacacatatctgacatttctccacagcttagagaagtcacccttcatcccatggaacacacacaagtttgtgagcggagctggctaagagcaggggagatacggaaatgaatgccagttacggtgttaggtagatccgggaagaacatggtgcagcaggaatacgaagtcaggagggaaggtgagatgaggwtttcatttcgaaggattcctagggacaccttctaacaactctccctagaccaaaacaaaaacaaaaacaaaaacaaaaacaaaacccagaaaaacaaaaacaagaaacaaaccatgaaaggatcatagtttctttagtgttactccaccgtgcccactgatgaaacaatcatgcttcacagctttt

SEQ ID NO: 737159 - DNA, 513 bp, Homo sapiens
tattaggtacagcaaccagatgcttagcaatggggcattgtaaatacagtgtcagggttggaaacattatcagaggatgcccagttcaactccctcttctgaaagaaggtgaaaaggagacgctttttctgaggccacacatatctgacatttctccacagcttagagaagtcacccttcatcccatggaacacacacaagtttgtgagcggagctggctaagagcaggggagatacggaaatgaatgccagttacggtgttaggtagatccgggaagaacatggtgcagcaggaatacgaagtcaggagggaaggtgagatgaggatttcatttcgaaggattcctagggayaccttctaacaactctccctagaccaaaacaaaaacaaaaacaaaaacaaaaacaaaacccagaaaaacaaaaacaagaaacaaaccatgaaaggatcatagtttctttagtgttactccaccgtgcccactgatgaaacaatcatgcttcacagctttt

SEQ ID NO: 737160 - DNA, 603 bp, Homo sapiens
atcttgctttttccagtgcttttttatttatttatttatttttatttatttttttgacattggcttctgggcagaaattgacaagtgaatcctaaacttcaaacagaaatggaaaaaacaccaaatagccaaaacaattgtgaaaaagaggaacacagttgaaggactcccatttctggatttcaaaacttactacaaagttgcagtaatcaaaacaatgtggcactggcttagggacagagctacagattaatggtatagaattgagagtccggggccagggcgcggtggctcatgcctgtaatcccaccactttgggaggyccacacaggccgattacttggggccaggccccaccttcctccctgcccttctaccatccacaggactggatctgatctcaacctggtgttctgggcttggacccaccttctgctccgcccccaatcatggctcctcccccagcgtagtccggcccacaggcctgattctaacctcaagctcatcctctgggcctggcctcaccttcctcctggtcctctagcgtgggcccgtgcccctggcccatagctccctccacaggcctgactaacttcaaccttg

SEQ ID NO: 737161 - DNA, 574 bp, Homo sapiens
gaaaaggcttggtttcactgcaccctgttaagtctccaaggaatgctaacttttccccctgcagtgaaaggcacgaggtgaagttaatattagggactggaggccagatggccctcaggggctgacccttagggctcttgacctcagggaacagcagtgaaagagtttcgcatgactcatcgccccaggctgtggggttttggaagggggctagcatacagctaccatactgtttatgcccagctgccatacagcttatgcccagtccatgagaggaccacccaagtggaaaggggacaatttgggtctctggcttgcctgtcacacaakagtaacagtcgcttttgtttagcatgtgaacagaatatttaatccattccagccaagcatttgtgtcttgatatcctgtttaattgctatagtttgttttaaatttttaacctctgtaacaggtactttggttttatcattgggtatataatgagaaaagatttgattagcagagaactttggagagggagaagggggtgcaggaggtggggaaacaatgaagtgcattttaaaggatcctaaa

SEQ ID NO: 737162 - DNA, 574 bp, Homo sapiens
gaaaaggcttggtttcactgcaccctgttaagtctccaaggaatgctaacttttccccctgcagtgaaaggcacgaggtgaagttaatattagggactggaggccagatggccctcaggggctgacccttagggctcttgacctcagggaacagcagtgaaagagtttcgcatgactcatcgccccaggctgtggggttttggaagggggctagcatacagctaccatactgtttatgcccagctgccatacagcttatgcccagtccatgagaggaccacccaagtggaaaggggacaatttgggtctctggcttgcctgtcacacaagagtaacagtcgcttttgtttagcatgtgaacagaatatttaatccattccagccaagcatttgtgtcttgataycctgtttaattgctatagtttgttttaaatttttaacctctgtaacaggtactttggttttatcattgggtatataatgagaaaagatttgattagcagagaactttggagagggagaagggggtgcaggaggtggggaaacaatgaagtgcattttaaaggatcctaaa

SEQ ID NO: 737163 - DNA, 458 bp, Homo sapiens
gatggcggccccctatcccggcagtggcggcggaagcgaggtcaaatgcgtgggaggccgcggcgccagcgtcccctgggactttctacccgggctgatggtcaaggcgccgtccggaccgtggtgagcaaagccccgcccccctggccgcgggcccccccccgggtccaattcacacccgatgttctgtccccgtgccaaggggcagttcacacccagctccctgacccgccccttagggctagaaggtcttaccttgagttaactaccgtcctgagcccggtcccctgcgttctgcttctwgtcccggtcctcagaattcacgcccaacatctttaatctctcgcccttcctcctccttcccaccagaattgacactcgaggttctgtccctgggtcggagtgtaaaatccacactccggtctgctcccacctccagagatgtggaatccactccc

SEQ ID NO: 737164 - DNA, 593 bp, Homo sapiens
aagttcctaagggtatcatttgagcatctggacccgactattcctaaaattctacccttgaacttttcagttaatttaaccaaataaattcactgcttcagggcaatttgatttgatgccttgttgtttgcagccaaaatattcctgagtaatatcagggatgaactttggagatgctgaatggtctaaatcactattcacccaactaagaagagatattccctgtcctttakatagctgagtggcatgcttcccactatgtcacccttgggtgaggtcaccttccaggaacacctccaaactctcaagcatatatatgctattaaagaccttcttgggggttatccctgtagctgaggcaaatgtcccagttcccctcctgtctggtcccacgtctttcttcctatttaccagccatgttactcatgtcccaccacgccttttaggtgagatttccccattaaggacaaagtcaccattttggtgtagaagattatctttttaaactttttgctctgtaagttgatagactataacctctggggaaatttaggaggcccacatctcttctctggcttcctactccctgcact

SEQ ID NO: 737165 - DNA, 593 bp, Homo sapiens
aagttcctaagggtatcatttgagcatctggacccgactattcctaaaattctacccttgaacttttcagttaatttaaccaaataaattcactgcttcagggcaatttgatttgatgccttgttgtttgcagccaaaatattcctgagtaatatcagggatgaactttggagatgctgaatggtctaaatcactattcacccaactaagaagagatattccctgtcctttagatagctgagtggcatgcttcccactatgtcacccttgggtgaggtcaccttccaggaacacctccaarctctcaagcatatatatgctattaaagaccttcttgggggttatccctgtagctgaggcaaatgtcccagttcccctcctgtctggtcccacgtctttcttcctatttaccagccatgttactcatgtcccaccacgccttttaggtgagatttccccattaaggacaaagtcaccattttggtgtagaagattatctttttaaactttttgctctgtaagttgatagactataacctctggggaaatttaggaggcccacatctcttctctggcttcctactccctgcact

SEQ ID NO: 737166 - DNA, 581 bp, Homo sapiens
accagagcatttactgcagtatctcgaaccacttggtaggggtcccactgagaatgacttgactggccactaccatgctgccctaggtagtttgctacagtaaggaccccagcgcatcatgcatccattactctgtgtgtgcctctcctcattgactytgggcttggctttgtgacttgctttggccaatggtacatgtacaaacctggtgccagcagaagtgtaatgagtacttgtgcactgaggcttcctctctgagaccactgatgagggagctggtctacagtaaaccacgtgagaggccacatgcagaaccaagatgcctcagccaacagctgacaccagctgccagacatgtgactggcaaattcaaagcctttgaattcatgaaagaggaagatttttctcgtacaatcttaggaggtagggaaagtgcccagcagagagctccttcaacacggaaaacaggtagccctggccacgtggagctggagaggggagatgcagacagagctaggagtggccagaagccagaaaaagttgagtctggcaaatctctcggccaccttgactagagttct

SEQ ID NO: 737167 - DNA, 628 bp, Homo sapiens
aaaaaaagttgattctcataggttttttggggggttttgttgcttctacagatgagtggaatttggagttctttactccgctattctgcagatgtactacagtttcttttgaagtcaaatatgcatttactctaggaaccagcaatccctctcctagatatttacctaagagaactaaagrcttaaattcacagaaacaaatctgtacacgaatatttatgttggttctatccatattcaccttaacctggaaatcatccacatgtccttgcactgataaatggataaacatgttgtggcatttccatacaattaaatattactgtcagcaattaaaaaggaacaagttatggatacacgcattagcaagatgaatctcaaatgcatcatgccaagtgaaggaagacagactcaaaaggttacattcaacttatacgacattctggaaaaagcaaaagtattaggccaaacaaatcagtagtttctatagtttggggttgggatgaccagttttatagaaagggtcagaagaaatttttagggggtgcttgagctattttctatcttgataatggtggtggttatgctatatatacacatgcaatgtttgtcaaaacgtacagatcta

SEQ ID NO: 737168 - DNA, 544 bp, Homo sapiens
aatgctcaagtccctgacataaaatagcacagtatttgcatataaccatgcatatcctcccatatactttgtcatctctagattacttataatatctaatgcaatgtaaatgttatgtaaatagttcttacactgcatgttttatttgtatttttaattgccttttttttttcccataagagtttttgtgggatttttttttttttttgagacagaaccttgctctgtcacctaractgggccgcaggggcatgatcttggctcactgcaacctctgcctcctgggatcaagcaatccttctgcctcagcctcacaagtagctgggactataggtgtgcaccaccaagtccagctaatgctaatttttttttattttttattgtagacactaagtctcactatgttgcccaggctagtctcaaactcccaggctcaagtgatccttctgccttggcctcccaatgtcccgggactagaggcataagccagcatgcccggcctccagatatttttgatccgtggctgtggaccctacagttgctg

SEQ ID NO: 737169 - DNA, 587 bp, Homo sapiens
tgggaatacatggatgtatacatatatccacttgtgttcctacagatagttgtatgtgtaacagcgaaactgtaaaagaactaatataactcactttatttttgtttaagaggcctttacccattcctgcatgtagattaggataattttaaarcactgagacaatatgcaaaaaacagcaatcatatagtttttaaaactagcctgagattaaagggaaagtatgtaaacaacgaattatgttttgttaaagatgtataggagcattgtgacctgaccaaggacaaagaaatttctgacctcttcagaccctgcctgccaccagacgcctgcagttgttggttacctcttgatttcaaccctgtcctgttccccttgccttgaatataaaaagagactaaaatttgcactgacttaaaatggtctttgtgactataattcaccatcttcttggttttgctgactttctgaataaacctgcttttcttcccaccaaccctcatctcttgtgtctggccttcaagcagtgagcaggtgaacctgggttcagttcgatatgtgtgtgcttgggaatatgcgtacgtcta

SEQ ID NO: 737170 - DNA, 511 bp, Homo sapiens
ggaaaaagacaatcccagtatttgttttacaggtcattatcaagatctgcaatcaggcaggggctaccatatctgggcctctggtgaaggtgaagcattcactctgagaggcagtgtggatagctctgggagatctgcttttcaacagtgacttgaaagaatcagagacaaggtcaagagtgaaggacagggtgctgtgagatccctgggagcagcactgacttgttcctgttcagcctttattgatcatcagctgcaagagggctggaggaggaaagatggaaaggaattgggactaaactatacaggagcatacaatggactaggactgaagccaaacagactgagacctatatggatacccatgatcaggtgygggggcctgaattccaagtagaacagcctattaggaccactcattgatggagaggggtgagggtgggtcctgtcctatcacagattccaactcagatgactggagtgtgcaggaaggaaacagaaatgattgggg

SEQ ID NO: 737171 - DNA, 584 bp, Homo sapiens
cttgctctgtcacccaggctggagtgcagtggcatgatctcagctcactgcaaactccacctcctgggttcaagcaattctcctgtctcagcctcctaagtagctgggattagaggtgcccaccaccacgcctggctaatttttatatttttagtagagatggggtttcaccatattggccaggctggtcttgaactcctgacctcaagtgaccctcctgcctgggcctcccaaagtgctgggattacaagcatgagtcactgtgcccagccaggaaggaggattttaaataggcatgtgacacagcccrgtttgtagtttagaaggatcctcgtggctttggtgtgacaagcagatgagagctgggcaagactagagattgagagccaggtgaggagagtctacttagccaggcaggaggccctgccctgggaagctgcatgatgctggggccatggagaagcaggaagcctagaacctacagcatcgttgttttaaatggggcaatgcagagatccacaagagatgctgcaaaaggcctccctggagggacagataggttaggaattaggagggtggagggt

SEQ ID NO: 737172 - DNA, 618 bp, Homo sapiens
tccataggaaaaaaaacggaaatgatttttgccttctggactctctcagacttaaaaggtagaaagttatatctaaggactggagaacctgccctttgaggtagtgcaagatcctgaaaagcacacaaggcagtgtctcctaggagggtggtgagtgtctcctaggagggtggcgaacagaatagggttaagggatgtcccaggtgataggatgacctgcactgattgttgcattagacttttctgtgttccagtcagcactgctgattcctgagtttgttagcttgaaaagatatgtttactcttttcagcctaaatttttgattaaccgtgaaatacatcctatgattagagattgttattttatactttgaagacaaagtatacccaaagttggaaagagtyggacttcagaaaataaattttataagtaatactagaaagagttggacttcagaatataaatggtatatgtaatcttctattccattttttaaaagcctttatttattttttttgccccagagcttgtgtagtacgtttctcaggtgtgtttgtttttcggatgatttcagatggaatttcaggacttagtagtataactactaccaagggaaa

SEQ ID NO: 737173 - DNA, 589 bp, Homo sapiens
gggtttcaccatattggccaggctggtcttgaactcctgacctcgggcaatccaccagctttggcctcctaaagtgctgggattacaggcatgagcatcatgcccatccccatatggcttttgattagggctagaatggagtatattttttcatacctttatatttaatgtacctgtgtctttctacttaaaatagttttcttgagagaataaaaaaaatagttttcttgcacacattgrtaggtcttgttttttttattctactctgtcagtccttgtcttcttttattggtatattcatataatacacatttaaagtggttattgatatacttggattcatgtgtacatatataattgttttatatttgttatacttgtcggtttttttcaacttcctttctttttctgtctccttttattttaactgaggtgtctatatgattgtgttttcttctaatagtatagtaagtctacttgtttctttgtttctttgtttcttttttttttttgagacaggttcttgctctatcacctaggctagagtgcagtggagcaatcatagttaactataacctccaactcctgg

SEQ ID NO: 737174 - DNA, 570 bp, Homo sapiens
gcctttacttcattgaacatatttaagatagttgttttaacgtttttattcagtgagtggtgtctgaggtttctcagagatggcttatctcaattatattttttccaattgatgaaccatattttcatgtttttctgtattcttcataattttgtgttgaaaagtagatatcggaatgttataatggggtaccttctgaaaattggattcttcttctttcctcactgttttctrtttatgtgtgttgaagactgtaattgttcatttgtttaataacattttcaaagtatgtttgcacagactgtattccttatttgttgtagaaactgacatctctgttctttagtgtgtgttcatccagtgttctggcagagatttcctgaatgctagaagctagtaaaaaagatgaagcatacaaaagcctgacctcttccagtctttgtggatggctctgtgcctggggcatcccttgaacacttagccaggctgtttaatactctacttatgctttatgttctgcttacttaaagctacagatcagccagaagcgaaaatgaatgtttttctccg

SEQ ID NO: 737175 - DNA, 553 bp, Homo sapiens
aattgtcttccacaaaaccagtccctggcgccaaaaaggttggggactgctgccttatgcattttttttttttcttgaggtggagtttcacaattattgcccaggctggagtgcaatggcgcgatctcggctcactgcaacctctgcctccygagtgcaagtgattctcctgcctcagcctcccgagtagctgggattacaggtacctgccaccacgcccagctaattttttgtatttttagtagagatggggtttcactatgttggccacactggtcttgaactcccgacctcaggtgatccacccacctcggccttccatagtgctgggatgacaggcgtgagccaccacacccagccaccttatgcattttgatgctctattttctggacatacatatcaaggattattatgtctctaggattgagcactttatcattatgaaatatctctatctcttgtaattttccttgatctacaacctgatttatctgagtctaatgtagcctgttccatattccttttgattagggctaaaatggcatatatttc

SEQ ID NO: 737176 - DNA, 553 bp, Homo sapiens
aattgtcttccacaaaaccagtccctggcgccaaaaaggttggggactgctgccttatgcattttttttttttcttgaggtggagtttcacaattattgcccaggctggagtgcaatggcgcgatctcggctcactgcaacctctgcctcctgagtgcaagtgattctcctgcctcagcctcccgagtagctgggattacaggtacctgccaccaygcccagctaattttttgtatttttagtagagatggggtttcactatgttggccacactggtcttgaactcccgacctcaggtgatccacccacctcggccttccatagtgctgggatgacaggcgtgagccaccacacccagccaccttatgcattttgatgctctattttctggacatacatatcaaggattattatgtctctaggattgagcactttatcattatgaaatatctctatctcttgtaattttccttgatctacaacctgatttatctgagtctaatgtagcctgttccatattccttttgattagggctaaaatggcatatatttc

SEQ ID NO: 737177 - DNA, 553 bp, Homo sapiens
aattgtcttccacaaaaccagtccctggcgccaaaaaggttggggactgctgccttatgcattttttttttttcttgaggtggagtttcacaattattgcccaggctggagtgcaatggcgcgatctcggctcactgcaacctctgcctcctgagtgcaagtgattctcctgcctcagcctcccgagtagctgggattacaggtacctgccaccacgcccagctaattttttgtatttttagtagagatggggtttcactatgttggccacactggtctygaactcccgacctcaggtgatccacccacctcggccttccatagtgctgggatgacaggcgtgagccaccacacccagccaccttatgcattttgatgctctattttctggacatacatatcaaggattattatgtctctaggattgagcactttatcattatgaaatatctctatctcttgtaattttccttgatctacaacctgatttatctgagtctaatgtagcctgttccatattccttttgattagggctaaaatggcatatatttc

SEQ ID NO: 737178 - DNA, 553 bp, Homo sapiens
aattgtcttccacaaaaccagtccctggcgccaaaaaggttggggactgctgccttatgcattttttttttttcttgaggtggagtttcacaattattgcccaggctggagtgcaatggcgcgatctcggctcactgcaacctctgcctcctgagtgcaagtgattctcctgcctcagcctcccgagtagctgggattacaggtacctgccaccacgcccagctaattttttgtatttttagtagagatggggtttcactatgttggccacactggtcttgaactccygacctcaggtgatccacccacctcggccttccatagtgctgggatgacaggcgtgagccaccacacccagccaccttatgcattttgatgctctattttctggacatacatatcaaggattattatgtctctaggattgagcactttatcattatgaaatatctctatctcttgtaattttccttgatctacaacctgatttatctgagtctaatgtagcctgttccatattccttttgattagggctaaaatggcatatatttc

SEQ ID NO: 737179 - DNA, 651 bp, Homo sapiens
tattaaccatcagagatggtatgtcataatcataatccgttttaccaggtggttgcaggcttttgatgtattttacaacatttttaggcaattcctgccaaatttgacagggactgagttattgtagatgatatagaacagagagccttgtttcagacctttggaaagtccccataccaattcgaaaatacaaaggtgataattgagtgagtaggattttatactgggatctcgggctgctgtctttaagactggcactgagggccgggcatggtggctcacgcctgtaatcccagcaggcaggagaactgcttgaacctgggaggtggaggaggctacagtaagccaagattgcaacattgcgctccagcgtgggcaacaagagtgaaactctgtctcaaaaaaaaataaaaakaaaaataaaagagagagagaccaatacaataatagctggagattttaacaccccgttttcagcacaggacagatcttccagacagtaaatcgacaaagattatctcaatatatactgaaaaatcagacaaaagaaagattaaatgggatttaatctacactatagatcaaatggatctaatagatatttacagaacattttatccaacagctacagaatacacatatttttcccga

SEQ ID NO: 737180 - DNA, 616 bp, Homo sapiens
tctggagagaagccgtatgaatgtaaggaatgtgggaaagcattctcttggctcacttgctttctacgacatgaaagaattcacatgagagagaaatcctatgaatgtcaacaatgtggtaaagccttcactcattcccgttttcttcaaggacatgaaaaaactcatactggagagaacccgtatgaatgtaaggaatgtgggaaagcatttgcttctctcagttccttgcatagacataaaaagactcactggaaaaaaactcacactggagagaacccrtatgaatgtaaggaatgtgggaaagcatttgcttctctcagttccttgcatagacataaaaagactcactagcattctctctagaatgtatggaatgtgggaaagcatttattaattgtatttcatttcagatacttgtacgaaacacattggagatagaccctgtgaatgtaagcacttggtaaagccttaagtagtttcagtttctttccagtacagtcatcccttgatacctgctgggtattggttccagcactccgtgagccatgtccagtcccttttataaaatgacatgtttgtatgtaacttacccacatcctcttgtatagtctca

SEQ ID NO: 737181 - DNA, 616 bp, Homo sapiens
tctggagagaagccgtatgaatgtaaggaatgtgggaaagcattctcttggctcacttgctttctacgacatgaaagaattcacatgagagagaaatcctatgaatgtcaacaatgtggtaaagccttcactcattcccgttttcttcaaggacatgaaaaaactcatactggagagaacccgtatgaatgtaaggaatgtgggaaagcatttgcttctctcagttccttgcatagacataaaaagactcactggaaaaaaactcacactggagagaacccatatgaatgtaaggaatgtgggaaagcatttgcttctctcagttccttgcatagacataaaaagactcactagcattctctctagaatgtatggaatgtgggaaagcatttattaattgtatttcatttcagatacttgtacgaaacacattggagatagaccctgtgaatgtaagcacttggtaaarccttaagtagtttcagtttctttccagtacagtcatcccttgatacctgctgggtattggttccagcactccgtgagccatgtccagtcccttttataaaatgacatgtttgtatgtaacttacccacatcctcttgtatagtctca

SEQ ID NO: 737182 - DNA, 616 bp, Homo sapiens
tctggagagaagccgtatgaatgtaaggaatgtgggaaagcattctcttggctcacttgctttctacgacatgaaagaattcacatgagagagaaatcctatgaatgtcaacaatgtggtaaagccttcactcattcccgttttcttcaaggacatgaaaaaactcatactggagagaacccgtatgaatgtaaggaatgtgggaaagcatttgcttctctcagttccttgcatagacataaaaagactcactggaaaaaaactcacactggagagaacccatatgaatgtaaggaatgtgggaaagcatttgcttctctcagttccttgcatagacataaaaagactcactagcattctctctagaatgtatggaatgtgggaaagcatttattaattgtatttcatttcagatacttgtacgaaacacattggagatagaccctgtgaatgtaagcacttggtaaagccttaagtartttcagtttctttccagtacagtcatcccttgatacctgctgggtattggttccagcactccgtgagccatgtccagtcccttttataaaatgacatgtttgtatgtaacttacccacatcctcttgtatagtctca

SEQ ID NO: 737183 - DNA, 600 bp, Homo sapiens
agtgagacatcaggttaacttgaatcttgacaggccatcaggactatcatctatgttggaagaaccaacttgtgattatagatgtggactcatttgaggaggctatgtaatactaatgttaggatctgtttggcttgagggctgaagatctgtaaccattgaatgttccatcttctttgcagatgcttagttatacggaagctagttcttcttttcctttgcttcattaaaaaaaaaatcttgtggtgcttataggcatgttgttrtttctcgggtggagtgaaagctttgttccattgtaggatctttgaggatcgtacctctttttcacctttgcctactgaaaaactgtggcaaacttttcaagtgtccaaatcaatggctctgtgtcctctaagttttctagctcatcatcatctgtagtggatttcagcagactttgaagttcctagctggtaagggtttctctttgcttttcggtgtgttccttaacgtcatcctcagtcgtttcagacagcgttctccatcaacttttttagcaacattttacatattcttaataactgcattaatagtggggaagcccttgaaatcattgac

SEQ ID NO: 737184 - DNA, 420 bp, Homo sapiens
tccatgtcaaaaagaaaaaaaacgaagtagaaggggctattcctaattttatcacaagagctatggtaactgttaggaatgctgcttgggttagtatttttgtggttttcattgtccagagtacattatattgataataacagctatgattagaattgtagatgtggttgcttgtgaaaggaagtattggttcaatctaaatacacagataggtcctggccaagacatgcactcaggagagstttcaggagggattcaatcccaaactcctgctcccaaatgccaaggaactatccaatactgccaactcaagtcagcggaatgtagaacccagtgcccggcagggctctaccatgcaacacagagcagcacactcagagcaccagctcctccagccagcagcgctcagccccacatgcc

SEQ ID NO: 737185 - DNA, 571 bp, Homo sapiens
tttaggatcctttaaaatgcacttcattgtttccccacctcctgcacccccttctccctctccaaagttctctgctaatcaaatcttttctcattatatacccaatgataaaaccaaagtacctgttacagaggttaaaaatttaaaacaaactatagcaattaaacaggrtatcaagacacaaatgcttggctggaatggattaaatattctgttcacatgctaaacaaaagcgactgttactcttgtgtgacaggcaagccagagacccaaattgtcccctttccacttgggtggtcctctcatggactgggcataagctgtatggcagctgggcataaacagtatggtagctgtatgctagcccccttccaaaaccccacagcctggggcgatgagtcatgcgaaactctttcactgctgttccctgaggtcaagagccctaagggtcagcccctgagggccatctggcctccagtccctaatattaacttcacctcgtgcctttcactgcagggggaaaagttagcattccttggagacttaacagggtgcagtgaaaccaagcctt

SEQ ID NO: 737186 - DNA, 571 bp, Homo sapiens
tttaggatcctttaaaatgcacttcattgtttccccacctcctgcacccccttctccctctccaaagttctctgctaatcaaatcttttctcattatatacccaatgataaaaccaaagtacctgttacagaggttaaaaatttaaaacaaactatagcaattaaacaggatatcaagacacaaatgcttggctggaatggattaaatattctgttcacatgctaaacaaaagcgactgttactmttgtgtgacaggcaagccagagacccaaattgtcccctttccacttgggtggtcctctcatggactgggcataagctgtatggcagctgggcataaacagtatggtagctgtatgctagcccccttccaaaaccccacagcctggggcgatgagtcatgcgaaactctttcactgctgttccctgaggtcaagagccctaagggtcagcccctgagggccatctggcctccagtccctaatattaacttcacctcgtgcctttcactgcagggggaaaagttagcattccttggagacttaacagggtgcagtgaaaccaagcctt

SEQ ID NO: 737187 - DNA, 534 bp, Homo sapiens
gagtctcaaaagggggggataagggaggagaccacccctcatattgtcttatgcccaatatctgcctccaaagaaagaaaaagtaaaaacgaaaaggcagaaatgaaatccacaagcagacagcccggcgccacaccctgcagcccccagtcacgtaggccctgcttgctcaatcaatcatgaccgtctcacgctcacacccttagaggtgtgagcccttaaaaaggacagcaattgcatcctcgaggagctcagctcttgagacaggagtcttgccgatgcccccggccaaataaaccccttccttctttaactcggtgtctgaggagttttgtytgcagctcgtcctgctacactatctctctaaaaatacaaaattagctgggcgtggtggcacatgcctgtaatcccagctattcgggaggctgaggcaagagaatcgcatgaacctgggaggtggaggttgtggtgagccaagattgcaccattgcaatccagtctgggcaacaagagcgaaactccgtctcaaaaaaa

SEQ ID NO: 737188 - DNA, 558 bp, Homo sapiens
caattgcaagattcaacatcaatgtagacaattcagtgtgtttctacacactgacaacaatctatctgaaaaaataatcaataaagcaatcccatttaaaatagaataaaaaatgctcaggaattaatttatccaaggaagtaaaagatccgtttacaaaaaaaaaattgatcaaagaaattgtagaagacacaaatgaatgaaaagatatcccatgttcatggaytgaaggaattaatattgttaaaatgtccatgctacacaaagtgatccacagattctatgcaaatccctatcaaaatttcaggggtatttttcatagaaatagaaacaaaattctaaaatttaaccacaaaagactttgaataataaacacaattcagcaagaaaaacaaagctgaaggcatcagttctggatttcaaactatattacaaatctatagtaatcaagacagtatgttactggaatgacagcagacacacagaccaatggaacagaataaaaagtccagaagtaaactcacacatgtacagtcaatgaatttcagacaaaagtgc

SEQ ID NO: 737189 - DNA, 471 bp, Homo sapiens
tcctttacttattggttcctttcttttcaagtccataatttgaattaacctttagataacttctgaatttgataataatttttttctcaataagaacatctcttctttggcatattttatatgcagaattatatattaactagaattcttatccttagtaacctcaaattttagtgaaaacctaggaagaaagaaatcctgagctacctatcagatattagcattttataatragaactcttccataatttttagaaacatatttccccatatcataacccttccttaattagaaatgacccagacatctaataagcataattttaaatattattcttaaacataattttaagattttaagttacacaataagttcacctgcagcacttaacccatttacactttatttttagcagtttatatagattatttacacattattttcttgttaacccttttataacttgtgaa

SEQ ID NO: 737190 - DNA, 514 bp, Homo sapiens
ctccatccggaggaccgaaggggatcccgggacgagaccactccgggcccggaaacggggggcgccggaccactccaccgcctcggggacgggggagggcggacgagaccactccaagccagggggcttctccgagacaaagttgcgccaccgaccccagaccctcgcgcggcgggcctcaccgtcagcgccagcyggtggatgcgcccggagcagccacccagcagcagcaccagaagtagccgctgcccccactccgcggggctcccgcggccgagccccctcctctcgctcactgccatctctggagccacctcctccccgactccgcctctggcgcccaagcccgcccaccgatgagccaatcgccgcacggcggggcccggcctttcggagtttccagtccgccaaccaatcagcaattgcctctccgcaagcccgcctgcttgcgtcaccgacggacagcaccggttccgaatgggagagccgataacgcttaacccccagctcactc

SEQ ID NO: 737191 - DNA, 471 bp, Homo sapiens
acttgcccggatcctttctctccctggcaggtgagggtggaactactccacaatccagccttctgcagcctggccaccaccaagaggcgtcaccagcagaccgtaaccatcccccccaagtcctcgttgtccgttccatatgtcatcgtgccgctaaagaccggcctgcaggaagtggaagtcaaggctgcygtctaccatcatttcatcagtgacggtgtcaggaagtccctgaaggtcgtggtgagtgcttggggcacccacaaacccttgtccttcagagagggctcctggtcttcgtactattgactcaggttggagatccaggctctgagacactaagaatcatagtgtccagcttaggaaatttggaagtcccagaatttcagaagcagagccaggattggggtaaagtgagtgagatgaccccaggcttagaattttaggtggtgccaaaaacctcgtcgacca

SEQ ID NO: 737192 - DNA, 611 bp, Homo sapiens
gacggagtctcgctctgttgcccaggctggagtgcactggcgggatctcggctcactgcaagctctgcctcccaggttcacgccattctcctgcctcagccttccgagtagctgggactacaggcgcccgccaccacacccggctaattttttttgtatttttagtagagayggggtttcaccgtgttaaccaggatggtctcgatctcctgatctcctgatccacccgcctcggcctcccaaagtgctgggattacaggcttgagccactgcgcccggcctttttttttttttttttttttttgttgagacggagctttgctctttcacccaggttggagtgaagtggcatgatctcggctcactgcaacctccaccccctgggttcaagcaattctcctgcctcagcctcccaagtagctgggattataggagcccgccaccatgcccggctaattcttgtatttttagtagagacgaggttttgccatgttggccaggctggtctcgaactcctgactgacctcaggtgatccacctgcctcggcctcccaaagtgctgggattacaggcatcagccaccgtgcccggcctacacatttccttaaaga

SEQ ID NO: 737193 - DNA, 611 bp, Homo sapiens
gacggagtctcgctctgttgcccaggctggagtgcactggcgggatctcggctcactgcaagctctgcctcccaggttcacgccattctcctgcctcagccttccgagtagctgggactacaggcgcccgccaccacacccggctaattttttttgtatttttagtagagacggggtttcaccgtgttaaccaggatggtctcgatctcctgatctcctgatccacccgcctcggcctcccaaagtgctgggattacaggcttgagccactgcgcccggcctttttttttttttttttttttttgttgagacggagctttgctctttcacccaggttggagtgaagtggcatgatctcggctcactgcaacctccaccccctgggttcaagcrattctcctgcctcagcctcccaagtagctgggattataggagcccgccaccatgcccggctaattcttgtatttttagtagagacgaggttttgccatgttggccaggctggtctcgaactcctgactgacctcaggtgatccacctgcctcggcctcccaaagtgctgggattacaggcatcagccaccgtgcccggcctacacatttccttaaaga

SEQ ID NO: 737194 - DNA, 518 bp, Homo sapiens
acttgaggtcaggagttcaacagcagcctggccaacatggggaaacccactctctacaaaaaaaaaaaaaagaaaatacaaaaattagccaggcatggtgatgggtgcctgtagtcccaactactcgggaggctgaggcaggaaaatcacttgaacccaggaggtggaggctgcagtgagctatgatcacaccattgcactccagcctggatgacagagaaagactctgtctcaaaacaaaacaaaacaaaaaattagcaggctgtggtagcatgtgcttgaggtctcakttacttgggaggctgaggtgggaggaccacctgagcccaggagttcaaggctgcagtgagctatgatcacaccactgcactccagcctgggcaacagagcaagatgctgtctcaaaaaaaaaaattgtaaatgatactaacaattagtgacagccatactaattgttactgaggcaggtccacaggggacctgagcaacctaggatcagggaggtcctgaaggatgat

SEQ ID NO: 737195 - DNA, 495 bp, Homo sapiens
gggccaggcccgaggctgaatcaactcagggaccctgacattgttctagtctgggtgagcaagtaggaggtcttgggtgactcacagaagtcccgggattggaggctcaatgataatgggtccaattaaactaactaactttctttctttttgagacagggtcttactctgtcgcccaggctggagtgcagtggcgccatctcagctcactgcaacctccgcctcccaggttcaagcgattctcctgtctcagcctcccaagtagctgggattacaggtgcccgccaccacacctggctaatttttgtatttttaatagagacagggtttcaccactttggccaggctggtctcaaacycctgacctcaagtgatctgcccgcctcggtcccccaaagtgctgggattacaggcgtgagccaccacttctagcctaaactaactttcaagattaggtaaactgaggcacagagaggggcagccttgcccaaggtc

SEQ ID NO: 737196 - DNA, 603 bp, Homo sapiens
aaaatgcgcagcaccatgttaacaggcattcctgccttgttccaattctgaaagagaatgtttcaacgttcatcattgatcatttggatccaattaatttttaagccctggtgcctcatttcattcccaccaacagcatagctcggctgattcgaaaggtattgatttgagctgtctcctcctccctccaattaattatgccatgctgcttctgtcttctcttgccctctcttctctgtggccccctctttttttttttaracacagttttcctcttgtcatccaggctggagtgcagtggcatcatctcagcctgcaacctccgcctcccaggttcaagcgattttcctgccttagcctcccaagtagctgggattacaggcatgagccaccacacctggctaattttgtatttttagtagagacggggtttcaccatcttggccaggctggtctcgaactcctgaccttacgtgatccacctgccttggcctcccaaagtgctgagattacaggcgtgagcctccacacccggccggccccctcttttatttatttatttatttacttatttttgagacagtctttgtcacccagactgaa

SEQ ID NO: 737197 - DNA, 542 bp, Homo sapiens
gccctttccctcccccaatctccttgaccacaggtgaaaggggcgtttgtaggactaaggaggcctggccttcttgtgaatctgcctacctctgtgaggagtggttgcagggccagctaggagggcagctgggacagctgggtatgcaggagacagcgcctgtgcccacggtgtctgcaccaatcctctcaggcactgtcaactgtgagcattcctgaccatcagccckcatgtcagagatggtgtgagagggaccgcatggccgtctccaggcatctctgtgttttcctgatggtcaggctgagtacatggctgtctttgtgctgcctgaatattgtttatttcagcaaatatttactgagcacctaccatgttccaggccctgggaagacagcaatgaatgagccaagtctctgccttgcagaggctgaggaactgagggaagttgtggtgtagagagacaaaaaaaaaaaaaaaaaaaaaaaatcaagacacattaaaaacaatgtaaaatagtataatacgtaggggtgggtacgatg

SEQ ID NO: 737198 - DNA, 542 bp, Homo sapiens
gccctttccctcccccaatctccttgaccacaggtgaaaggggcgtttgtaggactaaggaggcctggccttcttgtgaatctgcctacctctgtgaggagtggttgcagggccagctaggagggcagctgggacagctgggtatgcaggagacagcgcctgtgcccacggtgtctgcaccaatcctctcaggcactgtcaactgtgagcattcctgaccatcagcccgcatgtcagagayggtgtgagagggaccgcatggccgtctccaggcatctctgtgttttcctgatggtcaggctgagtacatggctgtctttgtgctgcctgaatattgtttatttcagcaaatatttactgagcacctaccatgttccaggccctgggaagacagcaatgaatgagccaagtctctgccttgcagaggctgaggaactgagggaagttgtggtgtagagagacaaaaaaaaaaaaaaaaaaaaaaaatcaagacacattaaaaacaatgtaaaatagtataatacgtaggggtgggtacgatg

SEQ ID NO: 737199 - DNA, 542 bp, Homo sapiens
gccctttccctcccccaatctccttgaccacaggtgaaaggggcgtttgtaggactaaggaggcctggccttcttgtgaatctgcctacctctgtgaggagtggttgcagggccagctaggagggcagctgggacagctgggtatgcaggagacagcgcctgtgcccacggtgtctgcaccaatcctctcaggcactgtcaactgtgagcattcctgaccatcagcccgcatgtcagagatggtgtgagagggaccgcatggccgtctccaggcatctstgtgttttcctgatggtcaggctgagtacatggctgtctttgtgctgcctgaatattgtttatttcagcaaatatttactgagcacctaccatgttccaggccctgggaagacagcaatgaatgagccaagtctctgccttgcagaggctgaggaactgagggaagttgtggtgtagagagacaaaaaaaaaaaaaaaaaaaaaaaatcaagacacattaaaaacaatgtaaaatagtataatacgtaggggtgggtacgatg

SEQ ID NO: 737200 - DNA, 670 bp, Homo sapiens
agacagggtctcatatgttgccaggatccttggtctttgacctcccaaagtgcagagattacaggcatgcaccactaatgccgggccaaatacttgtaatttaaattatcgctgggctgggcacggtggctcacgcctgtaacccagcactttgggaggccgaggggggaagttcacctgaggtcaggagytccagaccagcctggccaacatgctgaaaccctgtctcaactaaaaatacaaaaatcagccggacattgtggcagacgcctgtaatcccagctaatcgggaggctaagacaggagaatcgcttgaacccgggaggcagaggttgcagtgagccgagatcgcaccattgtgctccaacctgggcaacaagagcgaaactccatctcaaaaaataataataaaataaattatagttggaaaaaaggggtttcctaaagacccaagggaaatggcctctttgttcctgaagccacagagaggatttttctgctccccacaactagttttccttgtgaaaattcataattgctaccagcttgttctcctctctgtcactatacatctgtccttgaagccttatttgaacaaagagttctggtatcactcggatgcctagaaactgttgccgttctgtgaaaccgaccaccagaggaaacccat

SEQ ID NO: 737201 - DNA, 597 bp, Homo sapiens
acccaggctggagtgcagtggcatgatcatagctcattgcagtctcaacctcccgggctcaagcaatccttccacctgaaagtcctgagcagctgggactacaggcgtgtgccatcacgtgcctgactaatttttcttattttttgtagagatggggtcttgctatgttgcccaggctggtcttaaactcctagcctcaagcgatctcccacctcagtctcctgagtaaactggaccccaggtgcaagacaccaygcccataaaaaaattttaaaaaaatttaattttaaaatttttttgtagagataggatcgtgttatgccgcccaggctggtctcaaactcctgggcccaagcgatcctcccacctaggcctcccaaagcactgggattacaggtgtaagctacctcgcccggcctctcctgttctattggtgctgtgagattcacacctcacttgagtgctatgggctgaactgtgtcctctccacaaatgtctatgctgaagtcctgccccgcaactgcctcagaaagtgactatacttggagatagaatctttaaagaaataattaagtaaaaatgaggtcatatgcgtgg

SEQ ID NO: 737202 - DNA, 580 bp, Homo sapiens
agctcgcccagttcgtggctcgcaatgggcccgagtttgagaagatgactatggagaagcagaaggacaaccccaaattctcgtttcttttcggaggcgaattctacagttactacaagtgcaagctggcgctggagcagcagcagcgtgagtcccctccggcactcaggccgtcccatcgagcgcttcctttctcggattccagtccgggctctgccacaaacctctttctttcgggtcgtttattctttgaagtggagcagctcggtccacasgatccctgttccgctgttcccacggccctgcacagagcggctgctgggtgccactgtaatggagaacaacgaggttttcgatcctcccccctgggctctggatcagggattttgctgttgttttgcagactgatgacggagattagcaggagtagcgtgattgttttagtgttttctagggaggaagtgatagaggccggatgggagtccatgggacaggcactgtccagccccctttgccgtctccctgtgggtccagcaaggttttgtgcatttcagatgcctgcagcagaaatcaaaaagaa

SEQ ID NO: 737203 - DNA, 614 bp, Homo sapiens
tcctttaacacttgtttcttttatatgacccactcctagtatttgtttctttatgcttagctaaaataaatggatccatgaaagtagattgtgtaggttgaaggggtgggagtcaggagcatattgtgcatattttgctggtacactcatttgtgtgttccactatcaaatgcagacatcaccacgcttcagaggagggtccttggtcatttgtcaaattgatcatctcagcagactggttttgtatctagcactgtrtatcatttttgttttttttcttttggtgagcaagtatatccaactgtaagcctagacatcaaaatatgtattcagattttgctaaaggaatatgtcagcagaatgtgtaaagaagatagaccctgagaaatatactcacacaaatatttaataattgccagcttaaatttagaataaaaaatattttaatgttatggtcccaccatttatactggaaagactacagaaaaatctaagccaaacttgccctatgcctttatcttcctggtgctgtatgaaagcacagtatgacatacggttctcttatcaaactatcctccaaacccagaaaccctggtgatgttacccacccccag

SEQ ID NO: 737204 - DNA, 617 bp, Homo sapiens
cttgggcataaatttctccacactttgttgcaaacaaagtcagctcctttggtaagatactgagaggtctctgttttacaacctacttctcccccaggcaaatctctgagttagggctctagaactgcagatggagacaatggtatgcttctctctaagtgacacccctactcttatagctgagttctcagtggtggtggggcagtaaccataggtcttctcarcttgcttcttcctgtgagaaaccacagctttcaagcaagggcaaggataatgtaggtcccaggattctcagcacgccacattcaaggtagattcctctgtcctatgggtggaggctggatgaaagaaagaaccccacacctctgggctgcacttgcctggaacttagtctcaaaaacaggttgctgagggcaagatgagaaaggctgacatactgtcctttccaagacaacaggtctccaattaggagctggggtagaaggagctctgcattcttggttgcaccagtctagagtgaagtttccatctctctgagtttggagtgggggaagaaaagtggaggtcttgcttcaaatactacagctctcacctttgtaactgagttttagtagatt

SEQ ID NO: 737205 - DNA, 617 bp, Homo sapiens
cttgggcataaatttctccacactttgttgcaaacaaagtcagctcctttggtaagatactgagaggtctctgttttacaacctacttctcccccaggcaaatctctgagttagggctctagaactgcagatggagacaatggtatgcttctctctaagtgacacccctactcttatagctgagttctcagtggtggtggggcagtaaccataggtcttctcagcttgcttcttcctgtgaraaaccacagctttcaagcaagggcaaggataatgtaggtcccaggattctcagcacgccacattcaaggtagattcctctgtcctatgggtggaggctggatgaaagaaagaaccccacacctctgggctgcacttgcctggaacttagtctcaaaaacaggttgctgagggcaagatgagaaaggctgacatactgtcctttccaagacaacaggtctccaattaggagctggggtagaaggagctctgcattcttggttgcaccagtctagagtgaagtttccatctctctgagtttggagtgggggaagaaaagtggaggtcttgcttcaaatactacagctctcacctttgtaactgagttttagtagatt

SEQ ID NO: 737206 - DNA, 547 bp, Homo sapiens
actcaaggctgttttctatctgcacaaccaactgaccactgcacctctgtattcctgttgcctgaccaccctgtggattaccgccctgagcagacacctgcttctacctccattgcccagggtctgttgagttggaagcrtcatatttgaaaccatgggcgagtgtgagaaatgactgtcaagactcatttgaagaccccacttgaagagacacacggacccagaggaagtaaaatgcctcttactgtacatgttgtctcatcaaagccaaacaaatctgcatgcatattagtgcaagtgcagaggagagaaatcctacaacatttcaagcaaggggttgaaaatttaaattgtttgtatcgtactcatattactcttttaagatttgtaaaatgttatgaataatccttctcagagccacgtatggtcaggcaggttgtgctctgcagtggggcgcctgtccaattggggctgtaaccacccagagaaagagatgccttttaaattccaaacagagaagttgtatggcctaacagccaccttgaat

SEQ ID NO: 737207 - DNA, 635 bp, Homo sapiens
tgaagctttactccaatcatcttcaacgtttatatccccacttagagttggtttcatgaatttgggccattttggatcttcctaacaatcctctaagatagaggtgatatggccattagggaaacattcttttctatcttaatggcatcagaatttctcttgggatatttctggacacacttggtgcttctaaaaacaatctccctaaataaccccaacasggtgggaatactgtgaagatccaattaacatctgtggggtaggattggttgagtagaagcttgaggctaaggaatgtggagaacaacgagaactggggaaggtggtgggagggactggaagataaagaacaggggagacaaagcaggctcttaaagggacaacgccaagcagatgactcagcccacaatcagggctcaatttaacaactgtgtcataatactagtcctcaccggtagagatttcagttcagcatttcccaacattagagcaagcctggttaagccttactgaaaatcctcaagaccctctcctctcaaactcttcctgcaatccttttgggaggtcctaggggtgccttgagtccatgtcaaacaagtcctaaccaccacatggaggtcatcctttttcttcct

SEQ ID NO: 737208 - DNA, 615 bp, Homo sapiens
ttttgcttccagggaagggaattggaccactgaaggtaggagcggggatggattactcatcggacattttaaataccttaaaagtgtgtgaatatattaccattctaaaagcaaaaacaaagaaaacaacaaacaaaaagtaggtaagaatatccaataaaattgaaaaaaaaaacaatattgagggagatttccyctatcgaatagtacaacatataaaactgtaataattaaaatagcgagattctgcttcaaaactagatagattactagagcagcaaagagcccagaaacttgcctgagactagcatggcagatggaagtaaacagataggctggcttacgagcaaagggagagttttatccagaaggcatcgtagtctcggaagatagaacaccaggaccagagggcagggaaagcagaagcactgcaaagcctatgagtgtccctgaaggattaatttccttctgatgtggtttacctgctcaggcaattctgtctcttccaacttccaaatgaaaaagaggtatgtattagtctgttctcatgttgctaataaagacatatctgagactggataatttataaaggaaagatgtttgatggacccatcc

SEQ ID NO: 737209 - DNA, 478 bp, Homo sapiens
tacattattttgcttccagggaagggaattggaccactgaaggtaggagcggggatggattactcatcggacattttaaataccttaaaagtgtgtgaatatattaccattctaaaagcaaaaacaaagaaaacaacaaacaaaaagtaggtaagaatatccaataaaattgaaaaaaaaaacaatattgagggagatttcccctatcgaatagtacaacatataaaactgtaataattaaaatagygagattctgcttcaaaactagatagattactagagcagcaaagagcccagaaacttgcctgagactagcatggcagatggaagtaaacagataggctggcttacgagcaaagggagagttttatccagaaggcatcgtagtctcggaagatagaacaccaggaccagagggcagggaaagcagaagcactgcaaagcctatgagtgtccctgaaggattaatttccttctg

SEQ ID NO: 737210 - DNA, 478 bp, Homo sapiens
tacattattttgcttccagggaagggaattggaccactgaaggtaggagcggggatggattactcatcggacattttaaataccttaaaagtgtgtgaatatattaccattctaaaagcaaaaacaaagaaaacaacaaacaaaaagtaggtaagaatatccaataaaattgaaaaaaaaaacaatattgagggagatttcccctatcgaatagtacaacatataaaactgtaataattaaaatagcgagattctgcttcaaaactagatagattactagagcagcaaagagyccagaaacttgcctgagactagcatggcagatggaagtaaacagataggctggcttacgagcaaagggagagttttatccagaaggcatcgtagtctcggaagatagaacaccaggaccagagggcagggaaagcagaagcactgcaaagcctatgagtgtccctgaaggattaatttccttctg

SEQ ID NO: 737211 - DNA, 624 bp, Homo sapiens
atgtctatcagaattacgatgtaaggcattgccctaagaacttgacatatttaagtcaatttacttcactcaaaaactttatgaagaaggcactaagatattctcatcttacagatgagggaaataaggcgtaactgagatagcatcacgttataaaactgggattagaatttagccagtcaagctccaacgcccatgtgcttagtggactgtaggttgtaaatctacctctctggggaaagtttttgtgtcaaaggaggcacactaattgcagcytagcattctcaaaaaagaaaagacacttctttcttttcaccagaaggcattgaagaggagtcaggggaggaaacagagaaatgtagaggaatagaaaagaacagttaaagaagaatgaaagatctattggtgttggaatggctaggctgattgttaatgtcccttacgttcagaatagtaaacccatgttttcagcacaaatgcaccagagggaaattacccccctacttgctacgggagctgccatcttccaattaatctaccagctacgattatttagaaaaatgtatgaaagctgtaactgggtcacaggctcattttatattacctatatacgtacattgtgtt

SEQ ID NO: 737212 - DNA, 583 bp, Homo sapiens
tagactggtctcgaattcctgacctcaggtgacccggccatctccacctcccaaagtgctgggattacaagcgtgagccaccgtgcccggcccacaatgttttctttctgcaaagagatacaaattcagaaagcaattaattccaaatcctttaaaaaattaacctaacttttgacaaatttaaacaatatttccaaagcttctggatgagactttccccctcagcactgattgtgcagtgtcttttcatggcccacactaatccctkgacgttatgtttgctcagcaccactgtcctctccattgtcatgtattcaaaagagatgaacactgtctttcagtgtgtatataacatttgtcccccaggtactcaaccttttttctcccgattaagaagcccagctgcaatattcaacacacagaaaaatttaatgtcttttcctgagtcactatccaataatgtatctggggatttcaaggtcaatgcatgcgatcgctcgacactgagaatctgtaatatgtggaatcattgcaaacatgaaaaagatgctcaatgcacttgctacctgaaagtgaatgtgaa

SEQ ID NO: 737213 - DNA, 667 bp, Homo sapiens
tgccaatgctgcccaactgccaccagaggtgcccacaaacaccacctcacccctcagtgtccgctggggctgggaaacctcatgcgtcatttatagcccactccccagggagacaaattgctggtaaacctcaaggcagagttaagcaatgaaggtagggaacataggattgcttttgggaggacaacgctaaatggcacaggagggaaaagagaaaccaaaagcctggggggagggcgtgagaacaagagagtgagaatgtgcccgctrgttctcagaggctgggagccagataatgagagtgccatccaggcagaggagggatggggtaggggcagggcagagaaaagtctaggcagcgatggcaggggcacgaaatgctacatgtttacatggcagacccccctctgtctcctcagagagagcatcagtaaaacacctattgctcaatcatggaagtgagcaatagaataaagaggcattgagtccaacatccagactgaccaagtgacctgagagcacacacatggtctagccatatctcagtcacatcgccaagggggctggggacctggtttcttcccctgctagctttttccatctctcttctcctctctgtcccatttcccttttttgtcatttccatcctgattgggtcccaaatgga

SEQ ID NO: 737214 - DNA, 623 bp, Homo sapiens
tcctgtcataagccaaattggaacaacatagtcctagattgcaagactgggtttacctaacttgtgtggatctcagcccagcaccacatgttgatagccataaacaggtatttgtttcataggtgtgcatgggaatgctaatactattacctaggtttcctggattttcttctatggggaaaacattttcataaatgttaattgatcatggagaactgcccatgaaaattgcaaggaaatgattaatcatatctaatttgtagatagagaaattgaggcacagagagattaaagtgtctatgctaatagggttaaaaagtaatgaggctaaagagcccaggrtgcctgactctcaggccatccccttcttataactggataatgttgagagagtctccacctatgttgtaaaggtcagaatgctaactaattttaggaatgtgttaccagctttctaggaaaagggctgcttttgttaggactcaagttttggtgggaataagagaggttgcagtcatagtttctttatctacttctacagacagaagttaggagcttctttctctcagtcatcagctatcagccatcatctacctaggatcagaacctccagtgaaagtgag

SEQ ID NO: 737215 - DNA, 622 bp, Homo sapiens
tcttgaattaatttttgtataaggtgtaaggaagggatccagtttcagctttctatatatggctagccagttttcccagcaccatttactaaatagggaatcgtttccccatttcttgtttttgtcaggtttgtcaaagatcagatggtggtagatgtgtgctgttatttctgaggtctctgttctgttctgtgggtctatatatytgttttggtacgagtaccatgctgttttgattactgtaaccttgtagtatagtttgaagtcaggtagcatgatgcctccagctttgttttttttgcttaggattgtcttggctatgcaggctattttttggttccatatgaactttaaagtagttttttccaattctgtgaagagtcattggtagcttggtggggatggcattcaatctataaattaccttgggcagtatggccattttcatcatattgatttgtcgtatccatgagcatggaatgttcttccatttgtttgtctcctcttatttcattgagcagtggtttatagttctccttgaagaggtccttcacatcccttgtaagttggattcctagctattttattctctttgtagcaattgtgaatgggagttcactcg

SEQ ID NO: 737216 - DNA, 622 bp, Homo sapiens
tcttgaattaatttttgtataaggtgtaaggaagggatccagtttcagctttctatatatggctagccagttttcccagcaccatttactaaatagggaatcgtttccccatttcttgtttttgtcaggtttgtcaaagatcagatggtggtagatgtgtgctgttatttctgaggtctctgttctgttctgtgggtctatatatctgttttggtacgagtaccatgctgttttgattactgtaaccttgtagtatagtttgaagtcaggtagcatgatgcctccagctttgttttttttgcttaggattgtcttggctatgcaggctattttttggttccatatgaactttaaagtagttttttccaattctgtgaagagtcattggtagcttggtggggatggcattcaatctrtaaattaccttgggcagtatggccattttcatcatattgatttgtcgtatccatgagcatggaatgttcttccatttgtttgtctcctcttatttcattgagcagtggtttatagttctccttgaagaggtccttcacatcccttgtaagttggattcctagctattttattctctttgtagcaattgtgaatgggagttcactcg

SEQ ID NO: 737217 - DNA, 622 bp, Homo sapiens
tcttgaattaatttttgtataaggtgtaaggaagggatccagtttcagctttctatatatggctagccagttttcccagcaccatttactaaatagggaatcgtttccccatttcttgtttttgtcaggtttgtcaaagatcagatggtggtagatgtgtgctgttatttctgaggtctctgttctgttctgtgggtctatatatctgttttggtacgagtaccatgctgttttgattactgtaaccttgtagtatagtttgaagtcaggtagcatgatgcctccagctttgttttttttgcttaggattgtcttggctatgcaggctattttttggttccatatgaactttaaagtagttttttccaattctgtgaagagtcattggtagcttggtggggatggcattcaatctataaattaccttgggcagtrtggccattttcatcatattgatttgtcgtatccatgagcatggaatgttcttccatttgtttgtctcctcttatttcattgagcagtggtttatagttctccttgaagaggtccttcacatcccttgtaagttggattcctagctattttattctctttgtagcaattgtgaatgggagttcactcg

SEQ ID NO: 737218 - DNA, 570 bp, Homo sapiens
aaagtgctgggattacaggtatgagttgattttttaaaatcaatgttgacatgaagttattcaaggacctgctgattaccatttcattaacttctcttttcatcctgtcttgttccttaattttacacagacttagtttattagggtctgttagactagcgacagcactggggatcatagcttccagaagatgcttaagattcctagaaagggcaacggaggtattgaagtgccacccatatagcctttttcctcttccaaatctctagcctagccctagaaccygtctatttgtaaaagtaaataatactttttaataaccagtcttatttttccagattaaaattagggcatacacatccttagtaaatatgcattgtaaacgtgcctttcttctaccaattcaccaaacatcctgaggccacttctaggttgatttaaacatttctagaaaaatctatcactgatagtcactgttcagaaagaaccaattctgcagtagttgtttaaatggtaggttgtttctctttatgatttcttcctgtgagcctttaaaaaaatctttttttg

SEQ ID NO: 737219 - DNA, 630 bp, Homo sapiens
tatgctttttctgttccaggatcccatccaggataccacattacattgagtagtcctgtctccttaggcacctcttgattgtgatagttctcagacattccttgtttttgatgctcttgaaagttttgagggttactgctcaggtgttttgtagaatgtcagttgagatttgtctcatgtttttctcgttattatattggggtaatgtgtttcggagagaaagacaacagagataaagtacaattttcatcaatacatactgtcagtgtgacttgccacttttcttttttttttgagatggagtctccctctatcacccaggctggagtgcagtggtgcgatctcagctcactgcaacctctgcctaccgggttcaagcgattctcctgcctcagcctcttgagtagctgggattacaggcacgtgccaccacacccggctaatttttgtatttttagtagagacggggtttcrccatgttgattaggctggtctccaactcttgaccttgtgatctgcccgcctcagcctcccaaagtgctgggattacaggcgagagccaccacgcccggccaacttgccacttttaatgttaaccttgatcacttgacttgaggtagtgtttgttag

SEQ ID NO: 737220 - DNA, 551 bp, Homo sapiens
ctttctttatccttgacttttggaagtttgattattaaataccttgaggtaggtcttttttttttttttcccgagacggagtctcgctctgtcacccaggctggagtgcagtggcacaatctcagctcactgcaagctccacctcctgggttcacgccattctcctgcctcagcttcccaagtaactgggactacaggcacctgccacaacgcccggtaatttttcgtatttttagtagagatggggtttcaccgtgttagccaggatggtctcgatcgcctgacctcgtgatgtgcctgcctcggcctcccaaaatgctgggattacaggtgtgagccagtgcacctggccgaggtaggtcttytttaggttaaatctgcttggtgttctaaaaccttcttgtacttgaatgttgatatccttctttaggtttgggaagttctcttttattatccctttggatgaactttctactcctatctcactctacctccactttatggtcaataactcttagatttgccctttcaaggctatttcctagatctca

SEQ ID NO: 737221 - DNA, 636 bp, Homo sapiens
cacttgggaaattttcaaaatccatgttaaatacagtaattacagcatacgattagaacaaataattgttatctcataatctactatatttcatctatgttaacttaaatctaatagtagaaaccacaattggagttatttttcagtagctgaacaataaataaaatttttccctgataggaaaatatcaaaataacatttattgccaatggaaagttctctctgttaaacatttaagaaaacactgtatctatgatttctttaagaattgtatttttagccctttcattgcaattctaaatgaaatttgatgttgctgacttatataatagattgtgaccataaatattagcataaagtaaatatgcttcttatttatggaattacataagaaaggcattcattggaagggtgagcattttctaactcataagcttccatttttgacttttaccactctctygtctttaggaagaaataaagtcaaaagggatgttcctgaggccttacctgtatataaatgatgtgctcggggcaactctgtgcttgatttactaccatattcttctgcaggcacctttcattgttttctttaaataaccccctggaggttactctggatgaaaatccatctgc

SEQ ID NO: 737222 - DNA, 671 bp, Homo sapiens
tttttggtagagatgaggtcttatcatgttcagcccaggctggtctcaaactcctgggctcaagcaatcctcacaccttggcctcccacggtgctaggattacaggcatgagccaccacacccagcctcttcattttcttataagaaacaccactcctattggattggccaccyccctccaccccatgacctcatttaactttaattatctccctgaagaccctacctccaaatgcagtcccattgggggttaggacctcaacataagagctgggggtgggttgggggagacaaaattcagtgtctaacaagaaggttgggaaggcccctctgtcgaggtggcatctgaagtttaaggtggaacctgacatgtgaagaaccagaaaaagagaaacacaggcagagggaacccatggaccagaggcaactttaagtactggatttttgggttatcaggaaaaaaaaaaaacaaaaacagtaagtcagtccagtatttctagcctgatcagaggtgagactttaatgtcagacctatcctcttcagatttctactcaaaaaccgctccactagcatttgaaagtggcattcagacaagatcagaaagaatacaaagagactaattactagcaggttggaattgtagctttacttccaatccaaaactaacact

SEQ ID NO: 737223 - DNA, 448 bp, Homo sapiens
ggattggcccaggcatcagaatggcttagtgggatccccagtgttggcagcagagagcccctgggcaggaagtgagagttaggaactgaggcaaagtgctgcctgtttatccctacatagggctgattgctgcaccagtatctagactggaaagattggcaatgagtatgtgaggttgggtacaatacccaggacccacatggaaagctaagagcacaratataaccagtagtttatgacaacttggggcacaatatcacaggctgtgcagaagttgttgcccaaggagtgacagagacaatgattatatttgggagttcagtgtagagtgcttcaagactggatgttcagaaatgcttaactggaaagggtgaattccaacactggacttgaaggatgggtattgttgcagacatcacttgtgtttgctgctcggaattcatttgcc

SEQ ID NO: 737224 - DNA, 634 bp, Homo sapiens
cgcaggcagggtgctcatctgctaggccacggggtccttcaaggatcccaaagttccaaaccgtcctgagaggagaataaaagaaagaccattactgatgccagatttttgtgttggcttcttctactctgatacttccacaggaagtctctcaattcctcctcacagtcctaattatcttgtccaaccttttgccctaaggcaggcttggggctgacatatcccagacacaattagtcggtggttgactctcattcaaataataataataaatcagaatgacattgggttctttgaggatgaacttgataggcatgaaatctcaaacaaaatcctgcgggtatgaatcccggttcctctccccgacccctgggctgagattgcctgtcccagccagcacagaaggaggggacactctatctggcttccactcttccctcagtggccctgggtttccactgcaaccagtttagaayccaatattttacaagaagatgccacagaaggagcacagctactgcttagacaggcaactctcaggtttccagaatttaaatgggttcagaaattatcctacaagtcacagttaaagggtgttcagggacaagtataaggcccaccaaatagttccttc

SEQ ID NO: 737225 - DNA, 640 bp, Homo sapiens
ctctgtttcctttactctttttattgctctattggaatctgtccagcctgtatccttctggtaccaaagtgcccctggttgaagcccatactgctggacttagtctctgggagttggagggagaagaattgcagtgtccctcakcccactgtgctacagaccttttgaaacttcctctcagtcagctggtcagtgaatcacatttaaaacgcaagctcactgtccacttcttttcaatgggtctctctctcagagtgtcatttttctatgttcaccctgtttttctcagtgaggactttggtgcctggaagccatgagtttgaattcctacatcctctattattttgcttatagaccttgccaagtttgtcgatccatctgagactcagtttccccatcttggcaaggagataattcccatttctgggtgttgagtgaggatttggggctgggtaagacagccaagagcattcaggtgctcttcattcggcctctctcaacccgcatgatccaatgacttatttttccccaggggcaatccccttacccctcaccaccaaaagtgattttgtgacaattttccactcattttttgtcacaggaggtctctctatattttttcctccatcttcgccaggat

SEQ ID NO: 737226 - DNA, 589 bp, Homo sapiens
actgcctttaccaaaagtttattttaagggctatgactcggggacataaagaaatgtttgaagaagggaaaggggataaaagcatgcaagattctgtatggaatggaacatttgatacagccaccccacttcctttagttgagcacatggtgggagaccattcaaaaagccaacaacttgggtaacagcccttaaattgacattgtttaggcatgaatggatccaattggttttaaatgttttgttctccacataattcctattttaagaagattggttactatagagactagagctgcctttattctggatgttcaagagaggacatgttgactaatggttagagcagaggtctaaggtccaaggtcctagtcctakcccaaccacagactcactgagagcttgtccataactcactccccatgctgcaattcttccttagctaatgaggagcaaaaaatatctttgatgtggccctttgggcagtgatatttacatactttgttattgatgctgggtgagatggaagaaatggggtgagggagagagcaattctaacataaaatgaattttaagatattgaagttgg

SEQ ID NO: 737227 - DNA, 680 bp, Homo sapiens
gctttgggatccatgggcccattggaatctcaagtcttccaattacagaaagccctcatttaacatggtcaataagttcttggaaattgtgactttaagcaaaaagacctataaccatttttttcctcatcaatgttataatgaaatgacactgagctaaatgwtgttatttcggcacctgctgtacagcgtttagcttcctgtcacaatttctttttctttttcttttcttttctttttttaagatggagtcttgctctgttgcccaggctggagtgcagtggcacaatcttggctcactgcaacctccgcctccagggtcaagtgattctcctgcctcagcctcctgagtagcacccgccaccatgcccagctaatttttgtatttttagtagagatggggtttcaccatgttgggcaggctggtctcaaactcctgacctcaggtgattcacccgccttggcctcctaaagtgctgggattacaggcatgagccactgtgcctggcccctgtcccaatttctaagaacctattggtgacattaggtgaggacatactgaacaaatgatgtgaatttgggcaaaacttagtctccctgcattctgatccataaactgtggaaaaggaccctacttcataggattgttttgagatttaaatgaaataatgtttatatta

SEQ ID NO: 737228 - DNA, 653 bp, Homo sapiens
taacacttacaatgggaatgacattaaagccaattattataagaaggtttagaatattcaatattttctaacaaaagtaaaattctcctttgttttcaccacaatctccataatgaaagtgattaccaaacaaaagataaactgcttcttttttttcccctttttcccagatcttaaaacaattcataaaagttccatcaacactttggacttttatatrcagatctaattaaaaagcctagaggcgcacgctaagctaagctttaagaatttaaaattgctaaaaatcaataagaaattaacatggtaaactatagttggtcttgaagatctttgcaaattcacaaaatgcttccaagtcatgacagtttatccccagtgctccaaggaaacaagatagttttttcagaattatgtttccttatgaatggtaatggtaattattctctcctcctccccactatcttgtcctgtttcttattacagagaggaaaaaaataatttatgaacatgaaatcacaccaaagagaagcagggccaaatgaatataaaatagcagcgagaaccgctatgccagaagaattgcccaggatctccacatagaagacatgtgggcaaagtttcaggagctatcttatcagaaattgaacaaa

SEQ ID NO: 737229 - DNA, 653 bp, Homo sapiens
taacacttacaatgggaatgacattaaagccaattattataagaaggtttagaatattcaatattttctaacaaaagtaaaattctcctttgttttcaccacaatctccataatgaaagtgattaccaaacaaaagataaactgcttcttttttttcccctttttcccagatcttaaaacaattcataaaagttccatcaacactttggacttttatatacagatctaattaaaaagcctagaggcgcacgctaagctaagctttaagaatttaaaattgctaaaaatcaayaagaaattaacatggtaaactatagttggtcttgaagatctttgcaaattcacaaaatgcttccaagtcatgacagtttatccccagtgctccaaggaaacaagatagttttttcagaattatgtttccttatgaatggtaatggtaattattctctcctcctccccactatcttgtcctgtttcttattacagagaggaaaaaaataatttatgaacatgaaatcacaccaaagagaagcagggccaaatgaatataaaatagcagcgagaaccgctatgccagaagaattgcccaggatctccacatagaagacatgtgggcaaagtttcaggagctatcttatcagaaattgaacaaa

SEQ ID NO: 737230 - DNA, 615 bp, Homo sapiens
caaaattaaacaaacttacaaaaaaacgttctcaagacagacacctaggaatcacctatttaacatgggatacaatcaaaaggctgtcctcaggaataaagcaaaagatgagttttcaggcctacaatgtaagatgasaccatcctggctaacacgtgaaaccccatctctactgaaaatacaaaaaattagccgcatgtggtggcaggcgcctgtagtcccagctgtttgggaggctgaggcaggagaatggcgtgaacccgccactgcactccagcctgggcaacagagtgagactccatctcaaaaaataaataaataaaaaataataaaaacatttgagtaagactaagtctgagcaaaagaagtagaaagagattttttaaaatataggcaaggacccatttataccacagaattaagaaattcaaaggaatctctgattataaatccctggttgaatattgcttgtattgttaaagactgcaatgatctagaagtatttcgcttctcagaaaatattccatttagttggtaccaaataaaagccaaatgaaaaaaaaatcaataatgacaaagagatatagaagtctagcatacagtaattaaaataat

SEQ ID NO: 737231 - DNA, 514 bp, Homo sapiens
cattaacttggactgattatttgcataaagtacaagaggaatagtgatttatcatataggctcttttaaagttaactttgctagaacttttcagaaagaatattagattagacttttaaaagcctctggagtcttatgaagccaggcaaagatttgactcaccctcaaattgtgtcggtaatacctgtacaaattgcttaatctactctatttatgaggtccccaaaatatcttgagtttccttggcctgtcagaaagtgacattctttacttaccacaattcttttttttttttttttttttttttttgagatggcgtctcactctgtcacaycggctggagggcagtgatgcaatctcagctcactgcaaactccgcctcccaggttcaagtgatttccctgccttagcctcctgagtagctgggattacaggaatctgcctccacatccagctatttttttgtattttcagtagagacggggtttcaccgtattagccaggatggtctcaa

SEQ ID NO: 737232 - DNA, 613 bp, Homo sapiens
attataaatcatgtaaatatcttatatttttgattctttaaaccatgttttagcttcattttgcaaagatatctaagaggtggtttataagctttgcttgcaaataaaacatttctgctagtaatcacataaagcctaagtaaccctagaaagcttctctatgtatgtatgtatgtttaccttgtctcttaaacaaaagagtttgacaattaaccaatactctamagccttgtcaccctgagcaaagtgaacccagactcattgcacccctacttctagcgaattcaagcctacttggccaggaaatgtttctaatgctcacgttgctagtagaagcaagttactatgagccccagtgtgtggcttcaggcttgccaaatcactgctttgttcaggcatttcatactcaagagaatagtatataaaaacacacctctgcccaggagcagagagcaccatgtagattagggcagccagagttcctgctctacttcccaaccagctggtgctggttaggattagaccagagggagttggggttgaaaaggtctctcttgagagagtcagaaagggtcctacaagaacaagacaaacaggaaaagaaagcagtaac

SEQ ID NO: 737233 - DNA, 608 bp, Homo sapiens
gcaagcctagttcttaaatataacataagaatattgaactacaggttctgggcttatcagttcattgttctataccttcctggtgttttacctaagcaaaggtaacaaagttagccctttaagatcatgacccagactacttgtcataggggcatagaatgcccccttttttattttttattttattttattattatttttgagatggagtcttgctctgttgcccaggctagagtgtagtggcacaatctcggctcactgcaacctccacctcccaggttcaagcaattctcctgcctcagtctcccgtgtagctgggattacaatcatgcgccagcacacccagctaatttttgtatttttagtrgagacggggttttgccctgttggcctggctggtcttgaactcctgacctcaggtgatccgcccgcttggcctcccaaagtgctgagattacaggcgtgagccaccgcgcctggccagagtgccccttattgtctttcaagaataagccagtaaatgttgtgatgagcctgtttatggtcagattgcatctcacatttagacttcctaaacctatgcccttctgacttaaataaccacatac

SEQ ID NO: 737234 - DNA, 592 bp, Homo sapiens
cagtaaatacccttcaatatcaacattcccgtttatactcttcagtaaatttttgtaaataaaattctgggattaaaagattattctgtgacagcttttcctgaatcttattcagtaaatcacatcctttggtttttatgctttaaaacaatttcttctgaaattaccaatatttacctttgaattggactcaytgaaaatagctagaaggaatgtaagcttttaaagtctgcttttgctgcaccttggtttaagggaatgagtgagaaaataacacaacacttaaatgctattccagttctaattgttaggaaaaattatctaaaatgagccaagctcattgttctcatgttaagggaataaaacaaaaacctcattttggcccctttaaaatatttattagtattcttaaataaactattctgaaattaaatctataagatatattgaccaaaaatcttccacattggggaataagaagtttcaaagaaaaatataaatgaaagtgaaaacagaaattttgagtagagtaattgctaagtatattattttgctaaaattattacttgaaagtcaacatagtagaaggaaa

SEQ ID NO: 737235 - DNA, 628 bp, Homo sapiens
aatgagatttcaaagcaatatcaaatacaggtgacagtgtttcctaattagttttatggacgtagaaacaaatcacttaaaaaattcacaagctctggaaatgcaaattttctaaaataaggactcactctaaataaaattttatatattataaaccacatagttagcatattattgccagatctaaaaacctatatgtagttcctaaattaggctttagagaccctgcaagattttgaaatggtcaggaagtgggaaataacccaccactgacacagacattgatgacagacttgtgctggcttcctaagatccaagaaactgaatagctaatgcgaaagcacctttcttacctgagcactaatgttatggtamctttgtaggctcctgacctgtaacatttcagcctcttttgtaacttaacagaaaaagaaacaatctaatttaagtcattttcaaatatacaaattaaatggctaatatttttattttaaaaatcaaacattttctttcagagcttcaaagaaaacttggataatggatctctctagatccatccaggtggttttagattctgtaatacctttacttcaacatcgctggctttcaatctaaaactaaaaaattt

SEQ ID NO: 737236 - DNA, 629 bp, Homo sapiens
gtgacaactggttgcatggctggcattcattctgattaatcaccaatgtaataccagttgttaaatattttgaatattacctagaaatatttatatctgtacctgcattgcgtccccattttctcatttaagagtagcataattgttttttttctttgtctttcacagcaggacgattgaagtcattaaggtggatggtttctacctgttggttagacttttctacaaaactacggtatctgctaggttgtggcttatttcaycactgtactgaatctcactactttatacaggtcagggcatctcaccactgaaatgtattgttgagtaccttcatcattgtttattgagcttttcatagggtttttcatatagaacttgtaactgcttgttcattcttctccatgactctcctcttactacaccctcagctcagttcctttaatgagaagacattctaggaagttctgggtattaagctggagtggtggaggtctttgaaggaggtttgatattagaaatcagattcactttcacaaggagcatttaaatcattttagccaattaacaccctaacatgtgatttaacaccatcaagtccccaagttgccaagaatgtggcccatgcc

SEQ ID NO: 737237 - DNA, 547 bp, Homo sapiens
aggagagaacttctaagcttaaggatatctcagtagaaaccccctacactgaaaaagagaaaaaagactaagaaaacaaacaaacaaacaaaacagaacagtacatccaaggactatgggacaactacaaaaggtgtaaatgcatgtaatgggaacaccagaaggagaacagagagagaaaggaagggaagaaatatttgaaataataatgatgaggaatttctccaaattgatgtaagacaccaaaccamaaatccaggaaggttagaaaacaccaagcaggacaaatgaaaacaaaaataaaaacaaattgtatgtaagcatatgatattcaaacttcagaaaaccaaagatttaaaaaaaatcctgaaagaagctaaagggaaaaaaaatcttacctatagaggagaaaacataaggattatgtttgacttctcagaaaccatacaaacaagagagtgaagtgaaacgtttaaagtgttgagagaaagaaaaccaccaatctagaattctatactctctaaaattatccttcaaagtgaagaag

SEQ ID NO: 737238 - DNA, 611 bp, Homo sapiens
ggtgctctggtattgggtgcatatatatttagaactgttacattttctcatggaattgatccctatatctttatataatggccttctttattactccattttcacacagctagaaagaactacctgagactgggtaatttatgaagaaaatgggtttaattgactcaaagtcccacaggctttacaggaagcatggctggcaggcctcaggaaacttacaatyatggtggaaggtgaatgggaagcaagcatgtcttaccatggtggagcaggagagagatagggaagggggaagtgctacgcactttcaaacaaccagatattgtgagaactcattcatcatcatgagagtagcaaggggaaaaccaacccccatggtccaatcacctcccatcaggaccctctcccaacactgggaattataactcagcatgagatttggatgggacacagagcaagaccatatcaccttctttgtctttttttttttaactgttagagtcttttttgcattttcttttagctcatcagctatcattagtgttagtgtattttatgtgtggcccaagacaattatttttctttcaatgttgcccagggaaaccaaaaga

SEQ ID NO: 737239 - DNA, 654 bp, Homo sapiens
tcaccttctttgtctttttttttttaactgttagagtcttttttgcattttcttttagctcatcagctatcattagtgttagtgtattttatgtgtggcccaagacaattatttttctttcaatgttgcccagggaaaccaaaagattgacactcctgatttcatcygttcacattcaaggttaatgttgatatgtgaggttttgtccctgtcataatgttaattgttacctagtggctttgtagtgtcaattgtgtaattgttttataagacctgtgaattattttgtacattcatttgtttttacaatagtgagcattgaccttttgtttccaagttttgaactccttaaaacatttcttgtaggactggtctagtggtgatgaattagtttagcatttgcttgtctgggaaatattttatttctctttcttttataaagcttaaatttaggaggatacaaaatttgtggttgacagtttttgtctttaggaagtctgaaaataggaccccaatctatagtggcttgtaaaggttctgctgagaagtttactgttaatctgaagggatttcctttataggtgattagatgcttttttcttgatgattttagaagtttttccttcatattgactttagaggccctgatgacta

SEQ ID NO: 737240 - DNA, 618 bp, Homo sapiens
cttttttgcattttcttttagctcatcagctatcattagtgttagtgtattttatgtgtggcccaagacaattatttttctttcaatgttgcccagggaaaccaaaagattgacactcctgatttcatccgttcacattcaaggttaatgttgatatgtgaggttttgtccctgtcataatgttaattgttacctagtggctttgtagtgtcaattgtgtaattgttttataagacctgtgaattattttgtacattcatttgtttttacaatagtgagcattgaccttttgtttccaagttttgaactccttaaaacatttcttgtaggactggtctagtggtgatgaattagtttagcatttgcttgtctgggaaatattttatttctctttcttttataaagcttaaatttaggaggatacaaaatttgtggttgacagtttttgtctttaggragtctgaaaataggaccccaatctatagtggcttgtaaaggttctgctgagaagtttactgttaatctgaagggatttcctttataggtgattagatgcttttttcttgatgattttagaagtttttccttcatattgactttagaggccctgatgactat

SEQ ID NO: 737241 - DNA, 591 bp, Homo sapiens
ctaatgtgtcttgaagatcttctgcagttttttttctagaaattttatagttttatgttttacatttaagtctgtgattcatttttagttaattttttttgtataagatgtgaagcttaggttaaggttcatgtttttgcctatggttgttcaattgctctaatagcatttattgaaaaggttaatgatttatttgtacttctgccaaaattaattgatcatactcatgtggtcatacttccgctttctctgttttataccacttagctttgtctatcttgctatcaataccacactgtcttgattactgtagctatatattactgtagctatatagtaaactttaataaaaggaagatgaactttcttcttcttttttcaaaatcgttttggctgtttaaggtctttttcttttggtatacattttagagtaaaagtacatacttctrtgaaataccttactaagcttctgataggaaatacgataacactgtagaacagtttagggaggactggtatctttactaaatcttctaacccataaacatgatatttaggtcttcttgtctttcaccaacattttgtaatttt

SEQ ID NO: 737242 - DNA, 577 bp, Homo sapiens
tttgtgtgcttgttataatgactagaacttccagtaatacgttgaataatagtgctgaaaacagatttccttgccttgttcctgatcttagagtgaaagcatttagcctttcaccattatgtattacatagatattgtttcttttttttgtgtatgtaatttcttattaygagattaaggaagttcccttctattcctagtgtattgaaagtttttataatgaatgggtgttgaattttgtcaaatgctttttctgtcaattggtataatcatatgacttttttgtttagtttgttaatattatggatgataatgatagatttttgaatatcaaactgtccttatatacctagaataaattccacttggtcatggtatactaatatttttatacactgatggattcaatttgctaacattttattgaggatttctgccctgcttttaagtcacttttgtttacctctttttctgtgtagcttaaagtttggcaaatgcctgaaagaggaattcttcatgcagagctcaggttagattagttatctgcttgtaactatcatcactttatctgaagaat

SEQ ID NO: 737243 - DNA, 562 bp, Homo sapiens
ctgcatgtcaagcttgattccttaaagggaaacacaccctttcagttaaagccttggcaaaataaccggtttttccaattgtgttctgttgacaaagaaaaatggattcttgctgcactgatgcgaacaactatattgccgtaagttaagagtacttacagatagtctccaaattttagaggaaccaggcagagaaaaatgaacatgctccaaattttgttcacagtagtataccttacttgattattaaaggccataaatagtttaaaataagtttcctttcccagtccatgcaccaaaatgatacrgctctgatgagtggaggaacaacagggttcctggtcctcatgctggtttagataaaatgacacagacacatgtggagtggttttaaggagtggagagtttaataagcaagaaggaagggagaagagagaaggaagacgctcccccttgcagagacggagcgggggttccaaagctgaaagaggaggtcccccacattaacaatttttaaaataccgtacaactgcagaaaatgaggactgcctgtacatactgt

SEQ ID NO: 737244 - DNA, 603 bp, Homo sapiens
tgtcatttcacctactttccaatttagtatctcctagtataagtctcctcctattccctcttgcatgggagagagtactttgactaattcaggtcctctgctggaaggttagtttccaacaaaattcctccttcctccacctgtgagttctgattttctacttggaaagaagtgaagaatggggcttccccagcagagggaagccactgatgtctggctacctgtggacaggaagcatctgggattctagtatagttccacaggaagaggcttaaaagggaattccccaccaaaaktctgatgcaggcacttagccgacggggtcaaaaaaaaaaaaaaaaaaaacaataagatgcaatgtatttttgtaaggctagaaatgcttaatgttaaggccacatcaccttgtgtggtcagtaggaaataatgttgtaagaacctataaagacaaaatacaggagtaatagtacctctagctgtactctccttgcaaacacctatctataagactaaatgctcgagcccagagagtactcagctcttcatatccacttctccccacgctttagaaagcctgtactcagagaatgccagaaaatgggt

SEQ ID NO: 737245 - DNA, 541 bp, Homo sapiens
ttttggcaaacaaccaccgccacatctctctggatactggctttatcaaccctccagattcatttcaaccagccacctccacatatgattttccaaccactttgaactcccaagcaaccaggtgttctccctcactatgatctgcttgcacctgatccaggcttgacaaacaacatcatcatccagcagtggtttatatccatcatgaggttttccaaacatcartcattcaattatttccttcacaagttttgctccaactgtatataatttgctgtgttataattatgactttattgtataacatactctatgataaaagggatatattcttgttctgctagccactgtacgtgcagagattacaataataatcgtcatgtactgctcacttaggaaacattgttgaataagcaagtgaacagatgaagatatcactggatggaatctttcaaaattatgcactatatgcaaagcaatattattcaattctatctttattctgctgccttctgtaggatctgtcttagagatatgttgc

SEQ ID NO: 737246 - DNA, 581 bp, Homo sapiens
tcaacacaaaaagttgaaaactgtgcgatgaacgcatatatacctatacatccaaacattcctccattcgtctattaatctgcttgccttatcagatagatctcatatctattcttctgttcatccttctcttaacccatttttttttgaggtgttacraagatcagaacaaaagtacaacctcagatatagcaacaggcaaaaaaaccaacaaattttgaaaatttgtatttagttcttctgtatccctttgggataacattttcataaaatgaaatgcacaaaacttcagtgtacttattgtttcattttaaataaacattgcaataaaaataaattagctcataaacaccacaaaataaactttccaagtgttctgaagatgaaatcaatgacctgaatccagtgggagatagtgcaaaggaactcagaaaacactaagcattttcatttgtaaagaagggaaaaatctggcaaatcaagaggttttcagtgatatagggcagagcatctcattttaacaggctgagtttgaatgagtttaccactatgattggtagaatcactgattatcctttcag

SEQ ID NO: 737247 - DNA, 581 bp, Homo sapiens
tcaacacaaaaagttgaaaactgtgcgatgaacgcatatatacctatacatccaaacattcctccattcgtctattaatctgcttgccttatcagatagatctcatatctattcttctgttcatccttctcttaacccatttttttttgaggtgttacgaagatcagaacaaaagtacaacctcagatatagcarcaggcaaaaaaaccaacaaattttgaaaatttgtatttagttcttctgtatccctttgggataacattttcataaaatgaaatgcacaaaacttcagtgtacttattgtttcattttaaataaacattgcaataaaaataaattagctcataaacaccacaaaataaactttccaagtgttctgaagatgaaatcaatgacctgaatccagtgggagatagtgcaaaggaactcagaaaacactaagcattttcatttgtaaagaagggaaaaatctggcaaatcaagaggttttcagtgatatagggcagagcatctcattttaacaggctgagtttgaatgagtttaccactatgattggtagaatcactgattatcctttcag

SEQ ID NO: 737248 - DNA, 613 bp, Homo sapiens
ctgggcaggactggctgcatagttttcagggcccagcacaaaacgaaaatgtggggattcttgttatgaaaattataggaattctggctgggtgcaggggctcacacctgtaatcccaatacttttggaggctgaggctggggagttgctttgagtccaggagtttgagaccagcctgggcaacatggcaaaactgcatctctacaaaaaaaaaaatgaataaattaaaaaawaaataaataaataaatcagccgggaatggtggtatacatctgtggtcctagttactcgggaggctaaggcaggaggaccgcttgagcctaggaggttgaggctgcagtgagccatgttcatgccactgcattgtagcctgggtgacagagaaagaccttgtctcaaaaaaaaaaaaaaaaaaaaattataggaatttcaaaatgccagcatcacagtggggtcgtctaattatggggccttgtgcagttaccccaggcagcatagcaggaagcctggaagagctttgctgcaggattcagatcccagaccatggtgcccatgagtttcaagatcttgtaacatgaaggcgtgtcttcaacagactctctccaaagaaatc

SEQ ID NO: 737249 - DNA, 658 bp, Homo sapiens
cctgggttcaggccattctcctgcctcagcctcctgaggagctgggattacgggcactggccatcacacctggctaattttttttttttttgtatttttagtaaagacggagtttcgccatgttggccagcctggtcttgaactcctgacctcatgccatctacctgcctyggcctcccaaagtactgtgattacaggcgtgagccaccatgcctggcctatttttaaatatttttaatgcaatatttgaaacacacaaataatatatatataacatgtaagttatcaaacatatcaacaaaatgaagacccataaaatcattgctgtcttagtccatttgtgtgctataaaggaatacttgagactgggcactttattttaaaaagcggtttatttggtgtatggttctgcagtctgtacaagaagcctgacactgcatctgcttctggtggggcctcaagctgtttccacttagggcagaaggggaagtggagggactgtgtgcacagatgacgtggtgagagaggaagcgagagagagaggaggagatgccaggctcttttcagcactagttctcctgggactaagaatgagaacttttttttttttgagacaggatatccctttgttgcccaggctggagggcagtggcatgat

SEQ ID NO: 737250 - DNA, 658 bp, Homo sapiens
cctgggttcaggccattctcctgcctcagcctcctgaggagctgggattacgggcactggccatcacacctggctaattttttttttttttgtatttttagtaaagacggagtttcgccatgttggccagcctggtcttgaactcctgacctcatgccatctacctgcctcggcctcccaaagtactgkgattacaggcgtgagccaccatgcctggcctatttttaaatatttttaatgcaatatttgaaacacacaaataatatatatataacatgtaagttatcaaacatatcaacaaaatgaagacccataaaatcattgctgtcttagtccatttgtgtgctataaaggaatacttgagactgggcactttattttaaaaagcggtttatttggtgtatggttctgcagtctgtacaagaagcctgacactgcatctgcttctggtggggcctcaagctgtttccacttagggcagaaggggaagtggagggactgtgtgcacagatgacgtggtgagagaggaagcgagagagagaggaggagatgccaggctcttttcagcactagttctcctgggactaagaatgagaacttttttttttttgagacaggatatccctttgttgcccaggctggagggcagtggcatgat

SEQ ID NO: 737251 - DNA, 567 bp, Homo sapiens
ggtggtgatctaaatgtagtgtttttgaaggttatctgcccctttcccctgtgagcttttaagtcttctctgtctttgatgttctgtggtttcactgcaatatgtctagctatgaatttctttgcattcatcttgcttatatatgctgtgcttggacctgaagattttatgtgtgtgttagtgtatatgatgatctatctatctrtctatctcatcatgcctcacttaacaatcgggatatgttctgagaaatgagtcattaggtgatttcatcattgtgtgcatatcatagtgtccttatacaaacctagatagtgtagcctcctacacacctaggctatatggtatagcctatggctcctaggctacatgactgtacagcatgttactctactgaatactataggcagttggaacacaatggtaaacctttgtctgcctaaacatatctaaacatagaaaaggtccaataaaaatacagtattacaattttgtggagccactgatgtatgcagtctgttgaccaaaatgttatgtggtacgtgactgtattttaccatttttaca

SEQ ID NO: 737252 - DNA, 605 bp, Homo sapiens
tgatgctgggaaaactggataaccacatgcaaaagaatgaaataggatccttatctaacaccatacatgaaaatcaactaaaaaaggactaaagacttacaagtaaaacccgaaactgtaaaactcctagaagaaaacataggggaaacacttcatgatgttggtcttgccaatgatttcgtgaatatgacaccaaaagcacagacaacaacaacaaaaataaatgatgagaactatgtaaaacgaaaaagtgtctgcacagcaaatgaaacaatcgmgttaaaagacaacccacaaaatgggaaaaattatttgtagaccatctatataataaggagttaatttctaaaatatataaggaatttctacaactcaatagcaaaaaaaaaactctaacaatctgattaaaaagtgggctaaggactttaatagatgtttctctaaagaagatattaagtaggtttctaaaatcgtgatgtgtttttcatttgatgtgtgcatttaattgacgctcattactccatcaaaagcatcctgaaatcaaggaaacagtacttattagacagaatgtttcagtgatcgatttctgcctattaaaccacccc

SEQ ID NO: 737253 - DNA, 591 bp, Homo sapiens
gggggcggtgggggctgtcttgcgcattgtaggatgtttaagcattcctagcctctacccagtaggtggcagtagtgacccccccaatatgacaattaaaatccccagaattgccacatgtcccttgaaaagcacaatcatccctggttaagtgcaactgtaggaggcttgggagctcagaagagacacggaacccagaaaagcttgccactttgatacctgagtgaaggttgggaggctggttgcagaagccaagagaaggagtagggaaaggccatttctgttacgtggagtagccggggttggtggacctgcacagggtgggggcatgaatgttgagagatgaagccagagatgcaggcagagccaggycttgtgccacagaccttgcatgaatgtgactctgtagatccctaccttcagcgtgtctgagaaaagacacttgttcaacacgtgaattcttgggaccccttccagggggttaaatccgggaatctcaatttaatttcctggagggagtcccgagaatctgcatgtggaatgaacctgaactcattaattccctggcaggggtctgcaaggatctgaatg

SEQ ID NO: 737254 - DNA, 562 bp, Homo sapiens
tcagatcaattgcgtctgaatctctgggggtggggccctggaaacagtattttatttttgctgattcttacaggtactcatatattcacacactggcacttacttattcagtagccttttgtgccatgctcaaagcactgggaatatagaagtgaatgcgccayaggctctgctctcattgaaattacctttactgttgtggtagacaataagcgaataaacacgtattaaatcagtgtatttatttatgaagaaatatatgaagccatattgaacaatgaggaagtgataggaatgggaggtttatttttttaaaaatataagttttattcagatacataattcacattccatacaattcacccatttaaagtacacaatttaatagtttgtcgtatattcacagaattgtgcaaccatcaccacaatcgactttttttattttttagagacagggtctcacattgtcacccaggctggagtgcagtgatgagatcatggctcactgccgcttcaaattcctaggctcaaaggatcctcctgcctcagcctcctgagtagt

SEQ ID NO: 737255 - DNA, 562 bp, Homo sapiens
tcagatcaattgcgtctgaatctctgggggtggggccctggaaacagtattttatttttgctgattcttacaggtactcatatattcacacactggcacttacttattcagtagccttttgtgccatgctcaaagcactgggaatatagaagtgaatgcgccacaggctctgctctcattgaaattacctttactgttgtggtagacaataagcgaataaacacgtattaaatcagtgtatttatttatgaagaaatatatgaagccatattgaacaatgaggaagtgatwggaatgggaggtttatttttttaaaaatataagttttattcagatacataattcacattccatacaattcacccatttaaagtacacaatttaatagtttgtcgtatattcacagaattgtgcaaccatcaccacaatcgactttttttattttttagagacagggtctcacattgtcacccaggctggagtgcagtgatgagatcatggctcactgccgcttcaaattcctaggctcaaaggatcctcctgcctcagcctcctgagtagt

SEQ ID NO: 737256 - DNA, 541 bp, Homo sapiens
gaactctgattgctaaatgcaggtgggtacatcacagagacccgttgtgttgaccagagaccactttgagggggctcattcctgcaaaccatccagataaatgggggcacatgtcaccatcatttttgtatgagagaaagtaggaatggtttgtcaagatctgccaaaattaaaaacacgcarcaattccacttcttggaatccatcctatggaaatattcatatatgtgcagaataatatatgttcaaggtgttcattgcagtatgttttgtgatagagaaaatgtgggataacctaaatattcatcaactagggagtggctaaattatggtatatccgtactactgggcgccatgtagctgttaaaaagataagataaattgataagtggcaacatggaaatatctcccaaacacaccaactttacataaactatgtgtgtgcatctatatacgtgtgtgtatctatctatctatctgtctgtctatctacctatctatctatctatatttgactcttgaacaatacagatgtgaactg

SEQ ID NO: 737257 - DNA, 429 bp, Homo sapiens
gggttatctggttatctcatttaatcatcacaaccacgggaggggaagctcctggggttaagtgtctcgcccaaggttgcagctggtggggaatagtctggttgcaaacccagagaccacacttttaactgctatggaatgttgtctcccgtggctgtttctgaggagayagaaaaacatgccaattagggccaaaaaaacgggaggtggcctcaagggcagtgcattacattaagagtgtttgcaaaggcgtgggtgtttctccacccgcgagtcgctgctgacttcccgacacctacatgcagggtcaccctgcagcttctgagcacctggccggctccccccagcaatgtgtgtttgatgttatcagtgggtttgaggcatggctgaggccccaggaatctttctctttcatggagaagccaagct

SEQ ID NO: 737258 - DNA, 640 bp, Homo sapiens
aaatatattatagactaaagtttcttagaaaatagtgtatgtgccttttcatttactttaagaagaaactaaaggacattttaaattggtgtgtgcatgtgtgttggccggtttgcttataatgatgtttaaattttttacatctctctcaatgctgttcttaaataatatatcactagccttaatgagaaattattaatgcagtgtctttgagaaaatttcaaacatattaaataggarccttctttgaaatggctgactataagtacaaaacaagacatatcagtatgatatgcaaaaagtattatgcctccttcttttgacttcttcttctctgtttacctgacttacaaagaagtcagatgttgagatgaccttaaactttttctttaaatttaaattaaatttaaggatttttttttaaattctggcaggaaatgaataataggacttcccaccttagatagaagttgatgcttctttcagagctttttaaaacacttcatactattttacaaaaatcttggacttggtatttagccaaaagtgtatttctttttatcttgtgaatgaggtacatctcaatggaaatttgatgtggatgttttaggcccattagcatttttttttcagtcatatc

SEQ ID NO: 737259 - DNA, 452 bp, Homo sapiens
ctgggtagttcaaactgggtggagcccaccgcagccagcaaagccactgtagtcagactgcctctctagattcctcctctctgggcatctctgaaaaaaaggcagcagccccagtcaggggcttatagataaaactcccatctccctgggacggagcacctaggggaaggggtggctgtgggtgcarcttcagtggacttaaacattcctgcttgccagctctgaagagagcagaggatctcccagcacagcactttagctttgctaagggacagactacctcaagtgggttctgatccccatgacttctgactgggagatacctccccaaatgaaagttccccagggctgctgccatgggctgcagtcagtacttgtttcccctccttgatctggggaactatttcttcattccaaaagggcagagctctggcagtagtgtccttcagact

SEQ ID NO: 737260 - DNA, 560 bp, Homo sapiens
aattatgaaaccctgagacgatttaacattcttactttataatgaatttctcttctggttctagttcatcacacctatgaaaacacgtctgcccaagtagctcatctactgggaaataatatattgacctgctaatctagacacttcagccctttcattaaggtttaatasagtgctctctgtgagtggtggttattgtgaatccccagcttccagacaatgtgtgtgtgccaacaattcatgcttcaagtttgaaggctggaccgtggactttaaggcatccaaacaagcaaatgccaccctgaatgaatgtttatcggtagccttctctgggtgatgtacacaccctgctctcagaaggcatgcagctgctggtgttagaatttggtcgggaaaaggatcattcacctagtgccaacaaatgaaaatgaaataaaatttttacagattatagatgatcaataaactgggtagtcttccctcaaatatagtaaattacattttattaagtttctgcttactaaaatgcaatttcattttagcctgagatattcccatag

SEQ ID NO: 737261 - DNA, 560 bp, Homo sapiens
aattatgaaaccctgagacgatttaacattcttactttataatgaatttctcttctggttctagttcatcacacctatgaaaacacgtctgcccaagtagctcatctactgggaaataatatattgacctgctaatctagacacttcagccctttcattaaggtttaatacagtgctctctgtgagtggtggttattgtgaatccccagcttccagacaatgtgtgtgtgccaacaattcatgcttcaagtttgaaggctggaccgtggactttaaggcatccaaacaagcaaatgccaccctgaatgaatgtttatcrgtagccttctctgggtgatgtacacaccctgctctcagaaggcatgcagctgctggtgttagaatttggtcgggaaaaggatcattcacctagtgccaacaaatgaaaatgaaataaaatttttacagattatagatgatcaataaactgggtagtcttccctcaaatatagtaaattacattttattaagtttctgcttactaaaatgcaatttcattttagcctgagatattcccatag

SEQ ID NO: 737262 - DNA, 632 bp, Homo sapiens
ctaatccaataaaattagaacgtgagattctccaaagattccaagtgtcttaaggcactgaaaatacagacatgatgttttcatataattctacacagttattattacaaagtgatttattttaactttagattagggaaaagaaaatttgtatgtaatttagttttaaaataatatatgttaaaaataatttaaataataaattaaattgaatccttaaaagaataattgcagatttggaagaaaaaagctttatccaagactgtggatactttaaggagtctgttagcttactttccctttactttcaatttgcaattgttggaaactatactggatatccaccactaaaacacaatcagctcttgcttagattaaaaatttctaaggcctttagctttgatttcagttttgcaatatgctgtaactgccaggacagtgacccctggtgaagacaaaggtttgagtatcagatcrcttgatatgattaagcacattcctgtttcattccacagataccaatattaagtcagacgtgaaactcccttttgatgcctatcactatgctctgactcgctgcacaacttaacctcttggtgactccagttccttgtttgcaagtggagatgaac

SEQ ID NO: 737263 - DNA, 596 bp, Homo sapiens
gggaaaaggctcggtgatccttgactcctaactaataagaattttgctttaggaaaactaggggttggagccagaatgcaaacagacagatgtggctggtaccctaacagccctcctgagctatgattatcctgactggtaggaaacacggtgggagaaacatatgtactgtggtgtcccatccatstcttctcagactcaagttagttctgacctccttagacaatgacctgtgcgcaaggaacttgagccattatcttagaaacattcaggcaaagaggccctcacctgaggacttgtggaaagaggtagaaaggaacactgtctcttgtattttgcaactaataggccacttgatggggaaggtgggcttgttttctattttcttaagatgatactttaaaatcaagaacacgatgcggaaaataaaggggttttgacatcagaaaatggatgggttttacattggccatgtgtagttctacccactcagtcttgtctaatgaaggcctctactgtgggtttatgtgtggtgtgaagtcaggagcttccaaggaagctgaatgaacagagagatcatgtggagagaagcggaa

SEQ ID NO: 737264 - DNA, 626 bp, Homo sapiens
ctgcggctgcacctaatcattgcttttgtttgcttgttttttgagatggagtcttgctctgttgccccagctggagtgcagaggcgcaatcttggctctctgcaacatctgccttccaggttcaagctattctcttgcctcagcctcctgagtagctgggactacaggtgtacaccaccatgcctggccaatttttgtatttttagtagagacggggtttcaccatgttggccaggctggtctcraactcctgaactcaagtgatcagcccgccttggcctcccaaagtgctgggattacaggtatgagctagcatgcctggcttaatcattgctttttgaaagactttcttgataaccttgttttcatttccccatctgtaagaaagagatttgggtttggagccctggaagagttaagctggtttgcttgagcatcttcagaaaacaggaagagacctaggccagtctcagggtgtgatcccctgactcactgggtcaaaagcacacaatcctcagcccttctcatctcctaacatcccagcagtgatttgtcttgcagtcattctgcattagtaacctaaaaaaatagagtccttatttatgagtgctatttttaaaatttgc

SEQ ID NO: 737265 - DNA, 459 bp, Homo sapiens
gtctaaaaaaaaaagaatcagtgttgcttggagaaatgtctgattccaggattgggagaggaaaagtgcaagttgaggctagaaaatctcattgtatcaaaatgtgtggacatgctcaaagattcaagaggacatgccaaaaggatatgagccagattgtagggggctcccactggccaaaacagagaaaatttgagcattgaaataactatagcaaaggattatagcatattgattaaaacaagaattcatgaattcatagtgaaataaataaatgagaagggaaagttcttccttwcagtagaaaggcaactcataaatatagaggaaatgaaggaattagaaaatcagcatttggtagccatcctaattataactaattgaagcaagaagcaagatactaaaactggtaagcaaaataatgtgtgtgaggcataataggatatttacatattctca

SEQ ID NO: 737266 - DNA, 576 bp, Homo sapiens
cttctcacagctccactaggcagtgccccagtggggactctgtgtgggggctccaaccccacatttcccctctacactgtcttaggtagatgttctccatgagggctccacccttgcagcaggcttctacttgcccatccaggcatttccatacatcttctgaaatttaggtggaggctcccaagcctcaactcttgcactttgtgcacccacaggcttaatatcatgtggaagctgccaaggcttatggcttgcaccctctgtagcagcagcccaagctttactagggctcatttgagtcacagctagagctggagcagctgggatgcagggagcagtgtcccaatgccatgcaaggcagtggggccttgggcctggcccacaaaacattcattcctcttaggcctctggggctgtgatgatagggrttgttgtgaaggtctctgaaatgccttcaagacctttttccccagtgttttggttatcagcacttggctcctttttacttatgcaaatgtctccagcctgcttgaattcctccccagaaaatgggcttttcttttctactacatggtc

SEQ ID NO: 737267 - DNA, 554 bp, Homo sapiens
ttgaggtataacattaggttgtttggaatcttcttgtttgatgtaggcaattattaccatcaacttttctctcagaactgcttttactgcatcccatgagttttagtatcatgtttttccatttttgtttttcttaagatatttttaagtttctctttcatttcttctttgaacaattagttgttcaggaacatgtttaatttccacaaattcatgaagtttccattatttcttttattgctttctaattcataccactgtggttggaaaagatacttgatatgattttaattttcttaaaatttttaacacttgttttatctcccaaaatatgatccattctggggaatctttcctgtgtgcttaaaaagaatgtgtattytactgctattggatgagatgttctatatatgtctgttaggtccatttcatctaaagtatagtttaagtccagtatttccttattgacttactgtctggataatctgtccactgttgaaaatagggtgttgaagtcctttactattattgtattgcaacatatttctctcttg

SEQ ID NO: 737268 - DNA, 481 bp, Homo sapiens
aaagcttgtaagtaggactgcacagacttggttttggttcagcatttggcaataatcagtctttctgcttcagccttcagagagcccacttcatcattctttctggcatccctgtgatcatatgattacatatctaatcagtgtaacaacawcagctacttaaagaaggcatgtcattaaagatattgttaatatctctacattgcctttcaaacatatgtaagcattctaacttggagtgaaatcttcttaggtgctttatatgttgaaattctaccagtcagctgaggaagaaatgtatacggcttatccccaaaataagatattccaacaaataatgtttatgagagctgttaatttatgttaaaaaaaaagctattaataaaatgtttaagtaattaaatttgggagcttgaatggcagtaggaatattaagaggattagctagataactaatgtagaaaataatataattgtattg

SEQ ID NO: 737269 - DNA, 481 bp, Homo sapiens
aaagcttgtaagtaggactgcacagacttggttttggttcagcatttggcaataatcagtctttctgcttcagccttcagagagcccacttcatcattctttctggcatccctgtgatcatatgattacatatctaatcagtgtaacaacatcagctacttaaagaaggcatgycattaaagatattgttaatatctctacattgcctttcaaacatatgtaagcattctaacttggagtgaaatcttcttaggtgctttatatgttgaaattctaccagtcagctgaggaagaaatgtatacggcttatccccaaaataagatattccaacaaataatgtttatgagagctgttaatttatgttaaaaaaaaagctattaataaaatgtttaagtaattaaatttgggagcttgaatggcagtaggaatattaagaggattagctagataactaatgtagaaaataatataattgtattg

SEQ ID NO: 737270 - DNA, 597 bp, Homo sapiens
acttaaaatttattatattgtagttctggagatcataaatgcaaaatagatttcactaggctaaaatcaaggtgttggcaaggctgcattccttctggaagttctggggagagaatctatttccttcacttttccactttctaggagccrcctgcattccttgacccatggtccctttttccaccttcaaatccagcagtgtagcatcttctgatccctttgtctaaccatgacccttttgccttcctcttatgagaacccttctgatgacattgggcccactcagataatcccagacaatctccccatttgaagttctttaatcacatctgtgcaatctcttttgtcatataaggtaatatattacaggttctggggattagaacatggacatctttgggaaggcattttctgcctagcacatcatactttctcttctgcctttcttcaatctcctttgctttccaatggataaatccaatctaacaagggagcctgcagatgcagtccatgggagttcctcttttggggcccatcatcatggagaaggacagaaaatggaagtggggtaggccattggagactaaccaatggaaa

SEQ ID NO: 737271 - DNA, 577 bp, Homo sapiens
ttatttcttatccaggatttgaatagacacgccagtttatttaagcatcctgggacctgggtaaacatacagtgtgctgaaaaagggctacattttattcttcagtagccaaattcagacactgtttgggtttaaacagcagacactgttmaaatccagaaattttaagtttgaaagagtagataattttccttttttttaaatcttgtattttaggtttgggggtagatgtgaaggtttgttacataggtaaacttgtgccatgggggtttgttgtacagattatttcatcatccagatattaaacccagtacccaatagttaccttttctgcttctctccctcctcccaccttcaccctcaagtagaccccagggtctgtgtccttccttgtgttcatgagttctcatcatttatctcccacttgtaagtgagatcatgtggcatttggttttctgttcttgtgttagtttgctaaggataatagcctccagttccatccatgtccctgcaaaagacacgctctcattcttttttatggctgcatagtatttaccatttctattcaataattttc

SEQ ID NO: 737272 - DNA, 562 bp, Homo sapiens
acgtttgtcgagtttttaaactaggggactttactcttcagtttgtctgaatagtatacagctattgccctggaatgatgattaaatagtgcctccttttacttttgcaatattattgcttggattataaattatctggttatcttctggctctggaactgcacacttacaatgttgcctcaaccacttctgaatgcatctcagaggcaaagactgaggcttactcattattgcttctccaaatctatttctgtactccacctcttctagggtctgcatcaatgatccaaggaaaaaaaaacaaataatagagaaactcataataaactaaatcagattgaatacatctagaaaagaaacaaaagtgatccacatggagataaattargcaggcaaatattgacctgaatgttctcctaaatgtaaatgatacaaaagttgtctccttgtatttaaatccatacagcagtgaaatatcattgtcattgtcaaatatctctagatccctgagtttattcagcataatttcaaagttatttgcttgcagggagagatcaagaat

SEQ ID NO: 737273 - DNA, 563 bp, Homo sapiens
ttctccattcacacctgagataatctcattctagtgaagtcttacattataaatgacaacaccaatatttagggacgttcctcttttttcttcactgactttgcctttccaaacaatatactttgtgaatcctctgagaaaaaagaaagtagtttgatctgctggtttttaggacaataatttttaaaggacttgttatttttggtwcagacaccatgcaaaactcatcttcaatcaagggcaggtgccaggtacagcatcaagaaagtaacaggtggtttctcttcctctcctttcctctaaaacatgaataaaacaaaagttttagcatttcagaaataatctttttaattaaaagtggaagataaatgtgataaaagttttctttgagctcttgaaaacaagttcattctataagggttagaaatagtattttttatctgtcactagagccattgtactgtggggcctaatgtttcagattttggatactcatttctttcgattgaaggtgtcatcaggtgttttccacctttagtgatctcaagtggttccccttcagt

SEQ ID NO: 737274 - DNA, 563 bp, Homo sapiens
ttctccattcacacctgagataatctcattctagtgaagtcttacattataaatgacaacaccaatatttagggacgttcctcttttttcttcactgactttgcctttccaaacaatatactttgtgaatcctctgagaaaaaagaaagtagtttgatctgctggtttttaggacaataatttttaaaggacttgttatttttggttcagacaccatgcaaaactcatcttcaatcaagggcaggtgccrggtacagcatcaagaaagtaacaggtggtttctcttcctctcctttcctctaaaacatgaataaaacaaaagttttagcatttcagaaataatctttttaattaaaagtggaagataaatgtgataaaagttttctttgagctcttgaaaacaagttcattctataagggttagaaatagtattttttatctgtcactagagccattgtactgtggggcctaatgtttcagattttggatactcatttctttcgattgaaggtgtcatcaggtgttttccacctttagtgatctcaagtggttccccttcagt

SEQ ID NO: 737275 - DNA, 581 bp, Homo sapiens
cagaaataatctttttaattaaaagtggaagataaatgtgataaaagttttctttgagctcttgaaaacaagttcattctataagggttagaaatagtattttttatctgtcactagagccattgtactgtggggcctaatgtttcagattttggatactcatttctttcgattgaaggtgtcatcaggtgttttccacctttagtgatctcaagtggttccccttcagttgctaaaayatactgtgtcgtttgagcagtccaagacccacagagatctgctatctatattggcagataaatgacagcagatggaattgaggctgtgttctgtctcatcggcaagcctgcagccttagaagaagagatgtgcccctgaagcattatgcaggttgctcatccagaatcagtgtcactgtcatagtttgtgaaagggaaattggcaaatctctatacataataggcaaaatgcaaccctctcaattctcaaaggcatattctcttcactcacatttttgtctttttgctgaagggaggtttctgggccaagatgttctgacagcctggtattttctttttttg

SEQ ID NO: 737276 - DNA, 581 bp, Homo sapiens
cagaaataatctttttaattaaaagtggaagataaatgtgataaaagttttctttgagctcttgaaaacaagttcattctataagggttagaaatagtattttttatctgtcactagagccattgtactgtggggcctaatgtttcagattttggatactcatttctttcgattgaaggtgtcatcaggtgttttccacctttagtgatctcaagtggttccccttcagttgctaaaatatactgtgtcgtttgagcagtccaagacccacagagatctgctatctatattggcagataaatgacagcagatggaattgaggctgtgttctgtctcatyggcaagcctgcagccttagaagaagagatgtgcccctgaagcattatgcaggttgctcatccagaatcagtgtcactgtcatagtttgtgaaagggaaattggcaaatctctatacataataggcaaaatgcaaccctctcaattctcaaaggcatattctcttcactcacatttttgtctttttgctgaagggaggtttctgggccaagatgttctgacagcctggtattttctttttttg

SEQ ID NO: 737277 - DNA, 581 bp, Homo sapiens
cagaaataatctttttaattaaaagtggaagataaatgtgataaaagttttctttgagctcttgaaaacaagttcattctataagggttagaaatagtattttttatctgtcactagagccattgtactgtggggcctaatgtttcagattttggatactcatttctttcgattgaaggtgtcatcaggtgttttccacctttagtgatctcaagtggttccccttcagttgctaaaatatactgtgtcgtttgagcagtccaagacccacagagatctgctatctatattggcagataaatgacagcagatggaattgaggctgtgttctgtctcatcggcaagcctgcagccttagaagaagagatgtgcccctgaagcattatgcaggttgctcatccagaatcagwgtcactgtcatagtttgtgaaagggaaattggcaaatctctatacataataggcaaaatgcaaccctctcaattctcaaaggcatattctcttcactcacatttttgtctttttgctgaagggaggtttctgggccaagatgttctgacagcctggtattttctttttttg

SEQ ID NO: 737278 - DNA, 626 bp, Homo sapiens
ttgcaacccacttgccgtgcagacatgtcagaacacagatctgtagtatctatattcatcactgccaggcgtattaaaatagaggcagaatgtcagtggcaggagttggcatgtgtacgaaatgtttaagcgccctacatgattctgatctgccccactaggtcaaaaatcactcayctattcccatcacggtagttcactcagcggttcactgtctcacttagtgcttaattgcgggatgttttcataggtccactggcacctaactaggttcagactgttttaagtctctcccaatctacaaatggttatctcctgcctattcataggcacctgcacaccagcagcctaaagacagtggcctaaactagttaaactagttgattcttcataactgtttgcttttgatcaaaaagggcagcaagaaaagggccagtggttccactgggaggaaagccatgtgggacaaattaggtgccgctgcaagatttaaaagctcgggggtggggatggggggggaagcagagctaactagaggcagctgttaggatgtggtttctgtgtttatattcttctccttccccctaatgcctcttatgggtattaggaaggaaagcatatatatg

SEQ ID NO: 737279 - DNA, 632 bp, Homo sapiens
aattccaggataatggcacacacagcaccagtcaggccctggcctgtgttgcaggcacacctccgatacattttgacctgcatgccaactgcagaacctaaacccaggcaggggtcactccccagcagggtgctgaggttcaaagagctcgaaggaaatacctgcctgggaagacaggtgacaggtgactgagttcctctccagaactttccagacaataatcaggctgtgtgtcaaattcaccaagatttagctccagacccagctgatctgcagccaggatgctattgggagcatcactgcttccgtctttgacccatctttccacgtggccccccagacagagagcacttccaacctatgcataawaatacaggggaaaggccaggtgcagtggctcatgcctgtaatcccagtactttgggagaccgaggccattggatcacttgaggtcaggagttcgagaccagcctggccaacgtggcgaaaccccgcctctactaaaaatataaaagttagctgggcatggtggtgggcacctgtaatcccaactactcaggaagccaaggcaggagaatcacttgaacccaggaggtggaggctgcagtgagccaagatcatgccagttatac

SEQ ID NO: 737280 - DNA, 632 bp, Homo sapiens
aattccaggataatggcacacacagcaccagtcaggccctggcctgtgttgcaggcacacctccgatacattttgacctgcatgccaactgcagaacctaaacccaggcaggggtcactccccagcagggtgctgaggttcaaagagctcgaaggaaatacctgcctgggaagacaggtgacaggtgactgagttcctctccagaactttccagacaataatcaggctgtgtgtcaaattcaccaagatttagctccagacccagctgatctgcagccaggatgctattgggagcatcactgcttccgtctttgacccatctttccacgtggccccccagacagagagcacttccaacctatgcataaaaatacaggggraaggccaggtgcagtggctcatgcctgtaatcccagtactttgggagaccgaggccattggatcacttgaggtcaggagttcgagaccagcctggccaacgtggcgaaaccccgcctctactaaaaatataaaagttagctgggcatggtggtgggcacctgtaatcccaactactcaggaagccaaggcaggagaatcacttgaacccaggaggtggaggctgcagtgagccaagatcatgccagttatac

SEQ ID NO: 737281 - DNA, 611 bp, Homo sapiens
aacattgaaaaactcatttacataaatttctaacaaactgcaattatgacctattggtcagttgggaaaacaaggtagtatgggtcttaccaacatacatttttaaaatagaatatattagaaaatatcagagtatatcaytatcatacttagcaagcataagggttattttgtgatacttctgtttcatttagcacgcatatatattgtaaaatatgtttcttactgtgagtctcagctgaatattaaaaacactgctttgtgtatattaactgaaatgttcaggcaatcctataagggctttattatttttattgttactattattatctgtagacaagagtaaactgaggctaaaaattttaaaagtcattcatttgctcctggtcacacagagaaaatggaagagccagatagggacttaggcagggtgactaacagttcatgctcttaaaactgttctctaattccatgagtatccttccttcccttccataactgctaattcataggtccatgggaggaggcctgccctcaaccatctatggatgaatctccaaaagaatttgctgttttgtttgctgacatgacacaaattaatctagttccct

SEQ ID NO: 737282 - DNA, 622 bp, Homo sapiens
aggtggatggctttgagcccaggagttcgagaccagtctaggcaacatggtgaaaccccatctccactaaaaatacaaaaattagctgggtgtggtggcaagtgcctgtagtctcagcttctcaggaggctgaggtggaaggatcacctgagcccagggaggtcaaggctgcagtgagccaaaatcgcaccactgcactccagcytgggtgacagtcagaccgtgtctcaaaaaaaaaaaaaaaaaaaaaaaaaaaaaaagaaagaaaagaaagttttgtcctactattcatgttaaagccaccagaagctgttggtggcttagaccattttaaaaatctaagtttattattggccaaaacatgtcacatgcttcaaattataaatgttactattatgatatatttcagtgaatccgaatacatttataaaccaaattactgaattaaacattaggattaaaatgagatccaacaaatatttcaccataatatgataccttaagttgttatatgtgatgattgactgcagataactttatccagatttcatagaattgttaaaggtcatgctgttagcaatagctcacctctacaaatggctaatgaaaattttctatttca

SEQ ID NO: 737283 - DNA, 609 bp, Homo sapiens
cccagaagcctccaaattaaccctggggaatgatttaactgtttacaccctacataatgtggcaggactactgtactctagaggaagcctttggctaacagatagccgactccttaaatatcaggccctactgttagagggttccaacatccaattaaagacttgttctagcctaaatccagccaccttcctccctgaagaaactagggaacctgagcataattgtgaacaagtcatagtacagacctatgcagccagggaggatttcaaggaaactcccctagagaatccagactggaccctcttcacagatgggagctctcttgtagagcatggatccacaaggcaggatacrcagtagtcactctaaatgacgtcattaaaagtgtgtctcttcctccaggcacaagcgctcaattagctgagctaatagctcttacaagagcaattgaattaagcaaaggaaaggtagctaatatttacactgactcccagtatgctttcctagttctccatgctcatgcagccatttggaaggaaaggcattttcttaccaccaatggatctcctataaaacatcaccaggaaattaaaaggttactttcctca

SEQ ID NO: 737284 - DNA, 583 bp, Homo sapiens
ttgggaaacagagctaatttggattcatgaattctgtaaacaagtatttcttgagaagctcctggttgtgaactacctagaatgaaactgggtaaactaatatcaacatccattcttttgccaaacatcactgataaactgcaacatttttttttttacgtgagtggtcttggaatcagacatttctgcattgaaaacccagcactgttgctgactggctgcatggcctgcatctacttctcacatttctgactgcctaccaggttccaggcactgttctaggcactgaagatgaaaagatgaataatatggagttcccatcttcaaagaagttacaattttaaggaagactggcaaataaaagttaccmcacaaaataataaaaatacaggggtaaaactagggcatagttatattttggctggtctctttacctctgaggttcttttgctttttatgtaattggattttaacctcagaagactgtaaggttaaagatgataatgtataaaatcagtactctgagtaatgatcaaaattttctgttgccatccacacatttgagtgagatgtagtgagtgct

SEQ ID NO: 737285 - DNA, 602 bp, Homo sapiens
ttactgagttacttacactaatgttgaggtatttgggttcagagaaaaataggcaagtaaaggaaaattgaaaatagtttcaaattctgagatgcaaagaagaacccaaaaaaactaaacaaccagttttttattgccataggtcgaatgttcctttttaaaaaaatccctcatccttttctctcctctttcaatcatatcccacaaacgttaatgctcattaatactctgtctagctatagcattatccacatttttgcaatrgctcaaaaatgtctccaagccataactgctgcaactgcttataacttgatggactattaggtgacgtttccagttgtttgagaagtaccagcctataaacatacccaagacaatatattacaactagggattatgttgtgtaaaatttatacatatatatctctccatatatgatttcaaggatagataatctagagtctacataatcaggctattggctggaaacataaataaactaaaaaaaaataatttaaaaaaagcactccaggtttctaattcagcttctggagtgttaatgttttgtgtgaccttctgaaagctctttgagtttttaccac

SEQ ID NO: 737286 - DNA, 577 bp, Homo sapiens
atgagccaggacatggctacgtgaacagcaccacagccaaacctgatgggcatttggccgcagctgcagggaggacacgaggccctgcattgcctcaggcctgcttgtgattccaagtggtgaagccccatcactggtaaagaggagtgggacgggctcagccgctctcacctgctcagccagaggcaggcccktggcttgggggaaattcctgggcggggaggaaactgaccaacagctgagttacgcacacacagcggttcctgtttgagctgcctgacttgggttttaaatatagcctattaaggcaattagcgaattggttccaaagtttatctcctctgattcccaaagataaaagaaggcataatttattttatctttaggtaaaaagtgtagacgatttgggaccatctggttttaaaaaaataatctgacctagacacaaatgaacaaaacaaaaacggttttggagagaaattggtgttcctgaccctccccttttttgtgtggcgtatctaagcttcattgcaaaaaaaaaaaaaaaggtgtttaataattacccttattgacctct

SEQ ID NO: 737287 - DNA, 584 bp, Homo sapiens
atctgtagtgtgttattaaaaggtgtgtttatcaccaagggttgaaaagtactcaaaccagaacgtttagcaccaagataaacaaagagaaaactgatttctcagggcttgacatgaacggtccacttccaccaaggctgaattcctaagtgggtgatggtgtccctcactgccctcagaacctacaacccctcggagagtgggcgctctwtgccttacccttggggaagtggctgtcctcttcacagtcttcccagtgatcaaaatcaaaagccacgttggggttctgttcaagagaacagctgacagtgagcgcgtgaatatgacacacgcagggtaaagaccacccgctgagtgcatcccaactcaccctctgtctgagtaggtgacaccatgcctcccttctctctttggccagagtgattacaggttcatcgtttctaatcacacattggcagtcatctttccttatgttgccccgcagctccagatcagccaggtaaaatttgtctcccacccaagcactgggtttataaaaagaaataaagtcagccttttaaaatgctaaaaattatttctatttt

SEQ ID NO: 737288 - DNA, 584 bp, Homo sapiens
atctgtagtgtgttattaaaaggtgtgtttatcaccaagggttgaaaagtactcaaaccagaacgtttagcaccaagataaacaaagagaaaactgatttctcagggcttgacatgaacggtccacttccaccaaggctgaattcctaagtgggtgatggtgtccctcactgccctcagaacctacaacccctcggagagtgggcgctctatgccttacccttggggaagtggctgtcctcttcacagtcttcccagtgatcaaaatcaaaagccacgttggggttctgttcaagagaacagctgacagtgagcgcgtgaatatgacacacrcagggtaaagaccacccgctgagtgcatcccaactcaccctctgtctgagtaggtgacaccatgcctcccttctctctttggccagagtgattacaggttcatcgtttctaatcacacattggcagtcatctttccttatgttgccccgcagctccagatcagccaggtaaaatttgtctcccacccaagcactgggtttataaaaagaaataaagtcagccttttaaaatgctaaaaattatttctatttt

SEQ ID NO: 737289 - DNA, 659 bp, Homo sapiens
gtctttgcagaggtagtgaagtctgcagactgggagatggctctgggttatctaggtgggccctccctccaatgaaacgtcctttacaaggggcacagagaagaggaggtcatgtgaagatgcaggtggagagagagtgacagtggctgctggcggagatgcaaggacgccaggcgagccacaggccaggtcaccttctggaggctgtggaggggcatggccctgctgacaccctgacatccaggaacatgtcagaagaaatgtgtgtggctttaagtcactaacttggtggtaatcttttacagcagcctaggaaattaacacaacagatacygctctaagggaaacagatgaaagggagagaaattgtatgctcaaaaagaaatgaataaattaataaaaaaggattagaaagaaaataaaaaaattcttaacttggcaattctatctgcaccttattacagaattttcctcaaagaaattatcatgaatgtcttgaaaagattcatgtaatcactgtatcattattttttaaaaaatctgtttgtagagacaagatctcactatgttgcccaggctggtcttgaactcctggcctcaagtgatctgctcacctcagtctcccaaaatgatgagattacaggtgtgagccactgtgc

SEQ ID NO: 737290 - DNA, 548 bp, Homo sapiens
aatgatattttaaataaacgatgctggagcaaaccattatccatatggaaaaatcaaaccttgccccagatctcatattacacacatattttttttttcttttttcttttttttggacatagggtctcattctatcacccaggctggagtgcagtggcacaatcacgtctcactgaatccttgacttcccaggctcaagcgatccccctacccaaggctcctgagtagctgggactacagacatgtgccaccacagctggcttatatatatatatrtgtgtgtgtgtgtgtgtgtgtgtatatatatattatatatgttatatatataatatataacatatataatacacatatatatattttaaagagacggggtctctgtgtgttgcccaggctggtcttgaactcctgagctcaagtgatcctcccacttcagcctcccaaagcgctgggattataggtgtgagccaccatacctggtcatacatacaaactaatttaatatgaattataagtgtaactgtgaaagctaaaactacaaagcttct

SEQ ID NO: 737291 - DNA, 676 bp, Homo sapiens
gtatgaacatcatggagtatacttacacaacctagatggtatagcctcctgcaaacctaggctatatggcacagcctattgttcccaggctacaaacctgtacagcatgttactgtactgactaccataggcaactgtaacacagtagtaagactttgtgtatctaaacatatctaaacacagaaaagatacagtgaaaatgcagtatataaagattaaaaatgggccaggcgcggtggaatcccagcagtttgggaggccaaggtgggcggatcacgaggtcaggagatcgagaccatcctggctaacacggtgaaaccccatctctactaaaaatacaaaaaattagccaggcstggtagcacacgcctgtagtcccagctacttgggaggctgaggcaggagaattgcttgaacccgggaggcggagcttgcattgagctgagattgcgccactgtactccatcctgggcaacagagtgagactccgtctcaaaaataaataaataaatacgattaaaattggtatacctatatatatattttgtgtgtgtgtgtggtggtgagtgaatatgaagggttaggacgttagtgtactctactgttgactataaacaccgtacacttaggctacactaaatttataaaaacatttttcttttttcagtaataaatt

SEQ ID NO: 737292 - DNA, 676 bp, Homo sapiens
gtatgaacatcatggagtatacttacacaacctagatggtatagcctcctgcaaacctaggctatatggcacagcctattgttcccaggctacaaacctgtacagcatgttactgtactgactaccataggcaactgtaacacagtagtaagactttgtgtatctaaacatatctaaacacagaaaagatacagtgaaaatgcagtatataaagattaaaaatgggccaggcgcggtggaatcccagcagtttgggaggccaaggtgggcggatcacgaggtcaggagatcgagaccatcctggctaacacggtgaaaccccatctctactaaaaatacaaaaaattagccaggcgtggtagcacacgcctgtagtcccagctacttgggaggctgaggcaggagaattgcttgaacccgggaggcggagcttgcattgagctgagattgcgccactgtactccatcctrggcaacagagtgagactccgtctcaaaaataaataaataaatacgattaaaattggtatacctatatatatattttgtgtgtgtgtgtggtggtgagtgaatatgaagggttaggacgttagtgtactctactgttgactataaacaccgtacacttaggctacactaaatttataaaaacatttttcttttttcagtaataaatt

SEQ ID NO: 737293 - DNA, 598 bp, Homo sapiens
aatttattttaaaattggttttaaaggatattgttgcgacaactagggaagtatagagataatatattttattgtacgaatgtttaatatctttggtgtgataatggcattgtgtttatgtaggaggcttcttagtttttggaggtacattctgaaagagttaacgtgaagtttgtgtatatgtttttagagaaggaaagagaggtagaaaaatgtggcaatgctgaatatagattaagggttttagaagtattctttgtactgatcttccaacatttttgtagtttgagttttgtgttttttgttttttgtttttttttttttgagacggtgtctccctctgttgcccaggctggagtgcartggcgcgatctagactcactgcaacctccgcctcctgggttcaagcgattctcctgcctcagcctcctgagtagctaggattacaggcgcctgccaccatgcccagctaattttttgtatttttaggagaggtgaggtttcactatgttggcgaggccaatctcgaactcctgaccttgtgatccgcccacctcagcctcccaaagtgctgggattacaggtgtgagccactgtg

SEQ ID NO: 737294 - DNA, 601 bp, Homo sapiens
aacaaattgatatggctggaagtaagttctttgcagtggaaagaaaaataacatttgttatgaatataacatttagtttgtgaatttatttctaaagtatttcctcaattagcttaaagttgagttcctccagtatactgaattcygtcttttctgaggccttaccaattgctactgctttgcttgtaatgctttcccactcccactccatcctagctaatttacttgactttaaactgttatcctaatcctaactttatttgcaaggtatttttgagccccatgacaaaataaactgaaggacttctcaaaagtttattgtaatgaggggactttgggtttctccttagggatgtaaacagctggaaagaactttgcttcaatcattacaacaaggaaactacaaacttctaccgtacaacaaggaaatggacaaactacaaaataatttttctaggacccttcagagaactgaggtcacagggcaaccaagtaatcttaaatctggggaaagaaagatgccagctgagagaaacaggactcaagctttacttacctgggatggactctgccagacaccatataagccagtaagaaaata

SEQ ID NO: 737295 - DNA, 516 bp, Homo sapiens
aacaagggatttaatcagggatgaagaaacataatgctcaaggggttagtaagaagagacaacaatcataaatgtgtatgcagctaacagagcttcaagatatacgaggcaaaaactgatagaactgaaaggagaaatagacacacgcacaattatagttggggacttaaaacttctctttcaggaatcratagagcgtgaaaggatatcagaaaggttacagaagactccaaaacggcattatcaaccaacattcatgtattgaatgtcaattttttcggtgttcaaatgtgagtgacatttatagaacattctaaacaacagcagaatacatgtcttcctcaagtgcgcatgggcattcacctacatagatcatatttggggccataatagaaatgtcaagaattttaaagacataaaagtcattcaaagtctgttctcagaacatagcagaataaaactagaagtaaagaacagaaaggtatctggaaaatctccaaatatttcaaaatgaaa

SEQ ID NO: 737296 - DNA, 564 bp, Homo sapiens
caaaacattatgctaaagaaagtagatacaaaaggttacatattgcatgattcaatttatatgaaatacctaaaataaataaatccatagagaaagaacacagattagtggttactagggaatagaggaaggggagaatgggggagaaagtgcttaattggtaagaggttttcctttggaatgatcgaagtgttttggaattagaagtggctattgcacaacactgtgaatgtactaaatgccactgaattgttcactttaaaatgattactttcatattatgtgatttttactcaataaattatataaaatgtgtaaatkgtctaaacatcccaataaacagagatcttcaggctgaattaaaaaaacacccaactatatgatgcccattttaactataaaggttatatttaaattacaaaggtcatatttaaattataataaataaggttatattaaaatataaataggttaaaagcaaaacaaaaaaaaagaaaaagatataccatgctaatgctaattttaaaaagctgaagtagaccaggtgctgtggctcacgcctgt

SEQ ID NO: 737297 - DNA, 588 bp, Homo sapiens
actgctgacaataatggtataacaacaataatggtgacttacatttacagaacacttaggacatgtcaaacactgttctgagtgctttagatatagtctttatttttttgtcacaatagctctatggagcagataatataattatcccattttacagacaagaaaactgaggcacagagtgattgagtaacttatctaaggtcacacagataaacaataasaggctgggatcggtggctcacacctataatcccagcactttgggattttaattacaaaaaattagctgggtgtgatggtgcacgcctgtaatcccagctactagagaggctgaggcaggaggattgcttgaacccgagggtggagtttgcaatgagccgagatcacgccactgcactccagcctgggcgacagagtgagaccccgtctccaaaaaaaaaaaaaaaaaaaagataaacaataacaatactttactgttatcatacactttctacaggcactgaaattggtgctttccaattatgatgtcctttgttctcataaaccctatcaccagaggaaatttgggcttagagagattaaatcctt

SEQ ID NO: 737298 - DNA, 662 bp, Homo sapiens
ctttctcttttgtttacttttggtttctttttatattttaagattttatcaaatattaagtaacccttctctgttttaaattcacatttatcaatagctaacagcattgcatatatcaccaattggcaaccttaattttaaaattagcaggtaggtgctgatatgctagggtctgcacttaccagttccagaatgcagagggctttatcttccatcattgtcactcatactagcaatccttttttttctaggtgtttgtttaacctttcaaattaaaaaactctccctttacccacactcactaagcctagtggacatccattctagatgtaaaatagggaagaggtgagatatggagggggtgagtaaagtggtaaatgtcttargttttgctaggcatgtaataatctctgccacaattacccagttctgcccttgtcatgcctaagcatacataaacaatatgtaaatgaatgaggcattaggcagctgaatggatttggcctgtgggtcataaattgccaactcatgactctgaagaaatgatacatttatgaggatctctggatactttagattattctgacttgtcattactatttatttaaaaaatgtaagaattggagataagtaaattatagacatgattctactacatatca

SEQ ID NO: 737299 - DNA, 612 bp, Homo sapiens
tatttttcagttacttgacatcatggatattaaaaaaaatttaacataaaacattggcatttggtaaaccttatttaaatagacaataggcaactttttggcttagttctttggatcattacatttaccacattataaagtggtattagtatcactgtggagacaaaaccgctgatagattatacaggggaaggaagacagtagaatatgggagggtaatggtgatgaacatttagactgaaaagttgttaggcttattgaggggataaagaggaagagtagaaatgtgtgcaaatgaaatactcattgtgtaatgtttaccgtaaactggtacmtaatgcatctctcaatttgtctggactataccttgttagtagcagaggctatctaggtaagaattagctgtgacagctgtcctgttgtttttcttttggcagggctatatacacctgatagctaacgaaatttaacttcctaacaagtgtttgcaaatctaatatacagtgccaaatttcctccttgttattaagtaaattaagattttaaaaatggttttattttttacagttcaaaataaaacattttaaaagtttcttgcaagactaaaattac

SEQ ID NO: 737300 - DNA, 531 bp, Homo sapiens
cacggtggctcacgcctgtaatctcagaactttgggaggccaatgcgggcagatcacaaggtcaggagatcaagaccatcctgggtaacacagtgaaaccccatctctactaaaaaatacaaaaaattagccaggcgtggcggtgggtgcctgtagtcccagctactcaggaggctgaggcaggagaatggcgtgaacccaggaggcggagcttgcagtgagccgagatcgcgccactgcactccagcctgggcgacagagcaagactccatccatctaaaaaaaaaaaatccaaaccgggtcttggagaatgcccttccagtcagagggaacagagtatgcacagacactggcagacatcaggagacccatgtgcctggaggrctgagtgtgccaagcagggatgcagaaagaggcgaggctgggaagggcatgcacgtcttgcaaagacatctgggctccatctcaccattgggagctgctaaagggtcttaggcaggcaatgacgtggcaagagctgcagttctgtat

SEQ ID NO: 737301 - DNA, 624 bp, Homo sapiens
catgcagcagtgtagtctctatatgatttctttaaccataaacatcatgagtggtatctgtaaattcctcagcatcttaggctgcagttgttagcagaggctacaatgaggctttgctggggataggggtgccatgtgagccagtccttgggtcccagtggtggcagcggcaggctgggtgtacctgtgcctcggcccctgggggggatacacagatgccagtagtggtgaacaaagtgaggtgaaccccagatcttcagagagcacgctttggtgctggyggcagttgttctgggcctgttttttgagatagagttttaccttttagcccaggctggagtgcaatggcacgatctcagcttactgcagcctctgactcctggattcaagggattctcctgcttcagcctcccaagtggctgggattacaagtatgcaccaccacacctggctaattttgaatttttagtagagatggggtttcaccatgttggtcaggctggtctcgaactcgtgacttcaggtgatccacccaccttggcctcccaaagtgctaggattacagccatgagccaccatgcccagcctgttctaggcctgttgttaggtctcctgatggtacat

SEQ ID NO: 737302 - DNA, 564 bp, Homo sapiens
ccttccctgattctttcactggggtgcgctgtctgcatgcgcagtagcctgccagcacttgcggggggccacgtgaacagtgtatttactgaagttgtgcacatgcttatttcaggtgtttttccgttaccaatckagtggtcctagaggaaggtcatataccaggtaaactccacccaccaggtgcggtggctcacacctgtaatcccagcactttgggaggccaaggtgggtggatcactgaggtcaggagttcaagaccagcctggccagcatggcaaaaccccatctctaccaaaaatacaaaattagtggggcatggtgacatgcgcctgtagtcctggctatttgggaggctgaggctcgagaatcacttgaacccaggacacagaggttgcagtgagctgagattgcgtcactgcactccagcctgggaaacagagcaagactctgtctaaaaacaagcaaacaaacaaaacctctaccgattgcctcttggtgcacatgcttgagctgacttgcccggctcctgagatcttatcaggaagctgccaatcaccagct

SEQ ID NO: 737303 - DNA, 542 bp, Homo sapiens
caatggttttaatccatttcagaggattcaggtcagagaacccatcaatggttccattaaagacatcagcaccaggtaagaaagttaagtgggcttgagatgcctcaaaaacttgttcctttaattttgctatatccagtgtgggttcacgccattctcctgcctcagcctcccaactagctgggactacaggcgcccgccaccacacctggctaattttttgtatttttagtasagactgggtttcaccatgttagccaggatggtctcaatctcctgacctagtgatccgcccgcctcggcctcccaaagtgctgggattacaggcgtgagccacctttccctctaaatggtgtttaaccttatcccaatgaggcacagaggcattataagattgaggagtaatgcaaaaatcagaagtattccaatcaccctgcatttgtattctatgctccaagttcataattcgatcccccatccaccgtactgtttgacaaagatcgttaatttgattagttaatttttgatcaatttgcgtctgt

SEQ ID NO: 737304 - DNA, 492 bp, Homo sapiens
ggaccagcactcagcatacggaggatccgcaccagccgaggtctctgagttccctcaatatttattgatcactatctctaccatctcagagagggggatgtggaaggactgtagggtaatggtggggagaaggtcagcaggaaatcatgtaagcaaagctctctgtgtcataaataagtttaaggaaagatgctgtacctcgatgtgcatgtagggtagatttatgtttgactttacacaaacatctcagtgcagtaaacagcagtattgccaccagcatgtctcacctacagccataaggcagttttctcctatctctgtaaacagaacatacgattgggttttacaccaagayattccattcccagggaggagcaggagacagaggccttcctcttatctcaactgcaaagagggctatctctttcactaaccgtcctcagcacagaccctttacgggtgtctggctgggggatggtcaggtctttccct

SEQ ID NO: 737305 - DNA, 552 bp, Homo sapiens
cattctacaaaatatttcaaacctggtatccaatgcaatcctcacaatactcctaatgtagagttagggtggtattatcttgatttgcagttgaggatacagacccagggaagaacttggtttaggtcaaacagctcgtgagtggcaaagcagctctggagacttccagagacttcccttgccacagtcctatgcttcccttctaactgtgggcaagcttctaaaaaattaatatctaagctgctgggaggactcatctttatgttttttttccagatgaattmgtggcagtatgtcttcttcaaaaaattatggatgaaatgaacaaagagataaactcagtttattcatattctttgtctccaggttctatttacctctgactctgcaatgatgaataaattgttcgcttatctgatgatcaatttctgtctttaaaatggagaggataatacttgtcacccactaccatcactagaatgaaggaactaatgcttctaaagtgttgtgaaagagatgctctagaaatagaaatatgaggcttttattgaa

SEQ ID NO: 737306 - DNA, 569 bp, Homo sapiens
agaaataactatgatcagagcagaactgaaggagatagagacacgaacaacccttcaaaaagtcaatgaatccaggagctggttttttgaaaagattaacaaaacagatagaccactagccagactaacaaagaaaaaaagagagaagaatcaaatagacacaataaaaaacgataaaggggagatcaccactgaccccacrgaaatacaaactaccatcagagaatactataaacacctctatgcaaataaactagaaaatctagaagaaatggataaattcctggacacacatacctcccaagactaaacccaagttgaatccctgaatagagcaataacaggttctgaaattaaggcagtaattggtagcctaccaaccaaaaaaaaagccctggaccagacggattcacgactgaattctaccagagttacaaagaggagctggtaccattccttctgaaactatttcaatcaacagaaaaagagagactcctccctaattcattttatgaggccagcatcatcctgataccaaatcctggcagagacacaacaaaaaaagaaaa

SEQ ID NO: 737307 - DNA, 569 bp, Homo sapiens
agaaataactatgatcagagcagaactgaaggagatagagacacgaacaacccttcaaaaagtcaatgaatccaggagctggttttttgaaaagattaacaaaacagatagaccactagccagactaacaaagaaaaaaagagagaagaatcaaatagacacaataaaaaacgataaaggggagatcaccactgaccccacggaaatacaaactaccatcagagaatactataaacacctctatgcaaataaactagaaaatctagaagaaatggataaattcctggacacacatacctcccaagactaaacccaagttgaatccctgaatagagcaataacaggttctgaaattaaggcagtaattggtagcctaccaaccaaaaaaaaagccctggaccagacggattcacgactgaattctaccagagttacaaagaggagctggtaccattccttctgaaactatttcaatcaayagaaaaagagagactcctccctaattcattttatgaggccagcatcatcctgataccaaatcctggcagagacacaacaaaaaaagaaaa

SEQ ID NO: 737308 - DNA, 648 bp, Homo sapiens
taacatttctataacttgggctgcccagggcttgcttggcataaacccacctggaagctcacgggtagaggggttcacagtaagaaaatgtaactgctgggtacccagagccctttcatgtgtgagaaagttctgcttgcagggtggcaaggatcaggatcagcrtgtgctttctatccactggtaaaacgtggattggagaaatactgccttttccttcagaatgctttggtgtctggacacatgacaagcctcagaagctttgatcttactttaaactggtctcccatcttatttttatttgaacagagtttgtggcagtcagaggatacataagggtggcgtcctttgacctccctgatgtttgggaggtaaaccacctccatccctcagaccaggaatgtagtcatgtgaattgatatctgcagagtgcctgacacagctggagggctaggccaagccagctacaaaagaacttgaggtgtgggaaagtttcttagggcatagtaatagctgtatggcaaagccgaggataaagttgctactgtctgcttgttcattcacaagtacttattgagcttctgctatatattgggtgataggctgggcctgcaaatagcataaaactattaactatagagtaaaaca

SEQ ID NO: 737309 - DNA, 435 bp, Homo sapiens
tgatttcaaaaggccattccaccattctatcagtccagctgcttcaggatgatgggagtcttggtaagactggtgaattccatgagtatgagcccactgccacacttctttagctgtaaagtgagtaccttggtcagaggcaatgctgtgtggaataccatgacagtggatraggcattccatgagttcacagatggtagtcttggcagaagcattgcatgcaggataggcaaacctatatccagaataagtgtccattccactgaggacaaacctctgccctttccatgatggaagagcccaaatataatcaacctgccaccaggaatctggctgatctacccgaggaattatgccatatcgagggcccagtgttggtctctgctgctggcaaattgggcactcagcagtagctatagccaggtcagccttggt

SEQ ID NO: 737310 - DNA, 633 bp, Homo sapiens
ttcctaaaagtaggtcccaatatattaactcattctgcaaaacaacaacacaaggtaaacacttctgttgacatcattagttagatgcagagctcaggcttgaaataaccatttctattttgctacctgtatggctcttgaggtcctagacttagagcattttttcttctttgttttgtgttctcttcctggattttgwcattttcaatggtagaaactttgctattaaacagctactgagtactcctttgcactcttccatgttctatggggaaaccccttataattaactctcaatcagttgttagctgttttactgaagattacagctctaaaaatgtcgaacaatttttacttttatcagtttaagtttctcattcataattaatactagcattttattttcatttattttctaatatttttgaagggggttgcttttagaaaacatagccaaagacaaacctttcagtacctatgaaagaagagagtattttacagctttgaagcttgagtatcatattcaagaacagtctatgttcattctgccttgtgggcaaattatggaaacattttaggtgaatcgataaaaatgctaaaaaaagtctatataagaaaaaatcctgtttgctc

SEQ ID NO: 737311 - DNA, 537 bp, Homo sapiens
tattgttaactgcagtcaccctactctgctatccaacattagggcttatttattctgtctaactctatgtttgtacccattaactgacctcaatctttgtccctaccgcttgctcccaaccattctccacccctcattctactgtctacttccacragatgaactttttttttttgctcccacttatgagtcagaacatgcaatatttttctttatgtgcctggtttatttcacttaatataatttataagctgttggtaggaatataaatttgtaccgccactacagaaaacagcatggacatttctcaaaaaactgaaaatagaactaccatatgatccagcaatcccactactgggtatttatttatccaaaggaaaggaaatcaaaggaaaatatatcaaagggatacctccatcccaatgtttgttacagcactgttcacaatagcaaagatatggaattaacctaagtgtccatcaacgaatgaatggataaataaaatgtgatatataatgtgtatacatagtatatata

SEQ ID NO: 737312 - DNA, 537 bp, Homo sapiens
tattgttaactgcagtcaccctactctgctatccaacattagggcttatttattctgtctaactctatgtttgtacccattaactgacctcaatctttgtccctaccgcttgctcccaaccattctccacccctcattctactgtctacttccacaagatgaactttttttttttgctcccacttatgagtcagaacatgcaatatttttctttatgtgcctggtttatttcacttaatataatttataagctgttgrtaggaatataaatttgtaccgccactacagaaaacagcatggacatttctcaaaaaactgaaaatagaactaccatatgatccagcaatcccactactgggtatttatttatccaaaggaaaggaaatcaaaggaaaatatatcaaagggatacctccatcccaatgtttgttacagcactgttcacaatagcaaagatatggaattaacctaagtgtccatcaacgaatgaatggataaataaaatgtgatatataatgtgtatacatagtatatata

SEQ ID NO: 737313 - DNA, 537 bp, Homo sapiens
tattgttaactgcagtcaccctactctgctatccaacattagggcttatttattctgtctaactctatgtttgtacccattaactgacctcaatctttgtccctaccgcttgctcccaaccattctccacccctcattctactgtctacttccacaagatgaactttttttttttgctcccacttatgagtcagaacatgcaatatttttctttatgtgcctggtttatttcacttaatataatttataagctgttggtaggaatataaatttgtacsgccactacagaaaacagcatggacatttctcaaaaaactgaaaatagaactaccatatgatccagcaatcccactactgggtatttatttatccaaaggaaaggaaatcaaaggaaaatatatcaaagggatacctccatcccaatgtttgttacagcactgttcacaatagcaaagatatggaattaacctaagtgtccatcaacgaatgaatggataaataaaatgtgatatataatgtgtatacatagtatatata

SEQ ID NO: 737314 - DNA, 482 bp, Homo sapiens
cccgggttcatgccattctcctgcctcagcctcccgagtagctgggactacaggcgcccgccaccacgcccggctaattttttgtattttttagtagagacggggtttcaccgtgttagccaggatggtctcgatctcctgacctcgtgatccacccgcctcggcctcccaaagtgctgggattacaggcrtgagccacagcgcccggccgagaattgctcttatatgaagatttattccctcctctcacccctgcattatgtgaagtcttcatttcttggtataacttcatttgacagctatatcgattgcagcctggagactagcaaaaaacgacaggctgaaatatggtcaccaatcaccacattaactctttgtaattaaccactgtcgcctgcctgctccctaactctacggactgagcaacacaaagctccatccacacagacgagtggcaatgtgcaaaagggaactgtagaaag

SEQ ID NO: 737315 - DNA, 529 bp, Homo sapiens
gagtattaggaggtggtgattttgggaagtgattaggtcatggaggtgaaggcttcatgaatgagattagttcccttattaaagaggcctaagagagacccctcaccccatctaccatgtgagattagagtgaaaagaagctgtttatgaaccagaaagtaggccctccccagacaccaaatgtgctggtgccttgatcttgatcttgaacagaataaagttctgttatttataagmcaccgagtttatggtattttgtggtagcagcccaaacagacgaagacagtcagtcagcattacttatgaaacacatactgtatatttgagctttttgcatttgagtctttaaggcctccttattgattaatctgcaaggtggttctttaaataagttatcttctaatcaccactagtgacttcagggttggtagactttgtaaggaggataacacctctcataggaagcctgtaaaagttgtcagatatggtctattatcctgattaacaaacatttagtgggtgcttataa

SEQ ID NO: 737316 - DNA, 488 bp, Homo sapiens
cgagtgaggaggaacagattggggacttgcttaaagaagtagtctggccacattttggtaaagcagctgtgctgtgccgggggtccccttccatccctggttgttttggactctccaaagcctccaggatggaacggctgagttgcccaaacaggaaaaatggaggcccatcccttcccccaggaaatccatctcaggtggttgtgacactgttgcgggtggctggctggaattccaagtggtgactcttatcctgtgaggcactgtggaagtggggcctccagaatgtcactgcttggccccctggattcagcctctttcctaaaggtrtgcacagaggactaacctcccactttgctgggttacttttcctgggtacttttgccaggaagcccagactggagtatgtaaagctcctgggcctctgtgcatgcctgagaggctgatctgccgagactccctgtagttctgtttgtcagactgatggc

SEQ ID NO: 737317 - DNA, 640 bp, Homo sapiens
ctggcattttaattttaaaagtagttgaagaggccaggcatggtggctcatgcctgtaatcccagcattttgggaggccaaggtgggcagattgcctgaggccaggagttcaagaccagcctggccaacatggtgaaatcctgcctctactagaaatacaaaaaaattagccagtcgtggtggtgggcgcctgtaattccagcaamtcgggaggctgaggcaggagaatcgcttgaacccaggaggtggaggttgcaatgagccaagactgcgtcactgccttccagcctgggtgacatagcgagagtctgtctcaaaaaaaaattggttgaagagagagagccctccttaaacaccactccttgagaccttgggcaggtgggaggaagccgaaggaaggggatgaggactatcccattcactttcccatggaggggtgggctctatgaggctggtctttgaagttggcttatattttttctagacactatgtcattcattgagcatctactatgtgtaagacctaagccaggcattgtgaaaaccacacaatgatcataaaacgattcttgctcattgcgaactagagggcccctgcatgtagaagactgtgcaagaagtccagaaatgcaaaatttgg

SEQ ID NO: 737318 - DNA, 640 bp, Homo sapiens
ctggcattttaattttaaaagtagttgaagaggccaggcatggtggctcatgcctgtaatcccagcattttgggaggccaaggtgggcagattgcctgaggccaggagttcaagaccagcctggccaacatggtgaaatcctgcctctactagaaatacaaaaaaattagccagtcgtggtggtgggcgcctgtaattccagcaactcgggaggctgaggcaggagaatcgcttgaacccaggaggtggaggttgcartgagccaagactgcgtcactgccttccagcctgggtgacatagcgagagtctgtctcaaaaaaaaattggttgaagagagagagccctccttaaacaccactccttgagaccttgggcaggtgggaggaagccgaaggaaggggatgaggactatcccattcactttcccatggaggggtgggctctatgaggctggtctttgaagttggcttatattttttctagacactatgtcattcattgagcatctactatgtgtaagacctaagccaggcattgtgaaaaccacacaatgatcataaaacgattcttgctcattgcgaactagagggcccctgcatgtagaagactgtgcaagaagtccagaaatgcaaaatttgg

SEQ ID NO: 737319 - DNA, 573 bp, Homo sapiens
ttcgctttaccataaaccaccttctgagagtctgggatctgcccagagcctttccactggactacttttacctatccagaaaaaaatccttgttatttggttagaagcaatcataatgtacaaaataaacacaaaatattaatgcacattaccaaagcttattttcctaacacaataccagctttaagaaaaaaatcaaagtggcattttaagtatacagggtatactggsttaaatagatatttggttttatcatttctctgcccccattgcaaaacaccatatgctgcaacatttggatccacagatggtatggtttgacccaccttagtttgaacttacattttaggagttgtgaaaatcttgtgcaattcctcttgccctttctcactctgacttgacaactgatatacaggcagagcaagatgagagatgttccagtccccagcacaaagcaagtgaaatgggtggacctcatgcactcactatcaacagctctgccatcatcttattgctttttaatgcagcttagagttggctccttggttgctcgtgctcccatttcctaaccct

SEQ ID NO: 737320 - DNA, 579 bp, Homo sapiens
aaaattacattttataatctcagtggcataatctgcaactagagtgttaatattcaatatctaatttaaaaaaaggaaatctgatttgacacaaaaactaatacaagtaacatttgcctcaacaaaaaagggtacatcaattcataaaaaaatactttcaaataaagtttattttattttttcccaaataccccaaacttgaaaaaaagatttgaatatttaactttgaccatacaatttcatacccatacaacttcaccctgctttagtcacttcttatttagttttaatattctttttgattcttcgttccaaatcttggtaaacytcttaagatcagccagataataaagaacaccctcaaaagggtcagcgagtcttttataaacaaattcttggcaaatagatgtgtatattcataaggttgccaggtttcccctaggttgaaatagcagcctcagcaggatcgtgatacgtggaggggcttgaagaggggtgctggttatttctggaaaattttaatttgcgtctgtgcagttaaagtgtgtttatcatttctttacttttctccactcctat

SEQ ID NO: 737321 - DNA, 579 bp, Homo sapiens
aaaattacattttataatctcagtggcataatctgcaactagagtgttaatattcaatatctaatttaaaaaaaggaaatctgatttgacacaaaaactaatacaagtaacatttgcctcaacaaaaaagggtacatcaattcataaaaaaatactttcaaataaagtttattttattttttcccaaataccccaaacttgaaaaaaagatttgaatatttaactttgaccatacaatttcatacccatacaacttcaccctgctttagtcacttcttatttagttttaatattctttttgattcttcgttccaaatcttggtaaacctcttaagatcagccagataataaagaacaccctcaaaagggtcagcgagtcttttataaacaaattcttggcaaatagatgtgtatattcataaggttgccagktttcccctaggttgaaatagcagcctcagcaggatcgtgatacgtggaggggcttgaagaggggtgctggttatttctggaaaattttaatttgcgtctgtgcagttaaagtgtgtttatcatttctttacttttctccactcctat

SEQ ID NO: 737322 - DNA, 579 bp, Homo sapiens
aaaattacattttataatctcagtggcataatctgcaactagagtgttaatattcaatatctaatttaaaaaaaggaaatctgatttgacacaaaaactaatacaagtaacatttgcctcaacaaaaaagggtacatcaattcataaaaaaatactttcaaataaagtttattttattttttcccaaataccccaaacttgaaaaaaagatttgaatatttaactttgaccatacaatttcatacccatacaacttcaccctgctttagtcacttcttatttagttttaatattctttttgattcttcgttccaaatcttggtaaacctcttaagatcagccagataataaagaacaccctcaaaagggtcagcgagtcttttataaacaaattcttggcaaatagatgtgtatattcataaggttgccaggtttcccytaggttgaaatagcagcctcagcaggatcgtgatacgtggaggggcttgaagaggggtgctggttatttctggaaaattttaatttgcgtctgtgcagttaaagtgtgtttatcatttctttacttttctccactcctat

SEQ ID NO: 737323 - DNA, 636 bp, Homo sapiens
gaaggcaacatttattcctcaaattgcatgttaaagatcttaaaaagggtaagtaagtcaaagagagattactcaaagtaaataaagcatatagaatgtctgggtgagcaagatataaagaaatgtcactgcaaacacacacatattttacaataaaaatataaaaggagaaaaaatattaagcaaaagatagatgaagatctyagtctgaaaaaaaaaatcatccaaacactataagaaaaactcaaagatgtctttatgttacagaagaattcaaagaacacataaattttaggaaaaactactcaaaaatgagattatttataataacagagtgacattaaagaaatattattgaaataggggaaaaattaagaactaaaatggcattgttacaaaactgtatattgattataaagagtatcttaaaaatagagctaattttttatcatttctctggaaaaatgataattacaataaaagtagagaatggaggaaataggcaacaatgaataaaatcaatcaagaggaaatgaaggacaaagacaatccaacatcagagcaattggtgtcttttaaaaccatttaaagatatactagctgacatttctcctgaaatgaatctatagatcatag

SEQ ID NO: 737324 - DNA, 615 bp, Homo sapiens
tttatgtttaacctttatacagggccaccacattgcatcattctaggagctgccattgacattgtcttctttgcatgccccaaggagtgttcatccccataatagaaaatgataaggcaagttacttaacctctcttttartttgctgttatttgtatctttcagggttgcttgagaagtaaattaaagaagataaaaaataacatagtgcgcaatgcacagaatgcgtcccaaaacactagtttttttcctctctaatcattcttacagaatgcctgatgaaatcttgttacttctgccaccagatgtaactgaaatagcttggaatatttggtttgtttaagccactggaactcactggactatttttaactaatattagtaagaaggaaattctgttcacttacaattaaggaagcctacaaaagttgtcttttcattaaaaagataatatgcatttaggtagtcatctaactcctacttaaagcagcatgtctgttcaaacatcctttattttcttaatttgtctcaaaagaggtttgctttatcttaagggtggttataccagataatgggataacccattgtctagaatgcagagtctttgttatttct

SEQ ID NO: 737325 - DNA, 609 bp, Homo sapiens
tcctcacagtgctttttttctaatgggggattcagacaactcaatagcatcctaattatcaggtaccatgattggggtgatgagaatgcacacagtacagacgtgtaacccacctaggagggtccaagaagtcgtcttgttggaagtgaccaccaggacagatagttgaaaggataagtagaagtcgtatgtwagttcgaaagacaaaggggttctgaagaaactaggaggatgttctaagtagttggaacaatctatggggaggtcctgaaataaaaaagaatatggcatagttgaggaagaaatttggtaggactggggataaagtgcatgagagaagatgctatgaaaaataggctaggtaaagcttggtttatttatttgtaccatttataaagagtttaccattttattgagactgtatcctaagggctgtaagacaccagtgaaattatttaagtggtagacagatagatgcaatctggctgtgatgtttaaagtgattagaggggccacaaccagaagcaaggtggccagactattaaaagagtccaagcaaaaaatgatgaaggtttgagttagggtagaaatgaagaaaaaagaaaaaca

SEQ ID NO: 737326 - DNA, 555 bp, Homo sapiens
tcctcattttccagagctggagactaaggcactgaaatactatgtgatttgcccaaggtcaagctagaattcaatcctgggaagtcagagctcacactcttaacccctcttctcagccagcaagcacagattcaaaaccaattgttgatatgtatgttgcctatttaaaataattcattattaaaattatacttataaagttgtttttaatttcarctaaattaaatgaacaaagagtactgtgtatgattagtattatggctacacaccagttttaacttgagatccgactttaacctttgcaaactgctgtgaaatgttggatattttatgaaaaaaataggaatatttgcctcttttttttttacatctgttgtcgtaggaaccaagtctgtctctacaatcatacacattataccaaagccatcctgaaggagtgagtcttttaacagtccccctgttaaagactttctcattctcattacccccactcaccctagtcttaccttctacatcactttaaaacttttctaattagaaattagaggaatattt

SEQ ID NO: 737327 - DNA, 503 bp, Homo sapiens; identical to SEQ ID NO: 736745

SEQ ID NO: 737328 - DNA, 623 bp, Homo sapiens
gcaacccacttgccgtgcagacatgtcagaacacagatctgtagtatctatattcatcactgccaggcgtattaaaatagaggcagaatgtcagtggcaggagttggcatgtgtacgaaatgtttaagcgccctacatgattctgatctgccccactaggtcaaaaatcactcayctattcccatcacggtagttcactcagcggttcactgtctcacttagtgcttaattgcgggatgttttcataggtccactggcacctaactaggttcagactgttttaagtctctcccaatctacaaatggttatctcctgcctattcataggcacctgcacaccagcagcctaaagacagtggcctaaactagttaaactagttgattcttcataactgtttgcttttgatcaaaaagggcagcaagaaaagggccagtggttccactgggaggaaagccatgtgggacaaattaggtgccgctgcaagatttaaaagctcgggggtggggatgggggggaagcagagctaactagaggcagctgttaggatgtggtttctgtgtttatattcttctccttccccctaatgcctcttatgggtattaggaaggaaagcatatatatg

SEQ ID NO: 737329 - DNA, 632 bp, Homo sapiens
gccacagtatggaatcttcactgggctttagtcttaattgtcttaggtttttttttttttctccttttcctaagaaatccattaggccaaatattggttttattttctactacaatgtcttctaaattggattctgtagtcatgtgcttagataagtttggaaagggtaagcattaaacggttattttaattttaagtcttctcagaattgtcattcctgagcttttaagattggtcgtgtagagaacgttttagacacatttgatcaaactctttctttttttctttttccttttttttttttttttttttttttttgagacggtgtctcgctctatcacccaggctgtagtgcgcgatctcggctcactgcaggctccgcctcccgagttcatgccattctgctgtctcagcctcccgggtagctgggactacaggagcctgccaccacggccggctaattttttgtayttttagtagagatgggatttcaccgtgttagccaggaaggtctcgatctcctgacctcgtgatctgcccgcctcggcctcccaaagtgctgggattacaggcgtgagccaccgcgtccggccaccaaactctttcttatggagaatattgtggaaataatg

SEQ ID NO: 737330 - DNA, 638 bp, Homo sapiens
atatagcaactttagccaaattcataatatgaaaatataaatgtgaaaggatcaggcaggattccaaagactttaaccttgggtgaacatccaggtctcaaatgttggtaactctgattaaaagattcaagcatatataaagaatcttggatctagagaaactaaaacacacccaactaggttgtgctaacctaggttatccaartctagaaataacacatataatagaaatatccagaccattactaaattcattgttaaattgtgcttttagtcagtatatcttgaccttaaatagtgcctgtaaaagagtcacagcaaagtgaggctatattgtccagtaaggctaataacaaaattgatctccaacctttgctccttgataagaacacatatccattgttttgtatattttgcagaatattttggcactttactaacattctctgtcattagatattggggaatgtaaacctcaaaggaggatgtactatcttcctacaaaaaatattttaaacgataaccctatatcaacccagaactgttaaatctttggttttgaagtatattactaaagcagctttttaacatgcatatagaaaatgatatgcaggctaataggatcagcttaacaatta

SEQ ID NO: 737331 - DNA, 513 bp, Homo sapiens
caaatcattatcaattctataatgattcttgactatcataaatcccatgccatggtacaactcagtagttacacagagattatttaacatttctaatccagtgttttaattgcaatattagaacactcagtcttggtatgagcaattttctcacaactaatgtgaaacacttctattgttatatgtaaattatgggggaattttgcttgatgttttcaggggacatacaagatatcttaaaaatgaaaaggttttggytttctagaaaaccttcaagcatctggaacttgagcttcctactgcagtattgaaatagtttcaaggggtgtgcaagtgaacccagcttgtgcaataaaacttgtctctcctcccaatttctgtctttagttcttccctggctgaaattagagactgacaataaagacagttatgtaagttcttgaccgttccagccatgcccacttgcaataataacttatatttacattaacatgtattcaaactgtacccatt

SEQ ID NO: 737332 - DNA, 637 bp, Homo sapiens
tgtttgtttgttcgtttttttgagacggggtctcgctctgtcgcccaggctggagtgcagtggcgccatctcagctcactgcaagctccgcctcccgggttcacgccattctcctgcctcagcctccagagtagctgggactrcaggcgcccgccaccacgctcggctaattttttgtatttttagtagagacggggtttcaccgtgttagccaggatggtctcaatctcttgacctcgtgatccacctgcctcggcctcccaaagtgctgggattacaggcgttagccaccgcgcccggccgtgttatgcttttttaaaatatcccttatataaggttatcagaaatgcaatgaatgccatttttatttggaaacaaacttttaggccaatctgaaatgtccacagttattgcgtcttttgtaatggttactttatttctgcacatgcgtttcatgtcaggtcagagaatctattcatctcataatttcttctcttcaataatatatttttatttattttagggtcattgatgaggtataacatacacaaggaaaacagacttgcccaaatacttgatatgaatcaagtatataacttgattaatattcacaaattgaaaacactcatataagcat

SEQ ID NO: 737333 - DNA, 465 bp, Homo sapiens
ttacacatgaaatttgtttataacttgttagaaaacattgcaaaatatttgtagtcccaaagtaaaggcacttaagggattagagaaatgcttggtcatgtgatctgggtgctccttaactaacaatgtgaaatatggaacagatataatcaagaggcatgtattcatcaagaattgagcaatttaaggctgctcaggtgaaggcaaatgaatatattcacaaaatctattttatcaatgagcttagcaattcatatgaaatatgttgtgatcatgcattgtgttaaataacatcagtctgttttcaagcrgaaaataaatttcacttccatttatcttgttaggctcattttaccccaaattaactatttctgaccataactattaacaaataaagaatattattattctcctttcagatgtatttaaacatacttaaatggttagaattcttaagttttaaac

SEQ ID NO: 737334 - DNA, 587 bp, Homo sapiens
tccttattcattgagacacaataatattgaaataagactaattaatatctctaccatggcttccaagtatttgagtgaaaggaagagttgcacttctttcattttcattcagaatgctagaaatgatgaagcttgctgaggaaagcatgttgaatgttaggccaaaagctagccctcttgcaacaaacagttacccaagttgtgaatgmaaagaaatatttcttaaagaaaattaaaagcgctactccagtgaacacatgaatgataagacagggtaacggccttattgctaataccgagaaagtctgagtggtctggataggtgatcataccagccacagcactcccttcagccaaatcctaatccagaacaaggctcttttcaattctacgaaggcttagagaggtgatgaaactgccaaagagaagctaggagagtttgttggtttatgaggtttaggaaagaatccatctccataataaaaaagtaccaggtgaagcagcaaatgcaaatgtgcaagctgcggcaagttacctagaagatcaagctaatataattgatgaaggtggctacagtaaacagattt

SEQ ID NO: 737335 - DNA, 634 bp, Homo sapiens
gtcaagtgtaaaagcatctgtctctgaagatgcttttctgtgctaagtttttgacttttttttttttttgctttaagttttcttttcttaaattcttatcgaattagttttggatatttgtatgtttttctttagaaaattgtattttcttgaggtaattaaatatattagcataaatttttctcaraaaaatcttaccttataacatattttataattgttaaaaatattctttttcattttcaaaataatttgatcagttttttctgtataattaatgtctcatattgatcatatccattgttttgttttatacttatttctgcttaaagcatcattatttccttctgacttatttagattttgtttatttttcttcctatttattaagtccttaataaaatatttcatttatttcaaaaatagtgaaaataacatttactctgcgtatagctttggttgcatctcatatatctgacgcaagtgttatctcttactcattctgctcatgtaaactcaactattttcttgaataatagttacttgcaaaaggtgcatagaaaaattgtggatgtgacaatctttcagaaatagaagaagaaatacagacctactgaaatatagtatcttaatt

SEQ ID NO: 737336 - DNA, 586 bp, Homo sapiens
ctgatattaactgtgggattttggatatattacttaacagttttgatctttgctttcctcatttgtaaaataataagcacagtaatgctcacctttttgtggggaataatacaattatgtgtaaagagtatcatatataatagtaggcgttcaataaatggtggctactctcaatgatttagatacttggaggtttttccataaaatacaataaatttttaaaaaattttctaaraatgattgtttataaacacaaaaattgtagatcaagaattatgtctatctgaaaacacatatatgcaatcttattttgaaaataaaaaattgccagctacataatagttctctgcatgtgtaataaatacaccatgaattttattttagggtgattaattttatttaagaaagtaaaattaagtggttccgagtacatctttaaaacattgtaattaaaatatcaccagctgtttttcaattgaagtagttttctccagacttgcctgatcatgggagtcctctgggttgggggcaagatggatttcttgagaatatagagtcctagagtcccctgtagacttgccaaaaa

SEQ ID NO: 737337 - DNA, 595 bp, Homo sapiens
acaaaatgctatctatctgatatggttttctctgtgtcccccgccaaatctcatctcaaattgtaatccccacatgtggaggaagggacatagtgggaggtgattggatcatgggggcagtttccctcctgttgttctcatgatagtgagtgagttctcacaagagctgatggttttagagtgtggcacttcctcatgctctcrctctcttgtctgccgccatgcaagatgtgcttgcttccccaagcctactgccatgattataagttcctccctagccatgtgaaacctgtcagtcaattaaacctcttccgtttataaattacctagtctcaggtagtatcttcatagcagtgttgaggatagactaatacattatcctctttctctgagtattgttttggttcaacagttctatggcacatattattctaagaggctggactcaactccacctaagagtaggaatgggctaggagtgggaggacagttggcaaagctttcccggaaaggaacattgatttttgtgaggaagtttattcttggtggttgagtagatattatccaggagatcaaggaaaggtagagaatggcc

SEQ ID NO: 737338 - DNA, 611 bp, Homo sapiens
tttaaagaatttgaggttcatagaaaaatcatcagaaagtagagtttccacataccctcttccactcctcacagtttctcttgttatttacgtcttgtttttttattttatttttatttttatttatttatttatttatttattttttgaaagagtccagctctatgcagtggcatgatcttgatctaggctcactgtaacctccacctcccrggttcaagcaattttggtgcatcagcctcccaagctgctgggattacaggtgcatgccaccacgcttggttaatttttttatttttagtagagatggggtttcaccatattggccaggctggtcttcagctcctgacctcaagcgatctgcccaccttatcctcccaaagtgctgtccttacaggcgtgagccactgtgcctggcctacatcttgttttaatgtggtacatttactacaattgatgaaatgatactgacactgattactaactaatgtctataatttacattagaattcacactttttgttgtatgttttattgtttttggtttttggtttgttttgttttaagagacaggtctcattaatgttgcccaggctgaagtcaaatttctg

SEQ ID NO: 737339 - DNA, 611 bp, Homo sapiens
tttaaagaatttgaggttcatagaaaaatcatcagaaagtagagtttccacataccctcttccactcctcacagtttctcttgttatttacgtcttgtttttttattttatttttatttttatttatttatttatttatttattttttgaaagagtccagctctatgcagtggcatgatcttgatctaggctcactgtaacctccacctcccgggttcaagcaattttggtgcatcagcctcccaagctgctgggattacaggtgcatgccaccacgcttggttaatttttttatttttagtagagatggggtttcaccatattggccaggctggtcttcagctcctgacctcaagcgatctgcccaccttatcctcccaaagtgctgtccttacaggcgtgagccactgtgcctggcctacatcttgttttaatgtggtacatttactacaattgatgaaatgataytgacactgattactaactaatgtctataatttacattagaattcacactttttgttgtatgttttattgtttttggtttttggtttgttttgttttaagagacaggtctcattaatgttgcccaggctgaagtcaaatttctg

SEQ ID NO: 737340 - DNA, 621 bp, Homo sapiens
caaaaccacacaactacatggaaattgaacaacctgctcctgaatgacttttgggtaaataataaaattaaggcagaacttcttgaatgagaagaatgaacttctttgaatgagaacaaagatacaacataccagaatctcagacacagctaaaatttcwttcttgttaagaaagaaatttatagcactaaatgcccaaatcaaaaagctagaaagatctccagttgacaacctaatatcacaaataaaagaactagagaaacaagagcaaacaaaccccgaagctagcagaagacaagaaataaccaagatcagagctgaactgaaggagatagagacacagaaaacccttcaaaaaaaaaaaaatgaatacaggagctagttttttgataaaattaataaaatagaccgctagctatactaatgaagaaaaaagagagaagattcaaacaaacacaatcaaaaatgatattaccactgaccccacagaaatacaaacaaccatcaaagaatagtataaacagtcctatgcgcataaactagaaattttactaatgaatttctagaagaacttgataaattcctggacacatacatcctcccaagactgaaccaggaaga

SEQ ID NO: 737341 - DNA, 430 bp, Homo sapiens
ctggctgggcgcagtggcccacgtctctaatcccagcagcactttgggaggccagggtgggtggatcacttgaggtcaggagtctgagaccagtctggccaacatggtgaagccctgtctctactaaaaatacaaaaattagccaagcatggtggcagacgcctgtaatcccagctactaggaaggctgaggcatgagaattgcttgaatccaggaggcggaggttgcagtgggccgagattgtgccattgcactccagcctggaaaacaagagygaaactccatctcaaaaaaaaaaaaagataaagttttctgtctttaagaaaatttcattctacctggggaagacaggcaacaagcatgaaataaaaagggcaatattaaaggaatgaataggagagctgtcaaaaagtagccacatgggaaagat

SEQ ID NO: 737342 - DNA, 580 bp, Homo sapiens
ataccctctgccccaacacatgcatagcctccccattatcaacgtcccccaccagagtggtccatttgttccattgatgaacctacattgacacccagagtccatagtttacattagggttcacccttggtgttgtatattctataggtttggagaaatgtataatggcatgtatccaccatcatattatcatatagagtagttttactgccttcaaaatcctctgctctgactgttcaaccactgatcttttcaccatctccatagttttgcctcttccagaatgtgatatagctaaaatcatacagtatgtagtctgtccagattggctcctttcggtaatatgcatttaagtttcctccatgcctcaccacagcttgatagctcatttctttttagcactgaataatactccattgtctggatgtaccacagttkatccattcacgtactgaaagacatcttggttgcttccaagttttggcagttatgtataaaagctgctataaacatctgtgtacaggtgtttgtgtagtcatttcagctccttttggtaaataccaaggagcacaattgctgg

SEQ ID NO: 737343 - DNA, 635 bp, Homo sapiens
agcataatagaattttaactttcttctttagatcttactatattttgtaatggccacatagtcttttaactactaatgtaaacatctttttcagaagccagtctttgtttttttgcatcatagtcctctcccaaatgagttatcagacttgtcagctaattaggaactctaaatttatttcttctgttatccttagctgtattattattctagattaataataaggtagaagcccctggttcyactctgtttgcaacagacagaatttgagacaaaaagaaattttacagattgtttttatagttttacagaatgtggtcattgactagtgtcttgaaaaactgggaaatatattcatgtaaaaagtataaaactaaaataaaaccactggtgatttttattcaagtaacctaggaaataaaataaatcggtaaaaataccccaatatcagtaacttagatctcttctagattcagggaataagttatttcaagaatggaaactggctctctctaacctattcagatacaaatcctaagactttagcataggtctaatttcaatgagtcttatctctagtgaggttggcatttcgtacagtagtcaaaggccaagatatatcatgttttatagat

SEQ ID NO: 737344 - DNA, 572 bp, Homo sapiens
actgatctttgacaaggatgtccagaatatacaatgaagaaaagtcttgaatggtattggaaaatggtattggggaaactagatattcacatgcaaaagaatgaaactaaacctttatcttaaatcatacacaaaaaatccactcaagacttaattataacacctgaagctgtaaacctagaagaaaatttagggggaaaatttcatggcattggtcttggcaataatttgagatgctttcttagagagagtttcagttaagaaaatttttcttaacagtcattaaaaagtaatgtataaacttcaagtaaaacaatttttggttggggctttctggttgccttagtcaactcaggccgcataacaaagtaccctagactggtggcctaaacagaaaygttctcacaattctggatgctgagaagtccaagaccaagattggctgatttggttcctgttgagggctctcttcctacatacagatggctgctttctcactctgtcctcacatggtgaagagagaatgctcttgtgtctctctctgttcttataagaacaccagcactattgga

SEQ ID NO: 737345 - DNA, 666 bp, Homo sapiens
ggtaagcacatttttcagcacttaacattattaatttattgaatcccaaaacatcactctatgtatgtgctgttatctccattttacagatgaagaggccaagggaaagtgaagtttaataacttgcacaatttcacacacctagtatgtggcagagctgaaattccaacccaaacttccatcagagagtraaatccaagttcttgtacatttcatacaagggctctgtgatctgctgcctggctcgttaccacccatgattctgaatttcctgccttccatggcattctctagaatcaccgagcttctcgttgcagctctgtatctgcttctttctcatctaggcagctgctctgcctccttggcttcatccctctctgctggctcccacgggctcaatggcctccttgccacttcagtgcaccaggcctgctcctaccctgggccattgttctaggaaagagcctttctgggcttgacctcagaagaccttttttttttgagagtcaaggtaaattatgtaaattatttattgatgacagaagaacactatcttagtccagtttctgttgctataacagaatagcatagacagggtaatttatatagaaaagaagtttatatcttacagttctagaggctgggtagttcaaggacatggcatca

SEQ ID NO: 737346 - DNA, 617 bp, Homo sapiens
aattttattattattacattaataaatgatactgctgacaataatggtataacaacaataatggtgacttacatttacagaacacttaggacatgtcaaacactgttctgagtgctttagatatagtctttatttttttgtcacaatagctctatggagcagataatataattatcccattttacagacaagaaaactgaggcacagagtgattgagtaacttatctaaggtcacacagataaacaataasaggctgggatcggtggctcacacctataatcccagcactttgggattttaattacaaaaaattagctgggtgtgatggtgcacgcctgtaatcccagctactagagaggctgaggcaggaggattgcttgaacccgagggtggagtttgcaatgagccgagatcacgccactgcactccagcctgggcgacagagtgagaccccgtctcaaaaaaaaaaaaaaaaaaaagataaacaataacaatactttactgttatcatacactttctacaggcactgaaattggtgctttccaattatgatgtcctttgttctcataaaccctatcaccagaggaaatttgggcttagagagattaaatcctt

SEQ ID NO: 737347 - DNA, 468 bp, Homo sapiens
gtcacaatagctctatggagcagataatataattatcccattttacagacaagaaaactgaggcacagagtgattgagtaacttatctaaggtcacacagataaacaataacaggctgggatcggtggctcacacctataatcccagcactttgggattttaattacaaaaaattagctgggtgtgatggtgcacgcctgtaatcccagctactagagaggctgaggcaggaggattgcttgaacccragggtggagtttgcaatgagccgagatcacgccactgcactccagcctgggcgacagagtgagaccccgtctcaaaaaaaaaaaaaaaaaaaagataaacaataacaatactttactgttatcatacactttctacaggcactgaaattggtgctttccaattatgatgtcctttgttctcataaaccctatcaccagaggaaatttgggcttagagaga

SEQ ID NO: 737348 - DNA, 677 bp, Homo sapiens
atttactgtgtggtaagcacatttttcagcacttaacattattaatttattgaatcccaaaacatcactctatgtatgtgctgttatctccattttacagatgaagaggccaagggaaagtgaagtttaataacttgcacaatttcacacacctagtatgtggcagagctgaaattccaacccaaacttccatcagagagtraaatccaagttcttgtacatttcatacaagggctctgtgatctgctgcctggctcgttaccacccatgattctgaatttcctgccttccatggcattctctagaatcaccgagcttctcgttgcagctctgtatctgcttctttctcatctaggcagctgctctgcctccttggcttcatccctctctgctggctcccacgggctcaatggcctccttgccacttcagtgcaccaggcctgctcctaccctgggccattgttctaggaaagagcctttctgggcttgacctcagaagaccttttttttttgagagtcaaggtaaattatgtaaattatttattgatgacagaagaacactatcttagtccagtttctgttgctataacagaatagcatagacagggtaatttatatagaaaagaagtttatatcttacagttctagaggctgggtagttcaaggacatggcatca

SEQ ID NO: 737349 - DNA, 584 bp, Homo sapiens
atgggatattttcataagtcaagccacaatttaaaatgcatttttaaatattttgatttgttaatgtgtgtatttttccatttaactaaaaatattctccatagacttggggatagaatgatttctgtgtaagaaataaatctctctctatatatgcatgattcttagatttaactacacactatagaaacctctccagttattaatcttacatctgacttaataatataaccgcttgggtatatcactgcagctgccaaaaaatttggcctgagggtataatcagctgtagtaacagttttgccattttattatccgtctatcagtcaartattagacacatctattatatttatttatttaattacatgtataaaatcaatatagattatagatttggtatatagagaaaatatatgtttgtgtgtatatatatgtatacacatacatacacacacacatgtttacttgagcattaaaaaaacccaaacggcctctcttcttgtgcctctgcacataaaggccacaggcctcaaattgctcagagggacaatgttttctcaccagtgttgctgtctgcattt

SEQ ID NO: 737350 - DNA, 567 bp, Homo sapiens
tctttgacaaggatgtccagaatatacaatgaagaaaagtcttgaatggtattggaaaatggtattggggaaactagatattcacatgcaaaagaatgaaactaaacctttatcttaaatcatacacaaaaaatccactcaagacttaattataacacctgaagctgtaaacctagaagaaaatttagggggaaaatttcatggcattggtcttggcaataatttgagatgctttcttagagagagtttcagttaagaaaatttttcttaacagtcattaaaaagtaatgtataaacttcaagtaaaacaatttttggttggggctttctggttgccttagtcaactcaggccgcataacaaagtaccctagactggtggcctaaacagaaaygttctcacaattctggatgctgagaagtccaagaccaagattggctgatttggttcctgttgagggctctcttcctacatacagatggctgctttctcactctgtcctcacatggtgaagagagaatgctcttgtgtctctctctgttcttataagaacaccagcactattgga

SEQ ID NO: 737351 - DNA, 620 bp, Homo sapiens
ccatttcagatggtccttagaatgagactgatatctccatctcccagtgccataggacaggatctcacaagctcttgggaattgtgtggttaggagaactaatccgagggtgattttcaaggatctctaagataacttcatcatctcttccctctgaggtamccccacccccaacacacacacaattttcatttttttctgacatacattgtctttacatgcaaaacgattatcaacagcaaaatgataatatgttttaagtaagtgggcctagtcacttttacattaatcattgattcataactttttaaccacccagaaccttttctattatttgctctctactttatgaacctcaagatttgaataaaagaagtcttcacaaaaaattgttcataataagtaacaactcatttccattagttccttccactaaataagagccagttgaagattcgataatcataaatatagccaagggcaaagaaactcaaaaggttataaattggaaaataatcacacccacagaatgtcattgtgaggattaagtgtgttcatatgcgtaaagcacttagaatggttcctggcgcacgggatcactataaaagtgcttactgctc

SEQ ID NO: 737352 - DNA, 657 bp, Homo sapiens
tgtcactgccaggcgtttgtatcaggatgatgctggcctcctaaaatgagttagggaggattccttctttttctattgattggaatagtttcagaaggaatggtaccatctcctccttgtacctctggcagaattccgctgtgaatccatctggtccaggcctttttttggttggtaagctattgattattgccacaatttcagagcctgttattgktctattcagagattcaacttcttcctggtttagtcttgggagggtgtacgtaacaaggaatttatccatttcctctatatttgtagtttatttgcgtagaggtgtttatagtattctctgatggtagttgtatttctttgttgttgttgttgtgtttatactctttaattgaattgataagggacatagatctatttaaaaacaaaaccaaacagctatttctgtctagattaagaggtggccccaggtgagggattcgcattttgagtggcacttgtggtgcgactcgatgatcctgggtttgtctatgattctggctgtgcagttgcccttctccacaatcccaataatccatgcttggtggccttcaccatatttgggggactttatctctgcacagaaccgagctgtttgctcacgtggcagtttgtatttctgtg

SEQ ID NO: 737353 - DNA, 515 bp, Homo sapiens
agaacaaaaatgtatttaaaatcctactgcatgtcaaatgactgcatgatattaaaggatttctgtgaggaatttgctttctgcccagagaagaaacagagcctgggggtaagcaaatttagaataaaatataatatagtaaggaaagaatgaggaaagtgccaaagagaaatataattaaatgaactgaggattaaaaggtcccagatcagggctggagcttgaccatgggtggcacgaaaaggcactctaggtwtatggcattttaggctatacataataggttgagaaatttgtttgtggttaagatcacgatgggaaggagagctactttgagggagcaataccattttacctgcaagggaaacaagatttgaaatacaggattctgaccacattttgataatcagacttgtaaatggcttgaagcacagaaaactagtaatactatagtaaagatgaagtagaatgtgtagaaaactagtaatactataataaagtaaggttgggattat

SEQ ID NO: 737354 - DNA, 634 bp, Homo sapiens
aacctagaaaattgtacctggttacaaacttggtgccttaaatagggccagagtctaaccaaacaaaaagttattagcaagataaaccataacaaccagcatatggcaaaaatccgtactatagaggtttattttctccatttggaagatttcattttactagacaaagtgtatgggatcacaagcattactgtttgcaaaattaacagtataaacaggaaagtgttaacagctcaaattaaatacgggaaagcaatcctaacatcctaatgtagctagttttattttccctacatttactcgattcgctaaacatttattcaactgcatgttgaaccgtcatgtttttaggctgtaagatctttcacaacgaaagatcccaagtaaaagaagtgtttcatttgcctgcatagactctgaccagtaagttctccatcaatacttyttatgaacagcatcatcactatcataactaggggtttaatagtatctcttaattgaaaaggcctgttttttattttaccaaattaacataactttcttctttaactgaaaacttacacgagcgagtgatcttttcgttctgttatgtggaactttgcataagaaatttttccaagtatattctacacat

SEQ ID NO: 737355 - DNA, 608 bp, Homo sapiens
cctgaatgcaacaacataactataaaatctccctgagatttgaaaggggtgggagtggagcactatgagctggaacaaatggaaggcgcaggcttgaaggtcagtgggagctttcagcatgcaccctgctcagttcaactcatttaataaagtgctttcaatgctgcgattcattgagcttctatttttgccaggttgaggttctgctgggtatattttaatgaagkaacaaaatgtatttatatttaggagaatggtgtttcataatgattgtaaccaggctaacctgagttcatatcctggctctgctacttaaataatgtggcacatttgtaaatctcttggaccgtcggttttctcatctataaaatggggataaatcatgcctactttacagggctatcataaagagtaaatgagataatatatgtacagtaagtatcacagtgcctggtatacaatcagcactccataggtagcatcaagaattatgatcatgctcttagtgtggtgacctggccaatgggaaacatttaccaggaactagtgcacaaaatagactgaagaggaatcaagactaagaacagggagaaaaatgagaaacattt

SEQ ID NO: 737356 - DNA, 607 bp, Homo sapiens
cagggcctgctggctcaggctgccaggctcattcagctgtataaagatgactattaaaagtggcatcacaggtttggttaagtaaacatgcttttgatacatacaacaaagactactaaagatcaccaaatgaaaaattccaaaatatcatattaaatagaaaaggttcatttggagagaaaaataaaattataattttattctgataaaacctttgccactcactctcattttatttctcaaggttaagtaagacaaaccatgcttttaaagctgaagttctaactgatgttctacaaaatacctaaagaggcaacctgacaaataactttatacttaacaggaatttccacttaccactcctccaaaatactttcctatgtagaagtcatcaaggctgtggagttcaagataggtygctcctagttcttttgcaagttggatcccttcagttgtactaacacagctccctctgtctgaggtacatagtgggcatgtacaaggtaactcttctgagaaaacaaattttaaaacaaagagtttcgaaattaaacaggaaaaaaaaggtacacagacaatctgaacattaaacaacaaagagctcata

SEQ ID NO: 737357 - DNA, 620 bp, Homo sapiens
agtttgcaaatattttctcctgttctgtagattgtctgttgactctgctggtagtttcttttgctgtgcagaagctctttagtttaattaggtaccacttgtcaatttttgtttttgttgcaattgctttcggtgtcttcgtcatgaaatctttgccaggacctgtgtcaagaatggtatttcctatgttttcttctagggttttttatagttttaggttttacatttaagtctttggttcatcctgagttgatttttgcatacggtgaaaggaaggggytcagttttcatcttttgcatatggctagctagtaatcccagcaccatttattgaataggaaatcttttcccccattgcttgtttttgttgagcttgtcgaagatcagatggttgtgggtgtgtggctttatttctgggttctttaacctgtttcattggtctgtgtctgtttttgtaccagtaccatgctttttgtttactgttgccttgtagtgcagtttgaagttgggtgctgtgatgcttctggctttgtactttttgctagctaaattatttcttaatgaaggcccataaataaaaataaaataactcctatcttacctgacccaagggagaaaat

SEQ ID NO: 737358 - DNA, 620 bp, Homo sapiens
agtttgcaaatattttctcctgttctgtagattgtctgttgactctgctggtagtttcttttgctgtgcagaagctctttagtttaattaggtaccacttgtcaatttttgtttttgttgcaattgctttcggtgtcttcgtcatgaaatctttgccaggacctgtgtcaagaatggtatttcctatgttttcttctagggttttttatagttttaggttttacatttaagtctttggttcatcctgagttgatttttgcatacggtgaaaggaaggggctcagttttcatcttttgcatatggctagctagtaatcccagcaccatttattgaataggaaatcttttcccccattgcttgtttttgttgagcttgtcgaagatcagatggttgtgggtgtgyggctttatttctgggttctttaacctgtttcattggtctgtgtctgtttttgtaccagtaccatgctttttgtttactgttgccttgtagtgcagtttgaagttgggtgctgtgatgcttctggctttgtactttttgctagctaaattatttcttaatgaaggcccataaataaaaataaaataactcctatcttacctgacccaagggagaaaat

SEQ ID NO: 737359 - DNA, 601 bp, Homo sapiens
gagagtttgacagggtcaaatagtttcctgggctttgtaaaattcagaatgcctgttcttgtggtattacgagttttcttttttgagtagttgtttcaatgaggtaaggtgagatggaaggaatagtagargatacacagatatgatcttcccattctagggaggaaagctgtggaacctgtgaaaaaaaggaaatagctagacaggtggtagtatggcaccacgtacacgaggctcatgcacagtctgaagcacaaagactacgaattttggaaatgcacacaatactgaataatgtgctctaaaaaaattcagtggggcacatggtgagatctgaaaggcgcagtttctctgaggggagtgagcattcctactgtcagataagggaaaatcagaataaaaaatttaaagtggcctaagatggctacaggttggacatatgagaaatacaaactagagctatgacctaaagctgaactctaagctgcaaggctggaatctgtcaaatatttcactggcctgtactgattacaacttttgtctatcagataaatcataaaggcaaggtagaatcaatcatccctctccagaccctaagaca

SEQ ID NO: 737360 - DNA, 493 bp, Homo sapiens
tggctgtggtgctgggctttaggatgtgactctcgttataggcaaaaactggagaacaagagaaaccagaatttgagagcagtagccaatgcaaagctctgtcaagtaaaataaaccaccagcacaggcaggagaggaaggcagtgagtagaaaggaaaaccaagtactggaaatcattgcatagaaggagctcagagacagaaggccatggatccacatttgttactgtaaacaatgatgctaaggtaagacaagcattcttcttaattcmtcaagaagtgtccaattgagtattactttccattacttcagcattaatagaatatggagttttcattaaaataagttgcacaactatttgaccaagacttttgttaacaatctctcaataggtagacatgcttcataaatatttttcatttgtgagagtgttttttttttttattttttaaatttttttagatgcagtcttgctctgttgcccaggctgga

SEQ ID NO: 737361 - DNA, 635 bp, Homo sapiens
caagcagtcaattagaaattaccaggcatgccaagaaatgacaaaaaacaaaaaagaaaaaggatcacaggtggtttaaatattggtgttactaaaaacagtcttttaaaataatcatgatcaatatgttcatggatatatacaacaaaaatgaaaatttaatcagagaactgaaatctgtttcctcagaaaaagaattgtatattcccaaattgataaatgcaataattaaaattaacatccagttgtattcagatttatttgtctyaaaaatgttttatattttggaggttttaaaaaataattttaaatgtgatttaaataaagtcatatattttgctcggttgatatatctaccaagtgtctcttaaactacaggtttaaaactgcctcaccacaaaacagtaagtatgtgaggtgatgcttgtgttaattagcttgattgagccattccacaaaacatcatgttgtacaacatcaatatatacaatttttacttgttaattaaaaaactataattaaaaaatagaagaatgtggatttcaacctatagttttcttttcatttctttgctttttctttacagagtttccttataaagccaggttatttgtcctgtactttctacactttga

SEQ ID NO: 737362 - DNA, 618 bp, Homo sapiens
agcggtgaagctgatacatatacctaccaggctcaagtagccaatctttagccttataccatactgcctctttgaaaataaaaatagcatggaaaattagaagacaaagatgtacccaaacctcattttaatcaataatgtcatacattccaagtatagcttttgcaagaccraagattggaagtggcatttgctgttttgattctcaattattcagcaattagttactgattgccaagaattgggataaatgttgagaattcacaaagtccctgcctttaaggatctgcttagaaaaataaaatgaaaacatttaaaaaccactagaaaacattacaaaagtatatgcactcaaatgctaagtggaataacactttatttttttagtggagttcaagagacaaatccaggcaccgtcagtgcttaaatgtaagttctccaaaaaaagcaaaataggagaatcagccaggtgcatgggcaaactatagactgcatttctatgtgttggtagctgttatgtttattcattcttaaccttcattacaatgggagttatttcatagtcaaattacagtagtccccccatcctcgggtagatcttctgagacagcagataat

SEQ ID NO: 737363 - DNA, 727 bp, Homo sapiens
tttgaagtttgctgccatataatatcctacggaagaaaggaaaaaaaaatttaaacccttggggagattcttcaaacaatgctttaaatattcagaatcaacagttaatggtgttagacttacctcaagaagttcatcatgattagaaaatatactattaagtcagaaaagcactctaatagtttctatctctaataaatgtcaccaggcagtcattgtctgaattacttaatttctgcctcactctggctcacattaatattttatttctagaaaagtacgtgaccagaacaaagtgcccaaatcagttcttgtcagccaacttcatccatgactttggaagcgacgctgctaagacaaagtggttctttaggagagacaatgtcatgctgccgaggctttcattttaggacagggttttgcagtgaattaatagcctctggaaatggtgcagagctacaataacagctttctcgttttgattataaggcagaatggtttctggttttctgtaatatttgcattgtgaatgggattccgttttttctcatttagatgcagtgatcaggtgagaggaatctragcctgttccatcaaagccctatattgtgaccagaatacaaattacttgattctggttcttttaaaaatgtagcttattttaaaactgcgagagtcttaaggcaatgtaaaaatgagaatctgagatggtgctcaagctgaagtc

SEQ ID NO: 737364 - DNA, 561 bp, Homo sapiens
tttcagtccttcctacttgatttgaacattaaaaaaacttgcttcatgaacagacttccactgggttctgaaatgtgcagatgtgtcatctttgaaaagcatctggtcaaatggtccctcacaagacagggccatggagctctgagtcttttgggaaaagcacttcaccctagaaaaagtgacagtgatctccaggactcatcagtagtggctatgagctcaggctgggtttggctcagccatcctgttacttttytaggcctctgtgaagttatttaatctccccaagcctcagtttcttgttccaccacatgtgaataataatagttcttacctcactgggatgttgggaggattgaaaaaaaaaaaaaagatgtatattatgcttagctccatgcctggcacaggtaatcatgatggtttttctgcaagaaacaccagctcttctgggctcccagccagcctctgcagttcagtgatgaggctggccagggagagtcttctcctttaccaaattgcttggctttaaattagacatgactgtgtaacctgacagatgcg

SEQ ID NO: 737365 - DNA, 646 bp, Homo sapiens
ttttggtctttattctttatcccaagcccagtggatgtgttaaaatccaattgaaactttgaatggattcctcaggagaagatggcaattaagcacagagcattacttagacaagagatgatggtaccttgggctaaaatggtgattgcatcaatcttataaatgaaacagatttttttggaggtgataccaacaatgcttttagtatggatatggggatgatgtaagggaaaggaacattgcctaagttttattcctgtgcaactgaatgaatagaaggtggtaccattcatcacagtaagaacaatggaaaagtaccagtctaagggaagatcatggattcagtcctgatcatgttcaagtgagaaattttatttcaagtagttaaatgtataagtctgggctaaatattatatttacataataatagtaactgaagctttgaacttggttgagattaagaawaaagtatgacatgagaaaaagatagactctaagagaagaatgtcaacatgtaatttctgggtagaaggagaagagcctgcaaaagatacagaacaaaatggccattgaggtaggtgaaaagcctagtgagttttaaaatgtatccgttgtatatagcattattgagcttattactgactat

SEQ ID NO: 737366 - DNA, 598 bp, Homo sapiens
ggggaggtgctacacacttttaaacaaccagatcttgttttttaaattacactacagttctttttaaaagatcttgtgagaactcactcactgtcactagaaccacaaggggaaaatcctcccccatgatcaaatcacctctcaccaggcccctcctccaatattggggattacaattcaatatgagatttggatggggacacaaatccaaaccatatcaagtacctaaaattacttacaaattaccagtatacaatattattaactatagtgcttatgttgtaattagaactctagacttattgatcctrcataacagccactttgtaccctttcacctataactacccatttcccaccactacccctgcctgcgcgtctctggtaatcaccattttaatctctgtttatatatattcaattttttttaagattccacctataagtgagatcatgtagaatattttttttccttgtgtggcttattttacttatcatagtgtcttctggattcatccatgttttccaaaatggtagaatcttttttgttaaggctgcaaaatattccatttcatatatatatatatacacatatata

SEQ ID NO: 737367 - DNA, 635 bp, Homo sapiens
ttactctcaaaaatgggtccaaatagccaaaaggatacaaaatgtcccaaaactgtaatctaagtcacttacatgatttaatccaaattttcataaaaggctgttaggctattacattgatttatccatatgtaaatactggtattatgtggattttcttaataactaataagaattcatttctgcaccctctccccacttccacaaacactttttgttacaggtgttcwagtttattttgccttttctctatttttctatgttccctcatcactcatgtctccccacagctggtattcacagatctcgtttaacaaattttgggtttgctctcacttatgtggaagagtctatttccagcaaactactggacttgtatcttagggctaattattcaggaactggcctaagtccttacttaccattctctaaatattctctgtcacttcattacagccaagactttattgtaaatctactactttgacctgatacacacatgagaagcttttatgaaatgaatgaatgagaagatgttaatttgcctaaaggctcttcagctagtaagtcattatcttattgaaagctatcaaagcctttcttagttacttctcaaaccactcactgcccttccc

SEQ ID NO: 737368 - DNA, 538 bp, Homo sapiens
aggaaaatgagtcccgtgatgagttttctcatgcttcggccatgcgtggaccagtcagcttccgggtgtgactggagcagggcttgtcatccttttcagagtcactttgtaggcgttagcgaagctcccgtccacrtacagctcacagtctactgatgttcaaggatggtctcggaggttgagcctgctagaataaactgagtccaacacctctacacagttatgttcaactgggctctctgataccgggagcaaggtggtggggtttagggtgttgcaaacttcagtggttatgcggggattttcatatagcaagcttgggtacttggttaatctggcatttgttaaccaatgatgtcctttgatagtcattaaagttaccacagtatggggggcctttatattcaggttttgcccaagggttagtttatctgcttcttgtgctaacaggaccattgctgccagggcccttagacatggggccaggctttggaaaccccatctagttgttttgagagataggccactggccttggcc

SEQ ID NO: 737369 - DNA, 578 bp, Homo sapiens
taatatagagaaaattctaaagaaaacatacaaaaatcagttgcatttctatacagtagcaatgaaagttataaaaataaaattaagaaaataattccaacaaatggtggtgagacaactggataaatttaaccgatgagatgcaagaatgaatgaatttggatcctcacttcacaccatatacaaaaattaactcaaatagactaaagactttaatataaagattaaaactcttggaataaaacatacgggaaatcttcacaaccttggatttagcaatggatttttagatatgacaccaaaaacaggaaaaatagataaattggactttataaaaatgaaagtcgttcatacatcaaaggactctaccatgaaagtaaaaagacactycacagaattggagaaaatatttgcaattacatatttgataagagtctagtatttagaatacataaacacttacaactcaacaacaaaaagatgaacaacccaattaaagaactgtcaaggatttaacagatatttctccaaagaaaatatacaaatgataaataagcacatgaaaagatgctcaacat

SEQ ID NO: 737370 - DNA, 594 bp, Homo sapiens
agatatcccatagagggaactgggacatgactaatgtggagcagtgggaagtaagtttggaagggaaaagggacccagtttatagaggacctgaaacctaagagagaaggtgagcattgatgtagcattaaatactttaacgaaattattaatacttttctgatttttgtagtaaaaatacagtcataagaacttcgggggaaaaaaagcccagaaaagtatgaaggtgaaaattaaaaatcttacccscagagataaccacttgtaaccttttttgtgttacttaaccttgatcctaactatgacatgtgctagaaaatatgaaattatgatcttacttttatgaaataaagtgtttttatatgcattttttatatatgcttacagtattctgtatgattatattgtataataagctctgcttttttcactctttgttgtgaacattttcctcataactaggaaatattagaaaaaactttttaaggctatggactattaacaaagtagaagtaccataatttaacaatttctctattattggcttttgaggttgtttccaatctttcactattagaaatagcactgtgatga

SEQ ID NO: 737371 - DNA, 546 bp, Homo sapiens
agaaaaaaaaaagccacccaccagagacataaatggcaatgcatgcatcaggcatggtgctaggaactttatacacatgtaatcctttcaaaaatagctcttttaagtaagaaaaatatgacccctccccatattaaatgaacaagggatatgaacatacaagtaatttattcaattaacaaatatttattgagcacctactatattttaggcactgtgctaaaatcaattccaatggtcaacaaatatgtgaacaaatggtaatcattattgaaggaatgcaaatgtacaaaaagtgacttttccatttttcacctattcaatggtctatattcaaaataaatgattctccaggattggatgagcgtggctttgggatctcttctactgtaggtagatgyacagctgcataatcttcctgaaggcacttgagcaatgtctatagaatggcttaaaatgcatacatatcttaaaaatggccaaccaggagcaggaagcactcctaacaacctgattgtggtttccaaatgccatttgggaaagtac

SEQ ID NO: 737372 - DNA, 605 bp, Homo sapiens
ctctgtctcaaaaaaaaaaaacaaaaaggaaaatacctctgcattgccaaggcatcagttaagaactcacattcagctagatgcagatgtaggttttttgcttctttctctcttttaaatcaataatggcatttctgggtgtacagtgtgatcttcgacaatgttaagcggattaattgtctgcatgttctgaactcttccctttttctgcccacctttccttcccaccgacaataagtatgcatagggctaccccggtttcctcagttgcagttccgggaggaggattccactctggctttggcattaaagacttttccttgcactcaggaacaacgctttaccagcagctgcctaatytttttgctcttgtttttgtgtttcttcaggttccctctggggtcctataccatacaaaatattgttgctggatcaacttacctgttttcaacaaagacacatttatctgaggttggttttataaaatgataatacagagactgggcaaccctccgcacacccggaccaggctgctcagttttagtgagatggtggattttcatgctaattccttctcttatctctgtcttcctttatcagtacta

SEQ ID NO: 737373 - DNA, 551 bp, Homo sapiens
caaggaaaattagccaatgcataaaatatacaaactatgaaaggcaaggatcaggaaaccagagactttgccaccaaatctcagattattagaaactaggtgtcagggtttatcaagaaggccaggaaggccttttgggttaagccttacattcatgaagaacctcragggtagatttttgagagcattccaaatgaatggtctctggtcaaatgaatgaatggtcaaatgaataaatctgccctcacagagatacaaaaggaaaaggaatataattcataccatttggtttaagccttacattcatgaagtacctcaagggtagatttttgagatcattccaaatgaagtcgaatctgccctcacagagacacaagaaaggaatataattcatacactattgcatttttaataaatcttttgaaatttgcagaattagattgtattgtgtattttcggttaaatgataattgaatgtaaatatttagatgcagcaccatattttataacccagctttagcatttcttcatattttaaggaaaccccccac

SEQ ID NO: 737374 - DNA, 551 bp, Homo sapiens
caaggaaaattagccaatgcataaaatatacaaactatgaaaggcaaggatcaggaaaccagagactttgccaccaaatctcagattattagaaactaggtgtcagggtttatcaagaaggccaggaaggccttttgggttaagccttacattcatgaagaacctcaagggtagatttttgagagcattccaaatgaatggtctctggtcaaatgaatgaatggtcaaatgaataaatctgccctcacagagatacaaaaggaaaaggaatataattcataccatttggtttaagccttacattcatgaagwacctcaagggtagatttttgagatcattccaaatgaagtcgaatctgccctcacagagacacaagaaaggaatataattcatacactattgcatttttaataaatcttttgaaatttgcagaattagattgtattgtgtattttcggttaaatgataattgaatgtaaatatttagatgcagcaccatattttataacccagctttagcatttcttcatattttaaggaaaccccccac

SEQ ID NO: 737375 - DNA, 515 bp, Homo sapiens
ccattcagtctatagatctggaacctgtagatacagactaactgtatttggataatttcataattttaatgagagaaaggggagaggggaaagcctggtttactgcccatgatgaagtagtaatacagtaaatttagttgagacatcagccaaccttttttgaatacctactaagtacctggctgagagagttgtaraaaccacagtgtcaatgtgtttctacacatttctataattgttggagttgtgtttatctctagaatttgtggtactatcctaaacctccatgcaactctttagttgtgatgtagaggtggctctgtgaccccccagccttctccagaggctatgtagacatgaagcgtttagttggaactagggacttgatttgacattcctggacttatacccaaagtctaaaagggtgttaaaggggtatacgtactgcagtcaaaaaaatggtgggtttggaacttggctctgctacttaatagcaagttcttaaacctctttgt

SEQ ID NO: 737376 - DNA, 427 bp, Homo sapiens
tgattttctgaggaagttccaggggtttttggtcttttaaattttttgttttgtgttttatcccacccccagccatagggcaagcctccaaatagtcataggaactagttttccacctgaacactaatgtctaccaaacataagcctgctcaaaatggccacatttttactctgctacttttccttcacttctattctttattgaccttctttcatccatgtaaccacgtrtcactatttttaaaatttcaacatatagtggtttacaacttatacatttacaaactttaaaccaatcatgcacttggttgtctgcttcctggtatcttaatctcatcaaagccaggtctccaaatcataaggaagaaagtctgaaaaggatcatgaaagaagtggctttactaggtcgaagcatatgtgtatttca

SEQ ID NO: 737377 - DNA, 637 bp, Homo sapiens
tccccaaagcagaaatgggtgaagtgaaatgaaaagaaagtttattttttaaaggtaataaagacaaaggaaaaacaaaaaaacataacttttcttaatttgtgttgtagcaagttaagctgaggtacggaataccaggtggatgggcatgggaaagggagatgatgacactgcaagcagagggaagagaaaagaaaaagagacatgtggaggatagcgtggaatagctgcctggcctrtgctcaaaatagtaagcagtttgggatggccagagcatactcaggaatggtatttagtgctggctgggatctgaccatggaagatgcttataccagtgcctctcaaacttaagtgcacgtgagcacccgaggatttgttaaaattcgtattctaggtggagacttcagaggctgcgtttctaacaagctgcaatgtgatgcaaatgctgcagggtcacaggccacactgaacagcaaaactgcaaattttatcctaatatttatcaataatatgttttatggatgaagagtttccaccattacagtgtttgttgaatagcacaaaatacatagcatttatcttaagctagatattcagtagttttttgtaagctttgctctcctgatggtgaaataat

SEQ ID NO: 737378 - DNA, 576 bp, Homo sapiens
gtaatactagctaatttcttcttaaatttaaggaaaaagctgagcttctgacatctctggaggtttcagcaagaaaagattgtgtaggttccaaagagtctgctttggcaaaaatagatgcggaattagaagaagttggaccatcaagaagggttggagaggaaactgtaggagataattcaccatcttcagttgttgaagagcaatatctcaataaactaacaaggtaacattttatttaacaaaatgtttcacaataagaaataaaaatcacttaacttttaccttaacttactggtagaacaaaatttttgggtgttgagtccrttagacatgggtagaaacttgaccaaagaggagtatgtatgtattagctaagtaattaaggtgctcattcaaatggagtcacaaacacaaataaagaataccctacttctatagttttcaaagaaaatggaaagaaacttaagttctagaaaccagcactgctctagtggatttctgctgcctcctttttcttttaacctatctgtttacccagtaggataaactaataccacatttgatctcatattc

SEQ ID NO: 737379 - DNA, 568 bp, Homo sapiens
agaaaataatcccataattagtaattaggagaagtgaatgatgtaaacaaattcatctgtaatgtttcctagacattatcagagttaaattgctctgagatcaatcatcaacctaatccaatatagcatttgtaatataagtctaatgcattttagtraaaaacatttcaataaaatatccagttttaaaaactgaaaaaatggctaagggaacctaaaattaatgtgaagtaaaaattggccttaatcttaaaataaaagcaatatggaaagacttttcaatgcatagcacagggaacaatcaacaaagtgaagagacaacctacagaatgggagaaaaaattcccaactatccatctcacaaaagttaataaccagaatatataaggaacaaaaacaactcaatagcaaaaaaacaaataatctgattaaagaataggcaaaagagaacagacagttctcaaaagacatacaaatggccaacaggtgtctgacaaaatgttcaacatcattaatcatcacggaaacgcaaatcaaaactgcactgagatatcctactgccgttaaa

SEQ ID NO: 737380 - DNA, 595 bp, Homo sapiens
attgaaatatatgtttatgttcaaatgtaaaatgctacttatttttaaaatatttgtttctttggaattagattgagcacatattgcctttatttaagatttataaattttatttaaaacttatgtatagaaacccatactgcttatagtcaaagtcttttctattttttatttcttccttggagggtaccaagccaggctgatggaattactggtatactatttcaacttttcaacttggaaatgtttaatgtgcgcaaaagtgcagtagtggactcccatatacctgctgtccagtttcagtaattaatatttaccagtctttacgtttaaaggctagcctatgctatactttcttacagctgtattagcctatttaaatartacctagctgggcatggtggctcatgcctatctagctacatggaaggctgaaggaagaggattgcttgagcccaggaattagaagctgcagggagctatgaatgggccactttactccagccagggcaacaaagtgagacagactcctgtccctccaaaaaagaaaagtacctaacctgagagtgaaagctaggtttcctgaactacttta

SEQ ID NO: 737381 - DNA, 551 bp, Homo sapiens
gagcttacatagaaaatccttgtagccacatagtcttcaactgatgacaggatgaaaagaccttcttttgcctaccaaactgccaaatccaaggcctttgcaggaaagaagtgctgataatacaagtattactcttggagaaaaggaatactcagtttcaatctcatatttgaacaaggtatatcccaaataatcaggagtatttagcaaaatgcaatcatgttaaaatgtatttcacttacctgtttcctcaaaaacatttgttaattcctttgagtgcacctattttaagaaaatttaaaaaaaaatttagaaatttatcaagtaaaactgaaattaattttatttcctttttttctttaagtaaagaaactatgttatctyccaaaaagctcttagaggaattctactaaacatttatggcaaaaatattgctactattttaaaatgttccagagcccactggaagagagaaagctgctaactgcctttataatcagtctcaatatcagtgcaaaagtatcaaagaaatagtacaagcagcacatcaa

SEQ ID NO: 737382 - DNA, 588 bp, Homo sapiens
tgcatcataaagctacaaaaattcggccgggcgtggtggcccacacctgtaatatcccagcactttgcaaggccgaggcaggcggatcatctgaggtccggagttcgagaccagcctaaccaacatggagaaacccygtctctactaaaattacaaaattagctgggcgtggtggcggctgcctgtaatcccagctactcgggaggctgaggcaggagaatcacttgaatctgggaggtggaggttgcagtgagctgagatcacgctattgcactccagcctgggcaataggagagaaactccatctcaaaaaaaaaaaaaagaataaagaaaactacaaaaattcaaacagtatgatgatactggccccagaacaaataggtgaatcaacataaaagaaaaggaagttttaggaatatatccaaacaaatatgaagatttactgtcttactgataaaagcagaatttcctatcagtggaaataagatgaattattcagtaaatggtaaaagtcatatgaggaaaattaacttggccctattccttacaccaaatcaaattcgcaacaaatcagtaatattaacatta

SEQ ID NO: 737383 - DNA, 556 bp, Homo sapiens
ctttgaggtataacattaggttgtttggaatcttcttgtttgatgtaggcaattattaccatcaacttttctctcagaactgcttttactgcatcccatgagttttagtatcatgtttttccatttttgtttttcttaagatatttttaagtttctctttcatttcttctttgaacaattagttgttcaggaacatgtttaatttccacaaattcatgaagtttccattatttcttttattgctttctaattcataccactgtggttggaaaagatacttgatatgattttaattttcttaaaatttttaacacttgttttatckcccaaaatatgatccattctggggaatctttcctgtgtgcttaaaaagaatgtgtattctactgctattggatgagatgttctatatatgtctgttaggtccatttcatctaaagtatagtttaagtccagtatttccttattgacttactgtctggataatctgtccactgttgaaaatagggtgttgaagtcctttactattattgtattgcaacatatttctctcttg

SEQ ID NO: 737384 - DNA, 612 bp, Homo sapiens
tagcatataattgtgtctcgtggttttttgttttggttttaatttttatttttttgagacagagtcttgctctttcgccaggctggaatgcagtggtgtgatctcagctcactgcaacctctgcctcctgggttcaagcgattctcctgcctcagcctcctgagtagctgggactacaggcatgtgccaccaatgcccagctaatttttgtgtttttaatggagatgrggtttcaccatgttggccaggatggtctcaatcttctgaccttgtgttccgtctgcatcagcctcccaaagtggtgggattacaggcatgagccatgatgccctgcctgtcttgtgtttttatttagccagttactctataaactgtacttggttctaatgatgagatcatgggttgaatttagggtgttcttaatactgaataatttacattttaaatccaaggataggttgtttctggctaaaaccattatatttatgagtctggcctagagatcaaatggagaaaacaaataataaatcccaaagaattgttattatattcttctatggcacactgccctcagaagaatcttttgtcttttctactgacaatacaaaaaaa

SEQ ID NO: 737385 - DNA, 595 bp, Homo sapiens
ttatagatatttgtcagatgaataatcaaaagagccattaaatgggaaaagaagggaagaaaaattatagagcttggtaaaatggcaaaatataagaatattttgtactttcagaaattctcatggggttcagtgctggacaagaaggaagggtacrggggatgaatctggaatttggtaatacgtatgttcagaggctattaagataattgtttgagtggagagaattgggaatattatctgttacttgttttaggaagaaatattaatgcaaattgaaaacgctttaaaattggctccttacaaattattaataatgacttctcctcagaagcaattatagtttctctgcagtctttggttctctgactacatttttggaaaacaggagtttctgcattttctgccctttccgagcttataataatggttcaagtattctttcacctgtggtttcaaggcaatacaaatccatcctcctctataaatttctttctttgttcttattcccagataaattattctattttaggaaaatctatctttaattgtatctccaaatttttttctcatttaaaacagtagttgtacattt

SEQ ID NO: 737386 - DNA, 572 bp, Homo sapiens
atcagttaggtgtgggttttatttactaaccatgtatggttagctatgttgctaatatctattgcacagggttggcgtacccaagcggtttagtaaggttatccttctcttccccaatatgctgcccccagtaaaataaaaaacccacgctaagcttcatcaggttacttcacacgccactgaccaaccaactcactactcagaattcatacacttccctkttttccagaggaagattctacacagtctcagttagttggtaaattggtaatggataaggattgagaagtctgagtttgggggagaatgaaacctttcccctcctgagaacagaattgggatggtgggcggggggaagggagggacaaaaaaaaaaaaaaaaaacggacagggaaagtatttttttccctccaacttaatttggagtattttctccctccaacttgatttggttttggatacagcctgtaggaatcacttacttcttttaccttctgaagtaagaaggatttttgcctgtaacattgtataattaaaggtaactatgctggatataaatttcagtctaaagg

SEQ ID NO: 737387 - DNA, 572 bp, Homo sapiens
atcagttaggtgtgggttttatttactaaccatgtatggttagctatgttgctaatatctattgcacagggttggcgtacccaagcggtttagtaaggttatccttctcttccccaatatgctgcccccagtaaaataaaaaacccacgctaagcttcatcaggttacttcacacgccactgaccaaccaactcactactcagaattcatacacttccctgttttccagaggaagattctacacagtctcagttagttggtaaattggtaatggataaggattgagaagtctgagtttgggggagaatgaaacctttcccctcctgagaacagaattgggatggtgggcggggggaagggagggacaaaaaaaaaaaaaaaaaacggamagggaaagtatttttttccctccaacttaatttggagtattttctccctccaacttgatttggttttggatacagcctgtaggaatcacttacttcttttaccttctgaagtaagaaggatttttgcctgtaacattgtataattaaaggtaactatgctggatataaatttcagtctaaagg

SEQ ID NO: 737388 - DNA, 629 bp, Homo sapiens
ccaggaatttgaacgtgcggtgagcatgatccagccactgcactccagcctgggtgacagagtgagactgtgaacaacaacaaaaaaatcaagtttcctggatctatacaaaattttcaatttaacaaatttttataaaaatttgtyttaaaataaacacccctctaaatggcaaagctagaacagaatctggtcacaatctataggttagatataggatgacagggaggagcaagagctgaacacatcagctgcagcaccatctactttgcctgcgactccgttagcaggcccactttgcccttttataaattatctgatcaacaactaagagattaaaattcgatctatgttttactctatctgaatcctcaatataatgaagaactttataattgttaatttatggatataatttaagttcattaaaccattatttccttcctatatcctctcattcttccacaaaaacctctacctttgggtgtttacttttacagacacccacgcacacaccccacacgcacgcacgcacatgccttatcttttaactcaagattctcatcttcctttggggagaaacaaacatcatgagccttgaggtccattttctgagggaaagggggggg

SEQ ID NO: 737389 - DNA, 653 bp, Homo sapiens
tgatgaaaatgaatcttcacaaaacacttcgagcactgtccagtattctaccgtggtacacagtggctacagacaccaagttccgtcagtccaagtcttctcaagatccgagtctacccagcccttgttagattcagaggagmggccagaagatctacaattagtagatcatgtagatggcggtgatggtattttgcccaggcaacagtacttcaaacagaactgcagtcagcatgaatccagtccagatatttcacattttgaaaggtcaaagcaagtttcatcagtcaatgaggaagattttgttagacttaaacagcagatttcagatcatatttcacaatcctgtggatctgggcaaatgaaaatgtttcaggaagtttctgcagcagatgcttttggtccaggtactgagggacaagtagaaagatttgaaacagttggcatggaggctgcgactgatgaaggcatgcctaaaagttacttaccacagactgtacggcaaggcggctacatgcctcagtgaaggactagtagttcctgctacaacttcagcagtacctataaagtaaagctaaaatgattttatctgtgaattcagattttaaaaagtcttcactctctgaagatgatcatttgcccttaaggacaaa

SEQ ID NO: 737390 - DNA, 511 bp, Homo sapiens
gtggcagtgtcaagattcaaacccagacctcctgactgaggaaccaggaccttataaaataattttgttaagaatatattttagtacccaaatgtatattattaaaatttatcattatggaataaatgattctctttgctctaaaataacaaaagtcatttttcattcaacattaccaaattctggaccaaatatcaaatggcactctagggtgtaaattaaactaaaaatgctcttcatcaaatattgkgggacaattttgccttttcatttgttgtgtttaagattttttttgacactaagatgtctttcccataactgctaggacttagaaatcctaaataaggtacagttaaacgttttattcttccagagctttaagacaagttgccttgcaaaaataatctttcaaaacaaacaaataaaaaatgtgtgttctctctgtttttttgtaggcataatgaaacactgggcattttttagttttactttttattttcttttagtgaac

SEQ ID NO: 737391 - DNA, 764 bp, Homo sapiens
ccctggatgcccttttgtctctttaggggtggggaggatatacaacaacttcattaccgtgattattaaaacttggaaaagtggaagataaatatgtctgtctatgtcttgtcataacaatttagcaattacaatatgtattctgaaattaaacatgcatttagmaacatttagaagtcttcagggggttgagcttctccctccaacactgcatcacttgggatgacatctctctaattctataatattcagccagcctggtaaatgtggtaaatattgtgaaaggatcaactgttagtccaacttggactaacagagctctgcaattacagaaagagaaatagttgaagaggcttgggttggcacagaagagaattaagcaaagacaataataactaaagagataataactaaaaagaaaagagcacataatccaattctcacacattcagcaagtacattcttttctgatgaggcatcacaattggctccagggccctggtcacctaacatcatagactgatcacctagtcacttgcattctccttacattacaagaaatgcccaatgttccttctcccaggaacattaactgaaatctctaacaactggtccagcacagagagtggtcagtaaagcacaaagatcgataaggtacaggcatggaccagtccaatcagctgccttctctcacatacctggggactacactggcaccccttgtactgcctcacacagttcaagcacactcactttttaaaaga

SEQ ID NO: 737392 - DNA, 588 bp, Homo sapiens
agcagctgtattactcaccagtaggtggcaaggatatcagaagcctaggatccatgccaagctggtgccccaaggttcggagacctgtgcggggtgagtggagtcttgtccgtgcccgccgcacatcgcgccacagctgagggaccctgaaagtgctctgcttcgggtgttccacccttggcaccacttagctcactgggcagaagtgcrgaagaacgtctcattttgggaggcatgaggacaaagccgggttgtttcccacttcctccttatcaggatattgcatcctccatacattcatagtactgaagccggaggaagcagagttgggtcagccaaggccatccggggccctgttctccttcataccagccctcgcagttagtatgcagggctgccaagccctcgatggctacaacaacaagttttctctaggcctcctcttggctgggtctaagtctctgctttttatggtggaagcaatgagggtacatggctcacctccacattgcagctaaaaggcagcccaatgcacctgcaccacacccttgctgcttaagaaacaagagccacaagtgcctcacagct

SEQ ID NO: 737393 - DNA, 588 bp, Homo sapiens
agcagctgtattactcaccagtaggtggcaaggatatcagaagcctaggatccatgccaagctggtgccccaaggttcggagacctgtgcggggtgagtggagtcttgtccgtgcccgccgcacatcgcgccacagctgagggaccctgaaagtgctctgcttcgggtgttccacccttggcaccacttagctcactgggcagaagtgcagaagaacgtctcattttgggaggcatgaggacaaagccgggttgtttcccacttcctccttaycaggatattgcatcctccatacattcatagtactgaagccggaggaagcagagttgggtcagccaaggccatccggggccctgttctccttcataccagccctcgcagttagtatgcagggctgccaagccctcgatggctacaacaacaagttttctctaggcctcctcttggctgggtctaagtctctgctttttatggtggaagcaatgagggtacatggctcacctccacattgcagctaaaaggcagcccaatgcacctgcaccacacccttgctgcttaagaaacaagagccacaagtgcctcacagct

SEQ ID NO: 737394 - DNA, 588 bp, Homo sapiens
agcagctgtattactcaccagtaggtggcaaggatatcagaagcctaggatccatgccaagctggtgccccaaggttcggagacctgtgcggggtgagtggagtcttgtccgtgcccgccgcacatcgcgccacagctgagggaccctgaaagtgctctgcttcgggtgttccacccttggcaccacttagctcactgggcagaagtgcagaagaacgtctcattttgggaggcatgaggacaaagccgggttgtttcccacttcctccttatcaggatattgcatcctccatacattcatagtactgaagccggaggaagcagagttgggtcagccaaggccatccggggccctgttctccttcataccagccctcgcagttagtatgcagggctgccaagccctcgatggctacaacaasaagttttctctaggcctcctcttggctgggtctaagtctctgctttttatggtggaagcaatgagggtacatggctcacctccacattgcagctaaaaggcagcccaatgcacctgcaccacacccttgctgcttaagaaacaagagccacaagtgcctcacagct

SEQ ID NO: 737395 - DNA, 623 bp, Homo sapiens
agaaacatcattaattaattcagaacattaatcaatggtcttcacacatttttaattgttattatgggcacactgagattcaaaagtcactggaaaaacagaaatcaaattatgaataattatactctttgtaataacataaattgaaatattctgaaattwccaaagacttttgggcacagttctggaggaaggataaaggatatttatgggaaaaagagtcaaaataatttccatttcaggcattaggaaactgtaattgcttggaggcaggcaagtgtacagtaaatgaggaatttcatggagtttgtgtagagtgcttacaaattataatctcctaaatttcacatttaatattagatatatttggtcatgccaaaacactgatgagatgaaaaataacactatcaacctgtgttattatattattacatccatcgaatttgaaaggaggatgtcatccttaactgtgacaatgaagtcattacagcttaaattagtgaaataaatagaaaccagataacttagcacctatatttgatgaagaatttatggaatgtaatggttgacatggtaaagctaaggagtaatgaaaataggtagctatgtatctggaaatatca

SEQ ID NO: 737396 - DNA, 621 bp, Homo sapiens
tcatgccaaaacactgatgagatgaaaaataacactatcaacctgtgttattatattattacatccatcgaatttgaaaggaggatgtcatccttaactgtgacaatgaagtcattacagcttaaattagtgaaataaatagaaaccagataacttagcacctatatttgatgaagaatttatggaatgtaatggttgacatggtaaagctaaggagtaatgaaaataggtagctatgtatctggaaatatcaaaaaactgtagattttaattattcaagggagtaatatttaacaaggtaaacgtcttagttataatatgaaattgtataataaaagataattttaaaaattgtayctatgtcaatttgtgtaacaaaattttcttcatgtttgaaaccaaatgatatccaaatatcaatcttatgggaataaattagttttcttaagatttcaatcaaaatcacagattcagttgattttgacacctaaagacaaaacagttttggaaaatgtccagcttctgttgtaacctaaagtatgtttattcaaaaggtgtgtgaactttggtccaatttattccaattagggaatggattatatattgtactttgcgaatcca

SEQ ID NO: 737397 - DNA, 595 bp, Homo sapiens
ttgaggtcagaataaccatgatagtatatttatttaaaaaaaactcacaaaagtaacagttcactttctttcatgtacataggtacaataccatcaaataaagtccagtgacatatgaaaaaggcagtacattatggtcaagtggtgattattccagaaaagctagaatgttttgtatttcatagtcagtgtatttcatcacagtagcaagaggagggggagagagagaaaaagagagagggatcaagatcacatcatcgtctcagtatatatgaaaacatcattttaaataatttagcaaccgcrcatgattaaagcctcttaaaaatctaggacagaaaggctcttccttaaatgtatgagaaatagctcaaaattctggagtaaacaccaggctaaatagtggattattaagtttggctcctaaaattggaaatagttagaggataacaataatggctacttctcttcaacattgtgctggatgtcagtgccagtacaataaggcaaggaaaaaaatgtgtgtgtgtgtgtatatatatgtgtgtgtgtgtgtatgtgtgtgtgtgtgtgtatgatgtttccaaataaataa

SEQ ID NO: 737398 - DNA, 597 bp, Homo sapiens
aaagtttctaaatgatctcttaatagttcctttaataatttgatttccaactctcttactgtctttctcactttctctgaatgattgatagtgtttagaggcccctctatgttatcaataactgatcagaatatttcatactgatacgaacatcaaatttctcttagtttagcytaagatgtaaggttttaaactttgcagttcaattgcattgtgtttctatgctcaaattaactcatagatttttttacttgaactgccaaaatataagaccctccttaatttatatttgagtgaaagagattttaaatccaattaaaatcaacccatcaaaaagtgggtgaaggatatgaacagacacttctcaaaagaagacatttatgtggcctacaaacatatgaaaaaaagctcatcatcactggtcattagaaaaatgcaaatcaaaaccacaatgggatgccatatcatgccagtcagaatggcgatcattaaaaagtcaggaaacaacagttgttggaaaggatgtggagaaataggaactcttttacactgttggtgggagtgtaagttagttcaaccattgtggaagacagtgtg

SEQ ID NO: 737399 - DNA, 605 bp, Homo sapiens
tacctttctacttctctcctgactggccctttgtctctatactttcttcttctccccgacccctgcctagctaactaattcaccttacccctgatgctttctagaataaaccactgtcctccaaccaggccttttttcacccctccttgcttcaacaactgcagctctcacagcagaggaagcatcactgccatctcttcctccatcttcacatggtgttctcactgtgccccatgtctcttctccttttcctgtaaggacaccagtcatattaaattcaggcccactctaataaccttcttaacttcattatatctgcaaagaccctcatttttaaataaggccacattcacagatmtgaacagaagtggcctaggcacagcaagctctcttatgaacaaaactgctcaattaattctgtgatactgaagaagcatggacgtaataaaatcaaattaccaactgaagagtgccttggataatcttcatggtgaatttccctcctcccattcacaagtattttacctaggatgaaaatgagttacagctctagtgtttcttgaacctgcagcccattccaatcctggagagctgatggaattttt

SEQ ID NO: 737400 - DNA, 670 bp, Homo sapiens
ggcatacaccaagtaaccaatggaaacctctagagggtacttaaaccccagaaaattctgtaatggggctcttgattagttggtctttttaccacttcagctacctttgtttcaaagaattttttgagtgcactaatccattaaagtttgcattargctgatttgcataccatttgccagctgaatttttacactctgatgttaatattaagatagcaatttagtacaataagtgttaagagctagtgacaaaattatcaacatgaagtgaagaacaaaactgaaacatattaaatatctggtatttggacctcccatctccaattctgtactagaagattaaataaattccagatcaaaggtaaaatctttatctctttggctattagagatgaatactaagtcttcgtgtttgcagcttaagtaactggaaatcaattcagctcttttttaaatatggatttgaattgttgatggttctgcaatatattgacaaaataagtgagaccccagcttaagaactttatgaataggcatgttatgtatttctgatgtcctggaagcaaagacacaaaaacaattctaagactatgattttaaaattccagtcctctctttatctgctagtcaagcttaatcaaagatttcctcttttgagcagtcttcaata

SEQ ID NO: 737401 - DNA, 607 bp, Homo sapiens
gtctcaaaacaaacaaatctctttaactcccaaaatggaaagttctccaagatatatgttaagtgattaaaaaaaaaaaaaaaaaaaagggccagcctggcatgctggctcatgcctgtaatcccagcactttgggaggccgaggaaggcagatcacctgacgtcaggagttcgagactagcctgaccaacatggggaaaccccgtctctactaaaaatacaaaattagccaggtgcggtggcgcatgcctgtaatcccagctactcgggaggctgaggaggagaatcgcttgaacccaggaggcggaggctgtggtgaaccgagatagcaccactgcactccagcctaggcaacaagagcgaaactccatctcaaaaaaaaaaaaaaaaaccgcatctctactaacaatamaaaaattagctgggcaaggagctaggtgattatagtaccagctactcaagaggctgatgcaggagaatcactaaaccgcatctctactaaaaatacaaaacttagccaggcaaggagccgggtgactatagtaccagctactcaagaggctgatgcaggagaaacacttgaacccgggaggtggagtttgcagtg

SEQ ID NO: 737402 - DNA, 641 bp, Homo sapiens
aatctggtgcaaaaccaaaattttatttgcaagctggattctgtagcatgacagttccagtttaagtagagctgggtatgtggatagtggggtggaggggcttttagctgtgaaagaatatactttatttaaatatatttaaagtatgttaaaatatacaaattgaacctgttatttacaaatgcaaatrtgtatatttcttaatgagtaaggctcaagaagtggttttggtaccctaattaaaacaatatagcagtatttcaaatttactctataaattaatttttaatataaaaattaaaaatctcattctgctttgaacatttgtcttaatagactttatccagagctgtgattatctgtggtcctctttctcatttctcatagattcttaagcctgcaaagatttaagaagagaaagtcagaaagaagggaactctttcatgctccttccaccccagtctaaacgagaatgaaaggcagttgtagaataagcaggaggctggaaaaatccatgagtgaaactaataacatgaagaccttgttaagaacaaggtctgttcgagtatttcagaaaacatagtaatggctagagccatatgttttagattaaatgacctgtgatagcctgcagaagttcc

SEQ ID NO: 737403 - DNA, 635 bp, Homo sapiens
aaagagggtcaaagctgttgtcaggagtgtttctaagggtgtgtgggaggacgaagaagaaaggctgggaagaagttgacttcgcagaggtgatagctaatgactgtttagtgtcagctttgtttagcctcaactaggaagagagcagtaggaggaatgaatggctgtatagcatcaactttgtttactctcagctgggaaagaacaagttaaaagaatgaacggctgcagtgctaatttatatactgtcagcttggaagggacaaatgagatgtttgaatcaaggtatttattgagagggtgagttggaaaggcaacttcagatggtttctaggcaaaagtttacaaatacaagtaamataaaagaactttatcctagatacttgtttcattaataggaactaatctgttgaactacatgaaaaataactagaaaattgattaatatctcatctccagattacaagaatgtacatttcttcagttttatagaacattatgaaaaaaccactagtaaactgctctttttccttgccaatgcaaagtcaactctcataaccataaagcacaatgaaattcaacctctcatttatgtcagctttttgattggtatatatacggggaccctgaatagg

SEQ ID NO: 737404 - DNA, 631 bp, Homo sapiens
ctctataaaagtattgtagctttggagttatccccatactcctggttattacacaactgtgtaacccatggcttttctgaactttaatctccagcctccttacacaggtgcataagatggctccagtacttcataaactaaagcaagggcgaattaagatatggcctgatgctctctagggagatgttctaaggagggataaagaagactgggcatggcgaactgtagcccacccagagtgctgaatctgtgacagtgaaataaacctacacttcagaaagtgctctgagaacctaacataactcatccctctatcctttgtaagtagcaacctggaaggcagcatcaggcagagttttttaattagacagctatgtattttgtcagaaaatttactaagcagttggctaaaagaatgattatctcgagctgcactaactctgattagtatccattaaacatctatggttttggagaaasctcaaagatagccagctatgtgccaaagaacagaccaatggctatcaataccacaaagttagcacaaatataaaccgcatagtttgtaggaaaagtttatttaatggggagactaagacgatgcaagatggttactagaaaaacatctttc

SEQ ID NO: 737405 - DNA, 640 bp, Homo sapiens
ttccttggactgatatctgcatgcagcagtcactttttctgactttcttctctgctactcagagctaccaagattcatttgaaaggaaaatctaatgaaaaatggaaaagaagcagatatacaagtctgacagttggttttgactcccacccactgagagagtaaagaagtttattgtttcagttgatacctggtttttggtgatatattgtttgttgctgttatttttaaagctattcagttactttattttgaaagatgagtgtgagaaaagccttttcttttcctttggaactagtccacatcttagctgacaagtaacagcaactgttctttgtcagtcattttcagggccctgtttgtgaatgaaatctcaggagacrtgcccaataacccctaggttctgaaaatcatttacacgccaggggtactgtgtttctctttttacataccagtgtgtttattattgaaaaccataatggggcaacgtatgctgagcttttaaggagacagtgctgtaaaatctgtgtcatgtctgtaacagttatggttatcattggacttctgtccattatctcttgtttcttatcgctttgatttagagttctggaaacaagaatatttctgcttctttagcttc

SEQ ID NO: 737406 - DNA, 583 bp, Homo sapiens
ttattgatatcttgttcgttagaccttatatgcaagaagtggtaaatgtaagccctggtaagacacctgtgctcctgagggaaatagataagttctaaaagagttcaagggccagtcacattagtgacctttttatgtgttccagtgttataaggcatgctggaatatcttcattcaatgtgaagaacagattgttgtgccttatacttcctaacactaagaaagaagcacattccttggtaggcctctttgggttataaaggcaacatattctgtacttgggaatacttctgtgacccatttattacaaagtgaaacactgctagttmtgagtggatcttagagcaagaaaggactctgaagcaattctgggctgtggagcaaccagtgctgcctcttgggcagatcctatggtagtacaggtatatctagtagaaaagtaatgcctgttcaacctgagaaagctgactgaaaataaaaataaaaatatagaaagataaaacactgcgtggagcctctggagagccacaataagagaattgtagcataggattctggagcaagtttatgccatctgccaaag

SEQ ID NO: 737407 - DNA, 658 bp, Homo sapiens
ctggtgtaaacaaacctactgtgctgcccgtcctataaaactataacacatacagtaatgtacagtacataatacttgataatgataataactatattactggtttatgtatttactaaactatgttttttttttttttttgagacagaatctggctctgtcacccagactgcagtgcagtggcacaatctcagctcackgcaacctctgcctcccaggttcaagcgattctcctgcctcagcctcccgagtagctggagttacaggcataaaccaccatgcctggctaattttgtatttttagtagagatggggtttcaccacttttggccaggctggtcttgaagtcctgacctcaggtgattcgcctgcctaggcctcccaaagtgagggggttataggcgggatccaccatgcccagcctaaactatgcttttgattgttattttagagtgtactttgtctacttattgaaaaaagaaaaaaaagtgaactgtaaaacagcctcaagcaggtccttcaggaggtatccagaagaaggcattgtcataggagatgacagctccatgcgtgttattgctcctgaagaccttccaggagtaggtaagatatggaggtggaagacaggcatattgatgaccctgaacctgtgtaggcc

SEQ ID NO: 737408 - DNA, 629 bp, Homo sapiens
ttgattgttattttagagtgtactttgtctacttattgaaaaaagaaaaaaaagtgaactgtaaaacagcctcaagcaggtccttcaggaggtatccagaagaaggcattgtcataggagatgacagctccatgcgtgttattgctcctgaagaccttccaggagtaggtaagatatggaggtggaagacaggcatattgatgaccctgaacctgtgtaggcctcagctaatgtatgtgcttgtgtcttagtttttaacaaaaaagtttaaaaagttaaaaacaacaacaacaacaacaacaacaamaaaaaaactagaacaaagcttatagagtaaggatataaagaaaaaatatttttgtacagctgtgcaacgtgatttttaagccaagtattactacaaaagagtcaaaaaaattaaaaactaaaaagcttataaagtaaaaaagttataataagctaaaaacttattattaaagaaagattttggggggtaaattcgaaatttgtgtaaatacactctatgatgtacacacaatcacgaaatcacctaacacatttctcacaatgtatcccctttgtgaagggacaaatgaattcagaatgccaacattttaattcataatatg

SEQ ID NO: 737409 - DNA, 536 bp, Homo sapiens
aggaaaatgagtcccgtgatgagttttctcatgcttcggccatgcgtggaccagtcagcttccgggtgtgactggagcagggcttgtcatccttttcagagtcactttgtaggcgttagcgaagctcccgtccacrtacagctcacagtctactgatgttcaaggatggtctcggaggttgagcctgctagaataaactgagtccaacacctctacacagttatgttcaactgggctctctgataccgggagcaaggtggtggggtttagggtgttgcaaacttcagtggttatgcggggattttcatatagcaagctttggtacttggttaatctggcatttgttaaccaatgatgtcctttgatagtcattaaagttaccacagtatggggggcctttatattcaggttttgcccaagggttagtttatctgcttcttgtgctaacaggaccattgctgccagggcccttagacatggggccaggctttggaaaccccatctagttgttttgagagataggccactggccttgg

SEQ ID NO: 737410 - DNA, 603 bp, Homo sapiens
gtttatctatcaatattttttctgagttttttgtcatgcttagaaatttttcacaacacaatattatgagaaaaaaagttcttttatattttctcctgacattttaagatttaactatttttatatttaaatatttacccatctggcatttatcctttctctttttttaacttgtttttattgaggtgaaattaacattacataaaattaaccatttgaagtgaacaattaagtggcgttwgaaacattccaaacatttacatcaccccagaaaaaaacccatatccattaagcaggtgaatccccattctccccattccccatcccctggcaactacccatctgctttctgtctctgtggctttttacctactctggacattttatatagatggaagcatactatatgtgatctttcctgtctggtctcttccatttaatgtttttgagtttcatcacattatagctatgttatcaatacttcattacttgttatggctgcataacattctgttacattataataccacaatttgtttatttattcatccactgatgaacatttgtgttgttttgatttggtgctactggaaatagtgctac

SEQ ID NO: 737411 - DNA, 552 bp, Homo sapiens
tgccttcttcaaatgagggatatagagggcatggtgtaaagagctgccatttgtttcggtaagtggttcttaaagtctggtcccgccagcagcatcaacatcatttagaaacttgttagaaatgctaatttgagcrccccattacagacctactgaacagaaactcttcgagtggggcgcattaatctgcgtttcaacaagccctgcaggtgattttgttgctcgctcaagtttgtgtaccactggtcttggctgacagagaaaccaaacccagcactctagacacgtggaatccgtgtcttcatcactgaagtctgtgcatctttgtaaactcattttgcccctagaacaatatccgaaacatagtaggggcccaataagtgcaccttattgagcaccttaatgaggccaatggtggcctcccaaaatgctagatgagtgaatgagtaaaaggaattaattttggcaattatatatttgtgcttgtcctttctaatgtgggagatgaaagtttagagttgctacttttcttatagagtggggcaaagcttt

SEQ ID NO: 737412 - DNA, 570 bp, Homo sapiens
atcatctttgtcctctccaattgggcacctactgataatcaggattgcaatggccctatctaacaaatgagtcatactttttgaccccgcataattccattttgggttacttaccaattctaagaaaagaattcaacataaactatccaaagcagcattgcttataatagcaaatttgaaaataatctgtatttccaataggataatagtttagaatatatatgtatataatgagctactatgtagctactaagattatatatgaggtttatawtatggaaaatttgcatgcttattttataagtgaaaaatacacattgttcataaatataataattctatttttgagaagagaaaataaatctgaaaactatataaaaaagaaaaaaattgaaggtaattcatcaaaatattagtactgtttgtgctaatatttgaattagcacaaattgaatggttgaataattttatcttttaagttgttgcagttacacatttctgtataataaacaatcccacaacttagtagcttcaaatgacaataatcatttattttgttcattaatccac

SEQ ID NO: 737413 - DNA, 630 bp, Homo sapiens
aggaaaggtaactgttatgatgggaggagactaagtacaatgtgggatcctggaacagagaaagaacatgagtgaaaaactggcaaaaactaactaaggtctatagttttagtttgtttttttttttgtttttttttttttttggaggcarggtcttactctgtcacctaggttagagtgcagtggtgtgatcctggctcactgcaacctccacctcccgggttcaagcaattctcctgcctcagcctccttagtagctgggattacaggtgcatgccaccacacctggctaatttttgtgtttttagtagtgatgggctttcaccatgttggccaggctggtcttgaactcctgatctcaagtgacctgcctgcctcggccgcccaaagtgtcgggattataagcatgagctaatgcacctgggctagttaatagtattatactaatgttagttttatagttttgataattaattgtactaagattatgtaaagtgttaaattaggaggaagttgggtgagtagtatatgtgtactctctgtactatttctgcaactttcctaaaaatctaaaattaaatttaaaaagtttaaaaatttagaaactgaaaattctggccaggtggagtg

SEQ ID NO: 737414 - DNA, 630 bp, Homo sapiens
aggaaaggtaactgttatgatgggaggagactaagtacaatgtgggatcctggaacagagaaagaacatgagtgaaaaactggcaaaaactaactaaggtctatagttttagtttgtttttttttttgtttttttttttttttggaggcagggtcttactctgtcacctaggttagagtgcagtggtgtgatcctggctcactgcaacctccacctcccgggttcaagcaattctcctgcctcagcctccttagtagctgggattacaggtgcatgccaccacacctggctaatttttgtgtttttagtagtgatgggctttcaccatgttggccaggctggtcttgaactcctgatctcaagtgacctgcctgcctcggccrcccaaagtgtcgggattataagcatgagctaatgcacctgggctagttaatagtattatactaatgttagttttatagttttgataattaattgtactaagattatgtaaagtgttaaattaggaggaagttgggtgagtagtatatgtgtactctctgtactatttctgcaactttcctaaaaatctaaaattaaatttaaaaagtttaaaaatttagaaactgaaaattctggccaggtggagtg

SEQ ID NO: 737415 - DNA, 625 bp, Homo sapiens
aattttatgtctgcgagcgagttgttaaacatttatcaacacaccgctaatccaaaccagcacctgaagtaactcggaagcccaaagttctttcagcaagaaggctatactgtagtgagatgactttacctatgggmaagaagtgggacttcctaacattacctaacaaccatgacaaaaaggaaggacacagaatgagggacatcgtgggcagatattggaagaatctcctgttctttggtttcatttgcttacttttaaatatgcactgccttcttccaaagagcacttgaggggacaattaggaaatacagaacaggcttgtttactaaactgctcagaggaaaagcataatggaaaaataataattcaatacctttaattttgaaaaattgacgtacaaaaataaagatcaacacacaacaggtgccaagcccgaggagcaggcaagctgatccttccgctccagcccagctgcctgacagacacatttcctagtgggtcctggatgctggcaaatctggactctaccagacccccccacgaggaaccgcagggccccctcttgccttccagagctccacacggaggatggaatgccctacagaaactcaagccacattgt

SEQ ID NO: 737416 - DNA, 496 bp, Homo sapiens
ttaaaggtatcattttatccataaatattttagaatgtatagctaaaataagtgatcttgttagaaatgtaactacaggccagatgcggtacctcacacctgtaatcccagcactttgggaggccgaggaaggcggatcacgaggtcaggagatcaagaccatcctggctaacagggtgaaaccccgtctctactaaaaatacaaaaaattagctgggcgtactggcgggygcctgtagtcccagctactcaggaggctgaggcaggagaatggcgtgaacctggaaggtggaggttgcagtgagcggagatcgcaccactgcactccagcctgggcatcagagcaagactccgtctcaaaaaaaaaaaaaaaatgtaactacaataccgttaatttgcctaaaaataataattccttcatgttatcgaatactttttgttgaaatgcttgttgtttaaatgtttttttatagttggttggtttcaatcaggatcc

SEQ ID NO: 737417 - DNA, 619 bp, Homo sapiens
aatggatccctctgtgcatctggaggcaaggatggccaggccatgctgtgggatctcaacgaaggcaaacacctttatatgccagatggtgggggcattatcaacaccctgtgcttcagccccaactgctactggctctgtgctgccatgggccccagcatcaagatctgggacttaggggtaaatatcatcgtagatgaactgaagcaagaagttattagtactggcagcaaggcagaaccaccccagtgtacctccctggcctggtctgttggtggtcatttgtttgctggctacacagacaacctggtgtgagtgtggcaggtgacatgggcacctgctagaagtttatggcagagctttagaaattaagaaacgaacaaactggaaaaaaaaaagtggggagtctcaggccttatggtgaaggagagtgtttcccctggctrtttgtttttgttgaggttcctagttaatctctcttgctggtggtgtctggcttccttgatatttgtcagagggacatctattctattctgggaggaattagcctgcatgggctgccttctgcccctaggctgtggctgggaaaaaccaggtctgtgtggccttcttcacttgg

SEQ ID NO: 737418 - DNA, 547 bp, Homo sapiens
tacttatcaatctcatctaaagccttaggtgagattgattgtctgtgcaatacaggcaagaacaagatgtaggaacgggcagttgtgaaagaggaagaaatgtgctaggagaggagatgaacagagggaactgattgtgaaacattactcagatgagctgatctgaagtctgttcaactttgtaactcctcctaagtgcgacggaaggtttcactgggtaagctgacatttgtgagccaggagccccagactgtgaggtggtggccagcagattgcaaaccttgagcactgttgatgtagcactcttgattctcatctkttctctgctatggctgtgtgtgttgatcatgtttccagcaggattgagttactaccttggaaaaaggtcaccctgctcaagttcatgtttttattcatctttttagagaagacaaactacactttacttcagccatacttattgggaaggaaagtaaaaacccaatagtggcgtttggttcatttattaataaaccttttaaatatgcctgaatatcatggacttttt

SEQ ID NO: 737419 - DNA, 439 bp, Homo sapiens
ttaaatgcaaaaaaaaaaaataaatttaaagtatatgtagttaaaaatactcatgtctttacccattcctttgagaatttctgtagaggctttctcaaaatgcagagagtggaggcagtcataacatatgatgcctgcagattggggtatctgtcatttaatcaaragaagaaataaacattttatgtcattgatttatccattttagttgctatcatctttataggttatgccccaatacatgggcttttctagaaaaactatagagaatatgagagttgggaggtattggagtcctcaggtcttcaaaccacctacaggttgtgttctactcactgtatctccttcaagttttctctgctcaaacagctctcagaaaatccactcttgtgtcagctctttcatctttggatccaaacactctttcacatagttctca

SEQ ID NO: 737420 - DNA, 645 bp, Homo sapiens
gctggaaatgcataactaagccatagctctgtgtttaaaacccaggggcattaacctcccgctttgcttttgcctctgttttttgttgtgctgtttcctggttgttttctttggacttagtagatatcatttcacattargctttttctttctttcctcttcttcctttactttttttctttcttttctcaatcttgtctacattaagaggagacacttcaaagtaactttttaaaaatatgaactcagctgtgtcaaacattccattttatgattagaaggactgaattatgccacgagttttatgaccttgccagcgtcgacacaggacataacagtcagctaaacacaggggatctttggatgttgttttggtatcaggccacgccccctccttctatcctcttatcttggtaaatattactgtgcatttaaaataggtaattctgtttgcctagggagcgtgagagtggaatagagaatcactcttaaatatcattgtagtattagtatgtgatttactttgaacattttgtttaccttgaaatgcaaaattactctaaaatggacatagctaactttacattcactcatggagaaagctaattctgcagtctttgagtaaattcaacttctagccactgc

SEQ ID NO: 737421 - DNA, 504 bp, Homo sapiens
agagagccttctgcttctgacgttggcaaagagcctgaggactggcagtaacaagtcaccccctcttacccgaggaagtgaactgcagggatgttagctgatcaggacatttttttttctcatgaaagaataaagactatgctaaagaaaaaatagtgctggactgagactccaaagctctgcacagtggagtatgggagagatcgtttgggcatagaaattttaaagtcataagtttgtaaccctgtgccttttccatttacctcatawtatggtaaaacatgtgactttgagtggcaccacttatttttaagcctccaagtgggattttttttgcaaaatgttatctgaaatagctgaatatattgatttgatgaatacagctatttaataatgttcttatttattggaaattatccgctcaaaatagaaatttgttttggaaagacattggactatgcagtcaattgttcgtttctctactttaggaatggctaataatag

SEQ ID NO: 737422 - DNA, 562 bp, Homo sapiens
tcatgcctgtaatctcagtgctttaggaggccaggatgggagaattgcttgaggccaggagtttgagaccaacctgggcaacatagtgagaccctgtctctacaaataaacaaaaaaattagccaggtgtggtggtgctacctgtaatcccagatacttcaaaggctaaggtgagagaattgcttgagcccaggagttaaggctacagtgagccatgattgtaccactgtactccagcctggatgacagagctagaccctgtctctaaaaataaaatgaagaaattattctgtattgtaagatgacaattctcactaaattgttttataagccactgtttaaaaatgaaacagtgaaattccaaataaattgyctacggtactttttgtaaaatatttattgaagtataatatacatacaaaaagtacatatatcttaagtgtgcagctcttaagtttatctgaaataaaaatggagagaaatataccataaaatttcaatagaaaggaattttacaatgttttaactagcactgtactatagaaatcagcaaaaaagaata

SEQ ID NO: 737423 - DNA, 637 bp, Homo sapiens
tattgtagaccagagagataacgaaatttccttgtcaattgtgtttttaactatcactatttaaactcatttctacaattaattgcttaatgctcttgcagtttctaaaaactccataagcacacaaaaatcccagaatatgatgtcttttaagaggtcatgaaaggatagaaagaaccctgaaaagcactcttgaataaagttttctaacaactttaaaattatatcatgggtaagaattccccatgaattccccaagaattggtctggataagaactcctgaaaccttaataaaaagactgactgatttataaaactkccaacttaagtataagaaaaattaattaaataccaagaaaatactttgcccaattatcatgtgaaatcagccaatactagatatacaatttgaatgaactccacagtgtaagtcaaattacctatgataacccattagttatcagtgctatgctcctaaattggttaaacaactggtattcattcaatgttaagtatggactcatgaagaatcaggatggctgccttgtccttcctgagtccttaaagcttttgttattaaaggttctgcattccatgacttgtcatggaaaagataaaatgatccaaattgaatat

SEQ ID NO: 737424 - DNA, 611 bp, Homo sapiens
ttgggtttagttgtaaagttaggtttttgatttgagatctttcttgtttttaatgtaagtatttatagctataagtttccttcttagcattgctttcccttcatcccttaagtttttggaatggtgtctttttttaaatttatatctaagtattttcaaatgttcctgtgatttcctctttgttccattggttgttyaataatgcattttttggttcccacaaatttttaattttccagttttacttctttatcaatttctaatgtcatctcctagtgtcagagaaaatactttttctttttttcagactgagtctcactctgttgcccaggctgaagtgcagtggcacaatcttggctcactgcaacctctgcctagtgggttcaagcgattctcctgcctcagcctcccaagtagctgggactacaggcacgtgccaccatgcccggctatttttttgtatttttagtacagatggagtttcaccatgttagccaggatggttttgatctcctgaccctgtggtctgcctgcctcggcctcccaaagtgctgggattacaagtgtgagccaccatgcccggccagaaaatactttttatgatagttatc

SEQ ID NO: 737425 - DNA, 567 bp, Homo sapiens
agatgtggggagcgcctctgccccgccgccccgtctgggatgtgaggagcgcctctgcccggctgcgaccccgtctgggaggtgaggagcgtctctgcccggccgccccgtctgagaggtgaggagcccctccgcccggcagccgccccatctgggaggtgaggagcccctctgcccggcagccgccccaactgagaagtgaggagcccctccgcccggcagcygccccgtctgggaggtggggagcatctccgcccggcagccaccctgtccgggagggagatggggggtcagcccccacccggccagccgccccgtccgggaggtggggggcgcctctgcccggcggccccttctgggaagtgaggagcccctctgccaggccaccaccccatctgggaggtgtacccaacagctcattgagaatgggccatgatgacaatggcggttttgtggaatagaaaagggggaaaggtggggaaaagattgagaaatcggatggttgctgtgtctgtgtggaaagaagtagacatgggagacttttcattttgttctgtactaagaaaa

SEQ ID NO: 737426 - DNA, 567 bp, Homo sapiens
agatgtggggagcgcctctgccccgccgccccgtctgggatgtgaggagcgcctctgcccggctgcgaccccgtctgggaggtgaggagcgtctctgcccggccgccccgtctgagaggtgaggagcccctccgcccggcagccgccccatctgggaggtgaggagcccctctgcccggcagccgccccaactgagaagtgaggagcccctccgcccggcagccgccccgtctgggaggtggggagcatctccgcccggcagccaccctgtccgggagggagatggggggtcagcccccacccggccagccgccccgtccgggaggtggggggcgcctctgcccggcsgccccttctgggaagtgaggagcccctctgccaggccaccaccccatctgggaggtgtacccaacagctcattgagaatgggccatgatgacaatggcggttttgtggaatagaaaagggggaaaggtggggaaaagattgagaaatcggatggttgctgtgtctgtgtggaaagaagtagacatgggagacttttcattttgttctgtactaagaaaa

SEQ ID NO: 737427 - DNA, 624 bp, Homo sapiens
tagaacactggcacagagtaagtgttcaataaatgttaactgattttgccctcctgattataactcatatacttatctcctctcacccccgacctgagcactgcccacatgccaacaagcatgtggctttggcatctttcagaatgcaagcccctggagggcatgaatcaaggtccctatgtgtcctctcctagggctcatactgttagactggagccacagaagtttgggaaccagacttaacacctttgtagaaaagttcctacctaatggtacrgatttgctcaaaacatttttgctatatgaactccatatatggtagatctgtttattgtgctcagataatttttatcttataaattattaagaaaggaatatttaatatgactgcctaatccactcgacatttagactaaaaagtgacctacattatcactttaaagttagtcacaataaatacaacttacaatgttcatagatattcagggttaaaaacaacgaaacaatgtacttttttttttatcaataaagaagttcagttcacagataactgaacataatatgaaatcacaaatgtaccttcactcctcttttcaagtaggatcctttacaatttcatagtgc

SEQ ID NO: 737428 - DNA, 644 bp, Homo sapiens
gggattacaggcgtgagccatcgcgcctggcctgtgaggggtttttctttctttctttcttttttttttttttttattgagatggagtctcactctgtcgcctaggctggagtgcagtggtgcaacctcagcttacttactgcaacctccgccctccaagttcaagcgattctcctgcctcagcctcccaagtagctgggattacaggtgcctgccaccacacccggctaattttttttgtattttttttttttttttttagcagagatggggttttaccatgttggccaggttggtcttgaactcctgacctcgtgatccacccgccttggcctcccaaagtgctgggattacaggygtgagccatcatgcccggcctgtgaagggtttttctaaggttcaccagccctgacatcattgcagttccctttttccagaaatgcagtgcccttgaatactttccccgcccattgaaggcaaacagggttttttctggcattctgcacacctgttttgctgccctgccttccgcctgtgactgattgcttttgatctgctgaaagagaaacccccggcctctctcaggtgtttggtttcctctgtccgtcttagagtcacctctgctgacatttatttgctgttta

SEQ ID NO: 737429 - DNA, 678 bp, Homo sapiens
cataccaggataatttttttttttttttttttttttgtagaaacagggttttgtcacattgcccaagttggtcttgaactcctgggctcaagcgatccacccacctcagcctcccaaagtgctgggattacaggtgtgagccactgcatccaccctacattttcttccttccttccttccttcttccttcctcccttccttccttccttcctttctttctttcttatttacttatttttttttttttgagatggagtcttgctgtgtcacccaggctggagtgcagtggcacaatcttggctcactgcaacctccayctcctgggttcaagctactctcctgtctcagcctcccgagtagctgggattacaggcgtatgccaccatgcctggctaattttttgtatttttagtagagacagggtttcgccgtgttggccaggctggtctcgaactcctggcctcaagcgatccgcccacgagtcgtgacatccagcccactctcagggtggtgggaattaagctctttctcctggagacatcatttgattttgatttgcaggacaaccctttgaggtcaagaaagatttgagtttgtgtgaaagaaatgatgtggggccgggcgcggaagctcactcctgtaatctcagcgctttgggaggctgaggcaggaggatcc

SEQ ID NO: 737430 - DNA, 511 bp, Homo sapiens
gctttcttgagatataatttgcatacaattcactattttaatgtgtacaacaatctggtggcttttagcatatgtgcagagtggtacgaccaccaccaaaatcaattttagagctttttatcaatccaaaacgaaactccagatttcacatgggcagagaaagtaattttaatgatgtcaaatttattatttttttcttttatagactgtcttagaattcgtggcctagtccttcatcccaaacatttttctcgtatattttattctacaaatttttataattttackttttatggttaagtccataatccattttgagttaatttttatatattagtaaagattaggtcaaggttttttttttaattttttgcctgttaattcccaattattataacatcttagtcgagaagaccatcctttctcctttgaattgctttgcacatttgtcaataatctgttaggcatctttgtgtgggtctatttctgagttctctgttctgttccatta

SEQ ID NO: 737431 - DNA, 348 bp, Homo sapiens
aggaatgggcagttttaaaccccgcgcagagtcagacagaagctagttactatgggagcatcctagcggagcatcttacagtggggttcagtgtgcacctggcatgcttccttgatgaagtggtcccagaacaaagytataaaggagcaactagaaagaagcggtagccagaacaaagtcagagttgagagggtgtgtgtggggtgcagggaggcaggggaagacaactggcagctcagtgtttcttgagcaaagacagagtggtaggggtggtgagacatgaaggcgcagagggagataaggctgctgcatcccactgtaatggacttagcgttttatccatccagc

SEQ ID NO: 737432 - DNA, 604 bp, Homo sapiens
aaataagttattgattttgattctcctttcatctttatctcatgttagaaatcggccatgccaacactcccctgggatttccctccattctgccatctaattttatcccatcatttctttcaaaatctggctcaaaccacatttctgcccagatgtcttccctggtaaatttcatacaatttgggtctcttttttttttttcagcccatgtcctcatatggccaatttatgctaacttgcaacactttctgtgttgccaggtattaatttataatttgtatatcatttccatttcaaactacaatttttctcaaagtaacagtccttaagcccttaacttaaaaaaaaaaaaaaaaaaaagcctcaayctcagaaaatgatagtatggagtgcatctagtccattgagcattttatttaacaattaaataaaatagaaaatttacccaggaagcaatgaagcagataggtaaatgtttagccctgtgtttctacaagtatcttttcttcaaaataaaatgcagacatataatataccatgcgaatttacaagtcactttgctactgttgatgacaaaggagtgcttccgtgctgtgcgtgttat

SEQ ID NO: 737433 - DNA, 695 bp, Homo sapiens
acatgactgacacttctttcatataatttaagagttatatttgactttcatgtttaaaaacaacagtatatagaactcaatagctggtgtagtacctacaaatatattagctatgataacaatccttaagagattcacattttatggaaaataacatacaattacaaataaaatcttcttagcaaatggggctgtaaagggaattttacaggtttaaaaatgatctcagtgactgctggctttacaaagaaaattggataagacatttctgtgggttttctgttggcrtataggatgactagtcaaaagagaaaagaccaaagctttgccacaatccaaatgactgagccaaccatcaacaagaaaatcccaacccctcagaaccaatccttttgtatcctatgacttagagtcacagaaagtcaatatggcttctctggtttcaagtctaatgatgaagtggaactgccatgacttcaaattattatttcaaaatgcagtatttgcttaaacacttctcactgaataatactaaaactctctaacagagaagagatactggtctacaataagaaaaataaggtagatgccggaaatgaaaaatataacaaagaccacacatccaataagcaatcgatcagggatgccagaactacttagacaatttccttcattcttcccaactcctacacaga

SEQ ID NO: 737434 - DNA, 695 bp, Homo sapiens
acatgactgacacttctttcatataatttaagagttatatttgactttcatgtttaaaaacaacagtatatagaactcaatagctggtgtagtacctacaaatatattagctatgataacaatccttaagagattcacattttatggaaaataacatacaattacaaataaaatcttcttagcaaatggggctgtaaagggaattttacaggtttaaaaatgatctcagtgactgctggctttacaaagaaaattggataagacatttctgtgggttttctgttggcatataggatgactagtcaaaagagaaaagaccaaagctttgccacaatccaaatgactgagccaaccatcaacaagaaaatcccaacccctcagaaccaatccttttgtatcctatgacttagagtcacagaaagtcaatatggcttctctggtttcaagtctaatgatgaagtggaactgccaygacttcaaattattatttcaaaatgcagtatttgcttaaacacttctcactgaataatactaaaactctctaacagagaagagatactggtctacaataagaaaaataaggtagatgccggaaatgaaaaatataacaaagaccacacatccaataagcaatcgatcagggatgccagaactacttagacaatttccttcattcttcccaactcctacacaga

SEQ ID NO: 737435 - DNA, 695 bp, Homo sapiens
acatgactgacacttctttcatataatttaagagttatatttgactttcatgtttaaaaacaacagtatatagaactcaatagctggtgtagtacctacaaatatattagctatgataacaatccttaagagattcacattttatggaaaataacatacaattacaaataaaatcttcttagcaaatggggctgtaaagggaattttacaggtttaaaaatgatctcagtgactgctggctttacaaagaaaattggataagacatttctgtgggttttctgttggcatataggatgactagtcaaaagagaaaagaccaaagctttgccacaatccaaatgactgagccaaccatcaacaagaaaatcccaacccctcagaaccaatccttttgtatcctatgacttagagtcacagaaagtcaatatggcttctctggtttcaagtctaatgatgaagtggaactgccatgacttcaaattattatttcaaaatgcagtatttgcttaaacacttctcactgaataatactaaaactctctaacagagaagagwtactggtctacaataagaaaaataaggtagatgccggaaatgaaaaatataacaaagaccacacatccaataagcaatcgatcagggatgccagaactacttagacaatttccttcattcttcccaactcctacacaga

SEQ ID NO: 737436 - DNA, 605 bp, Homo sapiens
ttagtagagacagggtttctccatgttggtctggctggtctcaaactcccgacccacctcggcctcccaaagtgctgagattacaggcgtgagccactgtggctggcctgtgaccttttcatgcaatgtaccaatactgtacagccattgtgcctaaatatgtgatatcttacacatttgagatggatgggcatctaacatggtaragtccatgacattgttggtactagacattaggttttattacaacacaaaacgttagttatttgagaaaataaaaatgttttttcctagtataacctaaatggaatcacatgccagatacaaaattgtgaaagcaaaggtgaaatttaatggaatacagtttaaaaatgcatttgggtaggtactgccataaaagtattgcctttaaaattgtaacctaacctggaatgacagtgcttttaactaggtataagatgtgtgtagaagcaagtatagatttcctctgtgtgtgttatatgtatactgagcaggtattgaagtgttatgacattgttcagtcattcaggaaaatggaaagtctacttgtctttatttaaacttgtagttcccaaactgtatac

SEQ ID NO: 737437 - DNA, 599 bp, Homo sapiens
gaaatctttgcctgttcctgtgtctaggatgaaattgcctaggttgtcttccagggtttttatggttttaaattttacgtttaagtctttaatccatctctagttgatttatttatttgatgtaaggaaggactccagcttcaatcttctgcatatggctagccagttatcccagcatcatttattgaataggaagtcttttccccattgcatgtttttgtcagctttgttggagatcagacaytcatagatttgtgatctttgggcttatttctgggctctctattctgttccattgacctatgtgccttttttgtaccagtaccatgctgttttgattactgtagccttgtggtatgatttgaagtcaggtaatgtgatgcttccagctttgttctttttccttaggattgccttggctattcaggctcttttttggttccatatgaattttaaatagtttttttctagttctatgaagaatgtcaatggtagttggacaagaatagcattgaatctgtaaattgatttgagcagtatagctattttaatgatattgattcttcctatccgtgagcatggagtgtttttccatttgt

SEQ ID NO: 737438 - DNA, 599 bp, Homo sapiens
gaaatctttgcctgttcctgtgtctaggatgaaattgcctaggttgtcttccagggtttttatggttttaaattttacgtttaagtctttaatccatctctagttgatttatttatttgatgtaaggaaggactccagcttcaatcttctgcatatggctagccagttatcccagcatcatttattgaataggaagtcttttccccattgcatgtttttgtcagctttgttggagatcagacactcatagatktgtgatctttgggcttatttctgggctctctattctgttccattgacctatgtgccttttttgtaccagtaccatgctgttttgattactgtagccttgtggtatgatttgaagtcaggtaatgtgatgcttccagctttgttctttttccttaggattgccttggctattcaggctcttttttggttccatatgaattttaaatagtttttttctagttctatgaagaatgtcaatggtagttggacaagaatagcattgaatctgtaaattgatttgagcagtatagctattttaatgatattgattcttcctatccgtgagcatggagtgtttttccatttgt

SEQ ID NO: 737439 - DNA, 599 bp, Homo sapiens
gaaatctttgcctgttcctgtgtctaggatgaaattgcctaggttgtcttccagggtttttatggttttaaattttacgtttaagtctttaatccatctctagttgatttatttatttgatgtaaggaaggactccagcttcaatcttctgcatatggctagccagttatcccagcatcatttattgaataggaagtcttttccccattgcatgtttttgtcagctttgttggagatcagacactcatagatttgtgatctttgggcttatttctgggctctctattctgttccattgacctatgtgccttttttgtaccagtaccatsctgttttgattactgtagccttgtggtatgatttgaagtcaggtaatgtgatgcttccagctttgttctttttccttaggattgccttggctattcaggctcttttttggttccatatgaattttaaatagtttttttctagttctatgaagaatgtcaatggtagttggacaagaatagcattgaatctgtaaattgatttgagcagtatagctattttaatgatattgattcttcctatccgtgagcatggagtgtttttccatttgt

SEQ ID NO: 737440 - DNA, 623 bp, Homo sapiens
agattgcctatttgtgctctttcagacttttcgatgttggcattcagtgctatgaagtttcctcttagacactgcttttggtgtatcccaggtgttttgataggttatgtcactgctatcattcagctcaaaggattttaaaatttccatcttgatttcattgttgacccagtgatcattcaggagtaggttatttaatttccatgtatttgcatgsttgtgagggttccttttggagttgatttccaattttattccactagagtctgagggaatacttgatctagttttgattttctaaatttattgagacttgttttgtggcctattatatggtctttcttggagaatgttccatgtgctgatgaatagaatgtatattctgcagttgttgggtagaatgttctataaatatctgttaagtccattttgttttaggatatagtttaagtctgtatttcttttttgactttctgtcttgatggcctgtctagtgctgtcagtggagtactgaaatcctccactattattgtgttgctgtctatctcatttcttaggcaggtctagtagtacttgttttataaatttgggacctccagtgttaggtgcatatatatttagga

SEQ ID NO: 737441 - DNA, 645 bp, Homo sapiens
taatacattgtccccttccaagtgattccttacagacatcactccttcattttccttgatcttgctattctgatcatagttgcttgacccagggaggggtttttaaacaaaggcttctatctgtgtggcaatgtcttagcattggtgctattgacagtttggactggataattctcggtgctgttgacattgcattgtaggatgtttagcagcattcctggctacccactagatgctagtagcactacctctgccccccagttgtggtaactaaaaatgtctccaaacattgcctcatgtctgctggggacatttagtagttccccagttgtgaactactaaaatatagagatatgaaactttagctaggctctatcyttgtggatgcttgttacttgtgggcatttagatgacatttatttattattatttattcgtttgcttttaaatttttttatttccataggttattggggaacaagtggtgtttggttacaaaagtaagttctttagtggtgatttgtgagattttggtgcacccatcacccaagcaatgtacattgcaccctatttgtagtgttttatccctcaccccttcccgccctttccccctgattccccaaagtgcattgtgtcatttttatg

SEQ ID NO: 737442 - DNA, 614 bp, Homo sapiens
ccacaggatccttcaccatgacagtactcctgttcattcctctcatcaggagaatttcaatgggaaatcattaggcatctaccttacagtcctgatttggctccttctgccttttttttctaatcttaaaaaattgtacccatttttctttagttaataatgtaaagaaagactgcattgacatgtttaagttttcaggactctcagttcttaaaggatagactatattgctggtatcatcacttacaaaagtgtcttaaacttgatggaacttatgttgagaagtaaagtctgtactttttatttttatctctaattcaactttccacagactttttgaagtccttttgtatctactggatagaatgtrtgaattttaatgagaaaatatattaattgttgtgattatatttaaagtttatttcatgaaaatataagtaatataagttaaatatgccttttttgttttcaaaactaattacaccattttgattaccagaagacagataataacctcatctaagacaataagctcacacatggctgtcatgtgctgtaaagtttcttttcaaaagatggtatactatgttatactaattaggttttgtttgttc

SEQ ID NO: 737443 - DNA, 643 bp, Homo sapiens
aattagtttggaaaagcagtacaaataaaaagaaaaattagcattcatttctcactaacctggtttattggttcattgaagttggtgatgagccctgcacgcagagtagttttctcctcctctgagagagcactgtaaaaaaaaaaagtattgattatgcaaaagaatgccacctaataataaatgtaggtaagcattactgtaaattttaataaaaagcctttcaaacatgtgtctctgattggtttttgtaaataaaaaggattatttccattacttgtatattggcactactgtgaactttaacaataaaaagttttytaaacaactgtccctaattggttctggtaaatgaataagattatttctattacttgtacactggcacatcagataagtcggaagcataaaattccttcacaattgaataaatgggaagcaccacacagtaagcaagaggaaataagacaaatccaggtaattaatatatttgatgttcacttttattgatgtaaaaatagttgcctacgaaaaaaaaaaacacagctaaaaaaaaatctatacaagtaaatattgccactccattggcttctttcataaaatctgtgtgagattattctatggggcaagagattcagaatca

SEQ ID NO: 737444 - DNA, 465 bp, Homo sapiens
aggcgcgggggctcacgcttgtaatcccagcactttgggaggctgaggtgggtggatcacgacgtcaggagttcaagaccagcctgaccaacatggtgaaactccgtctctactaaaaatacaaaaattagccaggtgtagtggcgtgcatctgtaatcctagctactcaggatgctgagacaggagaatcccatgaacccgggaggcggaggttgcagtgagctgagatcgcaccacggcactccagcctgggcgacacagtgagactccrcctcaaaaaaataaataaataaaatgtgacttatataggccaggcatggtggctcacacctgaatctcagcactttaggaggccaagatggaaggatcacttgagctcaggagttcaagatcagcctcggtaacataatgacaccatgtctctttaaaaaaaaaaagtgtctacggtttcaacaacaattgat

SEQ ID NO: 737445 - DNA, 669 bp, Homo sapiens
caaacagtgaaaaactactttatgatcagactagcaaaaattacaaagtccaaaaatattcaatgctggcaagaatgcatggaaacagaaactcttaaacactgctactgggaatatctattaatacaactttggagagctatctagctgtctctaatgaaattgagtatatattttgtgtattctatgaccaggacacacagagggtcacacaccacataaaaatggcggctcacgcctgtaatccaacactttggaaggctgaggcgggtggatcacttagagtgcaggagttcaagaccagcctgggcaacatggagaaaccccatcactactaaaaaaacaaaaagttagctgggcatggtggggcacacctgtagtcccagctactmaggaggctgagatgggagaatcacctgagcccaggaggtcaaggctgcagtgagccacgatcgtgccactgcactccagcctgggtgacagagtgagaccctgtctcaaaaaaaaaaaaaaaaagtttcagtcagatatggaccacatatatacgacagtgatcccgtaagattttaatggagctttaaaattcctatcacatagtgacatcatagccatcctaagtcgtagtaaatcacattactcacacgttagtggtgatgctggtgtaaacta

SEQ ID NO: 737446 - DNA, 409 bp, Homo sapiens
tcagtaactagtttgctgggccgtcttctaaacgttttatatgaaatcaattcatttgttaaactctatgtagtatatatcaatattcttattttacatgggaggaaacagtctcaaatgctgaattaatttgcacaaggtcattgcaaaatggtgatgcacaagtctgctagttctagttcccaaatcctttttattataaagtgctacactgtatgaggatgtggagtarcaaaacttcacagagtctgatacagagtcagtcaccagccagctgtgctgtgtcattacatcatctaaacttctgagcttcctcctactcatttatagaatgaacagtggggaattaggcagcaatgccagccactgctgacctattcaccttgtagtgaaggcctcactacgtaaa

SEQ ID NO: 737447 - DNA, 562 bp, Homo sapiens
tttgtaggtgactagataaagacagagaaatctagaaatgccacaaccttttaaggttttgaattgcatttcagagagtctgatagtacacaatattcagaaattaaagagacggttcccttctactttcttttcaatcgctgcctcaagaacaggggacctttgttacactccatggtatactgagcatatgtatgggaaatatcctgtgtggcttaggatgaaataaataacctcctgtggtcacaagccactctgcaaaatgrcactaagaagactgagtttaaaggcagaggcctttaagcatggcctttggaatcaattggttattaacattgttataacacagtttaatttttatatgaacattaaataacacttattgaacaagctcaatttcaggacttttctccccatttatctcacaagtttttttttttttttaaaggcaacagaaaaggtctccctatattagaagtcctagagtgacagaggaaatgagtcatcaagataatttatgaactttcccatagcttgcaatgcacgagcataataatccttt

SEQ ID NO: 737448 - DNA, 577 bp, Homo sapiens
aatccaaaaacacaagaatgatttctccttggctcatggtttttcctccatattcatcctttgacaccccaagccctgtccaccatgaaagccaactcatttctcccatctcttcctccactgagcccttgccccagcctttgccgccagctcctgcccgggcacatgtagattcttccacctgctccattcatttgggtccctgaaaattcctactgtatgtggctgtatacctaggagatgtgtataacctgctctgcctgtgagatattaagctccttgagggtgagaactgtgtttctaacacttggcagagagccgagtgcacaacagtcacccaagayatacttactcctcaaaaccagacccatctcaggtcagcagtgtagaagaaaaaaatgctcatcaatgagcctcacttagctgtcttctcacgtgggttcctgtgcttcagtaagaactcagaaagcacagttcatgagacaaagacaaagggggagaaataaaggaaaaggcccctgctcagatgttctcctcactcacagcatacttcaggacaggaaatagaaacttcctg

SEQ ID NO: 737449 - DNA, 585 bp, Homo sapiens
ttgctttttggcctgccaccccgcacccccaatcctgtacccataaaaaccccaggctccactggcagagcagcagaccaacagagtggcaggaaaggagagaagagaagaagcaccttgacatcagcgagaagcagcttgacttcagagcaatggcttgatggcaggacctcagaaaagagttcagcaggggatggccaaactccagaggaagaccaccttcccactccatcccctttccagctccccttcctgctgagagccactttcatcagcaataaaatatttcacatttactatcttcaattttttcgtgtgatctgattcttcctggacgctgaacaagagctctgatacagaggctgtcacactgagctattaaatatttcagctggctgtccacggatagcaawgctaaaagagcactgtaacacatggcccccggggctccaggggtcacaggcacccccgacactgcgggggctacacggagttctgcccctgctggagcccagaagcacttgtcgcagcccctgcgcccgttcacctgcatgctccccctcccacaaggggttgagagctgag

SEQ ID NO: 737450 - DNA, 639 bp, Homo sapiens
tggccaaagactgaaggctgcactgtgagcttccctacttttgaggtttggggactcagactgatccaccactggcttccttgctcctcaacctgcagatggcatatcgtgggactttactttgtgatcgtgtgagccaattctccttaataaactycttttcatttatacatatatcctattagctttgtccctctaaagaaccatgattaatacacacacatatttaaatccccagaggatcctgctaaaactctgattccaatttagtatgtttaagatgggtttgagattctgcatctctagcaggcttctgggttttgccaatgttgctcatctgtgggccacacttggagtgaccatcagattgaggaagtttccttctagtcctagtttgctgcaatgtttatcagaaacgcatgttggattttgtcaagtgcttttttttgcatatattgatatgatcatatactttccttgaatagtctgctgaaatgataaattacattgattgattttctattgttaaaaaaatgcattcctgacaaaaactacatttggtcatgatgtatcatactttttatatatgctgaattcagggtgttatttttttattttttgtaactatgttaatgaagg

SEQ ID NO: 737451 - DNA, 611 bp, Homo sapiens
ctgaaaatttcctgaataaaaacagttcatgaaactctggatgtagtattttatttggtgtagaatgagtctacaataagatcctttgtgttctctggtttttagcagtttgactctgatgttcctgtgtgtgtgtgggcatgtgtaggtgtgtgtttaatcctyttctgcttggggattgctctccttcctaaatttgtaactttatgcctttctctaaatttgaataattttcacctattactttttttcaaatattttttctgaccaatttttttctcttctccttctcagactccagttacatacatattagacctattgatattgtccactgttcccagaggacctgcccattgtttttcaatgtctcttctctctgttctgcacattgaataacttctattgaatgattttaaagcttactaacttttctgttatttctattttactgttaaggccaatcagtaaattttttattttagatactgtaatttttaattctagaatttttatttggttcttttaagaaaaaatagtttttagttctttattgagctttcttatcttttcattcattaggaatatgtttttctttatgtccttaagta

SEQ ID NO: 737452 - DNA, 611 bp, Homo sapiens
ctgaaaatttcctgaataaaaacagttcatgaaactctggatgtagtattttatttggtgtagaatgagtctacaataagatcctttgtgttctctggtttttagcagtttgactctgatgttcctgtgtgtgtgtgggcatgtgtaggtgtgtgtttaatcctcttytgcttggggattgctctccttcctaaatttgtaactttatgcctttctctaaatttgaataattttcacctattactttttttcaaatattttttctgaccaatttttttctcttctccttctcagactccagttacatacatattagacctattgatattgtccactgttcccagaggacctgcccattgtttttcaatgtctcttctctctgttctgcacattgaataacttctattgaatgattttaaagcttactaacttttctgttatttctattttactgttaaggccaatcagtaaattttttattttagatactgtaatttttaattctagaatttttatttggttcttttaagaaaaaatagtttttagttctttattgagctttcttatcttttcattcattaggaatatgtttttctttatgtccttaagta

SEQ ID NO: 737453 - DNA, 609 bp, Homo sapiens
gtatttccttcttcaagtatagactcttctgtaatatctgcctgtttttatttgccctcagatatttttctatttttctgaagttttaaattattatctgcagaaaagttgggtaggtaggggtttattactataaaagggagtataacttttattcttttgcttcttggacaaataactattcaaatattttctaagacttagtcaattttgctctttagcaaatagtttctgtctcagttttctatttattttctcatggttctatgggtcagcagttggggmtgggattgatgggcagctcttctgctggtcttgtttattgttacctaggtggttgcattcttccagtggcttgactgggattatatggtcgaagacattctcactcactggcaatcgatgcaagaagttggctgggcctctcttctcatgtcgtctctcattctcaagaaggctatcccagactttttcacataaatatctcagggttctaggagggtaagagtggatgctacataggctcttgaagcctgcaattaaaacatacagtgtcatttccaccacaaagcaggtcataaggctatccagatataagagaatgaagat

SEQ ID NO: 737454 - DNA, 602 bp, Homo sapiens
gctgggatctagctttggctttagctagaatttcccaaataaggattctacaggatgttcctgtgtaggaagcaaataaagaagccacaaagaaaggattagattatcaaatacttttgagaaatactgagttaaatggaatttttttttcctgtaggggctttcagagccttcaacatgggaatgtgcattttgagtcacccagggtggcaggtcaggtggcacaaagcctggcaatcacatgtagagtagggggtcaaggcagggcaaggactctgaagttccccaagaaggggatgctcatttattcgatcagcaaatattaactgagcatctactctgttctaacctaggcacttataaatatgtggtagataaaactgctctcactgaacttactgtttagctagagagatagtcaaaatcaagtaaataaacaaataataacaaaattccaagtagtawtgagtgctacaaaggaaagaaacaatagagtacaatggggtgggggtgggagctacctagatagaatggttaaaaaaggcctcgcaggaagtgatacacaacctgagagctgatcaacaagatagaggtggcctgtg

SEQ ID NO: 737455 - DNA, 661 bp, Homo sapiens
ggcacctagaagaaaagagaaaatgaaaacaataatttttcgaaaaccaggaataatatgaagaaaaactacagcagacatgcattttaagctggtgcttaacatcaatgggcaaagtaaaacttctctaacatagagtttgtaggaacaagataagcagttgaggaagagtcttttaattagtggcttcattattttatttgaaatcctgaaaattcttaagccaccagctattttcataagcaaatgagaataccaaagcatttaaaaaacccaactaggaaaattatttttaatcatttgaaattttgagtttattgtaccaatatagcccacattcagtacaaatattgcaactgatrccacatatggaaaatataatttattcataaatatgtataatttccgtttgtttttcattctctgactatagatctatttatacgtttgtcttagtttgggctctcctagaagcagaatcaaaggcaaggattagaatgatagcagtttatttgggaggtaagaagtgggcaagtgggataagaaagtgagacagggaagatgattagaagtggattatcaacccagctatgactatggcaactgaagtgaattttcattgaggaagttcttggatccaggataaaacacctgccacaga

SEQ ID NO: 737456 - DNA, 557 bp, Homo sapiens
gaatactatttcattatgtatatataccacattttctttatccattagtccactgatgaacacttaggttgattccatattttggctatcatgaatagtgctacaatacatatgggaatgcagatgtctttttaatacattgatttcctttcttttgggtatataccaagtagtgaaattgctggattatayggtggttccatttttagttttttgaggaaccttcatactgttctccatcgtggctgtgctaatttacattcccaccaacagtgcacagggttcccctttctctgcatcctcaccagcatccattattgcctacctttttgataatagccattttaactggagtgagatatctcattgtagttttaatttgcatttttccagtgattagcgatatggagcatttttttgtatatctcttggccatttgtatgtcttcttttgagaaatgtctgttcagatcttttgcccatttttaaattgaattatttgtttctttgctattgagttgtttgtatcccttatgtactctggtttttaatttcttg

SEQ ID NO: 737457 - DNA, 557 bp, Homo sapiens
gaatactatttcattatgtatatataccacattttctttatccattagtccactgatgaacacttaggttgattccatattttggctatcatgaatagtgctacaatacatatgggaatgcagatgtctttttaatacattgatttcctttcttttgggtatataccaagtagtgaaattgctggattatacggtggttccatttttagttttttgaggaaccttcatactgttctccatcgtggctgtgctaatttacattcccaccaacagtgcacagggttcccctttctctgcatcctcaccagcatccattattgcctacctttttgataatagccattttaactggagtgagatatctcattgtagttttaatttgcatttttccagtgattagcgatatkgagcatttttttgtatatctcttggccatttgtatgtcttcttttgagaaatgtctgttcagatcttttgcccatttttaaattgaattatttgtttctttgctattgagttgtttgtatcccttatgtactctggtttttaatttcttg

SEQ ID NO: 737458 - DNA, 630 bp, Homo sapiens
ttttaaccacaaagctaacataccttgctctctaaactagcactgcatgtcgcatagtaaaaactaatgactgctccctaaaattggagaaccacaggtttataatagacacaaaggttcattgggcaaccctttaataagcatgtcttatggaccaggaagccccatgctaggtgtggttaacgtgcttctggattttattgcctcgtagaggagagatacgttaaataaatcaaacaaaccatacctgaatacctaaacagttaccacggcagtcagtgctctgaagattaagtctgggagttacaagagcatatagcaggggaccaaatctgggcaagaaggtcaggaggctcttcctgaaaatggcatgtcagctgagacctcaagaatgagcatgagtcagggaagatggtgaggagcagctcmtgcaagggccagtcagacaggtctgggttcagattgtgaccttgatcctgagaagggtgggaaatcattaaagattttactaagggtatagaatgatcaggtttgcatttcagaaagactatttttggtcactgtgcaaagaatgaaggaggacaagagtgggagcagatgagcagctgtaaaaatctaggctaagttcaa

SEQ ID NO: 737459 - DNA, 449 bp, Homo sapiens
atatatgtacattgagacaactcaagagatcttcttgcctcagtctccagagtagctaggactacaggtgtacgccaggatgcctggctaatttttaatttttatagagatgtggtttcattatgttgaccaggctggtctcaaacacctggcctcaaacaakcctcctatctcagccttccaaagtgttgggattacaagcatacaccactgcacccagcctcaatttaatatttttatgttacctgtctcttaacacgtttctgtaggtattattgtttttgataggttgataggggacttcatactactgttatgagtgtattatacaccaaaattacagtattagactattctgggtttgtctatgtacttaattttaccagtaggttttgtatttttaaatgtttgtgttttctttttaatattagtgcttttttctttcagat

SEQ ID NO: 737460 - DNA, 449 bp, Homo sapiens
atatatgtacattgagacaactcaagagatcttcttgcctcagtctccagagtagctaggactacaggtgtacgccaggatgcctggctaatttttaatttttatagagatgtggtttcattatgttgaccaggctggtctcaaacacctggcctcaaacaagcctcctatctcagccttccaaagtgttgggattacaagcatacaccactgcacccagcctcaatttaatatttttatgttacctgtctcttaacacgtttctgtaggtattattgtttttgataggttgatrggggacttcatactactgttatgagtgtattatacaccaaaattacagtattagactattctgggtttgtctatgtacttaattttaccagtaggttttgtatttttaaatgtttgtgttttctttttaatattagtgcttttttctttcagat

SEQ ID NO: 737461 - DNA, 494 bp, Homo sapiens
tgaactgaattccttcccaaagttagttcagcctatgcccaggaatgaacaaggacagcttaaaggttagaagcaagacggagtcaattaggtctgatttctttcactgtcgtaatttcctcagttataatttttgcaaaggcggtttcaatgtcagtgcctggagaggtcataggacaaccaagtttgagagctgtgctcagatgttgtatgacaagagtctattggagaattaatataggcaatgcctggcctaagaataactggcttatgaaagcttcctactttcaaacagcaacatctaccattgccctgccatccccaatttccagagyctccaaagctgagtgcctaccctcctttattccaccccagcctcctgtctgtttgccttgccttgctgtcattgtcccatgtctaaatttctcaatactcacccaacagagagctccttttcctttaacacacacccagtgctgttaccaaaaagctag

SEQ ID NO: 737462 - DNA, 570 bp, Homo sapiens
tagacctggttttcaaggtgcctccaatctggttggggatatggataactgaagaattagtttgcaacagcatgagataaaccatgagggatgctgactggggtgttgaagggtgagaggatggcaggtggtgagagagacattccagagtttccttgtgagttacaggtttggttaggagggaagtggagctaactgttgaagaatagagattggccaaatctctggaatttcagaarcatcaactttgggaaacggaatttgctaatggagtggagtctgatgcagttcttcacttattttcttctggtatgcagaccaaaattatctgagaatgatcttttcacttctggctacaaaaatgcaagccaccagtagaaccacaggcaccagtttacagtgtagagagcactggactgggagtcagatctgggttgtacttatgtggtcatgggaaattccttcccctaggtgcagggactcaggattcgctttagtaaaatgaagggttattctttattgttctcagaaaggtggtttgagaatcacctgtgtggtgggctaagtatt

SEQ ID NO: 737463 - DNA, 576 bp, Homo sapiens
gctattattttccacatgaatttttggaccattcaaaaaatattatagttcagccatggtggctcatgcctgtaatccaagcactttgggaggccaaagtgggaggatcacttgagcccagaagtttgagaccagcctgggcaacatagcaagatcccatgccaatttttttaaaattgtgaattaactttaccttttttactttccgcaaaggaaagaggactttggaaaaccactctcatttcacagtaatgatgcttgtattctctataacattargaaatattaaaatgttgctatacattttattgctgaaagctaatatcccaaactcattttgtgcatgagtaaagaatgaaattatttctgacaactacaataaaaatatgttgttgttaaataaagggttgttattagaaagaagttatccaaccaattaggcctgtgctaactgcattaacaggactatgctccctgttaatgttaggatcctacaaaccctgtgagctcatagggtttccaaaagcataagccgccttggcatttgggtttataagaatatttcttcttagtgat

SEQ ID NO: 737464 - DNA, 687 bp, Homo sapiens
aggaaaaaaagaaaaaaatggttcttgagctgctttattcttttctcagggatcatgaggatgagaaggaaagagtctttacagaacacctggtatgcactttatctatcattaactaatttaatccaatagtcacaaaatctaatattatctgcaactcttggaaactgatttctgtaatgtcccgtatttattggaatgtcagaggccctaactcattttctgaatgtcctaaagcatgcaagtgtcaatgaagaccgaaattggcagccacacaaggaataatragatgaggactgcaaaagctttctatggaattgcatccagaaggaagaacagcatttctgtgaaaaaaaaaaaaaaaaaaaaagaagtgaagccattaatacttgcatcaaatgaatagggcatgtagcccaaagttaagccaagagtgtgtcaattcatttcataaactgagaactgagggacctcaagaatatggaatagaaacaaaatacatgttaaataagtcatatctacttttaaagtttattaatttttcttgatgatgccaaaatacagatcctctccttgtagaaacattgcagaaaatatgaagaataaaggaaaaattaatcataatcccacatcacaccaaccttaatattttgctgtatttcctgacattttttctccaaatataag

SEQ ID NO: 737465 - DNA, 687 bp, Homo sapiens
aggaaaaaaagaaaaaaatggttcttgagctgctttattcttttctcagggatcatgaggatgagaaggaaagagtctttacagaacacctggtatgcactttatctatcattaactaatttaatccaatagtcacaaaatctaatattatctgcaactcttggaaactgatttctgtaatgtcccgtatttattggaatgtcagaggccctaactcattttctgaatgtcctaaagcatgcaagtgtcaatgaagaccgaaattggcagccacacaaggaataatgagatgaggactgcaaaagctttctatggaattgcatccagaaggaagaacagcatttctgtgaaaaaaaaaaaaaaaaaaaaagaagtgaagccattaatacttgcatcaaatgaatagggcatgtagcccaaagttaagccaagagtgtgtcaattcatttcataaactgagaactgagggacctcaagaatatggaatagaaacaaaatacatgttaaatawgtcatatctacttttaaagtttattaatttttcttgatgatgccaaaatacagatcctctccttgtagaaacattgcagaaaatatgaagaataaaggaaaaattaatcataatcccacatcacaccaaccttaatattttgctgtatttcctgacattttttctccaaatataag

SEQ ID NO: 737466 - DNA, 615 bp, Homo sapiens
ttttgaatgtcttacagatttaaagaggccattgaaccaagtcttgtatttttctatacaggataaattccttgtttcagccagctgtcagtggaaggcaactagtatgacaccatctccatggacaaagaatgttggaatattccatttcattgatttatatatctctttatctgtttcttcattagtttctatagtagtcaccgtttcttccaatgtcatttaaatgttgatcacatgcctgtaatctgcttttaagttcttggtcatttctcattttcacataaatttgttcatccaggatgagcctgatggagatccaggagctcctttatggtgctggtaatttgttttgggtccatgttgcctgccgtatttcaaacactgcacccttttcctcctctctcgaatagtggctttggatttataacttaaaaactgcttagccattcartttaaaacttaaatatataaactattttatgtagttttctaattgttcttggatattttagttgctttagctaattttctttttaaaataaaaataaagttaaaattcagatctctctactaccagtttataaatatgtttcacttcagatttctcattga

SEQ ID NO: 737467 - DNA, 629 bp, Homo sapiens
ctccaagatcacccgagaagcttgttcacataaagcctctgattcagcaggtctaaggtggggtctgagattctgcattttgagcaggcttccaggtgaggccagcgctgctgggtccaggctttggccaggtgaggggctcagcccagcccaggcttcccatcctctccccatggtcctggtggcaaatggccatgatcaaagagccagccacctccttcccgcctctgaagctccctccagcyggcagatatttaaaagaaagcatgaaagttcagggagtgaacattccttccagattccttccagatgttcctttcagatgttcctcccaccatcctttgataattttttcacttcaaggaccatcttgtgttttcacctccccgtgtacgggtgctggctgacgatccgatcacatgagccgcgtgaaggctctgaatctccacggtgccatctccagtttctgggcatcgcgttcctctcaagaatgaacggcgatttcaaaggaccccaacactgggtgatggcgtgcaaagtgttaccgagaaataaacttcaagcagtgaagacagatggatgagatggagctgtgattgaacatgtctcagaggctagacatctaagaa

SEQ ID NO: 737468 - DNA, 629 bp, Homo sapiens
ctccaagatcacccgagaagcttgttcacataaagcctctgattcagcaggtctaaggtggggtctgagattctgcattttgagcaggcttccaggtgaggccagcgctgctgggtccaggctttggccaggtgaggggctcagcccagcccaggcttcccatcctctccccatggtcctggtggcaaatggccatgatcaaagagccagccacctccttcccgcctctgaagctccctccagccggcagatatttaaaagaaagcatgaaagttcagggagtgaacattccttccagattccttccagatgttcctttcagatgttcctcccaccatcctttgataattttttcacttcaaggaccatctygtgttttcacctccccgtgtacgggtgctggctgacgatccgatcacatgagccgcgtgaaggctctgaatctccacggtgccatctccagtttctgggcatcgcgttcctctcaagaatgaacggcgatttcaaaggaccccaacactgggtgatggcgtgcaaagtgttaccgagaaataaacttcaagcagtgaagacagatggatgagatggagctgtgattgaacatgtctcagaggctagacatctaagaa

SEQ ID NO: 737469 - DNA, 629 bp, Homo sapiens
ctccaagatcacccgagaagcttgttcacataaagcctctgattcagcaggtctaaggtggggtctgagattctgcattttgagcaggcttccaggtgaggccagcgctgctgggtccaggctttggccaggtgaggggctcagcccagcccaggcttcccatcctctccccatggtcctggtggcaaatggccatgatcaaagagccagccacctccttcccgcctctgaagctccctccagccggcagatatttaaaagaaagcatgaaagttcagggagtgaacattccttccagattccttccagatgttcctttcagatgttcctcccaccatcctttgataattttttcacttcaaggaccatcttgtgttttcacctccccgtgtaygggtgctggctgacgatccgatcacatgagccgcgtgaaggctctgaatctccacggtgccatctccagtttctgggcatcgcgttcctctcaagaatgaacggcgatttcaaaggaccccaacactgggtgatggcgtgcaaagtgttaccgagaaataaacttcaagcagtgaagacagatggatgagatggagctgtgattgaacatgtctcagaggctagacatctaagaa

SEQ ID NO: 737470 - DNA, 528 bp, Homo sapiens
tccttgtcagaaggaatcatttccaactcatctgaattaaaaagagactttttggtgagttactgcacctcctgaattagaggagactaaatgaatgaggctttcctgctgccgtgattacttcctggcttggactcacaccaggaaacccacagctgtaaatctctccttgtggtttctggaatctcccaactcctgaaactataaatggaattcccaaccggtgtggtcaggtgggtatggttcctccaggccccaaggaaatctggagaacactggaaatggggggatgttggccagggrgccagagctgggctgggtgtggtgctccccagaacttagagcaggaagagctgtcatgactcctagccctgccctgtgctagtccaaactgaggaagctgaattctgttaagtccaggagtgttgagtccaggggggctaagaattaagagacaatgtcaagtgcatcacaaggtgagcccagaggaaagcagagccaggaaagtgaaagagagagccgagcttc

SEQ ID NO: 737471 - DNA, 528 bp, Homo sapiens
tccttgtcagaaggaatcatttccaactcatctgaattaaaaagagactttttggtgagttactgcacctcctgaattagaggagactaaatgaatgaggctttcctgctgccgtgattacttcctggcttggactcacaccaggaaacccacagctgtaaatctctccttgtggtttctggaatctcccaactcctgaaactataaatggaattcccaaccggtgtggtcaggtgggtatggttcctccaggccccaaggaaatctggagaacactggaaatggggggatgttggccagggagccagagctgkgctgggtgtggtgctccccagaacttagagcaggaagagctgtcatgactcctagccctgccctgtgctagtccaaactgaggaagctgaattctgttaagtccaggagtgttgagtccaggggggctaagaattaagagacaatgtcaagtgcatcacaaggtgagcccagaggaaagcagagccaggaaagtgaaagagagagccgagcttc

SEQ ID NO: 737472 - DNA, 597 bp, Homo sapiens
atgggactggtacaagaatgcatataaaccaacaggataccataggatagaatagcccagaaataaacctttatgtatgtagtcaattttcaacaagagtgccaagagtactcaatgagaaaaagacagtttctccaacagatattgggaaaattggatatacacatgcaaaaaaaataaccttggatccttacactctacacaataattaacaaaatggataaaagacctacmtgtaagagcaaaaactataaaccttttagaagaaaatgttggggagcaaatctctatgaccttggtttggcaatggtttcttaaatatgacaccaaaatttgtccttttgtgcatcaaaagacattatcagagagtgaaaagataacccatcgaatgggagaaaacatttgcaaatcaagtatttggtaagattcgagtatccagaatataaaaataactcctacaactgaaaaaaaactaaactcagttaaaaaaaatgggcaaagtatgttaattagccctattgcgccatttcactacatatacatgttccaaaacatcacgttgtacatgataaatatatataatttgcatctgttact

SEQ ID NO: 737473 - DNA, 646 bp, Homo sapiens
gtgtttgttttctaatgtttaaagctgtattgtaatgagaccttattgtaaccctgactctctatcatcccttttccatttcttttctttttttttttttttgagatggagtctcgctctaccacccaggctgcagtgcaatggggtgatctcagctcactgcaacctctgcctcycgggttcaagtgattctcctacttcagcatcctgagtagcagggattacaggtgtgtgccaccacacccaactaatttgtgttatctttagcagagacacggtttcaccatgttggccaggctggtctctaactctgaccttgtgatccacacaccttggcctccgaaagtgctgggattacaggcatgagccaccatacctggcattcttttcagtttcttttcctgcatttattgttcaaaaacagaggacatcctcactgccaaccatcagcattcccagatctcctggtcagaatgaatcactactttctctgtattctcagagaactatgtatcaaaataccatcctttatttcattttaataacaaacttctcaaaggcacacttgctgtgatctcctcctgctggatcctggcccagtgcgatggagaaggccatctcaacagtcacagaaatgtcaaatcgg

SEQ ID NO: 737474 - DNA, 646 bp, Homo sapiens
gtgtttgttttctaatgtttaaagctgtattgtaatgagaccttattgtaaccctgactctctatcatcccttttccatttcttttctttttttttttttttgagatggagtctcgctctaccacccaggctgcagtgcaatggggtgatctcagctcactgcaacctctgcctctcgggttcaagtgattctcctacttcagcatcctgagtagcagggattacaggtgtgtgccaccacacccaactaatttgtgttatctttagcagagacacggtttcaccatgttggccaggctggtctctaactctgaccttgtgatccacmcaccttggcctccgaaagtgctgggattacaggcatgagccaccatacctggcattcttttcagtttcttttcctgcatttattgttcaaaaacagaggacatcctcactgccaaccatcagcattcccagatctcctggtcagaatgaatcactactttctctgtattctcagagaactatgtatcaaaataccatcctttatttcattttaataacaaacttctcaaaggcacacttgctgtgatctcctcctgctggatcctggcccagtgcgatggagaaggccatctcaacagtcacagaaatgtcaaatcgg

SEQ ID NO: 737475 - DNA, 393 bp, Homo sapiens
tcattttattttgctctctgactcattagctttatttcttataaacacccttcccttccaagcacaatctaaaaatttctgtcattaaaagcaattttgtttttcctgcctaagggtgactatttccaagaaaatatgtgcattttgacaatgtgattcttgcctatttaaagctacaagtataatttcttttttattgggtgataractttccttctgacaaaacaaagggcagtcaagatttcttcccattttaaaaactgtgattttgcatttcttcacaacatgttttaaagcacattttgcataactctgcttttaaaaagaatggtatatggcttgtatgctatccgttctaccaagatgtcagtgatattgagcattaaacgaagt

SEQ ID NO: 737476 - DNA, 634 bp, Homo sapiens
agagagagctgggttgtaagtgtttttgttcctacagagcagatagatttggctccatctgttccatattcataacaaaggagcacacttacaggagggccaacttccccggagccgcctggtaatgatcttttcacccgaatgaaagcatctgaacccagtggcttggccctgcaaaagcagctagcaggattgcccttcagaatcttgatttccttgtaactcaggttgacataaatttccccaatatatagagtgaaaagaatttactgatttctcatcttcctacagccctgtgtggttggaaagttcaaaatgtatgtgttttacstccccctcctgcaaccacagaagatttgtaattaaatagaatttgatagtatgggggaagtttgcacttgaagtatctgtaaaggtatcacaggggagaggctgttcttcaaacttttaagttgtttctattcagacttttttaatctttttaaaactggggttaatgaatagaaatatgagttacaccaaataagggaaaacccctgttgagttttgtaattagcaaacttcaaagccaatttcaattgagacctcttagattaaaaagataagttgacccaagagttttcttccactaagc

SEQ ID NO: 737477 - DNA, 599 bp, Homo sapiens
atgatttgaccacagttcctcctttgtgtgtctgtttctccctcctccctccccacttgggttgtaatctcatctcgggatgctgttttagtcatgcttatggcctcagcacttcacacttcactgtgttcaacggacctgtcccaacttttggggagttcccaatgccatgaagtatggctggaacacagcatgaggtcagaaccagactgtgagggatttcaaacgctaagaggaagattttggactttatcctgcccagagaccacagatggctattaaaggaagtggtttttttgtttgtttgtttgtttgttttgctttttgagacaggattccactcttgtcacccaggctggagggcagtggcgtgatcatggctcacagcagcctcgacctcctgggctcaagcaatcctcccayctccacctcccgagtagctgggacgacagatgtgtacccagctaatttttgtatttttaatagagacagggtttcgccatgttgcccaggctggtctgaaatgccagacctcaagtaacctggttgcctcagcctccccaagtgctgggattacaggcatgagccaccgtgcccag

SEQ ID NO: 737478 - DNA, 599 bp, Homo sapiens
atgatttgaccacagttcctcctttgtgtgtctgtttctccctcctccctccccacttgggttgtaatctcatctcgggatgctgttttagtcatgcttatggcctcagcacttcacacttcactgtgttcaacggacctgtcccaacttttggggagttcccaatgccatgaagtatggctggaacacagcatgaggtcagaaccagactgtgagggatttcaaacgctaagaggaagattttggactttatcctgcccagagaccacagatggctattaaaggaagtggtttttttgtttgtttgtttgtttgttttgctttttgagacaggattccactcttgtcacccaggctggagggcagtggcgtgatcatggctcacagcagcctcgacctcctgggctcaagcaatcctcccatctccacctcccgagtagctgggackacagatgtgtacccagctaatttttgtatttttaatagagacagggtttcgccatgttgcccaggctggtctgaaatgccagacctcaagtaacctggttgcctcagcctccccaagtgctgggattacaggcatgagccaccgtgcccag

SEQ ID NO: 737479 - DNA, 599 bp, Homo sapiens
atgatttgaccacagttcctcctttgtgtgtctgtttctccctcctccctccccacttgggttgtaatctcatctcgggatgctgttttagtcatgcttatggcctcagcacttcacacttcactgtgttcaacggacctgtcccaacttttggggagttcccaatgccatgaagtatggctggaacacagcatgaggtcagaaccagactgtgagggatttcaaacgctaagaggaagattttggactttatcctgcccagagaccacagatggctattaaaggaagtggtttttttgtttgtttgtttgtttgttttgctttttgagacaggattccactcttgtcacccaggctggagggcagtggcgtgatcatggctcacagcagcctcgacctcctgggctcaagcaatcctcccatctccacctcccgagtagctgggacgacagaygtgtacccagctaatttttgtatttttaatagagacagggtttcgccatgttgcccaggctggtctgaaatgccagacctcaagtaacctggttgcctcagcctccccaagtgctgggattacaggcatgagccaccgtgcccag

SEQ ID NO: 737480 - DNA, 609 bp, Homo sapiens
tataaaatgaacactaaccagagaacctggtctataatcatattccttcttgcttcattttatcacaaccttagaacttggctaagagagaggaatggaataaaaatatttacattacactgagcttataattctatgttctccaaagtgatgatatccttttgctttatatttaaattctatttacaatgaatgttcctttatctgtgtyccctcccctactttttcttagtactagcctcaaggaaaaagcctacagttcattaatgaggcattattgtccactgaaaaaatatcaaaactcaaaaatttttttatctcagaatggtaagaattatgatagaaaccaaccttaagttaatcactgagagttattatgagttaatttaagaaaaggtcataaaacagtcaaatattatagaaatggtatatattgtaatcatctgatcttgatagatctactgacagtggtcaaatatagataaattaattcttaaaaataataatgactacactgaagatgaaaacaagaacacatttattgagcacggattgttccagacaccatactaaaccctttaaaaatagtatttcatttaatccacaaac

SEQ ID NO: 737481 - DNA, 595 bp, Homo sapiens
agatatcccatagagggaactgggacatgactaatgtggagcagtgggaagtaagtttggaagggaaaagggacccagtttatagaggacctgaaacctaagagagaaggtgagcattgatgtagcattaaatactttaacgaaattattaatacttttctgatttttgtagtaaaaatacagtcataagaacttcgggggaaaaaaagcccagaaaagtatgaaggtgaaaattaaaaatcttacccscagagataaccacttgtaaccttttttgtgttacttaaccttgatcctaactatgacatgtgctagaaaatatgaaattatgatcttacttttatgaaataaagtgtttttatatgcattttttatatatgcttacagtattctgtatgattatattgtataataagctctgcttttttcactctttgttgtgaacattttcctcataactaggaaatattagaaaaaactttttaaggctatggactattaacaaagtagaagtaccataatttaacaatttctctattattggcttttgaggttgtttccaatctttcactattagaaatagcactgtgatgaa

SEQ ID NO: 737482 - DNA, 470 bp, Homo sapiens
agaataatattttcaaccaaattattagccaagcgtgaaaatagaataaagttgttttcagatatcttcattttaggttgatttttatatatggcatgaggtgagggtacagttttattcttttgtatgtggatatacacttgacccaagaccatttgctgaagacatccttttcccattgtgtgttcttaacacccctcatggtcagttcatcatatatgcatgggtttattcctggayttcctattctgttacattggtctatgtgtctgtctttatgtcagtacaatactattttaattactatagctgtgtaatatattttgaaatcaaggaatgtgatgcctacagctttgttcttcttaagattgctttggctgtatggggtcttttgtggttccgtatacatttttggattatgttttatatatctgtcaaaagagccattgggattttggtagggattccat

SEQ ID NO: 737483 - DNA, 632 bp, Homo sapiens
ataaaatagggccgatatcattagatttggcctgatcgtttacataaatacagcaagaaaggtaatttataccataatagaccttttttagtttgctttactgaagtttttcataaggaatctgagattagacttctaaaagcacgtcaaggctaggaagccatgccaagaactcactaccagactttacctgcagtagctttagatttggatgaactcctgtcttctcaaggtttccaaaatattgtaaagttcctgggcctgccaggatgtgaccttccttactcacctataaggctgggaactctgtaagccaagtaccaggctgggttttcccaagagagttttgtaggcattagctacataaaatcagscttagctactaacagttgattctatgtttctatgatcatcattctcaaatatgacacttcagtcaaagctttggtttatataaccaatgtttctaattatttcctgttaacaaaggggtcagactcattgaatctatgcagaaaaattatgttgtcatgaaataaaaatataagaatttgcaaattctggaagaatcaagccaaggaaaaaatataattgtttcagttctgtttacaaaagtataatctactaaattg

SEQ ID NO: 737484 - DNA, 615 bp, Homo sapiens
tagtaaatctcactggatactagcaatgaaaagtcaactaagtgcctttaaaagaactgtcttcctgtactctaaacaggagtactcatcttgaatgaaaattatgcctcgatgtaaggaacaagcaatgttccttacrtctaaaagaaaatgacatagctcatcatattctcaattcaatatccagattgtaaaatcaagggagtttgttatggttaattaaatttgattcaaaaattcagtttagacaactgaaagacttagataaaacaagtgaagacgcagcttattgtaatgacttatggttaaaactatagtatttcctgttatgtataaacttaagattagatacttaagacagtgaacatttaattacagcatgtgaaagtttcaaggcattgtatactcaatctttaaaatactgttaaggtctcttttttaaaataaccatttaagtgagaatgataccagtacaagttaaattgcacattagcacataaattacaatcctccccaaattagacataacattgattttaataatagaaaatgataacaattctgtgactcaataaagagcttgtcacttacaattcccctaaataagtagcaaac

SEQ ID NO: 737485 - DNA, 615 bp, Homo sapiens
tagtaaatctcactggatactagcaatgaaaagtcaactaagtgcctttaaaagaactgtcttcctgtactctaaacaggagtactcatcttgaatgaaaattatgcctcgatgtaaggaacaagcaatgttccttacatctaaaagaaaatgacatagctcatcatattctcaattcaatatccagattgtaaaatcaagggagtttgttatggttaattaaatttgattcaaaaattcagtttagacaactgaaagacttagataaaacaagtgaagacrcagcttattgtaatgacttatggttaaaactatagtatttcctgttatgtataaacttaagattagatacttaagacagtgaacatttaattacagcatgtgaaagtttcaaggcattgtatactcaatctttaaaatactgttaaggtctcttttttaaaataaccatttaagtgagaatgataccagtacaagttaaattgcacattagcacataaattacaatcctccccaaattagacataacattgattttaataatagaaaatgataacaattctgtgactcaataaagagcttgtcacttacaattcccctaaataagtagcaaac

SEQ ID NO: 737486 - DNA, 615 bp, Homo sapiens
tagtaaatctcactggatactagcaatgaaaagtcaactaagtgcctttaaaagaactgtcttcctgtactctaaacaggagtactcatcttgaatgaaaattatgcctcgatgtaaggaacaagcaatgttccttacatctaaaagaaaatgacatagctcatcatattctcaattcaatatccagattgtaaaatcaagggagtttgttatggttaattaaatttgattcaaaaattcagtttagacaactgaaagacttagataaaacaagtgaagacgyagcttattgtaatgacttatggttaaaactatagtatttcctgttatgtataaacttaagattagatacttaagacagtgaacatttaattacagcatgtgaaagtttcaaggcattgtatactcaatctttaaaatactgttaaggtctcttttttaaaataaccatttaagtgagaatgataccagtacaagttaaattgcacattagcacataaattacaatcctccccaaattagacataacattgattttaataatagaaaatgataacaattctgtgactcaataaagagcttgtcacttacaattcccctaaataagtagcaaac

SEQ ID NO: 737487 - DNA, 615 bp, Homo sapiens
tagtaaatctcactggatactagcaatgaaaagtcaactaagtgcctttaaaagaactgtcttcctgtactctaaacaggagtactcatcttgaatgaaaattatgcctcgatgtaaggaacaagcaatgttccttacatctaaaagaaaatgacatagctcatcatattctcaattcaatatccagattgtaaaatcaagggagtttgttatggttaattaaatttgattcaaaaattcagtttagacaactgaaagacttagataaaacaagtgaagacgcagcttattgtaatgacttatggttaaaactatagtatttcctgttatgtataaacttaagattagatacttaagacagtgaacatttaattacagcatgtgaaagtttcaaggcattgtatactcaatctttaaaatactgttaaggtctcttttttaaaataaccatttaagtgagaatgataccagtrcaagttaaattgcacattagcacataaattacaatcctccccaaattagacataacattgattttaataatagaaaatgataacaattctgtgactcaataaagagcttgtcacttacaattcccctaaataagtagcaaac

SEQ ID NO: 737488 - DNA, 635 bp, Homo sapiens
tctccctggatccagggccatcatcacacttatcacccgagtcttcactttagttgttacaataggattttatccagagtaagtttacaaatacctggggcatgaatgatggttgaaatttgctctgtgaggaataagcaggtaaagccccaagtgctaaacaaatgttaattatttattattatggttgtaattatagagatgtattcaaggagtaacaatgatttaatcaagggtttattcctgctctgtagagctatcctgcccattacagtagccatwagccacatgaagctatttaatttaaagataattaaaactaaataagatcaaaaatttcaactccttagtcccaggcatatttccattatttaatagccacacatggctagtggctactgtattagacactgcagaatgaggaacattgacatcattgcagaaagttctattggagagtgcggctcacctgtgtgagaggaagtcagaattgggggggtcaccatgccattcatatgaacaagttttcaccataggtgagttgtccttccttatttatgtggaaatctttgggaatttcttatgccagtgaccataagctacatctccaagggctttatcactattattatttt

SEQ ID NO: 737489 - DNA, 630 bp, Homo sapiens
tgggcgctgtggctcatgcctgtaaccccagcactttgggaggctgaggcgggtggatcacctgaggtcaggagttccagaccagcctggccaacatgacaaaactctatctctactaaaaatacaaaaattagctgcacacggtggcaggcacctcccgagtagctggaggctgagacacgagagttgcttgaacccagaaggcagagattgcagtgagctaagatcatgccactgcactccagcctgcgctacagagtgagacttcgtctcaaaaaaaaaaaaaaaaccaagggtcaggcatggtggctcacgcctgcagtcccagcactttgagaggccaagatgggtggatcacraggtcagggagaccatcctggccaacatggtgaaaccccatctctactaaaaacacaaaaagcgggcatggtggcacgcgcctatagtaccagctactacagaggctgaggcagaaaaatcgcttgaacccgggaggcagaggttgcagtgagccgagattgtgccactgcactccagtctggtgacagagcaagactctatctcaaaaaaaaaaaaaaaaaaaattgtctcacatttctgcaaatgtgtaaaggatgagatagatataac

SEQ ID NO: 737490 - DNA, 524 bp, Homo sapiens
tcaagtgctcataagagaaaatgataggaggagaagtctatgaaatatcactgcagtttgtttcccatccatgtaaatacatttcagatacatctacctttggaaactaaagactgtccatataaggtcctaatgattttgtgaggctaagcagcaaacgtaagaagctatgtttgctcatttctccttgcccgcatgattttacaaagcccctgactctgtgagaacatacagctctccagaagcatgctttgaagacaaaacaggatagagcaaacagccccaaaatgtttcttgcctgaatcactacattccttagaagttaaatgatcctmgtctttgccttttcctatacataaaataacatcggacggggttagcgattatgcttcttaatctataaccagatgcactcttacatgtaaactttgatgtgacgctgctttaatgtaacttctgagcaagtttgacatgttttggcatgcaccgaacctccaacacctgtatgtatgcagtgggctgaa

SEQ ID NO: 737491 - DNA, 591 bp, Homo sapiens
acaaaaagagcccacatagccaaagcaatactaggcaaaaagaacaaatctggaggtatcacgttgcctaacttcaaactatactataaggctacggttaaccaaaacaacatggtactgatctaaaaacaagcacatagaccaatggaacagaagagagaacccagaaataaagccaaatgcaaccaactgatcctttgacaaagcaaacaraaacataaagtggggaaaggacaccctgtgtcaacaaatggtgatgagataattggcaagtcacatgtagaagaatgaaactagatccttatctctcacctcctacaaaaatcaactcaagatggatcaaagacttaaatctaagaccctaaaaccataaaaattctagaacatgacattggaaaaactgctttttagacattagcttaggcaaagagttcatgaccaagaacccaaaaaacaaatgcaacagaaacaaagataaatagatgacatttcattaaactaaaaggcttctgcacgggaaaaaaaaataatcaatagagtaaacagacaatccacagaatgggagaaaatatttgcaaactatgtatctga

SEQ ID NO: 737492 - DNA, 635 bp, Homo sapiens
ctctataaaagtattgtagctttggagttatccccatactcctggttattacacaactgtgtaacccatggcttttctgaactttaatctccagcctccttacacaggtgcataagatggctccagtacttcataaackaaagcaagggcgaattaagatatggcctgatgctctctcgggagatgttctaaggagggataaagaagactgggcatggcgaactgtagcccacccagagtgctgaatctgtgacagtgaaataaacctacacttcagaaagtgctctgagaacctaacataactcatccctctatcctttgtaagtagcaacctggaaggcagcatcaggcagagttttttaattagacagctatgtgttttgtcagaaaatttactaagcagttggctaaaagaatgattatctcgagctgcactaactctgattagtatccattaaacatctatggttttggagaaacctcaaagatagccagctatgtgccaaagaacagaccaatggctatcaataccacaaagttagcacaaatataaaccgcatagtttgtaggaaaagtttatttaatggggagactaagacgatgcaagatggttactagaaaaacatctttcagtc

SEQ ID NO: 737493 - DNA, 635 bp, Homo sapiens
ctctataaaagtattgtagctttggagttatccccatactcctggttattacacaactgtgtaacccatggcttttctgaactttaatctccagcctccttacacaggtgcataagatggctccagtacttcataaacgaaagcaagggcgaattaagatatggcctgatgctctctcgggagatgttctaaggagggataaagaagactgggcatggcgaactgtagcccacccagagtgctgaatctgtgacagtgaaataaacctacacttcagaaagtgctctgagaacctaacataactcatccctctatcctttgtaagtagcaacctggaaggcagcatcaggcagagttttttaattagacagctatgtgttttgtcagaaaatttactaagcagttggctaaaagaatgattatctcgagctgcactaactctgattagtatccattaaacatctatggttttggagaaasctcaaagatagccagctatgtgccaaagaacagaccaatggctatcaataccacaaagttagcacaaatataaaccgcatagtttgtaggaaaagtttatttaatggggagactaagacgatgcaagatggttactagaaaaacatctttcagtc

SEQ ID NO: 737494 - DNA, 643 bp, Homo sapiens
ttccttggactgatatctgcatgcagcagtcactttttctgactttcttctctgctactcagagctaccaagattcatttgaaaggaaaatctaatgaaaaatggaaaagaagcagatatacaagtctgacagttggttttgactcccacccactgagagagtaaagaagtttattgtttcagttgatacctggtttttggtgatatattgtttgttgctgttatttttaaagctattcagttactttattttgaaagatgagtgtgagaaaagccttttcttttcctttggaactagtccacatcttagctgacaagtaacagcaactgttctttgtcagtcattttcagggccctgtttgtgaatgaaatctcaggagacrtgcccaataacccctaggttctgaaaatcatttacacgccaggggtactgtgtttctctttttacataccagtgtgtttattattgaaaaccataatggggcaacgtatgctgagcttttaaggagacagtgctgtaaaatctgtgtcatgtctgtaacagttatggttatcattggacttctgtccattatctcttgtttcttatcgctttgatttagagttctggaaacaagaatatttctgcttctttagcttctca

SEQ ID NO: 737495 - DNA, 639 bp, Homo sapiens
tctggtgcaaaaccaaaattttatttgcaagctggattctgtagcatgacagttccagtttaagtagagctgggtatgtggatagtggggtggaggggcttttagctgtgaaagaatatactttatttaaatatatttaaagtatgttaaaatatacaaattgaacctgttatttacaaatgcaaatrtgtatatttcttaatgagtaaggctcaagaagtggttttggtaccctaattaaaacaatatagcagtatttcaaatttactctataaattaatttttaatataaaaattaaaaatctcattctgctttgaacatttgtcttaatagactttatccagagctgtgattatctgtggtcctctttctcatttctcatagattcttaagcctgcaaagatttaagaagagaaagtcagaaagaagggaactctttcatgctccttccaccccagtctaaacgagaatgaaaggcagttgtagaataagcaggaggctggaaaaatccatgagtgaaactaataacatgaagaccttgttaagaacaaggtctgttcgagtatttcagaaaacatagtaatggctagagccatatgttttagattaaatgacctgtgatagcctgcagaagttcc

SEQ ID NO: 737496 - DNA, 623 bp, Homo sapiens
cttcctcttaggactttaggtctgcctacatgttgaagaagtttgagttttaggctttgggagcatttccttaaaaaccattgtcatgggggaggaaaaaaaaagggtagtgttaattctgtcttcacacactcagagatcatttggttgggctacattttatgagctatattccataaagatgctgcaaagttcaggtatctggtttaggaaagaaaaaaaaatcccttctytaacccaagaaatgtaatgcaaacaacttgggcctgtgtcacttagtcttctaagaagacttcaaggctgttataaagacccagtggtgggagaaacctgatccggtatagcggggccagaagaagctgcgggaccatgccgcggggacaaggcaaggagtttcgccaggatgttgatctcctggttatttacacttccgcctcagtatgatctgaattattaatgagaaagattaagatacagattccttccttcaagtgccttagtagtcacagacaggaggttaattataagactaaaagcaatcttgggttgttagaagaacttaaaggaaaacacctttcaacttcttgttatcaatcaatcatttttgtctttagaaatcaaga

SEQ ID NO: 737497 - DNA, 582 bp, Homo sapiens
accagggatccacggccaccactagatgctaggaagatataaggaaggattctacccagagtctggagggagcacgggcctgctgacaccttgatttcagacttctagcctccagacctgagagagaatacattttgttgtttatagcyacccagtctgtggtactttgttacaacagccctaggaaactaatacacagttcaggaaaattaaacatgtttattatgtctcagaaatcgaaccaaataaacaaatagatatttactctgatagagctgggggaaagaaaattggttaaaatagaattttaaaatgagatttaaaaagcaagggaaaaagccatttttaacactataaagaagatgcaaaagcaaaactgaagaaaaagttcaacagcaaagggaattttaaaagacaatcaatctgaaataatgaatttagcgtgggcagcacttgcagtttaaaagaaaaagagaaaaaaaaatacctcagttccccttccttggttctgtaggtgcttttgtaaaatccgtggaaagtctccgaaagattgccagcatagtgaatgacaactgtgtacgg

SEQ ID NO: 737498 - DNA, 582 bp, Homo sapiens
accagggatccacggccaccactagatgctaggaagatataaggaaggattctacccagagtctggagggagcacgggcctgctgacaccttgatttcagacttctagcctccagacctgagagagaatacattttgttgtttatagctacccagtctgtggtactttgttacaacagccctaggaaactaatrcacagttcaggaaaattaaacatgtttattatgtctcagaaatcgaaccaaataaacaaatagatatttactctgatagagctgggggaaagaaaattggttaaaatagaattttaaaatgagatttaaaaagcaagggaaaaagccatttttaacactataaagaagatgcaaaagcaaaactgaagaaaaagttcaacagcaaagggaattttaaaagacaatcaatctgaaataatgaatttagcgtgggcagcacttgcagtttaaaagaaaaagagaaaaaaaaatacctcagttccccttccttggttctgtaggtgcttttgtaaaatccgtggaaagtctccgaaagattgccagcatagtgaatgacaactgtgtacgg

SEQ ID NO: 737499 - DNA, 582 bp, Homo sapiens
accagggatccacggccaccactagatgctaggaagatataaggaaggattctacccagagtctggagggagcacgggcctgctgacaccttgatttcagacttctagcctccagacctgagagagaatacattttgttgtttatagctacccagtctgtggtactttgttacaacagccctaggaaactaatacacagttcaggaaaattaaacatgtttattatgtctcagaaatcgaacyaaataaacaaatagatatttactctgatagagctgggggaaagaaaattggttaaaatagaattttaaaatgagatttaaaaagcaagggaaaaagccatttttaacactataaagaagatgcaaaagcaaaactgaagaaaaagttcaacagcaaagggaattttaaaagacaatcaatctgaaataatgaatttagcgtgggcagcacttgcagtttaaaagaaaaagagaaaaaaaaatacctcagttccccttccttggttctgtaggtgcttttgtaaaatccgtggaaagtctccgaaagattgccagcatagtgaatgacaactgtgtacgg

SEQ ID NO: 737500 - DNA, 585 bp, Homo sapiens
taatagcctattattctcattcaaggtggggtaactgaagcaaagaaccattcatgtaactttgctaagttcacacaacttgttggaatgcaatccacatctgtgtgagtataaactccctgctttttcagcttcaccaagatccctcttttttttttttttttttttttttgagacggagtctcgctctgtctcccaggctggagtgcagtggtgcgatcttggctcactgcaacctctgcctcccttycttttattggggcactatagtatatgaaatagatcatcaagaagtaattgaggttcttccagaatttcctgaacaatgaaattaacaagcactgttggtaaataataaaaatgctggattaatttgaaaaaaaaaaaagtactagaatgtttctattcaggccgcacctgaaaatgtgctacttatactaattaaaaatcctcaggcaagagacaactgtgcccaattttcaagttttttgttttgttttgttttgttttgttgttttgttaattgttgaccacgtcctgagttcagagcgaatcctctgggtgtttaataggaaacagataatt

SEQ ID NO: 737501 - DNA, 608 bp, Homo sapiens
aagaaaactatttataggaaactgagagctaaaacaatcttataataacatcccatttttggtttcacttagtacttaagataaaaattgcttctctgaatataattttgtcactttttttcctgtgtactttcttaatacagcaagtagactcagtaaaatctgatacaatatacttatttcactagtgaaattgaaagctgaatgactggcgaatttaaaagataatgagggttcttactaccagcgccaataagaaaggttagacatttgttaaacgtgatatggtgctatctgcctgcatgttaaccatatagttcaggggacacccagtggttaaaagtaggtaattccttgctgtggtacagtgttaaaaaattatggaaaaatatatttcttggctcagcagtgatcacacattgttgattttttctttctgaatgagtacatgttrggatgtgtgtgtgttttgagaaaatgtttggtcttgactttatatataaattttctttgaataataaaaactcaccaacaattttgaaaatgttagaaatatgattaaacttttcctttaattaaaacaaattagaaatgtggaacaagtgact

SEQ ID NO: 737502 - DNA, 650 bp, Homo sapiens
acattggtagcctgtctatcacaggtaccaaaaatatttgatggcatttcccatctttctacttttcaccatttccaccgccatcctcctcattcgagtccacagtatttcttgcatagatactacagtagcctccaaattcacctcatttttgcacttgcctccttagaatccattccacacagcaggcaaagttgttttcttaaaatgggcaaaaatcttcatccttcactcaagtgtgcaagaaatacacattttcttattttatttaaatcaacaaattctatcccaagctcctaccctactaggctggtgagaaattccaagacccccaatggttgcctaaaactgcagatagtactgaaccctaagtacactatgcatgaatttctttttccttcttcacagttttatggatagaagatttgtttctaccatagatcttagcaacctcaacatacaattttttccctccttattaagtcaagaactttcacattttcrcttaaaagaagtactttactgcttctcattggcatattcaaattgccagcatcactattcttgtgctttgaggctgttattaagtaaaataagggttgctcagcacaagcatgaccatgccttgacagtggatctgataaccacaa

SEQ ID NO: 737503 - DNA, 624 bp, Homo sapiens
tgcagacctcctgaaaaccaagccgaggactgcggggtccggtgtccacgcagagtgagtactgtcttccgccgctttgctccaggccgcgcgtgctcccgggtctagggcctgtgcccccggctacctgccctgcgtgyccggggcctggtccctgcagcggactccccaggctcgggacgtgcgcttttcctactatcgcgaccctggcgataccgtgcgttctgagtttaactgtgtttcttggcgactcctcctccttgtcggtaacactgttactgccccttccgccgggaaatgtatctggtgaccggacgcgtagggttacaaaacaagggatttgtgtggcccggtacaagtggcccgagacaagtggcccgagacaagtggcccaaaagaaggaaagcagcagctatgtcagtttggtttggcacctttatctctagggttggagatagatctccttctccccagccgtgccgccaccctgtgatgacctccgttttagagcgtgagctcactctgacctttctgcgtacctgatacatgctgggtgtggcgtggcaagtgttgtaacctgtttcggttccatttcctttacacaacctgagacggttgtagaat

SEQ ID NO: 737504 - DNA, 624 bp, Homo sapiens
tgcagacctcctgaaaaccaagccgaggactgcggggtccggtgtccacgcagagtgagtactgtcttccgccgctttgctccaggccgcgcgtgctcccgggtctagggcctgtgcccccggctacctgccctgcgtgtccggggcctggtccctgcagcggactccccaggctcgggacgtgcgcttttcctactatcgcgaccctggcgataccgtgcgttctgagtttaactgtgtttcttggcgactcctcctccttgtcggtaacactgttactgccccttccgccgggaaatgtatctggtgaccggacgcgtagggttacaaaacaagggatttgtgtggcccggtacaagtggcccgagacaagtggcccgagacaagtggcccaaaagaaggaaagcagcagctatgtcagtttggtttggcacctttatctctagggttggagatagatctcctyctccccagccgtgccgccaccctgtgatgacctccgttttagagcgtgagctcactctgacctttctgcgtacctgatacatgctgggtgtggcgtggcaagtgttgtaacctgtttcggttccatttcctttacacaacctgagacggttgtagaat

SEQ ID NO: 737505 - DNA, 608 bp, Homo sapiens
tagtactgataaaggaagacagagataagagaaggaattagcatgaaaatccaccatctcactaaaactgagcagcctggtccgggtgtgcggagggttgcccagtctctgtattatcattttataaaaccaacctcagataaatgtgtctttgttgaaaacaggtaagttgatccagcaacaatattttgtatggtataggaccccagagggaacctgaagaaacacaaaaacaagagcaaaaarattaggcagctgctggtaaagcgttgttcctgagtgcaaggaaaagtctttaatgccaaagccagagtggaatcctcctcccggaactgcaactgaggaaaccggggtagccctatgcatacttattgtcggtgggaaggaaaggtgggcagaaaaagggaagagttcagaacatgcagacaattaatccgcttaacattgtcgaagatcacactgtacacccagaaatgccattattgatttaaaagagagaaagaagcaaaaaacctacatctgcatctagctgaatgtgagttcttaactgatgccttggcaatgcagaggtattttcctttttgttttttttttttgagacagagtct

SEQ ID NO: 737506 - DNA, 615 bp, Homo sapiens
ccggggctcatattccacctcatcaggctctagaggatgtaaacaaggctctttggctaaatccaccacatctggttcttcctcaaacatgctgttttcaatcatattcctggggagctgaagccgatctaaaaaaccaaaacataagaacaaggcacagagttagaaaaaaaaaagctcataatattaataacatgtcttctacctagaccacatttaaactaagaatttttttaagtcactaagacttatttccatctcagagctactgaattaaataagatgtttataccattgagtcatccattaaaaactaaaacataaataaaagtataccacagttatgaaacaagaaagctaaataaacaggctattatatttttaaaaagttagctgagataatatactaatttccttaatatactcctgccccacaacctgggaccctgccctgggcttgagagggcmctgttttggcattcctctgactatgtctgtccccaccaggcgaggagtcagtaggatcaaagggatgtgcccacctacagtccacggttccccttctagggtttgggcactgcaatcccagaatttctgtccaacaggcctcaaatc

SEQ ID NO: 737507 - DNA, 515 bp, Homo sapiens
aacaaagaggtttaagaacttgctattaagtagcagagccaagttccaaacccaccatttttttgactgcagtacgtatacccctttaacacccttttagactttgggtataagtccaggaatgtcaaatcaagtccctagttccaactaaacgcttcatgtctacatagcctctggagaaggctggggggtcacagagccacctctacatcacaactaaagagttgcatggaggtttaggatagtaccacaaattctagagataaacacaactccaacaattatagaaatgtgtagaaacacattgacactgtggtttytacaactctctcagccaggtacttagtaggtattcaaaaaaggttggctgatgtctcaactaaatttactgtattactacttcatcatgggcagtaaaccaggctttcccctctcccctttctctcattaaaattatgaaattatccaaatacagttagtctgtatctacaggttccagatctatagactgaatg

SEQ ID NO: 737508 - DNA, 394 bp, Homo sapiens
cacttctttcatgatccttttcagactttcttccttatgatttggagacctggctttgatgagattaagataccaggaagcagacaaccaagtgcatgattggtttaaagtttgtaaatgtataagttgtaaaccactatatgttgaaattttaaaaatagtgayacgtggttacatggatgaaagaaggtcaataaagaatagaagtgaaggaaaagtagcagagtaaaaatgtggccattttgagcaggcttatgtttggtagacattagtgttcaggtggaaaactagttcctatgactatttggaggcttgccctatggctgggggtgggataaaacacaaaacaaaaaatttaaaagaccaaaaacccctggaacttcctcagaaaatc

SEQ ID NO: 737509 - DNA, 648 bp, Homo sapiens
acaaactcgatgtgtccttgaggaatctcagaaggctatagctggaaaagtccctattcgaccatctaatgagacagtgtcctcaaatgatgagaacactgatgcccaagcagttgaaatattttgcctaatatactgtggctagtttaagtgaccaaaccyagagcagaaaacaattttcttgctctgattcaagttcccagtccactatctcacactatgaagcacataaaaagcagtgatgaaccatcttcattatgtgtccctggggtgtaattaccgatcatacgaagcagaaagattagaagtaataggccttctgcagctcttgcagctgtgtttccactgggtgagacagtgtcaagggtagaggctacaatacgaactggcgagggaggagagccaagtgacagacttccagtcagcaacaggcttgggccacttggccaggagccacctaagtgtcccatatcccctatgcagagcagtccggatactcagcctccagctcttctaggaaactagcaatgcagatgcctctatgagtttgagattgtctagctctgcccagtccaaacggaagtgtccctgaatcagtgggaggaagaagagaggcaactggttggatgaggactgagtttcatttta

SEQ ID NO: 737510 - DNA, 600 bp, Homo sapiens
gagggaatattcttattttttatgaatatcagtggggccatcttcacacggaatggggtgaggagagctgtctaaaaacatacttttttgactgacataggttcctagacttcggaacagatttaacagtttagaccactggagataactttgagaaacattgacccaaattaagcagtctaaaaatgcaaactaaaggccrtcacagtcatccttaatcttaatgctattgaatggtatcaaactttactgaatccaagtcttcgtatttgctggtatatataaacgtgcctttatctattaatcaaccaacatttattaaatagataaatctgtgctagctgttgtcagaatacataattgtttcatacaatgactgtaatggcagaaacacatgcacatacacacacacacttagaaagtaggctatcaatactgaagagtacatgaaacctatccatttagtgatagagatattaaggactaaatagatgagagtttcatctttccactgggctaaggggttttaatcaaaacagacaaccttaaattggggaaactagcagaatatagcaaatatcctcccagcatatgctcttg

SEQ ID NO: 737511 - DNA, 606 bp, Homo sapiens
ccctttctccctcacaagtttgctcctgggtcttgccactctcttcccagagaatagacagaatattgcaaacatatggcaggcctctcactgaatagcaatgaggctggtggcagtggtcactagctgacgaggcagaatgtttcagatgtcagcaaataggcgttttgcttggtaagcaagaaattgaaaggcaacatttataataagaaattaaggccgggcgcggtggctcacgcctgtaatcccagcactttgggaggccgaggcgggtggatcatgaggtcagsagttcgagaccatcctggccaacatggtgaaaccccgtctctactaaaaatacaaaaaaaaattagccgggcgcggtggcgggcgcctgtagtcccagctactcgggaggctgaggcaggagaatggcgtgaacccgggaagcggagcttgcagtgagccgagattgcgccactgcagtccgcagtccggcctgggcgacagagcgagactccgtctcaaaaaaaaaaaaaaagaaattaaagggctatcaaggcgacaagtcagatctattatgtcatggcaatttgatgggactgttctaggtgtgaattacag

SEQ ID NO: 737512 - DNA, 606 bp, Homo sapiens
ccctttctccctcacaagtttgctcctgggtcttgccactctcttcccagagaatagacagaatattgcaaacatatggcaggcctctcactgaatagcaatgaggctggtggcagtggtcactagctgacgaggcagaatgtttcagatgtcagcaaataggcgttttgcttggtaagcaagaaattgaaaggcaacatttataataagaaattaaggccgggcgcggtggctcacgcctgtaatcccagcactttgggaggccgaggcgggtggatcatgaggtcagcagwtcgagaccatcctggccaacatggtgaaaccccgtctctactaaaaatacaaaaaaaaattagccgggcgcggtggcgggcgcctgtagtcccagctactcgggaggctgaggcaggagaatggcgtgaacccgggaagcggagcttgcagtgagccgagattgcgccactgcagtccgcagtccggcctgggcgacagagcgagactccgtctcaaaaaaaaaaaaaaagaaattaaagggctatcaaggcgacaagtcagatctattatgtcatggcaatttgatgggactgttctaggtgtgaattacag

SEQ ID NO: 737513 - DNA, 606 bp, Homo sapiens
ccctttctccctcacaagtttgctcctgggtcttgccactctcttcccagagaatagacagaatattgcaaacatatggcaggcctctcactgaatagcaatgaggctggtggcagtggtcactagctgacgaggcagaatgtttcagatgtcagcaaataggcgttttgcttggtaagcaagaaattgaaaggcaacatttataataagaaattaaggccgggcgcggtggctcacgcctgtaatcccagcactttgggaggccgaggcgggtggatcatgaggtcagcagttcgagaccatcctggcyaacatggtgaaaccccgtctctactaaaaatacaaaaaaaaattagccgggcgcggtggcgggcgcctgtagtcccagctactcgggaggctgaggcaggagaatggcgtgaacccgggaagcggagcttgcagtgagccgagattgcgccactgcagtccgcagtccggcctgggcgacagagcgagactccgtctcaaaaaaaaaaaaaaagaaattaaagggctatcaaggcgacaagtcagatctattatgtcatggcaatttgatgggactgttctaggtgtgaattacag

SEQ ID NO: 737514 - DNA, 576 bp, Homo sapiens
tgctcctgggtcttgccactctcttcccagagaatagacagaatattgcaaacatatggcaggcctctcactgaatagcaatgaggctggtggcagtggtcactagctgacgaggcagaatgtttcagatgtcagcaaataggcgttttgcttggtaagcaagaaattgaaaggcaacatttataataagaaattaaggccgggcgcggtggctcacgcctgtaatcccagcactttgggaggccgaggcgggtggatcatgaggtcagcagttcgagaccatcctggccaacawggtgaaaccccgtctctactaaaaatacaaaaaaaaattagccgggcgcggtggcgggcgcctgtagtcccagctactcgggaggctgaggcaggagaatggcgtgaacccgggaagcggagcttgcagtgagccgagattgcgccactgcagtccgcagtccggcctgggcgacagagcgagactccgtctcaaaaaaaaaaaaaaagaaattaaagggctatcaaggcgacaagtcagatctattatgtcatggcaatttgatgggactgttctaggtg

SEQ ID NO: 737515 - DNA, 618 bp, Homo sapiens
tgttaattatgttgcttgaagtagtacagctatagtgcacaatcatacctaccactgattatgttattaaaattctcaaaactataccccctcattaactgtgtgttagcaaatgtttaacaatcacctctcaggaaaagacaaacaaaccttactttgtagtgtttgatgatatctgtggtttaaccactcccaacatggccagtttcaaactaccaacatgacatcactcaatgtggaggtaggaagagatgaacacaatggctttcctgagccagtgcaagttggtgccagcataccactgttaagctcagcaagtcccctggcatggctaggatgtgtccttggtttttggttactatttatatttctagaaactacaaccttaaattctgaggctttctattatccaagaagtctgcaataacaacatgcttcayccttctgctaaagtgtatcctctcttattgctaaagacttcaggtacatttaaaatgatcctatgcccttcacagactttctttctgctttcaaaaataccaccagaggcttaattataacaatttgtgataagcctacatgaatcaatctaaagacaaaacaaaacaaagagatgca

SEQ ID NO: 737516 - DNA, 630 bp, Homo sapiens
aagtattaatttttcttatagatgccaacgatagattgagcatccctaatccaaaaatctgaaatggcccaaatctgagatttttttgagtgccagaatactgctacaagtggaaaatttcacacaaatactttgtttcatatacaaaattatttaaaatattgcataaaattatcttcagactatatgaggtgtatatgaaatataaataaatttcacatttagacttgagtcccatccccaaaatatcttgttatatatatgcaaatatttcaaaatctcaaaaatccaaaatctgaaagaaacattttagataaaggatactcaacctatattaaatttccacaacttacatgtcaaaaatagttttgaacaaccacacacttacataatattataygttgaagcaaacagtattctcattaaaaatgtaaaacaaatttttctgatacaattaggtatctttctaaacttaacctccaccatttctagctttctttcaataatctcagtactttatcttggagaaaactctaacatgtcttattaactcatttttttccattcattaatttatctaacaagcagagtgctgactaccaccaaggaccatgttctttaacatttcaa

SEQ ID NO: 737517 - DNA, 619 bp, Homo sapiens
tctacaaaatttgaaaaatgcaggggaaaaaagagagaaaaaaattcatctgcagtattaccaaagacaactattaaaattttgggatatttccatccagtagctttttaaaaaatacctctattcttttaatttttaaattactgtaataccgtatatactatttaaactttttattttcccacttaaaatgaaaagttttaaatatatttaattgcagattctttgcatgggtaagaaatataggttttgtgcttaatgagtagaaatttaaattagagatgggagttgaaatctgaaacaatacaatatttttctgtttttctttattttatgcctcatttgaatcacaaatgggttgcttagttcctggtgtatgcccttttttttttattttcttattgtgaaaatggaaagggatcagagtttcatacttgaatttttctaagagtttcaaagtgttataaatgataytgtatgtggctgctccaacaaagattagctacaccttgtctctagccctcccttgtgaattacactcagctgctagatggaagtatttgacatctttatgtgactccatctctttccaggctgggttttgtaataagcttgatgc

SEQ ID NO: 737518 - DNA, 648 bp, Homo sapiens
attggactatattatgtcattttaaatcagtttagtctcataagttggactatatgtttgtcctccaaggtaaattataaacttcttgaaggcagggaccacatttagccagtcattcaaaagtatttaatgtgtttctgttcaactaatcttttttctatgttcttctgggtatccaaagggattcagtgttacataaaatataatccttgttatcaaaaaatttatagcccactcctaggttgtaagcttcgtgtacaattcgaagttatgttgtgaccaccaagtgatactgtgcttgccaggtttactgcaatatgacaaggtgaatgtcagccaccaatgacacgtgctaatactatgacatcagagcccaccatgttagccatgtasaaatagctatgctgatatgtctaactttgaaatagagccacgaaatggagaataactcaggagaaattagttgttaaaaatgtacacttatacacagtgtaacatttcagtcaacaacagaccacatatatgaaggactgcatatacacaggtggtcccacatgattgtaatgccatatttttactgtacctctatgtttagatcctgtcaacctgaaaggaaaagtccaaggcaaaattaagtagagagtttca

SEQ ID NO: 737519 - DNA, 614 bp, Homo sapiens
cgcaggcagggtgctcatctgctaggccacggggtccttcaaggatcccaaagttccaaaccgtcctgagaggagaataaaagaaagaccattactgatgccagatttttgtgttggcttcttctactctgatacttccacaggaagtctctcaattcctcctcacagtcctaattatcttgtccaaccttttgccctaaggcaggcttggggctgacatatcccagacacaattagtcggtggttgactctcattcaaataataataataaatcagaatgacattgggttctttgaggatgaacttgataggcatgaaatctcaaacaaaatcctgcgggtatgaatcccggttcctctccccgacccctgggctgagattgcctgtcccagccagcacagaaggaggggacactctatctggcttccactcttccctcagtggccctgggtttccactgcaaccagtttagaayccaatattttacaagaagatgccacagaaggagcacagctactgcttagacaggcaactctcaggtttccagaatttaaatgggttcagaaattatcctacaagtcacagttaaagggtgttcagggacaagtataag

SEQ ID NO: 737520 - DNA, 672 bp, Homo sapiens
atataaacattatttcatttaaatctcaaaacaatcctatgaagtagggtccttttccacagtttatggatcagaatgcagggagactaagttttgcccaaattcacatcatttgttcagtatgtcctcacctaatgtcaccaataggttcttagaaattgggacaggggccaggcacagtggctcatgcctgtaatcccagcactttaggaggccaaggcgggtgaatcacctgaggtcaggagtttgagaccagcctgcccaacatggtgaaaccccatctctactaaaaatacaaaaattagctgggcatggtggcgggtgctactcaggaggctgaggcaggagaatcacttgaccctggaggcggaggttgcagtgagccaagattgtgccactgcactccagcctgggcaacagagcaagactccatcttaaaaaaagaaaagaaaagaaaaagaaaaagaaattgtgacaggaagctaaacgctgtacagcaggtgccgaaataacawcatttagctcagtgtcatttcattataacattgatgaggaaaaaaatggttataggtctttttgcttaaagtcacaatttccaagaacttattgaccatgttaaatgagggctttctgtaattggaagacttgagattccaatgggcccatggatcc

SEQ ID NO: 737521 - DNA, 632 bp, Homo sapiens
aaaggtaaatgtctatcagaattacgatgtaaggcattgccctaagaacttgacatatttaagtcaatttacttcactcaaaaactttatgaagaaggcactaagatattctcatcttacagatgagggaaataaggcgtaactgagatagcatcacgttataaaactgggattagaatttagccagtcaagctccaacgcccatgtgcttagtggactgtaggttgtaaatctacctctctggggaaagtttttgtgtcaaaggaggcacactaattgcagcytagcattctcaaaaaagaaaagacacttctttcttttcaccagaaggcattgaagaggagtcaggggaggaaacagagaaatgtagaggaatagaaaagaacagttaaagaagaatgaaagatctattggtgttggaatggctaggctgattgttaatgtcccttacgttcagaatagtaaacccatgttttcagcacaaatgcaccagagggaaattacccccctacttgctacgggagctgccatcttccaattaatctaccagctacgattatttagaaaaatgtatgaaagctgtaactgggtcacaggctcattttatattacctatatacgtacattgtgtt

SEQ ID NO: 737522 - DNA, 651 bp, Homo sapiens
ctctgtttcctttactctttttattgctctattggaatctgtccagcctgtatccttctggtaccaaagtgcccctggttgaagcccatactgctggacttagtctctgggagttggagggagaagaattgcagtgtccctcakcccactgtgctacagaccttttgaaacttcctctcagtcagctggtcagtgaatcacatttaaaacgcaagctcactgtccacttcttttcaatgggtctctctctcagagtgtcatttttctatgttcaccctgtttttctcagtgaggactttggtgcctggaagccatgagtttgaattcctacatcctctattattttgcttatagaccttgccaagtttgtcgatccatctgagactcagtttccccatcttggcaaggagataattcccatttctgggtgttgagtgaggatttggggctgggtaagacagccaagagcattcaggtgctcttcattcggcctctctcaacccgcatgatccaatgacttatttttccccaggggcaatccccttacccctcaccaccaaaagtgattttgtgacaattttccactcattttttgtcacaggaggtctctctatattttttcctccatcttcgccaggattataattctgc

SEQ ID NO: 737523 - DNA, 643 bp, Homo sapiens
tattttaagggctatgactcggggacataaagaaatgtttgaagaagggaaaggggataaaagcatgcaagattctgtatggaatggaacatttgatacagccaccccacttcctttagttgagcacatggtgggagaccattcaaaaagccaacaacttgggtaacagcccttaaattgacattgtttaggcatgaatggatccaattggttttaaatgttttgttctccacataattcctattttaagaagattggttactatagagactagagctgcctttattctggatgttcaagagaggacatgttgactaatggttagagcagaggtctaaggtccaaggtcctagtcctakcccaaccacagactcactgagagcttgtccataactcactccccatgctgcaattcttccttagctaatgaggagcaaaaaatatctttgatgtggccctttgggcagtgatatttacatactttgttattgatgctgggtgagatggaagaaatggggtgagggagagagcaattctaacataaaatgaattttaagatattgaagttggaaggttattgacctgctaaataagctggcaaatgggaagtaactactcatcacagcatcacctctgggactgg

SEQ ID NO: 737524 - DNA, 630 bp, Homo sapiens
agccaccgcactcggccttggaaattttttttctaactgataagaatacaaagcagcaagtaaaattcaaaaaggatcacagtggaataacttttcattttagcatattaacatttttatatgaatttttttgtgtagctaaaaaatgtaaaatgcatatataatttttttttatgtttrtaagaacattttctatagttttcctatgagagtctgttaggttggaataacaatgtattaaactgttctctgaaattggtcagccttttgttcttacataatacactgtaatgaacatatttatgcacattttttccatcaacttttaaatcaaattcttagaaggaaaactacagattaaaaaagaaaagatcctgatcatgtaatttgtgtgtgtgtttatgaatttgaatgatctcttggcatggctgtcagggcactgcctctgttcctgccactgtgatacgatcatacttttgtgatttcttctattacttcaaaagggaagaagttataccaccatactttaaaacaattaatttataatttgatgaaatgctcaagtattagaaaaaagttttatggtatatcttgattggttatggattttgttctgcttattatgccttc

SEQ ID NO: 737525 - DNA, 630 bp, Homo sapiens
agccaccgcactcggccttggaaattttttttctaactgataagaatacaaagcagcaagtaaaattcaaaaaggatcacagtggaataacttttcattttagcatattaacatttttatatgaatttttttgtgtagctaaaaaatgtaaaatgcatatataatttttttttatgtttataagaacattttctatagttttcctatgagagtctgttaggttggaataacaatgtattaaactgttctctgaaattggtcagccttttgttcttacataatacactgtaatgaacatatttatgcacattttttccatcaacttttaaatcaaattcttagaaggaaaactacagattaaaaaagaaaagatcctgatcatgtaatttgtgtgtgtgtttatgaatttgaatgatctcttggcatggctgtcagggcactgcctctrttcctgccactgtgatacgatcatacttttgtgatttcttctattacttcaaaagggaagaagttataccaccatactttaaaacaattaatttataatttgatgaaatgctcaagtattagaaaaaagttttatggtatatcttgattggttatggattttgttctgcttattatgccttc

SEQ ID NO: 737526 - DNA, 564 bp, Homo sapiens
acttacagatatcttaaagatatccaattcgggctgggcactgtggcttacacacgtaatcccaacactttgagaggcctaggtgggcggatcacctgaggtcgggagttcaagaccagcctgaccaacatggagaaaccctgcctctactaaaaatacaaaattagctgggtgtggtggtgcatgcctgtaatcccagctactcgagaggctgaggcaggagaatcactttaagccaggaagcagaggttgcggtgagccgagatcgtgccattgcactccagcctgggcaacaagagtgaaactctgtctcaaacaaacaaacaaagatatccaattcggtcatgtatatctttctttgttttacatgctratgacagtagtcttttactttcatggcaactcttctgcttactatatgataggaatggcctgggtaaaggatatgctttatagatctctggagttagctctttaatgcttccctcccctcttctgccctgcttttgagtggtgtgccttagcttgtgaaggatggttgaggatgacttaggttgagggggt

SEQ ID NO: 737527 - DNA, 638 bp, Homo sapiens
cagcatctgtgattttctatacaatttggccctttttactattaagaacattggtgatgcagcctttctaggagtgtgctgcactaattatctccgagatttgcttctaagccactgatatctcttcaacaggttttgatattgacaccttgtttatgtgttcttcacagcaggtatcaataggaagttttcagtcaaccacaaggtctcataatccttcctggaactattcttgaatagtttgccgtctgaaatgttgagagcttgccccttggataacatgccccttggataacaaccaagtcagttcatgagcaagcagtggcaaacactgtgtcccaccagctcctgactgactgagactacacgataccattyatcattaagatgtacctggatttcaagcatgttactgtgaaaaataaaatggagtcttagaaatgatgatataagtagaatttattttttgtctctgaaagacgaaactcctaatttttataacccctactatttataataaaatactgaaaagaaatagttatttttaatcacaccaataggccaaatcaatagatcataattataggaaaattggtcagatatagctggctatttgattcataaagaacgccttattt

SEQ ID NO: 737528 - DNA, 609 bp, Homo sapiens
agggaactagattaatttgtgtcatgtcagcaaacaaaacagcaaattcttttggagattcatccatagatggttgagggcaggcctcctcccatggacctatgaattagcagttatggaagggaaggaaggatactcatggaattagagaacagttttaagagcatgaactgttagtcaccctgcctaagtccctatctggctcttccattttctctgtgtgaccaggagcaaatgaatgacttttaaaatttttagcctcagtttactcttgtctacagataataatagtaacaataaaaataataaagcccttataggattgcctgaacatttcagttaatatacacaaagcagtgtttttaatattcagctgagactcacagtaagaaacatattttacaatatatatgcgtgctaaatgaaacagaagtatcacaaaataacccttatgcttgctaagtatgatartgatatactctgatattttctaatatattctattttaaaaatgtatgttggtaagacccatactaccttgttttcccaactgaccaataggtcataattgcagtttgttagaaatttatgtaaatgagtttttcaatg

SEQ ID NO: 737529 - DNA, 590 bp, Homo sapiens
ggagccttcccagattagaggggtttgaagtgtgttgatgtcttgaggctttcttgccgctgacctagctacctgactggctaatctatttccttcggctacctcatctgttcccttctgatgtcccctacaatgcatttctgtgatttctcgtggaaggaaaactgaggaaagtaaccttttaatttcctggtgatgttttataggagatccattggtggtaagaaaatgcctttccttccaaatggctgcatgagcatggagaactaggaaagcatactgggagtcagtgtaaatattagctacctttcctttgcttaattcaattgctcttgtaagagctattagctcagctaattgagcrcttgtgcctggaggaagagacacacttttaatgacgtcatttagagtgactactgcgtatcctgccttgtggatccatgctctacaagagagctcccatctgtgaagagggtccagtctggattctctaggggagtttccttgaaatcctccctggctgcataggtctgtactatgacttgttcacaattatgctcaggttccctagtttcttcagggaggaaggt

SEQ ID NO: 737530 - DNA, 605 bp, Homo sapiens
tgaggaaagtaaccttttaatttcctggtgatgttttataggagatccattggtggtaagaaaatgcctttccttccaaatggctgcatgagcatggagaactaggaaagcatactgggagtcagtgtaaatattagctacctttcctttgcttaattcaattgctcttgtaagagctattagctcagctaattgagcgcttgtgcctggaggaagagacacacttttaatgacgtcatttagagtgactactgygtatcctgccttgtggatccatgctctacaagagagctcccatctgtgaagagggtccagtctggattctctaggggagtttccttgaaatcctccctggctgcataggtctgtactatgacttgttcacaattatgctcaggttccctagtttcttcagggaggaaggtggctggatttaggctagaacaagtctttaattggatgttggaaccctctaacagtagggcctgatatttaaggagtcggctatctgttagccaaaggcttcctctagagtacagtagtcctgccacattatgtagggtgtaaacagttaaatcattccccagggttaatttggaggcttc

SEQ ID NO: 737531 - DNA, 634 bp, Homo sapiens
tagatattgtataaaatagacaaagtattaaaaacaaaataaaatatcagccataacctccaagtcagagatgaataaaattaacattttggtgactgttttactagtgtttattttccacgattatatgtgtcacaaaatgttacaagtataccatgtacagtcatgcaccgcattaatgatgtttgggtcaacgactgcatatgcaamggtggtcctataaggttataataccgtatttttactgtaccttttctatgtttagatacacaaatacttaccattgtgttacaactgcctccattattcagtacagtaacatgccgtacaggtttgtaacctaggagcaataggctatacaatacagctaggtgtgtagtaggctatactatctaggtttgtgtacacactgtgatgtttgcataacaaaatcacctaacctcacatttctcagaacatatccccatagttaagcagttatatgactttatagtattttgcaatctgcttcttaaaaatttgaattttattttagtgaatatatttctacagcgtcacttttagtgattatacactattctgatttattaaattaatatatttaatcaattgtttatacatgtaatttgtagtt

SEQ ID NO: 737532 - DNA, 619 bp, Homo sapiens
tattgaaatagaaaattttcattagccatttgtagaggtgagctattgctaacagcatgacctttaacaattctatgaaatctggataaagttatctgcagtcaatcatcacatataacaacttaaggtatcatattatggtgaaatatttgttggatctcattttaatcctaatgtttaattcagtaatttggtttataaatgtattcggattcactgaaatatatcataatagtaacatttataatttgaagcatgtgacatgttttggccaataataaacttagatttttaaaatggtctaagccaccaacagcttctggtggctttaacatgaatagtaggacaaaactttcttttctttctttttttttttttttttttttttttttttttgagacacggtctgactgtcacccargctggagtgcagtggtgcgattttggctcactgcagccttgacctccctggggctcaggtgatccttccacctcagcctcctgagaagctgagactacaggcacttgccaccacacccagctaatttttgtatttttagtggagatggggtttcaccatgttgcctagactggtctcgaactcctgggctcaaagcca

SEQ ID NO: 737533 - DNA, 577 bp, Homo sapiens
tgtctcccatgcctcacctccctggcccatgttccagctggcaacagtttatgaagcatgttgcagtgttaataccttgttaaggctattttagctgttgggtctttcagaggtcaatgtcaggactgttttactttgaacccttgatgggcagggtaaagctggggacatgtcgaacttctaccttctcacactgcaggaagccttacagctgtaggcatctcttcccatgatgcagtattgctgcaggccgtgtaagcaattagaagtattctgcttctagtcaaataatgaggggggagttttaagacttatttaaaattattagtgaagtagacatggaatcattaggtttcttttatattttaaaattcagtgcagccmaatataggtgttaaagactggatacattttatatcctttatttctaacaggtgtcaaacattgttgagtttataacaaagaaaagaaaatgaaacattttcctccagttttattatactagcatattgtttgacatcattaggatgttttagtttggcagttgatttttcagattttaaaaataacattttaa

SEQ ID NO: 737534 - DNA, 532 bp, Homo sapiens
tacagcaagattgacagtgtacacttgtggggaaagtgggcagatgaggaggtccacttggggaagggaaagcgaagtgacagtaattggtcatgatctgcatgaccactggaggccccagaagggagtgctttgttttcctacctttgtatggccttcatttctgcttcctataccctagtgttttcatatttgggattaagtttacagtgctctaaaagcccctgcatttatataccagtagcttccaggagacagaagatcaaaaattctttctctgccaacccaccacttagttcttaattwaaaaaaaaaaaattactttttaagaggtaccaaagtcgtcaatgtctttgtttgcttctgactgcttctagtactttttccatttctgtacatgcccatttatgggtctggttggtctctacagaggcagcaaagggaaaggaggaagactttttcccagatctctctaccttaaagcatggagccaagtagcttgtattagtcctaggattccttttctcctgca

SEQ ID NO: 737535 - DNA, 299 bp, Homo sapiens
aaaattgactataagtcaaaaaggattattagggataaagagggttattacttaatgataaaagagacaaaatccaacaagaaatataacaatcctgaactatattcaccttatagccttaagatgaatgtaacagatttacaaggagaaataattccacaaycattatgggtaatttttaatgcaaccttctaagaaatgaacggatcaagctgactaatcagaaaaaatacaaaaaatctggacaacacaatttagaagcttgaccaaagggagatatatacacatacactacatac

SEQ ID NO: 737536 - DNA, 591 bp, Homo sapiens
atggcaaagctgggagacattgacaattgtttgatttgttcaagctgagtttagatgaagaaataaagtagtcattatgtctactgttgggttccatattcttcagtttataatacccagcaggccctcatgcagcacacaataagaaatttaataaggtaaaatttaattaggcatatattataggctgaatgaacttttgacatctgcttttggacaattttaggctgcttgaattaatatattcattcctattttagtaacattctatcttcattgtaaaagtttgaacatatactttattatcatctcrtaagttgattccttttattttcaggagaattaacattttttaaatgaggggattggtgtgggagagtaggagtctgcagaaatgtgtccaaaaatgcagatggtatatctgataaacttaacaatgattggatatcatgctatctcctgctgcaattttctatcaagaagatcacagagattaagcattatttaattttttatgtaaggaaaaaggccaactttcaaaatctattctccaaatctggaaacatggcaagaaaagatttttaaaattct

SEQ ID NO: 737537 - DNA, 626 bp, Homo sapiens
aggcatgggccacattcttggcaacttggggacttgatggtgttaaatcacatgttagggtgttaattggctaaaatgatttaaatgctccttgtgaaagtgaatctgatttctaatatcaaacctccttcaaagacctccaccactccagcttaatacccagaacttcctagaatgtcttctcattaaaggaactgagctgagggtgtagtaagaggagagtcatggagaagaatgaacaagcagttacaagttctatatgaaaaaccctatgaaaagctcaataaacaatgatgaaggtactcaacaatacatttcagtggtgagatgccctgacctgtataaagtagtgagattcagtacagtgrtgaaataagccacaacctagcagataccgtagttttgtagaaaagtctaaccaacaggtagaaaccatccaccttaatgacttcaatcgtcctgctgtgaaagacaaagaaaaaaaacaattatgctactcttaaatgagaaaatggggacgcaatgcaggtacagatataaatatttctaggtaatattcaaaatatttaacaactggtattacattggtgattaatcagaatgaatgccagccatgcaaccagttg

SEQ ID NO: 737538 - DNA, 631 bp, Homo sapiens
aagataaattttttagttttagattgaaagccagcgatgttgaagtaaaggtattacagaatctaaaaccacctggatggatctagagagatccattatccaagttttctttgaagctctgaaagaaaatgtttgatttttaaaataaaaatattagccatttaatttgtatatttgaaaatgacttaaattagattgtttctttttctgttaagttacaaaagaggctgaaatgttacaggtcaggagcctacaaagktaccataacattagtgctcaggtaagaaaggtgctttcgcattagctattcagtttcttggatcttaggaagccagcacaagtctgtcatcaatgtctgtgtcagtggtgggttatttcccacttcctgaccatttcaaaatcttgcagggtctctaaagcctaatttaggaactacatataggtttttagatctggcaataatatgctaactatgtggtttataatatataaaattttatttagagtgagtccttattttagaaaatttgcatttccagagcttgtgaattttttaagtgatttgtttctacgtccataaaactaattaggaaacactgtcacctgtatttgatattgctttgaaatctca

SEQ ID NO: 737539 - DNA, 613 bp, Homo sapiens
attataatcttaccaagagcaaagatgactcctaccagactcctaccagacactaggaagatcaatttttcttgccttatttaaaaggtgaatttccactgtgtggaactgcaaatatccaatctcattgcccaaactctgggatgacatctgggaaataaataaacattttggtaccatgtcagattccctggttgcagaggcacagatcgatctatgagtcctagactattgaccgacaaacctggttcctaacatggattgcrggtgacctttggagactgacttcgtgaagggcccatggagctcacagactattagctacagagggtccaactccactggtgttgccctcattaacttgaacaaataaaaacttgtttgtacagatctcaaattacctcctgttacaaatgtccagtgcctcttccaagggcccagatccaaaaatctgtcaacagatcacaggagtttttgctgaggctggtgcatattctgatttgtttggatcatttagaagcctttaaacaaaatatcacaggcctctaaatcttcaagtataaactaaaaaaaataactcatggttaataaactatgaactccaacaaaatgt

SEQ ID NO: 737540 - DNA, 613 bp, Homo sapiens
attataatcttaccaagagcaaagatgactcctaccagactcctaccagacactaggaagatcaatttttcttgccttatttaaaaggtgaatttccactgtgtggaactgcaaatatccaatctcattgcccaaactctgggatgacatctgggaaataaataaacattttggtaccatgtcagattccctggttgcagaggcacagatcgatctatgagtcctagactattgaccgacaaacctggttcctaacatggattgcgggtgacctttggagactgacttcrtgaagggcccatggagctcacagactattagctacagagggtccaactccactggtgttgccctcattaacttgaacaaataaaaacttgtttgtacagatctcaaattacctcctgttacaaatgtccagtgcctcttccaagggcccagatccaaaaatctgtcaacagatcacaggagtttttgctgaggctggtgcatattctgatttgtttggatcatttagaagcctttaaacaaaatatcacaggcctctaaatcttcaagtataaactaaaaaaaataactcatggttaataaactatgaactccaacaaaatgt

SEQ ID NO: 737541 - DNA, 589 bp, Homo sapiens
aacagatcaatggacagagaaaatgtgttacatatacagaatggagtactatttagccataaaagagaatgagattctctcatttgcaacaacatggatgtaattgtaggtcattatgttcagtgaaataagccaggcacagaaagacaaactttgcatgttctcacttatttgtgagaactaaaaatacaaacaattgaactcatggagatagtagaatgacggttaccagagaccgggaagggaagtggagaggttagagggggagttgggatggttaatgggcataaaaaatggaaaggataagtaagatctagtacgtgatagcacaacaaggtgactgtagtcaatgagaatataattatacattttaaaataactaaaaatgtacaattaggtygtaacacacaaaaaatgtgtgaggtaatggatacccattttactctgatgtgatgattacatatggtatgcctgtatcaaaatatctcatatgccccataaatatatatacctactagttatccacaaaaactaaaaattaaaaaaatttagaaaaatttttaaaagacatggttaggtatgaatcaga

SEQ ID NO: 737542 - DNA, 588 bp, Homo sapiens
cctttgttttcaaaggaaactttatgttcacactctcgctacaggggttagcagagtaagacgagaaaatagtcccatagtgtttctgccagctaatgaggaaaatttttcctcctatatatatcatgataggtaattgaattagtactccagtaggaaagggtttgctatttcatacttctatagtcttttcttaacaccatgaaattaaagacatgccagcatggagctgcctattcctgatcgatttcaaataagcaatgtagtatattattgcttttatgtgcttttatagcacatgctgtgcaagataattgactccatgacagatgtctatatttcagaggaaaatttatttgttaaagaacaaacatgtattacyttaacatggggctattcattatattgcccacaaggtgctttttgatgacttctaaattgaaattaatattttctcttgtcgttctgaatatgcataagcaaatttgactgtttgatataaccattttgaagcttattctgctacttgaatgtaaccttctgtactcttagatcatgtttgaagtgctgggaaatgagaaagtgtgc

SEQ ID NO: 737543 - DNA, 452 bp, Homo sapiens
acaactcctccccttcagaatctggtgtggtagcagggaggttgtgagaagggacactgaggaagataaagaaggagaagccagtggactgggaagaaggtaggaaagtgcgaaccgaaggggtacaccggagaggagctatgggaaatgaggcaaagccttcaggctatagggggattcccagaaagaaaatcaktttctccatagggaaactaccgatgctcgctatagaccagttggaaaatctgttgtacaccctcccaacagaattcctagcgagcagtggccagactggtcagggcctagagcatgtgtccaggaactccatccacttcccaacccaaattccaaggcaggcggatgaccctcattttggaaacttgattctgagaaggtgcgagaagacaccgagctgagtctgtttacggatcccgggctgttcttcatcttta

SEQ ID NO: 737544 - DNA, 452 bp, Homo sapiens
acaactcctccccttcagaatctggtgtggtagcagggaggttgtgagaagggacactgaggaagataaagaaggagaagccagtggactgggaagaaggtaggaaagtgcgaaccgaaggggtacaccggagaggagctatgggaaatgaggcaaagccttcaggctatagggggattcccagaaagaaaatcagtttctccatagggaaactaccgatgctcgctrtagaccagttggaaaatctgttgtacaccctcccaacagaattcctagcgagcagtggccagactggtcagggcctagagcatgtgtccaggaactccatccacttcccaacccaaattccaaggcaggcggatgaccctcattttggaaacttgattctgagaaggtgcgagaagacaccgagctgagtctgtttacggatcccgggctgttcttcatcttta

SEQ ID NO: 737545 - DNA, 452 bp, Homo sapiens
acaactcctccccttcagaatctggtgtggtagcagggaggttgtgagaagggacactgaggaagataaagaaggagaagccagtggactgggaagaaggtaggaaagtgcgaaccgaaggggtacaccggagaggagctatgggaaatgaggcaaagccttcaggctatagggggattcccagaaagaaaatcagtttctccatagggaaactaccgatgctcgctatagaccagttggaaaatctgttgtacaccctcccaacagaattcctagygagcagtggccagactggtcagggcctagagcatgtgtccaggaactccatccacttcccaacccaaattccaaggcaggcggatgaccctcattttggaaacttgattctgagaaggtgcgagaagacaccgagctgagtctgtttacggatcccgggctgttcttcatcttta

SEQ ID NO: 737546 - DNA, 523 bp, Homo sapiens
ttaaaaaaaattttttaggccatattccatttaaccaaattatctaaagtacaataaaagtggtattttaaatcaatagggaaggaataattattcaattaatgatgttgaatcaatttgtaaaatccatggaaaaaatacatagataatatatcataacatatataaaattaaattccagaactaagtagttaagcataaaatgtgaaattacaatacaactagaataaaactataggtaactattatcygacctcacagcaagaatatttttataaaaataaaaacaatagagggaaatgaaagaaataaaaaagagaagacattgaatttatcttcactaactgaaataattatctttaataattgacttacacaaaaattaaaacattaagtatgttaaaaaataatccaccatttataaaaccaaaaggccaacaaagagacaaaatgaattgcaaaatatctgacaatgggttgataacctttataaatagttcgcatgtatcaatacgtaaagaac

SEQ ID NO: 737547 - DNA, 523 bp, Homo sapiens
ttaaaaaaaattttttaggccatattccatttaaccaaattatctaaagtacaataaaagtggtattttaaatcaatagggaaggaataattattcaattaatgatgttgaatcaatttgtaaaatccatggaaaaaatacatagataatatatcataacatatataaaattaaattccagaactaagtagttaagcataaaatgtgaaattacaatacaactagaataaaactataggtaactattatccgacctcacagcaagaatatttttataaaaataaaaacaatagagggaaatgaaagaaataaaaaagagaagacattgaatttatcttcactaactgaaataattatctttaataaytgacttacacaaaaattaaaacattaagtatgttaaaaaataatccaccatttataaaaccaaaaggccaacaaagagacaaaatgaattgcaaaatatctgacaatgggttgataacctttataaatagttcgcatgtatcaatacgtaaagaac

SEQ ID NO: 737548 - DNA, 564 bp, Homo sapiens
aaacattgctgataggaacacaaaatggtacaactactctggaaaatagtttggcagtttctttaaaaagcaattatgtaagtaccatatgacctagcaattgaactcctgggcatttaatcacagggaaaggaaaacttatgttcacataaaaccctgcacatgaagtttacagcagctttatttttgtttgtttgtttgtttgtttgttttgagacagtcttgctcggtcacccaggctggagtgcagtggcatgatcttggctsactgcaaactctgcctcccaggttcaagcaattctcctgcctcagcctcctgagtaactggacctacaggcatccaccaccacgcccggttaatttttgtatttttttgtggagatggggctttgctatgttgtccaggctggtcgcgaactcccgacatcaagtgatccgcctgcctcggcctcccagagtgctgagactacaggcatgagccacagtgcctggcccatagcagctttatttgtaatagctaaaaagtggaaaggccagaaatgtccttcaacaggtgaatggtta

SEQ ID NO: 737549 - DNA, 478 bp, Homo sapiens
tttgctctcaagatatcaggatattaggactctcccaagtctgggtgtgtttagcaaacattattaatctattcccttaaccataaacatcgggaggctatttctgggaatcagcccagcaagtcccagcctcattttcctagcccttactcaaaatggagtcgctgtggttcaaacgccactgacaggctgaggcagaagaattgcttgaacccrggaggcagaggttgcagtgagccgagatcataccactgcactccagcttgggtgacgaagtgatactctgtctcagaaaaaaaaaaaaaaaaaaaaaatatatatatatatatatatatacacacacacacacacacacacacacacacacacaatttggaggagaaagtgttttaaatatttttatggcaatttaaatattttaataaattaacataagcatcaacatattatgaaatagaacgcaacatttatatatgtg

SEQ ID NO: 737550 - DNA, 561 bp, Homo sapiens
ggatcccatatggttcggcccagaatgcccttccccgactctgccggcttggcaaacttccacttgttttcaaaactcttcttagactgagactggcagaagccacctctgaaccttcctatccactgcccataattactcctccttctgtcctacttcacatcatggtgcatgtccacgactgtgtgtcatacggtacagtgacagctcctcacttcagttcccttcactgacctgagcaccgggtaccttgcttatcaattactgtatgcttatcaaacctatcctaaagcatttcaagatcaggagtgcgctttccacctacactcctccaaaagtcacactgtgaccatgtttcaaagggggaattcaaatgctgcccactcaagcctctaacacaaactgacaattcctctctatcmcctggactcccatgcactgtcttattcgcagtactaagttaaatctaccttttatttcagtcctctgtgcacacattctacctctctcaaggaactgagtgggccttccatgagggcaagtacctactgctctacacat

SEQ ID NO: 737551 - DNA, 509 bp, Homo sapiens
ttctggtgggaggtgattggatcatgggggtggtttcccccatgcttttttcatgattgtgagggagttctcatgagatctgatggttcagaattggcagtttccactgtactctctctcctgccatcatttaagacttgccttgcttcccctttgccttccgccatgattgtaaatttcctgagtcttcccagccatgttgaactgtgagtcaatcaaacctcctttctttatacattacccagcctcaggtagtatctttatagcagtgtgaaaatggactaatacaaactccaacccatgagagaarctgcaagggctgaaccctggaaagtcacagggcagggctgcctaaagccataggagcacacctcttgcagcagtgtgctctgatgcgggacatggagtcaaaggacactattttgaagctttaagatttagtgacttccctgttgggtttttgaactggcataggccctgtaactcctttcttttaaccaatttctccc

SEQ ID NO: 737552 - DNA, 609 bp, Homo sapiens
agaacagacagatcttgttgctccctgataaggtcagagaagcttagctagattgtagtgatgcttaaagctcattggttttgcctacggagcacaaagctgttaccatgactacaaaactgctgttgctaaggcatccacaggctcatctgatgtcagggcttccaggtggcccagcacaaaagctattactttatgttgttgtcaagaagtctttgaatagtagtatatagctaaaacaattccaggtaaacaaggtttcctatactttttcatgtagacagaggatactcttcaaagtggaagtaaatgattggaaatgaatctatttctcctaattagcccatcagagaaatactaaagttggagggagaaaagtatgcacagcctgtattaaattactgctttatttgycatttcctaaatgtaaatttaaaggtaatggaaaatttttaaataacctcacaaacatttgtaaagcatttcgattggcaagtcgaaacagccaactcactgataagaattggcagtgttacaaagctggaaaacacagggtcacaaaatgcaccagagggggcaattcatccacactcttgtctctgtaataga

SEQ ID NO: 737553 - DNA, 680 bp, Homo sapiens
cccaaaattcatttatgtttcataatacacatatacacatagcctgaaggtaattttatataatacttctaataattttgtgcataaaaccaaattttgactacatttcaactgcgacccattgcatgaggtcaggtgtgtaattttccacttgtggcatcatatttgtgctcaaaaagtttcaggttttttagcatttcagagttttgattttcagattagggatactcagcttgtatcattgtatatgtaaagaaggaaccaatattctttaatattcaatatccatttgtggtgggtgatacatggaaaagcatattcatatcctttatatataatgttgtttgaccatgcagcttgttggggacaggtacatagtasccatcagatgctcagaggggtctttgaaactttattagacatgataagccagtaatgctgcagtattcaatgacttatgatatggtttggctgtgtccccacccaaatctcattttcaattataactcccacaattcccatgtgtcatgggagggacccagtgggaggtaattgaatcatgggggcgggtttttctcgtgcattctcatgatagtgaataagcttcatgaaatctgatggttttaaaaacaggagcttccctcttctctttgcctgctgccatccatgttagtaagata

SEQ ID NO: 737554 - DNA, 680 bp, Homo sapiens
cccaaaattcatttatgtttcataatacacatatacacatagcctgaaggtaattttatataatacttctaataattttgtgcataaaaccaaattttgactacatttcaactgcgacccattgcatgaggtcaggtgtgtaattttccacttgtggcatcatatttgtgctcaaaaagtttcaggttttttagcatttcagagttttgattttcagattagggatactcagcttgtatcattgtatatgtaaagaaggaaccaatattctttaatattcaatatccatttgtggtgggtgatacatggaaaagcatattcatatcctttatatataatgttgtttgaccatgcagcttgttggggacaggtacatagtagccatcasatgctcagaggggtctttgaaactttattagacatgataagccagtaatgctgcagtattcaatgacttatgatatggtttggctgtgtccccacccaaatctcattttcaattataactcccacaattcccatgtgtcatgggagggacccagtgggaggtaattgaatcatgggggcgggtttttctcgtgcattctcatgatagtgaataagcttcatgaaatctgatggttttaaaaacaggagcttccctcttctctttgcctgctgccatccatgttagtaagata

SEQ ID NO: 737555 - DNA, 626 bp, Homo sapiens
atttctgctcagaccctattcccacttacagattttgtgggacctacttctcatctctggatagtgcctgctccttgactcctttgcccatactttctctacttgcctctcagcaggccctgctgctgcatgttccatgtatttgctgctatttgcaatactgcactaacaccattgccagtattcttttctccagctttctttgcctcagactagacatccagtttcaagtctagtatctcccattctgtgccatcctgggcaatttaactggaccatgcctagccatgtccatgattgttgcaatagttctttttgtatatctatgattattgcttctccttagaggcagggattttatcttacccatttacatacatcccttgatcttcccygtaatggttaattttatgtgtcaacttaactagatcatgaggtacccagatatttgactaaccattattcctgtgtgtgtctgtgagggtgtttctggatgagattagtatctgaataggcagtaagcagatggccctccccaatttggtaggagatcatccaatcccttcagggcctgaatgcaacaaaaaggtacaaaaaggaattctctttctctctctctccttgac

SEQ ID NO: 737556 - DNA, 613 bp, Homo sapiens
gtggagggagaggcgcgagcgggaactggggctgcggggcggtgcttgcgggccagctggagttctgggtgggcgtgggcttgggcttggcgggccccgcactcggagcagccggccagcctggccccggacaatgagggacttagcacccgggccagtggctgcggagggtgtactgggtcccccggcagtgccagcccaccggcgctgcgctsgatttctcaccgagccttagctgccttcccgcagggcagggctcgggacctgcagcctgctatgcctgagcctcccacccactccatgggctcctgtgcggcccgagcctccccaacgagcaccaccccctgctccacggcgcccagtcccatcgaccacccaagggctgaggagtgcgagcacacggcgcgtgactggcaggcagctccacctgcagccctggtgcgggatccactgggtgaagccagctgggctcctgagtctggtggggaggtggagagtccttatgtctagctcagggattgtaaatacgccaatcagcaccctgtgtttagctcaaggtttgtgagtgcaccaatctacactctgtatctagctctctggtggggccttggag

SEQ ID NO: 737557 - DNA, 503 bp, Homo sapiens
agttctcttcccattaccacactacagttaaagagttaactggctagccacatgcagaaaactgaaactggaccccttccttacaccttatacaaaaattaactcatgatggattaaagatttaaatgtaagacctaaaaccatgaaaaccctagaagaaaacctaggcaataccatacaggacatagggatrggcaaagacttcatgactaaaacaccaaaagcaattgcaacaaaagccaaaattgacaaatgggatctaattaaactaaagagcttctgcacagcaaaagaaactatcatcagagtgaacagccacctacagaatgggagaaaatttttgcaatcattcatctgacaaagggctataaccagaatctacaaggaacttaaacaaatttataagaaaaaaacaaacaccccatcacaaagtgggcaaaggatatgaacagacacttctcaaaagaagacatttatgcagccaacagacacatgaaaaaata

SEQ ID NO: 737558 - DNA, 606 bp, Homo sapiens
tagaaaggaagttcatggatttgagaatatttatgaaagttggctggaagaaagagagaaggagatgatacatccagttttggacctgttgaaaaacggccgtgtgaaagggcacggtttcaaagctggatgcatcatcaacaacaagggtagaaattgagtacttatttaaacatgtaggactgactaaaactcaccaaaaatacattagttgaggatttattccttggatcacattttcccacatgtgaatgatggtayaggtgtgtaaattatgattaaagatataaatgatattcatcaggaagaacgcattgaaagataagcgtcaaagacctaagagatatccctgaagacactaatatttagagaaatggcagtggacaagaagtctaccaagaaaattagagagtgatgtaattacaccgaggaaaccatgtttaaagaggaggggttagttagcaatatcaagtcctaccagtaaaataaagtaagaatacctacgagggatttggaaacaaggcattcattgatgaccttaacaaaaacagtttcagagaactcttggcaatgttttccagtttgcatgggttgaagaatgcattg

SEQ ID NO: 737559 - DNA, 481 bp, Homo sapiens
caatgagaccgtttaagcagtcttgggaaatgaatgagaattgtgataggtaacactgagggtggtagttggaaagaagacattctagactgaatgaacaccttatgtaaaaacacacagtgagagtggtgaacagcaaaactgttatatgactagaacatakaatgttaaggtaggatgtggttgaacatgccaaaaagtgtgcataaacacatggacattaaatatcaaaaagattttatatagaagtaacaaatcatatataaatcttagtaattttactctggcattgacttagagggtacaaattgaaggtaggtatgcccttatttgagaaattatgtgagtctgaacttaacagttgaaccaagattgtactacaaacattatgatgtaaacattagaaaacaggatttttttttgctttgatcaaaattgtatattcagcacccagaagagtacttggcacataaattgaatg

SEQ ID NO: 737560 - DNA, 474 bp, Homo sapiens
tgtcaaggcaaccagcagcattccagatgatagaagcttcatcaacctggagtgagaagatgtagagctgagttcccagctgtcctgggatgaacacgtaatatgatcaataaatatacatttgttgcacttatctactgcagttttggaggtgttatctcagtataacctagtctatcctgattacactgagtgcataatttttagaaatccaaagaatgcctttccttaacttttcacagaatcagatgctacaaagaagataatgcttcaaatctcttcaccagaaagagatagactttttttytggactggctagagagaaagtatagaatcatgaatttatggttaaactatgttcttcagacagaaactcacatttccactttgactaattcagatgaactgttttactgcctgagctactcagaaaaattgctttaatttattgtcttgtaaaacaaaccaaagttt

SEQ ID NO: 737561 - DNA, 525 bp, Homo sapiens
aaattgtttcaaggatgacagattacaactggtttctctcccccgccctacctacccacaaccctcgtgttcacctttataacaattttttttttcccaaaagtaatgtggtttaaaaatcattttaagttgcccaacataaatgataaaatcaaatattggattcacaaacaatagcctttattggtttgtgacaagtgatccatctttttacattactgcagctttytgaaccagattatttttcataattgataatttgtgagtcatatatttgttatctgttcttttatggctttgaaaatagtgaacaatgccaaagatcacgaaacttttataaagaaaattattttagtgtggtttattgcctggcattttctgaaagtatgttaccaataagttttgcagagaatgtaacaaagataaaagtaacatcccttgctagaaagagacctgataggtctagaattcatactgataataggaatttagttttaggaattgttcatatttagcatgagaaca

SEQ ID NO: 737562 - DNA, 658 bp, Homo sapiens
gttaggatggaagcatccaagagccattgttttgatgaacagtgattgcaatctgaccaggaaagtttatatacatgatttgtttgtgtatttatttattttttaatctcttaagtggccaaaattgtattgataaaggaaattgagttcctatgaaagcatgcttttgtaatcaggaatactagctgacttgactcttagatttgaatatcaggcttcacaatttcaaatcaatttgtgaaggttttgagtttgtaatagtatgtgttatgtttaaagctctgtacacattacgactaattttaaaatatcacttttaataaaagcttgttgtctaattgttattccatmtgatgaaaaagtctttaaagatttctatgatttatgtagaaggctgaaaaaaatcacattatatgcatttgttagaaaaaaataaactgtcctttaattttatttccctgtgaaaaaaacatttcttttctagattttttactctaaaatctggttaatatttagattcataattagatttttttatctttgaggagaaattttcttagtgtgtattagatttttagaggcaaaaatagaaacaaataagatattcccaatgcatcttactactcttataaattagaaatcttggtagaaacagttt

SEQ ID NO: 737563 - DNA, 602 bp, Homo sapiens
ttactccagagcttcctagagctctggaccccagctgctcaatgggctgaccccagctatgggagaatggggtgccaggaagtaaacagatttagagcttgccatttaggcaagacctgacggtggttctcatccccaggggcaactggaaatgggggcgggcccatgtccgcttgtgaaaatgactaggggcccctgctgatagccggtggtgggaaggggccagggtgatagacgctggtagtgcatgcagagcaaaacactgttgtccacactgcccatagtgcccctctaaggacactgggccagcattcctgatgtgcaaatagagtcctcacgtggaggtccagctaagagctcagtcaaaaatctgaaaaaagttttaggaaaagcaactttcttgccacttactctgggacagtgaactaatgttaagtggcaggggaggtgttctagaacagygactttcaaatatgagtcgcatgccattagggtcatgaaatcaatttagtgtgtcacaatgagcaacctttaaaagtggaatagaataaaagcaaatagaaaatatcagcatgtaccattagtgagagagagggtgtatg

SEQ ID NO: 737564 - DNA, 602 bp, Homo sapiens
tgacagaaacttgtttgggtaatgctcacttttagaaaatagagaaaagacagtcaacagagctgataggaaacttgaaatctatgcagtggcctagaaacaacaacaacaaaaggagtgattttcaggagaatgtggttaaattgccacaagatatacaaatgtcaaacaacatgaagataaagaaaagatcaattgtttggcaagttggtgctcatgtcatctttgtgagagatttcagcagagtggtgtgaacagaagtcagattgagggggtggaagraatgattaagagatgaagaaatgaagtcatcaaaggttcaacagtctctctgtggtgtgtgtgtgtgtgtgtatgtgtgtgtgtttgtgtttagtagcaaaaaggaaagagggttggtagctgcaggggtaatcagagtagaatatttttatgagccagaggtcttctcttcatgtatggtgagaaaaggaaaggaaccagaaagaatagtaactattcaagatggcgaggagtaaggtgatgattgatgatggatcatgtgttgtgggatcagggtctctttagagttaatataaatcaaatttcagggccatgaagta

SEQ ID NO: 737565 - DNA, 604 bp, Homo sapiens
atcccatctgtcttgccggcacctcctgcacttgctggcatcccttgcccttgttggcaacttctgcatgctggatagtgtcccgtcaggtctaggataacggttctcaaagggcagcctggtgccattgctagtccacagatagactgcactttgatgcattaatgatgtttaataccacagtgactatatttttactttgttatactgatcattgttgctgcttataagaatacaatgggagacaggattctgaggctgggtgctgggggragccatttaaaatctggcagcactggcgggaaagcatacctggtgctgccaggttggagcttggtgcccttttctgcctttttcatgacacctctaagggggagccattgtcctgctattctctttggctttctttttaaggggctgtgcacccatagatttgctgtagccaaaacttacaagaccgtaactacacagttcaaccctacatacaccctgtgatatctctgaactcttctctactcctctcttccctgctcacttggccccagctgtgcttcagacacaccaaggtacttccagacacttacaggcttcactcctgcccctc

SEQ ID NO: 737566 - DNA, 604 bp, Homo sapiens
atcccatctgtcttgccggcacctcctgcacttgctggcatcccttgcccttgttggcaacttctgcatgctggatagtgtcccgtcaggtctaggataacggttctcaaagggcagcctggtgccattgctagtccacagatagactgcactttgatgcattaatgatgtttaataccacagtgactatatttttactttgttatactgatcattgttgctgcttataagaatacaatgggagacaggattctgaggctgggtgctgggggaagccatttaaaatctggcagcactggcgggaaagcatacctggtgctgccaggttggagcttggtgcccttttctgcctttttcatgacacctctaagggggagccattgtcctgctattctctttggctttctttttaaggggctgtgcacccatagatttgctgtagccaaaacttacaagacygtaactacacagttcaaccctacatacaccctgtgatatctctgaactcttctctactcctctcttccctgctcacttggccccagctgtgcttcagacacaccaaggtacttccagacacttacaggcttcactcctgcccctc

SEQ ID NO: 737567 - DNA, 555 bp, Homo sapiens
tgaatccttttgctttgtattccaatgacagcagctttgaccagcgaccagctctcttctgaaaactaccattttgacccctgcatttcacctgttgtcccaccaagcctgtctgtttttccattaacagagacctctgaattgttgtgccaaatgtggacagtgttgtttcttcctcactttcctgaattataaccagttccaggcggtaacatgcaaccgaactttactgagtcctggacataatgggaaaaaatcatagtgtagaaagaaaactataggactgaatataaaaaaataatcatttytggcattacaggacaaacccagtcctttctgcttagttactgacctaccccctgttgctttgcttatcttcccacagtgaaatgtctttcttcttatatcctacatggtttccaggccctttactccaggaaagccaggagaaacgccttattccaagttcaagtaaacataataatttacaaagatacaactctgcccacaacaaaaaactccttttacagcgttatgcaaaggcatttagactgg

SEQ ID NO: 737568 - DNA, 555 bp, Homo sapiens
tgaatccttttgctttgtattccaatgacagcagctttgaccagcgaccagctctcttctgaaaactaccattttgacccctgcatttcacctgttgtcccaccaagcctgtctgtttttccattaacagagacctctgaattgttgtgccaaatgtggacagtgttgtttcttcctcactttcctgaattataaccagttccaggcggtaacatgcaaccgaactttactgagtcctggacataatgggaaaaaatcatagtgtagaaagaaaactataggactgaatataaaaaaataatcatttctggcattacaggacaaacccagtcctttctgcttagttactgacctaccccctgttgctttgcttatcttcccacagtgaaatgtctttyttcttatatcctacatggtttccaggccctttactccaggaaagccaggagaaacgccttattccaagttcaagtaaacataataatttacaaagatacaactctgcccacaacaaaaaactccttttacagcgttatgcaaaggcatttagactgg

SEQ ID NO: 737569 - DNA, 555 bp, Homo sapiens
tgaatccttttgctttgtattccaatgacagcagctttgaccagcgaccagctctcttctgaaaactaccattttgacccctgcatttcacctgttgtcccaccaagcctgtctgtttttccattaacagagacctctgaattgttgtgccaaatgtggacagtgttgtttcttcctcactttcctgaattataaccagttccaggcggtaacatgcaaccgaactttactgagtcctggacataatgggaaaaaatcatagtgtagaaagaaaactataggactgaatataaaaaaataatcatttctggcattacaggacaaacccagtcctttctgcttagttactgacctaccccctgttgctttgcttatcttcccacagtgaaatgtctttcttyttatatcctacatggtttccaggccctttactccaggaaagccaggagaaacgccttattccaagttcaagtaaacataataatttacaaagatacaactctgcccacaacaaaaaactccttttacagcgttatgcaaaggcatttagactgg

SEQ ID NO: 737570 - DNA, 555 bp, Homo sapiens
gtgacttgagtgctgttaaaggcactcagttttataagagaagcagagcagaaaagtttaaaaaattttgtagcctgacaatgtgatagaaaagaaaaacctattttctgaggagaaattgaagctggctgcagaaatttgcataagtaacgagaggcygaatgttaagccttcaagacgatgaggaaaatgtctccagagtatctcagaggtcttcacagcagcccctcccatcacaggcctggaagcctaggagaaaatggttttgtgggccaggcccagggtccccgtgctgtgtgcagtctagtgaccaggtgccctgcatcccagccactccagctgtgactaaaaggggccaaagtacagctcgtgctatggcttcagagggcagcagccctaagccttggcatcttccatgtggtgttcagcctgcagatgcacagaagtcaagaattgaagttcgggaacctccgcctatatttcagaagatgtatggaaatgcctggatgcccaggcagaagtttgctgcaggggcagggccctcatggaaaacct

SEQ ID NO: 737571 - DNA, 542 bp, Homo sapiens
atgcattatgtatggagtagaggcaggaatatatcataggcccagcactataggtggaggagtggcaagaatacttgtaacggccatactctgaaacagggtacagcacctacgaaagactgaggcttcaccagaacatctgagatgttctccttccttycctgccttgtatcatcaggctaatcagcatcaagtgaaaatactaatgggaagtagctgggagggctacaaaagacagattctctctctagagcaacagtaaaagaacatccaaagagaaggaggagatgacaacaagaaaatagcagctaataaaccagtcgacaccttaaacacacattaccactagaagaatgtagactgtggtgtgctaagagaaaccatagcaacagcaaatattaaagtcagcccaactcctgtctagattaataaaactcccacactcatccatggcagggaaaaaaagacgtgtgctcatctttaagcatcaaaaacatatttacctcagtatctactgttttgagcaagaagcccagatttca

SEQ ID NO: 737572 - DNA, 592 bp, Homo sapiens
ctgctctatcttatgtgggatgtttgacctgtagaggcccacctgttagtcatttaggagctgtttcactgatcagatctgctgtttcagtattacagtgcttcttgtgttcaagtcacctttattttacttcataatggccccaaagctcaagagcagtaacgctgatatattcctataattgctctattttattattagttattgttgttaatctcttactgtgcctgatttataagttaaactttatcataggtatgtatgtataygaaaaggcagtatatactgcatagggtactatttggtactatccatggtttcaggcatttactgggggtcttgaaatgcatccctcaaggatatggggggactactgcaacagggattgaaaacacagattgataaattgattgattgacagttcatggatttatcaaaccatcttggaggctcaaaatacttttgtaaaaaaggcctcagcaaatacttttcatttagtataatgtgattcgtttttaaaaaaatcagcgtattgaccttttagaattacataattttaactcatatttttttttttttttttttggagatg

SEQ ID NO: 737573 - DNA, 588 bp, Homo sapiens
agtttacatttaaattaattagatgtaaataaaagtaaaaatttagttcctcagtctcaccaactacatttcaaatgctcagtaaccacatgtggccaatggctaccttttaggcagtgcagttttagcacattttcactgcctcagaaagctctcttagatgtgtagtactgactcgtgtctgacttaaataactcaataatccctgtggctttcgatatcctcatcactgagctgcagtctgtcaggaatattttacccactggttctcattctaaccgatggaattatacagaataaatctaattgttcctttccataccagcacttggtaagttattatgggcccrtgagtccttgtctttacagctaagtttctacatttcttccatttattactcacgtgaggtggtatggtgggaacccctcaccattttagctattcgtgccagaaggtgaatatgaagaaattaaggatttatcttagagaagagaaagtgctattgaaacatcttgtagaatgttggcagttaaaagggcatattactactcaatcaatataaagaacttttgaacaagcagagccat

SEQ ID NO: 737574 - DNA, 607 bp, Homo sapiens
tctaactttgaagaacaaatgattgaatggaaaaatggttgagatagtgaccacaagaggagtttgggtttttttttaagatctggagttattaaggtacataaattcgttaaaaagtacatttaacagcaaaaacattttacagtaaaacctgatgcccaacagtagttgttggctctatgttaaaatacctttaaattaactattaatttttgttaacttaaaacaataatcagttactagctcacgaatctgcagattgggcagggctcagcaggggtggcttatctctgttcctygtgacattctctgaagatgaaaggtccaagactgcttcttcactcacatgcctattgcttcagctgggatactggaacacttggggggctgttggcatctcttcctcctagcacgaagactgggttgcaaagagtattgtttcgagaggcaagtctcaacatgcaggctcttctcaagcctccacttcattgtgtttgctaatgccttattgtccaaagctagttgcatgcccaaacccagaattgatgtgatagggaactacacaagaatgtaaatactgggaggtatggttcatgggggccatcaa

SEQ ID NO: 737575 - DNA, 585 bp, Homo sapiens
aagaatgttgtccttagtaaaaactataatgtgttcttatttttgaagctcttaaatcaactttatgaaaaacatgcaaattaaagataaataattcagcctctagaactcttcatatgtataattatggcacaaatatcattgttactgtctttttccaatgttaggttgagagtttgttccagaaatatcacagtaggcgtagctcaaggatcaaagctccatctcgtaacaccatccagaagtttgtttcacgcatgtcaaattctcatacattgtcatcatctagtacttctacrtctagttcagaaaacaggttagtactttttaaggatttcaaacattaatccagtgttacttttaattttaggggtaattttttatatctacttgttaagttgctctaaaatgatttaattattgaatcttggctttcaagttaaaatcaagggtgaagatactaaaagttcgctgggcatggtggctcgtgcctgtaatcccagcaccttgggagactaaggcagaaggattgcttgagcccaggagttcaagaccagcctgggcaacatagggataccccaactc

SEQ ID NO: 737576 - DNA, 637 bp, Homo sapiens
taatgttcccttatagcatttcagatatcattctaacatgactaatttgctcagagatgccacagcctgcttatggaatggctgatagtatattcacatatcttttcacataaacagttgacacagaaagtggactcactgtattttttaggaagtctcactctcatttctccttgactttcctttcttatcaagccattcagaggtttgtggcctcaaaataatttctcttcagcagtgagagtagctgttgctgaaggaagaaacattgttactaaaacaactagaaacatattctaacaccaccaaatgctggtaaggatgggaagcaacaggaactcttattcattgcctgtaggaatgcaaagtggtayggccacgttggaagatagcttggaagtttcttataataccaaccatactcttaccgtataattaaataatcctgttccttggcatttacccaaatgcgttgaaaacttatgtccacacaaaagtgtttatagcagctttcatcataattgctaaaacttggaaggaacctgtatgtcctttgaggtgaaaggataaacaaagtgtggcacctccagaactggactattattcagcactaaaaaaattgagctaacaagccgca

SEQ ID NO: 737577 - DNA, 614 bp, Homo sapiens
aggcataagtaggatacaatggactttgcagactcaggggaaagggtgagaagtgggtgagacataaaagactacaattgagttcagtgtatacagctcagtgatgggtgcacccaatctcacaatcaacgtaaggaacttattcatataaccaataccacctgttccccaaaacctatggaaataaaatttttttaaaaaaacaattattgcaatatacaagtcacatatacacacacatagtaagtatatatatatatatatatacctgtgtatatatatytacacacatatatatacgtatatatatatacctgtatatatatatctacacatatatatacagtgtatatatatacatataatagtgaattaataaactactagttcgatctgccctggctcatttgtcaaggagcttacaatctctcttattaagaaaacacatattcattaaagcaggtgctcttataaaaagaggtacagccaaataagaccacaaggtaaaagaaatacaagctttaataacaatctaattatgcccaaatgatgcttaccagatacaagctttacttaaatctttttccccccttttcacttaaccgttgtggaca

SEQ ID NO: 737578 - DNA, 523 bp, Homo sapiens
aaatctaatgaaaataaaattagcaacagattctgttgtttaattatctgtatcagctagcatatacaaatgttaaaacttttcaactgaattgctgcatttataaaaatgtatgcacaacatcatattttaaaargaaactatcatccaacacataacttggcaattttttgttagttaactgttctactcaaattcgatatattgatttaaatatttaaatactttatttaaatctgcattcaaagtatgacattaggaaggtgttgaaataaaaatacaaaacaaaatttataaattataatatttaatgccatatgtttaaaaatgttgaaagaatgtaatgtctaaatttaaagtctaagctaacaaatctaggagaccctacaaatgggaaatattgattaacaattaggtaacattttgagtacttaaaaaaataatttaataataaaatctaatttataaacgcaatttaaatctttgaaaattaagtaaaaaagttatacaatatgaagagatg

SEQ ID NO: 737579 - DNA, 637 bp, Homo sapiens
attcctgttgctttttattaatacattcaagtcaccaaagagaagtgatctttcatcttacatgaaggaaagcaatttacatatttgaattcacatgatgctgtggactctgcccagaagagtaaaactgcccacccactcaactcctcccaccgcaaaccccacatgccagctctattgagctttctctgcttagctgaacagccgtctcctactctttcctccctaggccattgtgggtgctgcttcactcagcctgcaccctctttstacctggtttgatggctgtttgtctctcagacctcagcccctttgagaactagtaccaaagcacaaagtatgcttcctcaaaatgcatgtcatcacgagtccattcctgttggaatgtaagtctgaagatgaggctctggcattctcctcttgcccaggtcttgccacttactacctctgtttctttatcttttaggagttgtctgcacatgcagattaaacttattttgagcctccattctgggttcccattgacataaaacatgatgcttagaatatacacaaatccaaaccacttagatcggtatcagcaaccaggttcaatccactttccaatagttgtacataacaccattttactgctcta

SEQ ID NO: 737580 - DNA, 533 bp, Homo sapiens
ataaacagacttgaaagaaatgaggaagcaagcgttgtgtacatctggaggaagccgtttccaagcagagggggaacaaaagtaaaggcctgaagtaggagtggcatattcttggaacagcgagaaggccagggtgaccagagcagagtgagcgaggagacagtggaaggagatgttgtcttgaggcccagttgtgtggggctttgtaggacattgccggggcttcagctttttctcaaagtgaggtggaaaggcattaaaaactgtggaacccaggagtkacatgatctgatttccatttaaaagaatcaatttgcctgtgtattgagaaacaactgtagctatctattattggctactacaagactccagggataatggtggcttggaccagtggtggtagcagtggaggtggtgagaagtagtaagattcttggaggtagagctgacaggatttattgatggattggaagtatgaggaaaagagaaccaagaatgactttcaaggttttaggttggagcaatgatatggt

SEQ ID NO: 737581 - DNA, 550 bp, Homo sapiens
acttggttgggctaaaggatgcccagatagctagtaaaacattatttctggttgtgtctgttagagtatttttggaagagattaatactttaattggtagactgagtaaagaagatcatcctcactaatatggccagtcatcacctaatcaatccattgagggctgaayagaacaaaaaggctgaggaagggagaagtcagtctcttctgcttgagctgggacatccatctttgccctcagacatcagccctcctggttctctagcctttgaatttggacggggatttacattagtgccacaccctcccttgcttctcagacctttgggtttggactggaactactgccccaactttcctggctctctagcttgcatacagcagattgtgggacttttcagcctccataattacgagagccaagttccataataaatctctttccatatatcctatgagttctatttctctgcagattcctgactaatacaatcccaaaccttgaattgagacattagcattagcttgttgccatgccaaatctttagtg

SEQ ID NO: 737582 - DNA, 559 bp, Homo sapiens
gttcatttcaaaggaactttgtgttaatcatatcaatatctaatgaataacttccaggattaatacaatttatgtttatttgtcaggatgaagatctgtgcttagatacaaactgctctgactcataagctgagcgtagctcttaactaagacacaagaacatctgagcttcatatgatgaacagttggggattcttaactgcttttatctcaaaattcttgaatgttttactgaaacaaacttaagccaaaagaaaaaagataataaataacccccatcattgagacaggttgttcttccaaggtcatagcttccgttgtactataaacccttaccaatctattcaggttagggccatgatttatatcacagttggcaaaattgatatgcaaacaatacatatatattaaatttgtggcaygcaaatattaaaactatttggggtcaaaacttcccctggcaaaactaaaggtgatgaaatattaattgcgtgttaagcaccttttattgcatattaaattggaagttctctggtaatggctgaatagaaaaccccac

SEQ ID NO: 737583 - DNA, 588 bp, Homo sapiens
cccaggcaaggaggcctttttgggaaagggctgttatcaattttgtttcagagtcaaaccatgaacggagttccttcccaaagtttgttcagcctatgcccaggaatgaacaaggacagcttaaaggttataagcaaaatggagttggttaggtctgatttctttcactgttagaatttccttagttataattttgcaaaggcagtttcatggctaaataaactgaatgctttttacaaacggcagtggttttcctgtccagcccgctgttcctggactgccctgtctgtaactctctaataaactctatgtctctgtctcctttgcacgttttaggtctcttcttcagtttcttggacacagtgttggagtcaacagggatgtgkcacaacagggacttcacccaatgcagattcctttcgagaaactgggcctccagcttgttctaccagtcatgtgctggtcctcccaggggcctgctctgtgcccccaacccagctctagcctcaaactccacttgggcctaactgtctagagtgctaggatacccttcaatcctcagcaactgggtcaacagggaggagaagg

SEQ ID NO: 737584 - DNA, 627 bp, Homo sapiens
cctttagtgatttaaatgccataggcaagcttgaaggtattgctaactaccttctcaaggaggagattaattcctagcctgaagtatctagttttccttggcaatgctaaatatagttgtgttccctttcccagacacattgggcatttcagataaatggcatgttgccarttcatcctaagtagcctggtagctggcagaatacatgctcagccagtgtccgcctgctgggacaccagccgggagtgctgatgaagtgtcagatgtatacttcatatacattaatctgaagaggggaaaactcattttcccatttgcttcttccatctttctgtccctccccacacacatgggtagtttatcacagaagtcatagtcgtcaaaagccaggggatttatacagatgctgctttctggcaagaaagatggaaatttcaggaggcaaaagcaggaccagtggcaacttatttctttgtaggaaaataagggtgtaagccttgatgatggaagtttaaaatggctacgtggccatcatcagaaatattcactccatttgtacttgggagtaatagatagatggcagaagcaccatgaacattagtttctggtatttttctccaattttct

SEQ ID NO: 737585 - DNA, 601 bp, Homo sapiens
acaccaataacagacagacagccaaatcatgagtgaagtcccattcacaattgctacaaagacaataaaatacctaggaatccaacttacaagggatgtgaaggacctcttcaaggagaactacaaaccactactcaacgaaataaagaagaatacaaacaaatggaagaacattccatgctcatgggtaggaagaatcaatatcgtgaaaatggccatactgcccaaggtaatttatagattcaatgccatccccatcaagctaccaatgactttcttcacagaattggaaaaaactactttaaagttcatatggaaccaaaaaagagcccacatttccaagtcaatcctaagccagaagaacaaagctggaggcatcacgctacctgacttcaaactatactacaargctacagtaaccaaaacagcatggtactgataccaaaaccagagatatagaccaatggaacagaacagagcccccagaaataatgccacatatctacaacaatctgatctttgacaaacctgagaaaaacaagcaatggggaaaggattccctatttaataaatggtgctgggaaaactggctggctatatg

SEQ ID NO: 737586 - DNA, 605 bp, Homo sapiens
ttcttgttttactttatggcaagagtctttaaaactaataaattctctagctgaattaaacagctgattgtttttaatggaaatatctaggtaatgaacttctatttccttttcttagcttttgattactatagaattgatacattatcaaatggtagattttgaaaagctattaattcaacatacattttaatagaagtattagctatatatacaaactttattatgcatcaaataatacaatgctttaataagctacttttaccccaggaactggactataaatagacctaaagctgcaagagaaaataaactgtctgtagtgacttcttcacttgcataacttgtactacatggcctctgaaaaacaacaggtccctcccccttgtcccaccctgcgaagatgcaggaatagggtggtccaggaaatccttccctccctggatccttcagagcaytgttttaacatattcctctactatttgtgtatttttaaaattatacttccaggctatgaacttctaagggccaagagtgtgttttactcagttttgtatactctacagctaccatcataatacttgccacaaaaaaaggtcctcaga

SEQ ID NO: 737587 - DNA, 640 bp, Homo sapiens
gctgcaatacaaataatatttacttcagacaataatcccacccaggtgctgtcttcattgaaattatttcaaaatacgtaagttatgaaactttaaattattgtgttttataagtttctgtcttgtttcatggaacaaaaatataactgtatccacacaatttcaagtagctggacaaatttttttttaacggtaaatctttctaatattttgcaactcatctattgttcaatcctatcaggatttcactctgtctctttatgagaggataaagtgatgtagtctctatgtcactgcacactcagatcaggscagctcagagagtatcctgaaatgagtacatttgcccgtcaagttacttgaactttagtgaaaggagaggaagagcaatcagtgcccaaaggcagttactctatttctgatcctgtttctcatggctacaaaaactgggtttgcatttgcctggcactttacagtttatagaatattaacaaatgctggggaatcttggtgttggaatttaacagtgagtgtggatgattagaacagcatcctggaaattggtaacatgccccaatttacagttttcccttggattttccaacagccttgtgcttctttattttcatgtctggacaaa

SEQ ID NO: 737588 - DNA, 598 bp, Homo sapiens
aactgatgcatctaaaattggagacagggaggcagactcagagaatcacaacttaacaagagcagaaacctccctgtttgtcaggctaggaaaccctaaaatgtaattttgatgaattgcagatggctcattgtagtcaaatctaagagattaaaaatttcaggggacycaatcccataggagagcccctatagttttgtaagttttacctgtgagagctctactaagatctcacagttaagatatgagaaaaattccctcatgttgttggctggaggagaagaaaagtaaccattttgaaataatccacagcttctgttcttaacaaagcctgacttgaaagaagctattttatctgagcctaaactactggggttttagccgaggataagctgccttaggggaggaaaatatcctatttcagctccccctagccttcccaactctagcccattctagccatcccatctcaccaaaggggagagggactaagaagcatgtgggtaactcacagtccaaagacacaggcttactgaaagactgagacctaatcataggactatagaatacttctccttctgcaacaccttaggcgttt

SEQ ID NO: 737589 - DNA, 430 bp, Homo sapiens
ggctgtgctccggcgcgcctggacttaccggatccaggaggtgagcgggagctgcatctgcctgctgcgatgtgagtgcggcccgtggggtctgggcgtgtggggtgcacacacagccttgctgccagcctacaccctaacctgggcacccccctctgctcaccacagattctacctccccaagagacacaggaaggtgtgtgggaaccccaaaagcagggaggtgcagagagccatgaagctcctggatgctcgaaataaggtttttgcaaagctccaccacaacaygcagaccttccaaggtgggcaagacctctgctgggcatctagggggcctgccctccctgcctgcaagcccatgtgtggttcagaccccgagggagggaattggagaccagaatactgacacctgcctgaaccccaaacaaag

SEQ ID NO: 737590 - DNA, 611 bp, Homo sapiens
aggggccaccttgagagaagctgtgactttcattggggctggaggtttctgctaatctcaggttacttctcatagtgggggctggagaataaatatccctactacccctttatcactctgccctatcattctcttctatatcctgctggggctctcagctcaaagaaatgggagacaaaaggcaaggtggctgtgtgatgttttctatgctggtctacatcccagagcaaacatgttaccataacatgtctttttgctttgtaatgtggactggcataggaaatgaccatattgctgaaatcgatttacaggttaaatgctatttctatcaaactatcagtgaccttcttcacagaattcgacttcatgatgaattagatttcatgataaaaactgcattgctttcgaaacccaaaatcgacaaatggaatgtaattaaactaaccaagtgttgcgcagcmaaagaaactatcaaccagagtaaatagagaatctacagaatggagataattttggcaaactatgcatctgacaaatgtctaatatccagaatccagaagtaggtgaaacaaatttacaagaaaaaaacaaacaccattaaaaagtgggca

SEQ ID NO: 737591 - DNA, 617 bp, Homo sapiens
ataatgaaataatgctgaaaacatctcaaattgtgggtgagaaattagacatccaggtacaggaagctcagggattcccaaatagattcaacccagaagggtcctcttcaaggtgtattatattcaaactggcaaaaatcaaagacaaagataattctaaaaataacaaaagaagagcgtcaagtcacatatggaggaattcccattagaaagatttctcagcagaaaccttacaggtcaggagacaattggatgatatatttaagaatgctyaaaggcaggggtctgggggtgggagggacacagctgtctgtcaagaatactatatccagcaaagctattcttcagaaataaaggtgaaataaagtatttcccaggcaagcaaaaattgagggagtgcatcatcactagaccggccctacaaaaaatgcttaaaggagttctacatctggaagcaaaaggacaataattaccaccctgaacacaagtgaaagcataaaactcaatggcagagaagatacttaagaaaaagaaaggaatcaaatgttatcactacaggaaactgccaaactactaagatgaacgagagaggaagaaatgaacaaaggatatataaa

SEQ ID NO: 737592 - DNA, 617 bp, Homo sapiens
ataatgaaataatgctgaaaacatctcaaattgtgggtgagaaattagacatccaggtacaggaagctcagggattcccaaatagattcaacccagaagggtcctcttcaaggtgtattatattcaaactggcaaaaatcaaagacaaagataattctaaaaataacaaaagaagagcgtcaagtcacatatggaggaattcccattagaaagatttctcagcagaaaccttacaggtcaggagacaattggatgatatatttaagaatgctcaaaggcaggggtctgggggtgggagggacacagctgtctgtcaagaatactatatccagcaaagctattcttcagaaataaaggtgaaataaagtatttcccaggcaagcaaaaattgagggagtgcatcatcactagaccrgccctacaaaaaatgcttaaaggagttctacatctggaagcaaaaggacaataattaccaccctgaacacaagtgaaagcataaaactcaatggcagagaagatacttaagaaaaagaaaggaatcaaatgttatcactacaggaaactgccaaactactaagatgaacgagagaggaagaaatgaacaaaggatatataaa

SEQ ID NO: 737593 - DNA, 628 bp, Homo sapiens
aaaaagttgctgcacagcacacgaaacaatcatcagattgtagagacaacctataaaacaggaggaattatttgcagactgttcatccaacaaaggtctaatttccagaatatataaagaactttaacaactcaacagcaaaatgtccaaataatctaattataaaataagcaaagaatctayatagccatttttcaaaataagatatacagatgaccaccatgtgtccccatgttattgtagcgcttcccacaatagctaagagatggaatcaagctaaatattcgtcaacagatgaataaagaaaatgcgaaatgtatatacaacaggatactattcagccataaaaaaaaaagaatcctgtcattcatagtaacatgggtgagcctagaggacatcctgttaaatgaaacaagtcaggcacagaagataaatattgcatgttcttactggtatgtgggagctaaaaagaaaaaatatcagctcatagaatttgagaatagaattacggttattaaaggctggggaagatatgggaaggggaggatatggagagatttgttaatggatagaaaactacagttaggagaaataaattctggtgttctatatagcactgtagattgaa

SEQ ID NO: 737594 - DNA, 553 bp, Homo sapiens
atgagtgagttctaatttggggttataagagaaatgagacttttctaatgcctaaaattgccatatagctatgaaattttagattgttgtcaagggagtggggaaggtagatcctacaaaatataccggaagatagcaatgggataaaaataaggccctttatagattgaatcctatcagccccacctcttccagttactttactatctttgtattcttgctttacttatacagagaaaataaacataattttagtacaattctcccttccaaacctatgaaaaaacttattccttacctcgtgaaatttattaactagggtttgggttgaggattggcaacaatgkctataattgaagtcactcgtggaatatttaaaattaacaatgctcaagctccatccaggacaaatgaaattaacttgttaaaagtttcccaggtgattctaaagttaagttaggattgcaaactgctgaatataaactatcgcattgaagaagatgcagtgcaggaggcagacatgactcactttctgttgtcagtgatttaatga

SEQ ID NO: 737595 - DNA, 611 bp, Homo sapiens
aacacttattaatcttctagatattaccttttgttggaactcaaagttatgaatggccctcaccatactgatgctttcttactgagtgcctctctaccacaaatacaagagaccctaatttgttaaccaggaatatcattgcccttactcaccctgaagaagttacagaagatggatctttgtccctctagaactcaggattaagggttttcttataaaaggcagggggaaaatatgtcagaggcwttcaaaccagagcaactccatcttgaatagaagctgggtaaaataaggctatgggcctatgggcctgcattttcaggaggttaggtatttgtagtcacaggaagagataggaggttggcacaagatacaggtaacaaagactttgctgataaaacagcatgcagtaaagaagctggccaaatcctaccaaaacaaagatggtgatgaaagtgacctttggtcatcctcactgctcattatacattaattataatgcattaacgtgcttaaagacactcctaccagcaccatgacagtttacaaatgccatggcaatgtcaggaagttgccctacatggtctaaaaatgggagaaaccctcagttc

SEQ ID NO: 737596 - DNA, 524 bp, Homo sapiens
acaattaaagatgaaatacttgaccagaagcaaccaattataatagggattgtcatccttcatgtccagaactggtttggtatgcaaatctgatcaaatcctctgtgctttcatctctcaggataaagcaaattcttccatgtggcccacragactctgtggcctggcccacctgccttttcagcatcttcctccttattcactctatcccagctatcttggcctcctgttcaccatgctccctcccaccagggggctttgcatgttctccctgcctagaatgttctcccttcttccctttacctggtttaccctcatgcttggggatcgcaactcattcaacccctcgtgaccttgatgggtcaaacccttgctatgctctcagagcaccagacatctcttcttagttgcccttgtcacagttgcaatcttatacttattgtgtgattatatgattaatatatatttctctctcgcatcaaactataagcttcacgagggcaggttgccagtattgggtgcct

SEQ ID NO: 737597 - DNA, 486 bp, Homo sapiens
caagatcaagaagccagcagggttggtgtcctctgtggcctccctccttggtttgcagaaggccaccgtcttgctgcctctttatatgattattcctccgcacacatgtaccctggtgtctctctgggtttcctaatctcttcttatgaaaatactagttggattgcattargggccaccataatggcctcattttaccttaattacctctttaaaggccctatctctaaatacagttgcattttgaagtattggggtttaaggcttcaacatataaatttgggaaaaggacacaattcacccataacatggacttcttggcacatattaaaaataaacggggctgggcatggcggttcacgtccgtaatcctagcactttgggaggctgaggcgggcagatctcttgagcccaggtgttcaaaaccagcctgggcaacatgacaaaaccccatctctacaaaaaatagccaggcctgatggtgca

SEQ ID NO: 737598 - DNA, 486 bp, Homo sapiens
caagatcaagaagccagcagggttggtgtcctctgtggcctccctccttggtttgcagaaggccaccgtcttgctgcctctttatatgattattcctccgcacacatgtaccctggtgtctctctgggtttcctaatctcttcttatgaaaatactagttggattgcattaagggccaccataatggcctcattttaccttaattacctctttaaaggccytatctctaaatacagttgcattttgaagtattggggtttaaggcttcaacatataaatttgggaaaaggacacaattcacccataacatggacttcttggcacatattaaaaataaacggggctgggcatggcggttcacgtccgtaatcctagcactttgggaggctgaggcgggcagatctcttgagcccaggtgttcaaaaccagcctgggcaacatgacaaaaccccatctctacaaaaaatagccaggcctgatggtgca

SEQ ID NO: 737599 - DNA, 646 bp, Homo sapiens
acatctcaggccactgctccagagggtgcaagctgtaagcgacaagggcttccacgtggtattaagcctgcaagtgcataaagggcaagagttgaggcttgggatcctccacctagatttcagaggtcgtatggaaatgtccggatgtccaggcagaaatctgctgcaggggtagtgtcctcatggagaacctctactagggcagggggagaggaaacatggggttgaagcgcccacatagagtccccactggagcaatgcctagcggagctatgaaaagagggccactgtcctccagatccccgaatggtagatccaccaacagcttgcaccatgctcctggaaaagccacaggcacgcagtgacagtccatgaaagcagctacaggggctgtacactgcagggccacaggggaggagctgtccaaggcccttygagcccaccccttgcatcagtgtggccggatgtgagacaggaagtcaaaggagatgattttggagctttaagatttaatgactgccctgcttggacttgcatggggcctgtagcccctttgtttcggctgatttctccctcttgtaatgggtgtatttacccaatgcctgtacccccattgtatcttggaaataactaacttgcttttgat

SEQ ID NO: 737600 - DNA, 593 bp, Homo sapiens
tccaaaaccatccccttgcccatgatatgctctcattatagatggcaaactttaccatttccattgctgcacaaggtgattgcttctgctccatcccccttcaaccgttccagagaaggaacagctaccacttctgagcagacggataaaaacactggttaagtaacaaattggcccctgacatttgaatcagtgttgaaacctaaaataagtataacatcataaatcatagaagaatagaacttggtgaaatctcaagtgatcatgaactctattcataatcattcaattaacacactcactgagaatctgctgtgtgccagataatgcgacagatgytgaagccaaaaaaaaaaaaaaaaaaaaaaaatgaaaagccatagttcctgcctttgagtaatttacatttttaaaggaaatacaggcctgcaaacaaacaatggcaataccgttaacaagtataataatgaggtacgtacaaattaaagagggggcccagtgaagagaatgatcaacagtttggggttccaaaaaagctttctagaaaaagatgcttgagctgggtcttaaagtaggaataggagtttgacaga

SEQ ID NO: 737601 - DNA, 628 bp, Homo sapiens
gcttagtggaagaaaactcttgggtcaacttatctttttaatctaagaggtctcaattgaaattggctttgaagtttgctaattacaaaactcaacaggggttttcccttatttggtgtaactcatatttctattcattaaccccagttttaaaaagattaaaaaagtctgaatagaaacaacttaaaagtttgaagaacagcctctcccctgtgatacctttacagatacttcaagtgcaaacttcccccatactatcaaattctatttaattacaaatcttctgtggttgcaggagggggasgtaaaacacatacattttgaactttccaaccacacagggctgtaggaagatgagaaatcagtaaattcttttcactctatatattggggaaatttatgtcaacctgagttacaaggaaatcaagattctgaagggcaatcctgctagctgcttttgcagggccaagccactgggttcagatgctttcattcgggtgaaaagatcattaccaggcggctccggggaagttggccctcctgtaagtgtgctcctttgttatgaatatggaacagatggagccaaatctatctgctctgtaggaacaaaaacacttacaacccagct

SEQ ID NO: 737602 - DNA, 483 bp, Homo sapiens
aaagtgctgggattacaggcgtgagccaccttgcctggcctgaggtatccttatatcccaagaaagagccaccttgcctggcctgaaggaagtatccttatatcccaagaaagctgtactcaagagtataatattgtaacaatcctaatatttggaatgtaggataagaacatgagagtggacagcttagtgaaaataaatttaaaaatttcaaataaaacaattagatttaaaaaatccatttataaatatcttagwataagaaacaaacaggttgatcacaaactgtcagaaaaatttctatattaagaagcaatgtatcgcaaatatcaaactaggaatattaattgttgaaataattcttagtttcttaaaacctagacttaagagttctaaattttctattgtgtccttcattcacaaattaaaatcccccaaattaactacaaaatcaactgaaaataattcaaaagaaatcaccgt

SEQ ID NO: 737603 - DNA, 604 bp, Homo sapiens
tcagaaaaatttctatattaagaagcaatgtatcgcaaatatcaaactaggaatattaattgttgaaataattcttagtttcttaaaacctagacttaagagttctaaattttctattgtgtccttcattcacaaattaaaatcccccaaattaactacaaaatcaactgaaaataattcaaaagaaatcaccgtgcaagaattatgaaaatctgaatacaaatcagtgagtttttactacacaataacacyattaacctgtcagaatttggagctgaaactttacagatggtctggttgtctaaaccttgttatttcccaattccaagtgcagtgattttattaattgcaccatggcttctaaaacactaatcactgaatagggtacagcgctttcatttagaggccaatcagttgcgcaataaatatttaattgacttctatgtgtccacaatgtttcagggagggaatacccaaataatgctatgagaaacaactctcactacaacgtaagctccttgagggcagtgatttttgtctgttttgttcacctttctctcctgagcctgtaaattgcatggcagagatggcgctccataaatat

SEQ ID NO: 737604 - DNA, 583 bp, Homo sapiens
gcacataaattttggggggccaggggcagaatgctatgatttgaatgtgtcctaccaaaattcatcttgaaacttaaccctcaatgcaacaatattaacaggtggagtctttaggaagtgattacgtcatgagagttctgtcctcattaatgggattaatacccttatcaaatggcttaagggagccagtttggcctttctgctccccttccaccatgtgagggcacatcccttcgtccatgtggggatgcagcaagaaggctccatttatgaagcagagggcaagccttcactagayatcaaattggctggacttcccaggctgtgtactactatgagaaatacatttttattattttgtaaattacccagtctaaggtattttgcaacagcaacagacaaaggcaggtgatattctaaagtagaaaaatcaaaacagaaatattggaagaataagaacaaagaaaaaaatggaaaccaagtggtggacattaaagcagacatgaattaaatcagtacaaaaattgtatacgggcaaaaacttagtcatgtgtcagttaaggacagggatacggtctaagaa

SEQ ID NO: 737605 - DNA, 523 bp, Homo sapiens
tctgtattaatgttctaatgaataaaaaattttcacaaacttagctgcttaaaacaacatcagtttattatctcacagttctgtagatcagaagcctgggtaagctgcactaggttttctgcacagggtcttacaaggttgaagtcaaagtgttagcagagctgtattctcatctggaagctcagtgggaagagcccgcctcaaagcacattcaggatgttggcagaatgcagttccatgtggttataggattgaggtccctgctttcttgtggactgttggcctggagttgctctcagcccctaaatgtcactctcaggtcctttcaagtggcttcctccaccttcaaagcagrcatttcttgtgctttgagttgctctgactttcccttctactaccagctggagaaaattctgtacttttcaagggctcatggaatttggttaggatcaaccaggtaatctccctttcaattaactcaaagtgagcgattaataaccttaattattaatatatctgcaaa

SEQ ID NO: 737606 - DNA, 588 bp, Homo sapiens
atgggctgcaagaaccaggaaatgtatcaacaaacaccattgcaatcagggccaaaaggaaaagatatcctcagagaaaactggtttgcttactggaagctgttccttagactcttttggcaggagtggctttccatctttatcctatccgggggggaaaacacatggcatgaaatcattttacattttatccaaagtatgaaaccttgtaaacattacaaagggtctacaggttatacttgctgttgtacattttaaattagatccatcatgtcacgaaggattctctcaccagagaataygctctaattagttcatggcaacaaacagctcacaagcaccaggcattcctgagtcacgggggctgcacactggatgaggtatggcttgtgacctcagaagcctagagactatcacagcaggaaaacgtgaaagtcagcatagtgtggtatgtggtgctgtgactggggtttgcaggacagtgtgggataagccctttacctacatgggggtgggctttgtagaggttgtctggaaaatgctggttaaccttgtaagccacacatctaactcatatgcaaggactac

SEQ ID NO: 737607 - DNA, 528 bp, Homo sapiens
ccatgttataatagggattttgagtcttctgcattgtcagtggcagagttctggcacccagtcctacatgtgacaggagctgagctgtggtggcagcaggagaaagcctcatagtgttactgtgcattagtactgctgtaaggctttagatttcttctgctgtactctcctggatttctctaccagctaccccgttccttaagaaattcctttttggcttagtcagagtgggttctaattggaactaacaactttaaccagtacatcttcttaatagcatggtcttctacagagacattcctaatgcaatttgaacctcggtttcctcacctgaacagtcaggttggtgaaataraagttgtctgacaagtcttccagaaataaaattgcatgactggttatggatcacaactattttcatataggctttagtaagagtccgtataatttccgcagcctcatcttcactactgatttaccaaaaattaaattttaagaactaaatattttacactaattattttgaat

SEQ ID NO: 737608 - DNA, 572 bp, Homo sapiens
taatagcctattattctcattcaaggtggggtaactgaagcaaagaaccattcatgtaactttgctaagttcacacaacttgttggaatgcaatccacatctgtgtgagtataaactccctgctttttcagcttcaccaagatccctcttttttttttttttttttttttttgagacggagtctcgctctgtctcccaggctggagtgcagtggtgcgatcttggctcactgcaacctctgcctcccttycttttattggggcactatagtatatgaaatagatcatcaagaagtaattgaggttcttccagaatttcctgaacaatgaaattaacaagcactgttggtaaataataaaaatgctggattaatttgaaaaaaaaaaaagtactagaatgtttctattcaggccgcacctgaaaatgtgctacttatactaattaaaaatcctcaggcaagagacaactgtgcccaattttcaagttttttgttttgttttgttttgttttgttgttttgttaattgttgaccacgtcctgagttcagagcgaatcctctgggtgtttaatag

SEQ ID NO: 737609 - DNA, 539 bp, Homo sapiens
tcaaagcaattatgtatcgtgcacaaattctcacaagtagtaagtgggaagactcggaattcaaattcattgtgttgactccaaattctatctgctttctgctactccattctgcttccatgaaaggaatattcagggcgatgagacaccgacctggaggctatactgaggtccagctccttttagctcatatacaagcaactcttggctctgtgttgcagatacaaataccttttaccattagaagataaaagctcactttaacctcacttgaatataagagctttgttgcctaaaatattaaaaggraaacagacactcttggttaaataatatttcccaaacatttctccagatggtgtcaattcactcctgttgtaattccctaacgcttctgcttaggatctgtaaaacaaaccaaacaaaaccccaacctagtagaagactggattttacacatataagtctccctttgttttttttccccttgtaataatttttaagactatttttaatatgtaatgcatgcacacattgaa

SEQ ID NO: 737610 - DNA, 588 bp, Homo sapiens
tgtaacaaatcatcataaattcaatggcttaaagcaacagaaaagtattccctcacagttctagagggcagaagtccaaaatcagtatcactgggccaaaatcaaggtgttagcagggccattctccctccagaggctccaaaggagaatccattcattgccccttcggccactggcagctgccaacaatccttggtttgtggccacatcactcccctctctgcctccatggtcacattgccttcccctctcctgcatgtgtcagatcttctgcttcctacttagaaggatcgcaatgtggtgacatgtagggcccactggataattcaggatcatttctccacctggagatycttcattacacctgcaatgacactttttcagtatgtcataacatttacaggttccagagatttgaatctggtatcttcaggggctattattcagcccactccagtaatttgttttgttttttgaaaaaacagtgaagccttccttcaaaaattaatgacaataataataacaaaactgctgtcgagatcatgttcatgttactacaactgggaaaagttaatattctgatgaatc

SEQ ID NO: 737611 - DNA, 440 bp, Homo sapiens
catcactcagatctttccaatgtggctactttttgagcagctctcctattcattcctttaatattgccctttttatttgcatgcttgttgcctgtcttccccaggtagaatgaaattttcttaaagacagaaaactttatctttttttttttttgagatggartttcgctcttgttttccaggctggagtgcaatggcacaatctcggcccactgcaacctccgcctcctggattcaagcaattctcatgcctcagccttcctagtagctgggattacaggcgtctgccaccatgcttggctaatttttgtatttttagtagagacagggcttcaccatgttggccagactggtctcagactcctgacctcaagtgatccacccaccctggcctcccaaagtgctgctgggattagagacgtgggccactgcgcccagcc

SEQ ID NO: 737612 - DNA, 440 bp, Homo sapiens
catcactcagatctttccaatgtggctactttttgagcagctctcctattcattcctttaatattgccctttttatttgcatgcttgttgcctgtcttccccaggtagaatgaaattttcttaaagacagaaaactttatctttttttttttttgagatggaatttcrctcttgttttccaggctggagtgcaatggcacaatctcggcccactgcaacctccgcctcctggattcaagcaattctcatgcctcagccttcctagtagctgggattacaggcgtctgccaccatgcttggctaatttttgtatttttagtagagacagggcttcaccatgttggccagactggtctcagactcctgacctcaagtgatccacccaccctggcctcccaaagtgctgctgggattagagacgtgggccactgcgcccagcc

SEQ ID NO: 737613 - DNA, 564 bp, Homo sapiens
ctcctgacctcaagtgatccacccaccctggcctcccaaagtgctgctgggattagagacgtgggccactgcgcccagccaggatcctcagtatctttagatattattttaataatattcttatacatcatagagtttcagtaaatagttactgacttgactcttgattaactggggactctgataaagtatcatacatggttgactggtagaaaatgaattaggttccgataaagagaaaaagagaaaagaaaacagtaatttgtttaaaacaaacctaaaacaaacagaaaccccyaatactatgtcaccatatatacagttattgtttagttctataataatttttcaataagtaaattataactaggtaaatatgaacattaaaatttaatacctctttgacttgtgcctggtataatttgttatttgaattgtaaaggatgctaattttatctacctcttttgatcaggaatagttatctaataactacagcctgttttcttaatggaaaattgatattaattgttcctctgttaggaagaagaaagcatgtaggccat

SEQ ID NO: 737614 - DNA, 618 bp, Homo sapiens
tcaaagttatcttgccaagataatatataaacatcctataaacaaccattcacgaaaaatgtacaccatgaactcagctacaagtatgttgagtatagagaagaactacgctaaatatggagacattctggcctttattttgagtagcctctagcatctggtaaagtcaaaagcattatgagttttccttcattgtacagtctcttttttgtattgaaaaaaattgcatttraatttgagaactagaatgatcattacaacttcaatggtctaatcttggtcttatgtagcataaatatacatttattttggaaacagtgccacatacatccttaatgtgtacaacttcctctagcagtaagacttaagaacaatgattattttcaactctttttacaaaatgtttatgatccatttttttaaaaaaggtaactttattttagattttgtaatgtaataagtttttgtttccaaatttcattgtaaataaatgaaaaggaactcttcaaaattttcttttttaagagatatgaataaaaatgttaaaatgttagaaactacttaagggcatatgaaaaactgtatgatgctagaaatatttgtaatatttctgccact

SEQ ID NO: 737615 - DNA, 440 bp, Homo sapiens
agggatatgtttcatataactatcataccatttacatgtaagaaaattagtattaatactgaaatctttccatttgtccccaaaacatcttttatagctatgtgtttttatccagaatccaaccacatttcttgcattgtattttgttatgccacttttgtctcttttaatctaaaaagtatccctgacttttttgattgattgtttttcaygagatagacatttttgaagagttcaggccaattgtcttatagaatgagccatattctggatttatgtggtgcttcctcatgattaaatttaagttaaattttgttatgaagcctacaaaaataattatgtgtaccacttattgcattgtgttaggaggtacatattttcagactgtcccattactggtgactctaagtttgatatcttaaggtgatgaccaccagatc

SEQ ID NO: 737616 - DNA, 610 bp, Homo sapiens
aagtattactgctgtcatggtttgctttggtccctgtgggttcccccaccctttgaaacaagtgcctgacacatggtagggttcacaataaatatttgtagaataaataagagctgagccttcaaggggtccaaaatacttgcacggagtttttctaggtgggcacgatgccacccagctgcaggactatttcagggtgttcattggctcctctggttgatcttttgatgcctgtataagaactcccacttctccaaatctgggggccacatctttagagttctcagctttctgtctctcaggaatgaaggagataatatcactgattggagccarattgtctggatgttgaatcccagctccttgctggtgcctttgagaagtgactttagccctccatgtgccttatttctgcctctgtaaacggagatcatcatagcacctctcatgtggggctgtttgacgattcggtgaggtatgtgcaaagagctttttgcacttgcaaaaagtgtctgggatatcattgtgtgctgtaagaatgagctgtaatgattatcactgagacttgttgttgggattaaaagagatcaggtctgtcagggcctggtac

SEQ ID NO: 737617 - DNA, 577 bp, Homo sapiens
actctctctaatagcctattattctcactcaaggtggggtaactgaagcaaagaaccattcatgtaactttgctaagttcacacaacttgttggaatgcaatccacatctgtgtgagtataaactccctgctttttcagcttcaccaagatccctcttttttttttttttttttgagacggagtctcgctctgtctcccaggctggagtgcagtggtgcgatcttggctcactgcaacctctgcctcccttycttttattggggcactatagtatatgaaatagatcatcaagaagtaattgaggttcttccagaatttcctgaacaatgaaattaacaagcactgttggtaaataataaaaatgctggattaatttgaaaaaaaaaaaaaaagtactagaatgtttctattcaggccgcacctgaaaatgtgctacttatactaattaaaaatcctcaggcaagagacaactgtgcccaattttcaagttttttgttttgttttgttttttcgttttgttaattgttgaccacgtcctgagttcagagcgaatcctctgggtgtttaataggaaac

SEQ ID NO: 737618 - DNA, 641 bp, Homo sapiens
agctgctaccaccatatcatcatgttttcatcctacagacaatcatcagcggtgtagactggtgagttccagctatttcactaacaatggggaagaaccaaagaaaaattgctgtgagaggaggaaggcaggagagcctgtggctccagaggggtgtgtgtgtttgtgtatgtgtgtttgtgtgtgtgtgagggagagagagaaaataaaatgttttctaccaacaaaactcaggtgtgtttcctttacttgccttgaagcttcttcaaaacttgttatacygtaagtttgaaaaaccaaacacttttcctaggattgtttttttacgtactaaggaccagatcagatcagcaattagaagtatgacatacaaaataatcaccctcaaggaaggtttaaattagggatgaatttccagtattgacatggatctttccaagcaccctgcatattcagcacagtattctagtattttgtgagtaaagtcattatttcttaggacatcatcaaaagattgagcgtgtaatagacttcaagcacctatggatttaatatttacaattttgactatctgggtgtgacctgaaggtctagcacttgggtagtttataattttgccgagacgtaggttagagttacat

SEQ ID NO: 737619 - DNA, 529 bp, Homo sapiens
attcaaaataattagtgtaaaatatttagttcttaaaatttaatttttggtaaatcagtagtgaagatgaggctgcggaaattatacggactcttactaaagcctatatgaaaatagttgtgatccataaccagtcatgcaattttatttctggaagacttgtcagacaacttytatttcaccaacctgactgttcaggtgaggaaaccgaggttcaaattgcattaggaatgtctctgtagaagaccatgctattaagaagatgtactggttaaagttgttagttccaattagaacccactctgactaagccaaaaaggaatttcttaaggaacggggtagctggtagagaaatccaggagagtacagcagaagaaatctaaagccttacagcagtactaatgcacagtaacactatgaggctttctcctgctgccaccacagctcagctcctgtcacatgtaggactgggtgccagaactctgccactgacaatgcagaagactcaaaatccctattataacatgga

SEQ ID NO: 737620 - DNA, 630 bp, Homo sapiens
tgcagacctcctgaaaaccaagccgaggactgcggggtccggtgtccacgcagagtgagtactgtcttccgccgctttgctccaggccgcgcgtgctcccgggtctagggcctgtgcccccggctacctgccctgcgtgyccggggcctggtccctgcagcggactccccaggctcgggacgtgcgcttttcctactatcgcgaccctggcgataccgtgcgttctgagtttaactgtgtttcttggcgactcctcctccttgtcggtaacactgttactgccccttccgccgggaaatgtatctggtgaccggacgcgtagggttacaaaacaagggatttgtgtggcccggtacaagtggcccgagacaagtggcccgagacaagtggcccaaaagaaggaaagcagcagctatgtcagtttggtttggcacctttatctctagggttggagatagatctcctcctccccagccgtgccgccaccctgtgatgacctccgttttagagcgtgagctcactctgacctttctgcgtacctgatacatgctgggtgtggcgtggcaagtgttgtaacctgtttcggttccatttcctttacacaacctgagacggttgtagaataacatc

SEQ ID NO: 737621 - DNA, 619 bp, Homo sapiens
cttcctcttaggactttaggtctgcctacatgttgaagaagtttgagttttaggctttgggagcatttccttaaaaaccattgtcatgggggaggaaaaaaaaagggtagtgttaattctgtcatcacacactcagagatcatttggttgggctacattttatgagctatattccataaagatgctgcaaagttcaggtatctggtttaggaaagaaaaaaaaatcccttctytaacccaagaaatgtaatgcaaacaatttgggcctgtgtcacttagtcttctaagaagacttcaaggctgttataaagacccagtggtgggagaaacctgatccggtatagcggggccagaagaagctgcgggaccatgccgcggggacaaggcaaggagtttcgccaggatgttgatctcctggttatctacacttccgcctcagtatgatctgaattattaatgagaaagattaagatacagattccttccttcaagtgccttagtagtcacagacaggaggttaattataagactaaaagcaatcttgggttgttagaagaacttaaaaggaaaacacctttcaacttcttgttatcaatcgatcatttttgtctttagaaat

SEQ ID NO: 737622 - DNA, 317 bp, Homo sapiens
acccaagaaatgtaatgcaaacaayttgggcctgtgtcacttagtcttctaagaagacttcaaggctgttataaagacccagtggtgggagaaacctgatccggtatagcggggccagaagaagctgcgggaccatgccgcggggacaaggcaaggagtttcgccaggatgttgatctcctggttatctacacttccgcctcagtatgatctgaattattaatgagaaagattaagatacagattccttccttcaagtgccttagtagtcacagacaggaggttaattataagactaaaagcaatcttgggttgtta

SEQ ID NO: 737623 - DNA, 629 bp, Homo sapiens
tagattaatatatatttaattatacatttaattaacgttagataaatttggtatctaatatatacatttaatatatatacatttaattaatgttagataaatttggtattatgagctatacagtttaaaataactgaagaaaaatgatgacaacatggtatgattgactgttcagcaaacatatctgagtttacatatccagaatagtattgttccctccaaagcagtcaatatgaggggatgtatacctatttcaatattttccataaaattaggattcattagcatatcaaaagaatacctggccaggtgctacagctcatgcctgtaatcccagcaccttgggaggccaaggcaggaggattgcttgaagccaggaactctagaccagcctgggcaacatagcaagaccatgtctctactaaaaataaaaaatataaagttaactgggcatggtggggcatgccygtagtcccaactactcaggaaggctgaggcaagcggatccctaaagcccaggagtgagctatgatcacgcccactgcattctagcctgagcgacagagaccccgtctctaaacaaacaaaacaaaacaaaaaacaaaagggatagtgcacacctgtgctta

SEQ ID NO: 737624 - DNA, 634 bp, Homo sapiens
gcaagcggatccctaaagcccaggagtgagctatgatcacgcccactgcattctagcctgagcgacagagaccccgtctctaaacaaacaaaacaaaacaaaaaacaaaagggatagtgcacacctgtgcttattacagcactattcaccatagcaaatatatggaatcaatctaagtgtctatcagtggatgaatggataaagaaaatgtggtatatatacataatgaaactctagtcggccataaaagagaaataaaatccttccattcgtggtaacatggatgcaactggaggttattatattaaatgaaacaagccaggcacagaaagacaaatactgcrtgttctcactcatgtgggagctgggaaagttgatcttatggaggtagagagtacaatgatagatactagaggccgggaagggtgtgttgggacgggtgaagggtaggaagagagggtggtgaatgggtacagacatacaattagctggaaggaatgcctaatgttcaatagcacagtagggtgactatagttaataataattcatcgtatatttcaaaatagccaaaagagaagatttgaaatgttcccaatacaaagaaataaacattcaaggtgatggatagcctaca

SEQ ID NO: 737625 - DNA, 626 bp, Homo sapiens
tggtaccaacaaaattacttcaaacaaaataggagttcatgtcactcaagatgcactaaaagttaaattgcaaaatggctgaaaaggagaggtcttggcttcagaaaagaataataactacctaaagaacaaaagttcgtgttcttggcaggaaattttawaaaaagaaaaatcatctggtgtggtcatacagtgtatcaaactgaagaagaccctttctttactgagttaaaattaagtctatagaatcctaactggagacaagccatggaaaactaaaggcacttgcaagttgaagttacagggcaatggaaatgatgagtaattaaggaggaagtcagcctacagagaagacaatagagcaggtacacacagagaagcaaagccaacaagtcatgaattccctaaaagttgcagagagttaattaggttcttatcttcccagtctccactttaagtacccaagggctataattcctgtctttgggttctcagaaagttcttcatatccttgcaattaactattctttgacttgggctagtttaaatatgatttatttttcacccctgaaaaataactgccctctaactggaacatgcaagttttccagacagagtagagtagc

SEQ ID NO: 737626 - DNA, 564 bp, Homo sapiens
cttcatatgacacatttctttaaaaaagtctaaagtatggatgaacaatgtttccccttcattgaacttttccatgtcctaagagataaaattctttttttttcgggttcatcttaacaaatcaagacattagtgactagttgaagaagtatgtttattcatttggggaacaaacattcattgagcatcaactctgtgtcaggctctattttaggaactgtgagtgaaagaagttaatgagacatgttaacttggaagtccttaagatttcccagaagagagacagatatgtcttaaacgtagtctagtacaaggactagaaacctgctcaaattagcttcagagaaaaagagaaactattattaggttggtccaaaaataattgtgggttttgccactraaagtaatagaatgatacacagatatttcatggatgtaaacccaggaagaacagtcagatctcacacaatggcaaacaaaattaaaagacctagaacaatctctctccgtgtctctctctttctctgtctgtctgtctcatgcatgcacacctcagtttcttgg

SEQ ID NO: 737627 - DNA, 574 bp, Homo sapiens
agtcagagaaggactttattactcacagcacagcaggcagcacgagtatgagcatgtgtctatcagttcccctttccccactctagtctcatagtgttacatgaaggggcccagacagacacctgcacacagtggggtgcaagacaggaaagaaacaatgagcttggtggacctgctgctttatagcaagcagtcagcaagccttctctttgacctgggggaagagattatctcacccctcaatattattcatcataaacacaatgctaagaaatggcccaggtaaatagtagtcagggccttgcattcttgatatacccattgtattaagttgaatgktagtctcccccaaatatgtctctattctaatccccaacacctatgagtattaccttatctggaaagagggtttctgtagattgccttgaggagactgatggtaaaaacatgaaggctcaagtacttctggtgagggctcagaaggaaaccaggaatatgctgttggaaactgcagaaaatgtcctcattatacagcggcagaatatttgacctaattgggtcttattgttgttca

SEQ ID NO: 737628 - DNA, 631 bp, Homo sapiens
tacttttagaaatatgaacaaagaactgaataagatgctaaaataagagataaattatgcaaatgcctataataatgaacatttcataggtcttgacattgaaaaattgtaaggtgagagttgtaggtaagagaactccaaagagaaatraatgggtaatgaaagataggacctggaaggcctagatgtaggtctgctccactcattgaacacacccaacaagctcctaacatgctccaggcactatgcggcgctgcaggagacaaggtatgggctgtgtcctctcagggagttattcgcaagaagacatgatgaattctctttctctaggtcaaatgaccaaatatgttttgattttaaacattgtaagagaataatacggaaaagtgtaataagattagagatctcaaagttcctgtcttagtttggtgcaaaagtaattgaattttaaatcattataacgaggcttaaacacatctttattaatcagaataggaaccattacaatccacacatttttgccaatgagaaatacattttttcattactgtagtatagaaatccgtgcttcaggattcaatgaactcttgaaaagcattttctgcatcctgctggttgtggaagcattttc

SEQ ID NO: 737629 - DNA, 642 bp, Homo sapiens
tgttctcacaatttcatattgtaattctgtattgtttttcttagagtcccaaattatatatgtttcatgctgctcccacaaaaccttagttccccaggtgttaattttatgacagcatatctaactgcatcctctgagcagcagagcacctgtcagtctctgctagattgaacatgtctaggacaatagcaattgtttccaattgtacgcatttccaccaccttttctcccctggtttttctttaagygactgttgtatcaaagcgaaggaaggaagtgactaagagaaggaaattatgcctaagtcattttaaaagggcatttttcaaacgacaaaactttttcccaagcaggggtttcaggctaggctaaggacagtgtggatcgaaacacagatccttaaggagttgaatttcttctttgccgtgctcctactcctctgcatacaaattgttctttgagctttcactagttttcccattgtcttctctgcattcccaagctcacttaattcatggtctgtctgcctctctgtctccttttttccttagcctccagagatgtgcatgcctactttctgttttcacagcttcatttccatctctggcacgtgagagcctctgtgctggatgcagacatatt

SEQ ID NO: 737630 - DNA, 642 bp, Homo sapiens
tgttctcacaatttcatattgtaattctgtattgtttttcttagagtcccaaattatatatgtttcatgctgctcccacaaaaccttagttccccaggtgttaattttatgacagcatatctaactgcatcctctgagcagcagagcacctgtcagtctctgctagattgaacatgtctaggacaatagcaattgtttccaattgtacgcatttccaccaccttttctcccctggtttttctttaagcgactrttgtatcaaagcgaaggaaggaagtgactaagagaaggaaattatgcctaagtcattttaaaagggcatttttcaaacgacaaaactttttcccaagcaggggtttcaggctaggctaaggacagtgtggatcgaaacacagatccttaaggagttgaatttcttctttgccgtgctcctactcctctgcatacaaattgttctttgagctttcactagttttcccattgtcttctctgcattcccaagctcacttaattcatggtctgtctgcctctctgtctccttttttccttagcctccagagatgtgcatgcctactttctgttttcacagcttcatttccatctctggcacgtgagagcctctgtgctggatgcagacatatt

SEQ ID NO: 737631 - DNA, 607 bp, Homo sapiens
agtggcgcctctcatcaggggctccttgccagtcgcgccctcccttccctagcacaccaggtgttggaaacgggagcccctccggcgagcccccgtgtcctgtcctgggcagcagggccgcgagcaagcgccctcgggggtgctaggactagcgtggggagggcggggaaggcccagaggacgcggcacatacctgggccggggccgtcagctcggccgccgccatctgactcygtgagcggagcggggccagagaggatgtccttattccgggccgggcctgggtaccctgggcgccgccgagcctcagccacgcctctgtgcagcggggaagactcctctcgcgccttctcagtcagtcacggatgatgctgacccagcgctccggggctttctaccaagtaatcagtccagacaaatgccaaaacgaccgccacaaggaggacaacggaagtcccgccgcgaccgcgcgtgcgcttacggaaacaccacctttcggaggcctcattggctgaaggtcgccgtcgcccaacgcaggccattctgggtaatgttcccacaggcgcacggcgggagagtgagggtcgcctccacctccttccggaag

SEQ ID NO: 737632 - DNA, 577 bp, Homo sapiens
cacttgaacccgggagacggaggttgcagtgagccaagatcatgccactacgctccagcctgggcgacagagcaagactctgtctcaaaaaaaagtaataatgaacatataataatgagtccaacccaggatatattcatctttagaccaaggcaatggtaaaattgaattaagaatttttttttccacggaggaaggaacgcacaaaagccacagtgtggcccytgctccagggattccgtctgagcaaacacttcctccttggccttcccatcacactccaagtggagtaaaatcctggcgggacctacacaggtcagtccctgaacacctagacatcctgatccctcagtcacaaacctagcatggacttaagacccctcatcctggccaggcatggtagcttatgcctgtgatcccaacacttaccccaaagtggacagatcgcttgagcccagaagtttgagaccagcctgggcatcatggtgaaaatacaaaaattagctgggcgtggtggtgcatgcttgtagtcccagctactcgggaggctgaaggatcgcttgagcccaggaggttg

SEQ ID NO: 737633 - DNA, 598 bp, Homo sapiens
cctaaaactcagatatagactcgcaaaaatacatccagctaattttttacaaaagtgcaaaagcaacttaatgaaacaaaaacagcctttcaacaaatggtgctggaacaatcagacatccataggcaaacaacaaagcaagaaaggaaggaagagagaaaaggagggaggaggggagggaggagaacctctaagtctcatacctcatacaaaaattaactcaaaatggattatggacttaaatgtaaaatataaatatgaggtggtggtaccatgagagaaatgggtatagctataaaaggataacatgagggattcttgtgatggaaaagtgtgtcatcttgaccacatcagtgttaaaatcctggctgtgatactgtgcagtaattttgcaagatgttgccatcagaggaaactgggtagagggtacatactaatacctctctgaattagttcttacaartgttatgaatctacaactattccaaaataaaaagtttaacataaaaatactaagaaatatctctctcaaaagtttaacccatatttgagtttaaaacaagaaaggaaatctcaattcacccaaagagaaagggaa

SEQ ID NO: 737634 - DNA, 641 bp, Homo sapiens
taaagggagcacgaacgaaaagcaatcacattttaaaacatgaattctgaataaaatgttatactcttccaagtcaaatgagctataacctattgaaaaactctgaaaagagttgaaaatatcttatttgttatacttagaaaacaactataataaaatttaggttgtcatgaaacagaaaccaacaagtgtgattctaaatcaatcttacattattaaaaagttactctaaatttttgtgtgagttgatatatcaaaataattgtggtaatttttcagaaatatggaaacaataggatataataaaggggcaataaatgtataattgcatctctactataattgcaattgtgagatatattaatatatatgcatatgaacaaagcctttgaaataatgggtaagagtacatatttttatgatgatgagatttggggtgtggtttttccttttaaaatttgtagttcctccgggaggccgagtttacrgtgagccgagatcgtgccactgcactccagcctgggcaacagagtaagactccgtctcaaaataaaaaataaaaaataataaaaaaaaattgtagttcctgtgttgcttttcccaattaaaaataaataggtaagaaggattgaatgggagag

SEQ ID NO: 737635 - DNA, 630 bp, Homo sapiens
cccagtgggaggtaattgaattatggtggcagatttttcccgtgctgtttccatgatagtgaataagtctcataagatctgatggttttataaagggcagttcccctgcatatgttctcttgcctgcctccatgtaagatgtgcctttgctcctcctttgcttctaccatgattgtgaggcctccccagctatgtggaactatgagtccattaaatctctttttctttataaattaccagccttgggtatttcttcatattagtataaaaatggactaatacactgcctttgctgtatcccagaggttttgatagggtatgtcactattattgttcagttcaaagawccttttaatattcatcttgatttcattgttgacccaatgatcattcaagagcaagttatttaatttccatctatttttatcatcgtgagggttctgtttggagtcaattttcaattttattccactgtcatctgagagagtatttgatataatttcaattttcctaaatttattgagacttgttttgtgaccttttatatggtctatcttggagaatgttctatgtgctgatgaatagactgtctattctgcagttattgggtggaatgttctgtaactatct

SEQ ID NO: 737636 - DNA, 619 bp, Homo sapiens
tatgttaagaatataaagttcataactttttaaaactcccaaaaggaagtctctaggcccagatagtttcaatacaaattctaccaaacatgtaaagataactaacataaattcgatgcaatctcttccagaaaacagaagataaggaaacactacccaattcattttataaagctaatattaccctgataccaaaatcagacacaaacagtactgaaaagaaaggaaaactacaaaagaatatctttcataartatagatgcaaaaatccttttaaaaatattagcaaatagtatttagtgatatataaaaagaattgtacaccatgaccaagtggaattaattccagagatgcaagcctgtttcaatatttgaaaaatgagccaatgccaccttaggtaactagaaaaaaaaagagcacattagattcaatgagaaaaaaaactagtaaaaattagagcagaactcaatgcagttaaagacagaaaaaatagtaacaccaaaagctgattattttaaaagatcaataaaatcagtaagccttgagctaggctaactaagaaaaaaagagaaagaacacaaattaccaatatcagaaatgaaagatgggatatcacta

SEQ ID NO: 737637 - DNA, 526 bp, Homo sapiens
tttgcagatatattaataattaaggttattaatcgctcactttgagttaattgaaagggagattacctggttgatcctaaccaaattccatgagcccttgaaaagtacagaattttctccagctggtagtagaagggaaagtcagagcaactcaaagcacaagaaatgyctgctttgaaggtggaggaagccacttgaaaggacctgagagtgacatttaggggctgagagcaactccaggccaacagtccacaagaaagcagggacctcaatcctataaccacatggaactgcattctgccaacatcctgaatgtgctttgaggcgggctcttcccactgagcttccagatgagaatacagctctgctaacactttgacttcaaccttgtaagaccctgtgcagaaaacctagtgcagcttacccaggcttctgatctacagaactgtgagataataaactgatgttgttttaagcagctaagtttgtgaaaattttttattcattagaacattaatacagagag

SEQ ID NO: 737638 - DNA, 593 bp, Homo sapiens
cactgctgaacattctcccaccagccaccaacactgtaatgcatgaattccaattattttttattttttctgtccattaatcatgtgcaggggcatctggatatataatcccactatgattttcacagtgaaggaggcataattctttaaaaagaaattgaatgacattataagtagaatggagactaaatgcasaaatcagaatacaaagccactatgtgaaacagcaaatgtccactgaaaatagattttttaaaagttagaaaataaaaagtagatatattagtaaataaaggagataaaaatggacttagataactttaaatgtagcccatagaaataaagtatgataaaggactaagaaagcatattttttaaaaatttatttttaataacaaaaattatgtatatttgtagtgtacaacatgatggtctgatatatgtatagattgtggaatgactaagtcaaactaattaacatacctgttacatcccatacttatccattttcgtggtgaaaacattttaaatatatagttagcaattttcaaagggcctaatttaaaatgtatttagattcttaaattccctta

SEQ ID NO: 737639 - DNA, 623 bp, Homo sapiens
actctactctgtctggaaaacttgcatgttccagttagagggcagttatttttcaggggtgaaaaataaatcatatttaaactagcccaagtcaaagaatagttaattgcaaggatatgaagaactttctgagaacccaaagacaggaattatagcccttgggtacttaaagtggagactgggaagataagaacctaattaactctctgcaacttttagggaattcatgacttgttggctttgcttctctgtgtgtacctgctctattgtcttctctgtaggctgacttcctccttaattactcatcatttccattgccctgtaacttcaacttgcaagtgcctttagttttccatggcttgtctccagttaggattctatagacttaattttaactcagtaaagaaagggtcttcttcagtttgatacactgtatgaccacaccagatgatttttctttttwtaaaatttcctgccaagaacacgaacttttgttctttaggtagttattattcttttctgaagccaagacctctccttttcagccattttgcaatttaacttttagtgcatcttgagtgacatgaactcctattttgtttgaagtaattttgttggtacca

SEQ ID NO: 737640 - DNA, 642 bp, Homo sapiens
cacttgggaaattttcaaaatccatgttaaatacagtaattacagcatacgattagaacaaataattgttatctcataatctactatatttcatctatgttaacttaaatctaatagtagaaaccacaattggagttatttttcagtagctgaacaataaataaaatttttccctgataggaaaatatcaaaataacatttattgccaatggaaagttctctctgttaaacatttaagaaaacactgtatctatgatttctttaagaattgtatttttagccctttcattgcaattctaaatgaaatttgatgttgctgacttatataatagattgtgaccataaatattagcataaagtaaatatgcttcttatttatggaattacataagaaaggcattcattggaagggtgagcattttctaactcataagcttccatttttgacttttaccactctctygtctttaggaagaaataaagtcaaaagggatgttcctgaggccttacctgtatataaatgatgtgctcggggcaactctgtgcttgatttactaccatattcttctgcaggcacctttcattgttttctttaaataaccccctggaggttactctggatgaaaatccatctgcatcaag

SEQ ID NO: 737641 - DNA, 571 bp, Homo sapiens
acaacaataagacccaattaggtcaaatattctgccgctgtataatgaggacattttctgcagtttccaacagcatattcctggtttccttctgagccctcaccagaagtagcttgagccttcatgtttttaccatcagtctcctcaaggcaatctacagaaaccctctttccagataaggtaatactcataggtgttggggattagaatagagacatatttgggggagactamcattcaacttaatacaatgggtatatcaagaatgcaaggccctgactactatttacctgggccatttcttagcattgcgtttatgatgaataatattgaggggtgagataatctcttcccccaggtcaaagagaaggcttgctgactgcttgctataaagcagcaggtccaccaagctcattgtttctttcctgtcttgcaccccactgtgtgcaggtgtctgtctgggccccttcatgtaacactatgagactagagtggggaaaggggaactgatagacacatgctcatactcgtgctgcctgctgtgctgtgagtaataaagtccttctctgac

SEQ ID NO: 737642 - DNA, 658 bp, Homo sapiens
aggagccaggcagaaaaggcctcacggtgtgggattccgtttgtacaaatgtcccggagagggaaatccttagaggcagtaagtagattcatgttgcaggggctgcgggagaggacggacgccgagtgattgcttaacgggtacagaatttctgcttgggggagaggatgaagatgttctgaaattttggccgggcgcagtggctcacgcctgtaatcccaacactttgggaggctgaggcgggtggatcacctgaggtcaggaggttgagaccagcctggccaacagggtgaaaccccgtctctactaaaaatacaaaaattagccgggcgcggtggcgggcgcctgtaatcccagctacttgagaggctgaggcagaactgcttgaacctgggaggaggaggttgtagtgagccgagatcgcgccattgcrctccagcctgggtgacaagagcgagactctgtctcaaaaaaaaaaaaagaaagaaaagaagaaaatgttccaaaattagatagtgactgccgatagccataccaccccgaacgcgtctgatcacatctaaaattagagagtgatgatggctgcacagcactgaatacactaagaagtactacgttgtttttctggtttttgtgtttgttttcagacaggtcttgc

SEQ ID NO: 737643 - DNA, 623 bp, Homo sapiens
cagcatagaaaagaatctctaagtgcagggccaggtgctgtggctcatgcctctaatcccagcactttgggaggccgaggcaggtggatcacctgagttcaggagtttgagaccagcctggccaacacgacgaaaccccgtctctactaaaaatacaaaaattagctgggcatggtggcagacgcctgtaatcccagctactcaggaggctgaggtaggagaatcacttgaacctgggacgcagaggttgcagtaagccgagattgtgccactgcactccagcctgggtgacagagtgagactctgtctcaaaamcaaaacaaaaaaaaaaaaaaagaaagaaagaaaatctctaagtgcaaatgcagttactagttttgccttcatatactgcaatatgaacattttgaatttacttgctctttttctcttggcagatttttgaaaaatacaatgtctaatggttatgaagaccacatggccgaagactgcaggggtgacatcgggagaacgaatttgatcgtcaactacctccctcagaacatgacccaggatgagttacgaagcctgttcagcagcattggtgaagttgaatctgcaaaacttattcgggataaagtagc

SEQ ID NO: 737644 - DNA, 623 bp, Homo sapiens
cagcatagaaaagaatctctaagtgcagggccaggtgctgtggctcatgcctctaatcccagcactttgggaggccgaggcaggtggatcacctgagttcaggagtttgagaccagcctggccaacacgacgaaaccccgtctctactaaaaatacaaaaattagctgggcatggtggcagacgcctgtaatcccagctactcaggaggctgaggtaggagaatcacttgaacctgggacgcagaggttgcagtaagccgagattgtgccactgcactccagcctgggtgacagagtgagactctgtctcaaaaacaaamcaaaaaaaaaaaaaaagaaagaaagaaaatctctaagtgcaaatgcagttactagttttgccttcatatactgcaatatgaacattttgaatttacttgctctttttctcttggcagatttttgaaaaatacaatgtctaatggttatgaagaccacatggccgaagactgcaggggtgacatcgggagaacgaatttgatcgtcaactacctccctcagaacatgacccaggatgagttacgaagcctgttcagcagcattggtgaagttgaatctgcaaaacttattcgggataaagtagc

SEQ ID NO: 737645 - DNA, 623 bp, Homo sapiens
cagcatagaaaagaatctctaagtgcagggccaggtgctgtggctcatgcctctaatcccagcactttgggaggccgaggcaggtggatcacctgagttcaggagtttgagaccagcctggccaacacgacgaaaccccgtctctactaaaaatacaaaaattagctgggcatggtggcagacgcctgtaatcccagctactcaggaggctgaggtaggagaatcacttgaacctgggacgcagaggttgcagtaagccgagattgtgccactgcactccagcctgggtgacagagtgagactctgtctcaaaaacaaaacaaaaaaaaaaaaaaagaaagaaagaaaatctctaagtgcaaatgcagttactagttttgccttcatatactgcaatatgaacattttgaatttacttgctctttttctcttggcagatttttgaaaaawacaatgtctaatggttatgaagaccacatggccgaagactgcaggggtgacatcgggagaacgaatttgatcgtcaactacctccctcagaacatgacccaggatgagttacgaagcctgttcagcagcattggtgaagttgaatctgcaaaacttattcgggataaagtagc

SEQ ID NO: 737646 - DNA, 623 bp, Homo sapiens
cagagcactttgggggcaactgtctgcttactgcaggcagccctttcttatctggaattcagtctcctcatcttcctgccttctcccttgcatatctcctgcttgtgtaatagggtggaaagtgggagggcaggacaaagktcagaccaatagcactggttagctaaaagatcactcgtttcattctactagacagttctggtctgaggcctgggttctcagaacataaaattatcactgtctcctttattgcatccctgtattatccctatccctcttagccagggcagctggctgacatccaccctctcaagaggagatgtatggacagaagacctggctcagaaacactgctctatgaaaagggcagatagttatgtaagaattttgcaaaaacttgagaaattaaaataagggagactatgaatgcaaaaacattaactgtcaagcaagtaagagataattcaaagaattttttaaaaagatgtagtccacataacttaaatcatgaggaagactggcagatgacagcatcagagtggatttcctaaataactgaggaggtgactgggaaaactgagccacctaccaaaacagctttacagagccaatgcatctcaatt

SEQ ID NO: 737647 - DNA, 623 bp, Homo sapiens
cagagcactttgggggcaactgtctgcttactgcaggcagccctttcttatctggaattcagtctcctcatcttcctgccttctcccttgcatatctcctgcttgtgtaatagggtggaaagtgggagggcaggacaaaggtcagaccartagcactggttagctaaaagatcactcgtttcattctactagacagttctggtctgaggcctgggttctcagaacataaaattatcactgtctcctttattgcatccctgtattatccctatccctcttagccagggcagctggctgacatccaccctctcaagaggagatgtatggacagaagacctggctcagaaacactgctctatgaaaagggcagatagttatgtaagaattttgcaaaaacttgagaaattaaaataagggagactatgaatgcaaaaacattaactgtcaagcaagtaagagataattcaaagaattttttaaaaagatgtagtccacataacttaaatcatgaggaagactggcagatgacagcatcagagtggatttcctaaataactgaggaggtgactgggaaaactgagccacctaccaaaacagctttacagagccaatgcatctcaatt

SEQ ID NO: 737648 - DNA, 623 bp, Homo sapiens
cagagcactttgggggcaactgtctgcttactgcaggcagccctttcttatctggaattcagtctcctcatcttcctgccttctcccttgcatatctcctgcttgtgtaatagggtggaaagtgggagggcaggacaaaggtcagaccaatrgcactggttagctaaaagatcactcgtttcattctactagacagttctggtctgaggcctgggttctcagaacataaaattatcactgtctcctttattgcatccctgtattatccctatccctcttagccagggcagctggctgacatccaccctctcaagaggagatgtatggacagaagacctggctcagaaacactgctctatgaaaagggcagatagttatgtaagaattttgcaaaaacttgagaaattaaaataagggagactatgaatgcaaaaacattaactgtcaagcaagtaagagataattcaaagaattttttaaaaagatgtagtccacataacttaaatcatgaggaagactggcagatgacagcatcagagtggatttcctaaataactgaggaggtgactgggaaaactgagccacctaccaaaacagctttacagagccaatgcatctcaatt

SEQ ID NO: 737649 - DNA, 629 bp, Homo sapiens
ttttgttcattactatattgctaacattttcaatagagcatagtacacagcagttagttgataaataccataaataccgctggtgtgaaggaacacgatgatgaggatgacgatgatgattgtaagattattttatatttttacaaagggatttatgtttcataattctcatatcactaagctgacttcatttaccaataaagartctgaaaaccagggttttcagggctgtgagctctattcaaatcgcccacccaggtgaagagccgaaggcaatttgaactcacactttctgattctaaatcctgtgctcatcttgagtccagaccctggcctttgagagtttctctctacctggatttaggagaaggcattttgctttaagtagcaatatgacgacttcagaaatttctgcaatagttggggttcccaaagctggatacgaccttgagcagatcttaatttctctggatctctgctttgccttttgtaagaatatctgcagtgtgaaatgtgaagacgtttgctcagacctctcgcgtgattagagatgtgtcctgctgcatgtaatagacaacgtgattcaaacccaactcaaaatattaagttggtgctaaaagttactgtgg

SEQ ID NO: 737650 - DNA, 588 bp, Homo sapiens
atctgtaatgaactcaaatcagtaagaaaaaaatcaaaaaatagacaaatctcaaaagatacacaaatggccaacaaacatattaaaaaaaatgctcaacatcactaatgatcagggaaatgcaaatcaaaccacaatgcgataccactctattcctgcaggaatggccgtaatcaaaagatcaaaaaactgtagatgttggcatggatgcagcaatcaaagaacacttccacactgccggtgggaatgtcaaccagtacagtcactataggaaactgtggaaattccttaaagaactaaaagcagaattatcatttgatccagcaatcccactactgggtatctacccagagaaaaataagtcattatttgaaagagatacttgcacatgcatatttytagcagcacaattcacaattgcaaaattctggaaccaaccaaaatgcccatcaatcaacgagtggataaagaaactgtggggggtgtgtgtgtgtgtgtctgtgtgtgtgtgtgttggaatactactcagccataacaagtaattaattaaaagcatttgcaataacctggatgagactggagactatt

SEQ ID NO: 737651 - DNA, 588 bp, Homo sapiens
atctgtaatgaactcaaatcagtaagaaaaaaatcaaaaaatagacaaatctcaaaagatacacaaatggccaacaaacatattaaaaaaaatgctcaacatcactaatgatcagggaaatgcaaatcaaaccacaatgcgataccactctattcctgcaggaatggccgtaatcaaaagatcaaaaaactgtagatgttggcatggatgcagcaatcaaagaacacttccacactgccggtgggaatgtcaaccagtacagtcactataggaaactgtggaaattccttaaagaactaaaagcagaattatcatttgatccagcaatcccactactgggtatctacccagagaaaaataagtcattatttgaaagagatacttgcacatgcatatttctagcagcacaattcacaattgcaaaattytggaaccaaccaaaatgcccatcaatcaacgagtggataaagaaactgtggggggtgtgtgtgtgtgtgtctgtgtgtgtgtgtgttggaatactactcagccataacaagtaattaattaaaagcatttgcaataacctggatgagactggagactatt

SEQ ID NO: 737652 - DNA, 534 bp, Homo sapiens
gccatgcttgaggagcccttcagcctgctgctgcactatgggagcccctctctgggctggccaagatcggagccggctccctctgcttgcagggaggtgtggagggagaggcgcgggcgggaacccaggctgcacgcagtgctctccggccagcgcaagttccgggtgggtgtgagctcggcgaccccgcactcggagyggtgggccggcgccacctgccctgagcagtgaggggcttagcacctgggccagcagctgcggagggtacaccgggtcccccagcagtgccggcccgctggtgctgcactcgaatacttgccgggcctcagctgcctccctgtggggcagggcttgggacctgcagcctgccatgcccgagcctccccccgccgccgtgggctcctgcacagcccgagcctccccgaggagcgccaccccctgctcggcggcgcctggtcccatcaactgcccaagggctgaggagtgctccgcctgcggccctggtgcaggatccactgggtgaagccagctgag

SEQ ID NO: 737653 - DNA, 534 bp, Homo sapiens
gccatgcttgaggagcccttcagcctgctgctgcactatgggagcccctctctgggctggccaagatcggagccggctccctctgcttgcagggaggtgtggagggagaggcgcgggcgggaacccaggctgcacgcagtgctctccggccagcgcaagttccgggtgggtgtgagctcggcgaccccgcactcggagtggtgggccggcgccacctgccctgagcagtgaggggcttagcacctgggccagcagctgcggagggtacaccgggtcccccagcagtgccggcccgctggtgctgcactcgaatwcttgccgggcctcagctgcctccctgtggggcagggcttgggacctgcagcctgccatgcccgagcctccccccgccgccgtgggctcctgcacagcccgagcctccccgaggagcgccaccccctgctcggcggcgcctggtcccatcaactgcccaagggctgaggagtgctccgcctgcggccctggtgcaggatccactgggtgaagccagctgag

SEQ ID NO: 737654 - DNA, 534 bp, Homo sapiens
gccatgcttgaggagcccttcagcctgctgctgcactatgggagcccctctctgggctggccaagatcggagccggctccctctgcttgcagggaggtgtggagggagaggcgcgggcgggaacccaggctgcacgcagtgctctccggccagcgcaagttccgggtgggtgtgagctcggcgaccccgcactcggagtggtgggccggcgccacctgccctgagcagtgaggggcttagcacctgggccagcagctgcggagggtacaccgggtcccccagcagtgccggcccgctggtgctgcactcgaatacttgccgggcctcagctgcctccctgtggggcagggcttgggacctgcagcctgccatgcccgagcctccccccgccgccgtggrctcctgcacagcccgagcctccccgaggagcgccaccccctgctcggcggcgcctggtcccatcaactgcccaagggctgaggagtgctccgcctgcggccctggtgcaggatccactgggtgaagccagctgag

SEQ ID NO: 737655 - DNA, 648 bp, Homo sapiens
caaggcaggaggatcgcttgagtccaggagttccagatgaccagcctgggccacatagcaagacactgtctctaaaaataaaaataaaagaaatgtatcatttaaaaaacaaaatgtacaaaggttcagttatttcagataaataagttttggagatctaatgtacagcatggtgactgtagttaacaggaacatattatgtacttgaaatgtgctaagagggtaggtcttacgtgttcttaccaccaaaaaaaaaaaagcaaatatgtgaggcgatggatgtgctaattgcttcattatttcactgtatgtatatcaaaacatcaagttgtacaccttaaatatatacaatttttatttgtcaactatawctcaacaaagccaggagtaagaaaggagtcagtggccaagcatggtggctcacgcctgtaatcccagcactttgggaggctgaggcaggtggatcacctgaggtcaggagttcaagaccagcctggccaacatggtgaaaccccgtctctattaaaaatacaaaaattagccgggcatgatggcaggcgcctgtaatcccagctacccgggagggtgatgcaggagaatcacttgaacctgggaagcagatgttgcagtgagccgagatcgcaccat

SEQ ID NO: 737656 - DNA, 554 bp, Homo sapiens
cagtataataaaatataaaacaagaatagttataccagatatagatcttagttatgattatatatgaatatcattaatcatttgtttgtagcagttaccctttatcccaatattataataatcctccctctgtaatcataacctaggaaaagccaggccatacagagataggagctgaggggacacagtgagaagtgaccagaagacaagagtgcgaaccctctgtcatgcccggacagggccaccagagggctccttggtctagcggtgacgccagcgtctgggaagacgtccgttgccaagcggaccgtggtctagcggtagcgtaagtggcaaggaacaacacccgctacttagcagactggggaagggagtctccctttcccygggggagtttagagaagactctgctcctccacctcttgtggagggcctgacatcagtcaggctcgcccgcagttatccggaggcctaaccgtctccctgtgatgctgtgcttcggtggtcacgctcctagtccgccttcatgttccatcctgtacacctggctctgc

SEQ ID NO: 737657 - DNA, 522 bp, Homo sapiens
atggaggcagtttctcccattctgttcttgtggtcgtgaataagtctcagaagagctgatgattttataaggggtttccccttttgcttggctctcatttcctctgtacctgccaccacgtgagatgttgctttcaccttccaccatgattgtgaggcctctgcagccatgtggaactgtgagtcaattaaatctctttttcttataaattacctggtctcgggtatgtctttatcagcagcctgaaaatggactaatacaggagttgaatatgaaagtgaaggaaatctcagatactgctaaaaagaaggcaggcagcagctcatgcagcaagacctggcagaaaaccatgagtgaacttccmgtgcctgagagggaagttatgagaccacatgatacccattctcagtggggagccaggcaatccaggccactggggagctctttgaccgacctaagccctggatctgacttagggaacagcgggaggactgtgaaaaggaagggcccagggaagtgctc

SEQ ID NO: 737658 - DNA, 511 bp, Homo sapiens
tccagcctgggtgacagaatgagacttcgtctcaaaaaaaaaaaaaaaaaaaaaagcagcagcagcttctagaacagtggttcgcagagtgtggtctgtgccagcagcatcagcatcacctgggaactcattagaaatgcagagtctcaggccgcaccgggacctgccgattcccagattctcaaatctgtattaggaaccagtggtctacaaacccgtgcgcacgtcttggggaacgtttgttttcccctttgcttcccttagctgcatttttttcccctgaattcgaagcctgcttcgttgcctgatracgtgtgagtccctgtgtccggtgaacataatcatttcttttgtatttccgccacccaccccgaatgcctgtactttaccctctcccagggtttttcctgtttctcataagccagcattgagaaaaatccaaacccttttgagatacctggttttcttggcaagactgcagctttatagctgtatttagaacagcgtcgaa

SEQ ID NO: 737659 - DNA, 547 bp, Homo sapiens
ttcttcccccttcccgctgtgtttttagcagggctacatgagccatgttgagagaagcgtctagctcaatatctgcatagagctggtattcagcatgtatttggtgtttctacccatttctcagttgagcattcatttgtccgaatgactcccaagctgtgccctgagggtgtctgttggtaaatcggaaccctggagaggtgagcggtgagggagggtgcagttgagcaagaggaacctcgggaaactccttacttcccttccaagtcagagcaagacactcactgacgaccccaccatgcccagacaatgtgacctgagcacactatacttaacctccccatggctgtctcctcattgataaaccaggatgtggacatcartgaggattaaatgagttaatatctgcaagtagttgtaacgatgcctggagcataatctagtaatgcaaattgtattcacaataaagcagcagaggcttggggtctctgtccaaccctcacaagttcacagctcaagaccccctgggctccataggatgaatgca

SEQ ID NO: 737660 - DNA, 633 bp, Homo sapiens
tgtccaacctcccgtcccagcatggccaggaacccagtttttaagatttctctgggttcctcttggccaagagggggactgtttattcagttgggggacttaggattttctttttagttctcagagactatctattcagatcctttgcccataaattaattgagttgtgagactatctattcagatcctttgcccataaattaattgagttgttaaattttttaaattatcaagttggaaggatttttttaatctattctggatacaagtttcttttttttcttttctttttctttttctttttcttttcyttttttttttttttttttttttttttttgagacatagtctctcactctgtcgtccaggctggagtatagtggtgtgaccttggctcactggtactttctcctcccaggttcaaaccattctcgtgcctcagcctcccaagtagctgggattacaggcacccgccaccacacctggttaatttttttgcttttgtttttgttttatcttgagacagtcttgctctgtcacccaggctggagttcagtagtgtgattttggctcactgcaaaccttcgcctcccgggttcaagcgattctcctgcctcagcctcccaagtagct

SEQ ID NO: 737661 - DNA, 581 bp, Homo sapiens
agcctgggagaggaggcatgagtgtgcctgtgatgcccacctgggaccagggcctggacccatcggtgggacactcctggatgggactgtggtttggtggcttcagctagtgccctgccctgccgcagcaagagtgctcactgcgcaggtccctgttgccctgcccagcttcccgagtgcacatacgtgtggattacaggtgggctggggacccaggggacggctgggatttctgggaagatcggatcctcaggctggcaggggatgtcagatggcacggagccgaggccatcatccctttgcagctggcagacytggcaaggagcacacgtgggtcttctgatggtccatgcagccagaccaccctcaccacgtgccaggtgatgggcagacttgacggtctgggtaaatcacaccaaacacagtcataaaactttaagtaatgcttacgttactttccctgagcaaagtgcctctgacacaggctgtttgtgttgatttgttactattcatttattccttccctgtacttctcacggcagcctaattgtgattcggtaccaagaaagcaatatcaaagt

SEQ ID NO: 737662 - DNA, 605 bp, Homo sapiens
gtatgcaccaccaagcttggctaatttttatatttttaggagagacggggtttcactctgttgggcaggctggtctcgaactcctgacttcagttgatctgcctctcaaaatgctgggattacaggcatgagccaccatggctggcccaggagctggctcttttgaagaaattaataaaatacatagaccactagctagactaataaagaataaaagagagaagaatcaaacccaataaaaaatgataaataggatatcaccagtgaccccacaaaagtataaactactaacagagaatactataaacacctctatgcaaataaactaaaaaatctagaagaaatggatcaatttctggacacataaaccctcccaagaytaaaccaggaagaagtcaaatccttgaaaagaccaactaagttctgaaatttaggcagtaataaatagcctaccaaccaaaaaaacacacacaaaaagcccagaaccagatggactaatggttgaattctaccagaggtaaaaaaaggagctggtgaagcagcattgttgtctggggtaaatacccagggttcatcatctaatgctgagaaggttaatgacacag

SEQ ID NO: 737663 - DNA, 598 bp, Homo sapiens
cctggcataaaatgttcttgattatggtgtactatcttattaatatgttgctgtgtttggttagctagtattttatggaagatttttgcatttatgctcatcaggaacattggtgtgtagttttcttttattatgtcttttcatgatcttggtattagagtgatactggcttcatagaataatttaggaaggattccctttttctctatcttttggaatagtttcagtaggactggtaccaattctttgaattttggatagaattgagctatgaatccatcttgtcctggacgttttttgttggcagtttttttkttttttttttcttgagtcttgctctgtcacccaggctggagtgcagtggtgcgatgttgactcactgcaaacttgcctcctgggtttaagtgattctcctgcctaagcctcccaagtagctgggattacaggcacaaaccaccatacctggctaatttttgtatttttagtagagatggggttttgccatgttgatcagactggtctcaaacacctgacctcaagtgatccccccacctcgtcctaccaaagtgctaggattacaggcatgagccactgaacc

SEQ ID NO: 737664 - DNA, 547 bp, Homo sapiens
tgtgcttgttggccatttgtatatcttcctaggagaaatctctactttagtcctttgtccatttattaattgggattttggatttttgtggttgttgatttgtaagagttcttcatatattctggaaattaatcccttatcagatatatgatttgcaaatatatttcccatttcataggttgccttttcactttctcgataatgttctttaatatataaaagtttttaattttcgaggccctgcacggtggytcctgtaatcccagcactttgggaggccgaggcaggtagattacaaggtcaggagatcaagaccatcctggctaacacagtgaaaccccgtctctactaaaaatacaaaaaaaattatccaggcgtggtggtgggcgcctgtagtcccagctactcaagaggctgaggcaggagaatggcatgaacccaggaggcatagcttgcagtgagctgagatcgcaccactgcactccagccagggtgacagagcgagactctgtcaaaaaaaaaaaaaaaaagtttttaattttcatga

SEQ ID NO: 737665 - DNA, 547 bp, Homo sapiens
tgtgcttgttggccatttgtatatcttcctaggagaaatctctactttagtcctttgtccatttattaattgggattttggatttttgtggttgttgatttgtaagagttcttcatatattctggaaattaatcccttatcagatatatgatttgcaaatatatttcccatttcataggttgccttttcactttctcgataatgttctttaatatataaaagtttttaattttcgaggccctgcacggtggttcctgtaatcccagcactttgggaggccgaggcaggtrgattacaaggtcaggagatcaagaccatcctggctaacacagtgaaaccccgtctctactaaaaatacaaaaaaaattatccaggcgtggtggtgggcgcctgtagtcccagctactcaagaggctgaggcaggagaatggcatgaacccaggaggcatagcttgcagtgagctgagatcgcaccactgcactccagccagggtgacagagcgagactctgtcaaaaaaaaaaaaaaaaagtttttaattttcatga

SEQ ID NO: 737666 - DNA, 607 bp, Homo sapiens
cttgaactcctgggctcaagggatcctcccatctcagcctcccaatatgctgggattacaggtgtgagccacagtgcccagccaaaccatggctatcttgaaaaccacttgtcttccagtccccatgccccgaaattccaaggctctcatccctgaaacctaggactcaggctctccctacctcagccccaggagtctaaacctttaacttcctctttccctgggactaaggagtgctgcaccccaggcgcctcccttaccccacatccctcctcagcctcccctcctcagcctcagwgcatttgctaattcgcctttcctcccctgcagccatgtggctccggagccatcgtcagctctgcctggccttcctgctagtctgtgtcctctctgtaatcttcttcctccatatccatcaagacagctttccacatggcctaggcctgtcgatcctgtgtccagaccgccgcctggtgacacccccagtggccatcttctgcctgccgggtactgcgatgggccccaacgcctcctcttcctgtccccagcaccctgcttccctctccggcacctggactgtctaccccaatggccggtttggtaatca

SEQ ID NO: 737667 - DNA, 565 bp, Homo sapiens
aggatggtctcgatctcctgacctcgtgatctgcccacctcggcctcccacagtgctgggattaccggcgtgagccaccatgcctggcccggataattttttttaatttttgtagagacgaggtcttgtgatattgcccaggctgttcttcaactcctgggctcaagcagtcctcccaccttggcctcccagaatgctgggtttayagatgtgagccagcacaccgggccaagtgaagaatctaatgaatgtgcaacctaattgtagcatctaatgaatgttccaccattgctggaaaaattgagatggaaaacaaaccatctctagttggccagcgtcttgctctgttcacagtctctggaaaagctggggtagttggtgagcagagcgggactctgtccaacaagccccacagcccctcaaagacttttttttgtttgttttgagcagacaggctaaaatgtgaacgtggggtgagggatcactgccaaaatggtacagcttctggagcagaactttccagggatccagggacacttttttttaaagctcataaactgccaag

SEQ ID NO: 737668 - DNA, 568 bp, Homo sapiens
actccttaacagtgacatcatccgggcacgcctgggggcctccgcactggataggtgtgtgttgcagaagggagtggggagggtggtgggtggggctggagcctcaaattctttcagacctgagctcaagttctcggcttccaaccacggagcctgcgtcttacccataggtcaatggggagattcgcagtggtgtgaatctgcccaccggagcacggacttccrtggtggggctttgggtgtctaagttcctcccagcaacggagctatgtggtctcggggagcacactgaccccaggccaaccccaggatgacgctgcccccttcccaccctagcatccaagagttccggctgtcagggtggctggcccagcaggaggatgcacaccgtatcgtactctaccagacggacgcctcgctgacgccctggaccgtgcgctgcctgcgacaggccgactgcatcctcattgtgggcctgggggaccaggagcctaccctcggccaggtcggaagcccgtgccccctgatctcacccacctcggcccccgtcctttgccctcccgtgcct

SEQ ID NO: 737669 - DNA, 568 bp, Homo sapiens
actccttaacagtgacatcatccgggcacgcctgggggcctccgcactggataggtgtgtgttgcagaagggagtggggagggtggtgggtggggctggagcctcaaattctttcagacctgagctcaagttctcggcttccaaccacggagcctgcgtcttacccataggtcaatggggagattcgcagtggtgtgaatctgcccaccggagcacggacttccatggtggggstttgggtgtctaagttcctcccagcaacggagctatgtggtctcggggagcacactgaccccaggccaaccccaggatgacgctgcccccttcccaccctagcatccaagagttccggctgtcagggtggctggcccagcaggaggatgcacaccgtatcgtactctaccagacggacgcctcgctgacgccctggaccgtgcgctgcctgcgacaggccgactgcatcctcattgtgggcctgggggaccaggagcctaccctcggccaggtcggaagcccgtgccccctgatctcacccacctcggcccccgtcctttgccctcccgtgcct

SEQ ID NO: 737670 - DNA, 531 bp, Homo sapiens
tggcgcctggtggaccttcttcattaagttttgaagcttttctcagccaggcgtggtggctcatgcctataatcccagcactttgggaggctgaggcgggtggatcacgaggtcaggagttcaagaccagcctggccaagatgctgaaaccccgtctctactaaaaatacaaaaattagccaggcatggtggcacgtgcctgtaatcccagctactcrggaggctgaggcaggacaatcacttgaacccaggaggcagaggttgcagtgagccaagattacgccactgcactccagcctggtgacagaggaagactctatctcaaaaaaaaaaaaaaagaaaaaaaagagttttgaggccttccaaagaggtcaggtgccaaaagcatctcaggcagccctggggatgctgatctgtccttacctgcctaacgtgggtccctctccgcttaaggatttttaccctgcctgtgggccgcgaagcatgctgagcacttcacactcccccacaggcccccaggtgtcgttatcc

SEQ ID NO: 737671 - DNA, 618 bp, Homo sapiens
cccccagagggaaaccccagggaggggtctgaggggcgtccttgtgaggcagggggctccagcagccctggcaggagtccccattgcttgctcctcactaggtcccgggcacgaaagggcgccacactgccaggtcccgggcacgtgtgcgggcctcccaggctctgtgctcctggcacaagagggcaccacactgaggcatgccctgctcggaccccagacgctgtcatggccggagctttgtcataactggggctgggacggccctgggagcacagagccttttgttttcaggctgactgggaagacggtcacagggtgtggggtgcagagcagggaccagaggtgtggggttcatcrgtcggggagaagggggtctgttggttctctcacctgtggggtcttgccagcctggctctgtccttggggccgcacggggaccccaggagttcttttgaggttcagacttgactgggacagttttgctttttcactgtgccgtggttgggcccctggagaaccctgggtccttggaggcgtcctgcagagctggtacgcggctcacctgcctgctgtggttgcagggtggactccgacgaccagtggggagagtactcc

SEQ ID NO: 737672 - DNA, 618 bp, Homo sapiens
cccccagagggaaaccccagggaggggtctgaggggcgtccttgtgaggcagggggctccagcagccctggcaggagtccccattgcttgctcctcactaggtcccgggcacgaaagggcgccacactgccaggtcccgggcacgtgtgcgggcctcccaggctctgtgctcctggcacaagagggcaccacactgaggcatgccctgctcggaccccagacgctgtcatggccggagctttgtcataactggggctgggacggccctgggagcacagagccttttgttttcaggctgactgggaagacggtcacagggtgtggggtgcagagcagggaccagaggtgtggggttcatcagtcggggagaagggggtctgttggttctctcacctgtggggtcttgccagcctggctctgtccttggggccgcacggggaccccaggagttcttttgaggttcagacttgactsggacagttttgctttttcactgtgccgtggttgggcccctggagaaccctgggtccttggaggcgtcctgcagagctggtacgcggctcacctgcctgctgtggttgcagggtggactccgacgaccagtggggagagtactcc

SEQ ID NO: 737673 - DNA, 642 bp, Homo sapiens
catattggcaacacaataagccccaacatttgcattgtatttcagctcactgaagcacagctctcttcagtagggaagagagttctttactcccctgtaaagaacatgcacattttgattttacttgtcctctgaccttttactcattataatagtaaaaaacacacaagtgagtggagattaaagatgctaataagatatgtgacacataagcatgtacagccactgtgtatgtacaccaacaagaccactcagaacatgctaactaataacaccactttccacctcttcataaataatgatctaagactcccataratggagtctctctagttccagtctttgctgtctcattcttataagcagcccaccctgaatcccttctctcttggggctattttgcacctaatttttaaaatagtatttcaactttgcaataaatccctctatgttgcatcttcattgttttgtgtctcttgtttaaatttttgaaactaagaaccaaggtctcacaacagccatcaacactatcgtgctttgttttgtattcttcattaacagtatttttgggaatatgtcaatatctacattttaaacacagcccaaactgctaaattaaaaatttaaatgattgtaaaagca

SEQ ID NO: 737674 - DNA, 621 bp, Homo sapiens
tagtttccagtttaggctgtgcaccccgattcttagagctggacatttactctgctgtgctggtggcggggagcttcagatgcacaaggtatggggtgcctcatcttgaaaactaatggcaaaaatcaaaatagtaatttcctgcctatgagggagctcccccatcacctctaaggaacttcctgccttgtggctcactctyccgtgtgccagccccttggacacacttcctcttttctgtccctaatgtatgacaaagttaactatgagctatcacctcatagctcgaggatttgcctatttatttttcacttcccaaactgcctaagttcaggccctcagaatctcactgtgttggtctgttttcatctgctgataaagacatacctgagactgggcaatttacaaatgaaagagatttattggactcacagttccaagtggctggggaggtctcacaatcatggtggaaggtgaaaggcacgtctcacacggctgcagaccagagaagagggcttgttcagggaaactcccctttttaaaaccatcagatctcgtgaggtttattcactatcatgagaacagcacaggaaagatctgcccccatgattcaattacctc

SEQ ID NO: 737675 - DNA, 705 bp, Homo sapiens
tgaaatcagggtgttggctgggaacttggggagaatcggttcctcatctcttctggcttccagtggttgccagcaattcttggcatgccttggcatgtagtggcatcagctcagtctctgcctctgtcttcacttggtattctytctctctctcgcctgtctctgctttcacttcttataaggacacaggtgattagattagtacccaccctaatccagtatgacttcatcttaactaaacacatctgcaaaatcactactgtacttccaaataagatcactgctatggactgaattgtgtcctcccaaaagtcgtattttgaatccctaaccctgttgtgactgtatttagagacaaggcccaaggaggttattaagatttaatgagattgtaaacatggagccttgaccctgtagtgctggtgcccttagaagaaaaagaaatgccagagctctttctctctgccatgtgaggacacagcaagaaggcggccatctgcagccctaggagagagccttcaccagaacccaagcctggtactgtacttccagtctccagaactatgagaagtaaatatctgttgtttaagtcacctagtttgtggcattttgttatgcagccagaacaaactaatacaatcacattctaagattcccagttgtcatagttaatactgagtgtcaacttgattggactgaagcatg

SEQ ID NO: 737676 - DNA, 705 bp, Homo sapiens
tgaaatcagggtgttggctgggaacttggggagaatcggttcctcatctcttctggcttccagtggttgccagcaattcttggcatgccttggcatgtagtggcatcagctcagtctctgcctctgtcttcacttggtattctctctctctctcgcctgtctctgctttcacttcttataaggacacaggtgattagattagtacccaccctaatccagtatgacttcatcttaactaaacacatctgcaaaatcactactgtacttccaaataagatcactgctatggactgaattgtgtcctcccaaaagtcrtattttgaatccctaaccctgttgtgactgtatttagagacaaggcccaaggaggttattaagatttaatgagattgtaaacatggagccttgaccctgtagtgctggtgcccttagaagaaaaagaaatgccagagctctttctctctgccatgtgaggacacagcaagaaggcggccatctgcagccctaggagagagccttcaccagaacccaagcctggtactgtacttccagtctccagaactatgagaagtaaatatctgttgtttaagtcacctagtttgtggcattttgttatgcagccagaacaaactaatacaatcacattctaagattcccagttgtcatagttaatactgagtgtcaacttgattggactgaagcatg

SEQ ID NO: 737677 - DNA, 671 bp, Homo sapiens
ttagaagaaaaagaaatgccagagctctttctctctgccatgtgaggacacagcaagaaggcggccatctgcagccctaggagagagccttcaccagaacccaagcctggtactgtacttccagtctccagaactatgagaagtaaatatctgttgtttaagtcacctagtttgtggcattttgttatgcagccagaacaaactaatacaatcacattctaagattcccagttgtcatagttaatactgagtgtcaacttgattggactgaagsatgcaaagtattgttcctgggtgtgtctgtgaggttgttgccaaaggaggttaacgtttgagtcagtggactggaaaggcagacttaccctcagtctaggtgggcaccatctaatcaattgccagcttggccagaataaaaacaggcagaagaatgtgaaaaggctagactggcttagcctcccaacctacatctttctcccatgctggatgcttgctgccctagaacatcggactccaggttcttcagctttgggactcagactggcttccttgctcctcagcttgcagatggcttattgtgggacctcacctccttgtgatcctgtgagtcaatactccttaataaactcccctttatatatacatctatcctattagttctgtccctctagaga

SEQ ID NO: 737678 - DNA, 634 bp, Homo sapiens
gagtaaggttgggctttcgattcctgctttctcaaaggatcctggagctctgctgtgcacgtttgctcacatgccctccttctccccccacccatcacaggtcagtgctgtctcgcacaggagaaggtgctggcttcccctgacgtcctctgtgggtagactcacaggagctctgcattcagtgatcatgtgatgaggatcaggaatttcaaagaggaatttcagcactgcctgcactgaaataatcaagtttgacctcacaaggaacagcaggttgggcagaacgttaagtgtcaggcagcatgagagcccacacgcagggcacgcagcctgggactgaaccagaagaaggtctgccattgaggatttagcaaggggagtagctcatgatgaggcgagaaacaactgtttccagtcaggtccaacaacctccctgagctaatcacaaagtcattctaatatctggactayagaaatccaaatttcgtctccatcctttggagctaaatttctgacgctcctttcaacaagatgagaacctgccactttggttggaaccaggccctgggcctcactgtgaaggctgaacgaggatgaccagagccgggaccttggacacactgggaagtgacca

SEQ ID NO: 737679 - DNA, 611 bp, Homo sapiens
agcaatgtgacgattctcaaagaacttaaaagagagctacgactcaacccagcaatcccattatcaggaaatccactttcggattctcctcagtgacaccctgactattcccttccgcgacccggctggcctcactctgtyacctgcttaacccctgtcatcagtcatattaacttccaattttaaaaaattcttttcacccagaaatgtcctgttaattattttattgattttcagagtccattaatttatcgaattttctagtgataacaagtctctcggctatagaataaaaaataaaaacctacaacagaacagattccaagaactacttttcacattgcacatggccaaccaattagtactgaagaagaacaggtccctccctcatttctcctgcaaaagccacccagcaatgaatacattttcaaaagtcgtctctgatctaccttggaatgagctcagagatctcccagagccagtgtaattagttgtatctcccctgcagggagacctgccattttaaattaacccactgcagcctgaacagacattgatgaaagagaaaacaggattcacaagcaagctcacagaaggaagcgcaaatccaa

SEQ ID NO: 737680 - DNA, 675 bp, Homo sapiens
gggatccaaaaaagtactgatgcctggagcccacctccagatattaggatttaagtggtctgaatgcattctgtgcattgggatttttaaaagcttccccagtgattctaaaatacagccatgttcaagaatctagagcagaagtcagcaaactttttctgcaaagggccagatagtaaatattttgggctctacaagccatatggtatctgtcacagctacaatggcatatggtatctgccattgtagggtgaaaccagctgtagataatatataaattaatggactgtgtttcaataaaactttatttacaaaaacaagtagtgggtcaaggsccttggtttgccaacccctactctagagcttcagtactgaaagcacagtcccagaaacagcagtatcagcaacacttgagagcttgttagaaaggaagaccctcaggtttcaataagatccggcccaccaacacccaccccgcatcgccccatcgtactcctcctccgtgtgaaaagcatgtacattcaagtttccaaggcactgctgcagaggacacactttgtgaatccaaccatcattacagtcccaaagtgaagggttcccatcactgtcagcatctcctctgcctgtcacctctatcagcctggctatctcctggctgccacatttctgtagcat

SEQ ID NO: 737681 - DNA, 675 bp, Homo sapiens
gggatccaaaaaagtactgatgcctggagcccacctccagatattaggatttaagtggtctgaatgcattctgtgcattgggatttttaaaagcttccccagtgattctaaaatacagccatgttcaagaatctagagcagaagtcagcaaactttttctgcaaagggccagatagtaaatattttgggctctacaagccatatggtatctgtcacagctacaatggcatatggtatctgccattgtagggtgaaaccagctgtagataatatataaattaatggactgtgtttcaataaaactttatttacaaaaacaagtagtgggtcaaggcccttggtttgccaacccctactctagagcttcagtactgaaagcacagtcccagaaacagcagtatcagcaacacttgagagcttgttagaaaggaagaccctcaggtttcaataagatccggcccaccaacacccaccccgcaycgccccatcgtactcctcctccgtgtgaaaagcatgtacattcaagtttccaaggcactgctgcagaggacacactttgtgaatccaaccatcattacagtcccaaagtgaagggttcccatcactgtcagcatctcctctgcctgtcacctctatcagcctggctatctcctggctgccacatttctgtagcat

SEQ ID NO: 737682 - DNA, 576 bp, Homo sapiens
ttactttattctaagaatacagtatataatatacatgacacacaaaatacaggttaataaactgtttgtgctattgataagccttctggtccacagtaggctattagtagctaagttttgggggagtcaaaagttacacatagatttttgactgcacagggggtcagcatctctaacctcccaaccccattgttgttcaagggtcaactacataatgaaatggtggaagagcagtgttagggtgagtgttcccatccagagraaggccccgtggcccttggaagggggaaagcgagagacctcctgcaggaggatgtacagcctgagctggaagcagagcaaggtgaggctaccacccacatctcttccccagcagtcatctcaagggtacgactaatgtgctttgtggaacaggtaatttacagagttgctcaagaccccaattctttagatgttgtccatgaacttctgtttcaaacttttaggaatgagttatgacacaccaccctgaaaattcaattacctccgcaagacattcagcataaatcaaagatatttagagctggaagaggcatt

SEQ ID NO: 737683 - DNA, 576 bp, Homo sapiens
ttactttattctaagaatacagtatataatatacatgacacacaaaatacaggttaataaactgtttgtgctattgataagccttctggtccacagtaggctattagtagctaagttttgggggagtcaaaagttacacatagatttttgactgcacagggggtcagcatctctaacctcccaaccccattgttgttcaagggtcaactacataatgaaatggtggaagagcagtgttagggtgagtgttcccatccagagaarggccccgtggcccttggaagggggaaagcgagagacctcctgcaggaggatgtacagcctgagctggaagcagagcaaggtgaggctaccacccacatctcttccccagcagtcatctcaagggtacgactaatgtgctttgtggaacaggtaatttacagagttgctcaagaccccaattctttagatgttgtccatgaacttctgtttcaaacttttaggaatgagttatgacacaccaccctgaaaattcaattacctccgcaagacattcagcataaatcaaagatatttagagctggaagaggcatt

SEQ ID NO: 737684 - DNA, 563 bp, Homo sapiens
catcatcatagcagacagtgcccaaatctggatcacccaatagttaggataactttcttcagatgccgaagagctatagccagagaggaagggcactgatgcccgcagaccacgtcgctttagaagggactacggtggctggtttgttcaatttcattttcttctgcttattatttttaacaggtgtaattcactattattcttgtatgaaagcttatgctgtaaccacagctggagcctgggtcctctgcatggaggctctggtgtgggtcttgatgtgatggtcagtgcattccacagggagkcttggtgaatagtctctttccagaggctgggggtcaggcagctataggtcctggagatggcattgaaggtggccttggtgaagttgtccagggtggcagtgcagcccctggctgaggtgtagcagttgtcaataccggccatcagcagcagcatcttgggcacaggagtcgagatgatgccattgttcctgggggcagggataaggtgtactagcccagagctacagcagcctgtaaccatacagggggtggtgtagg

SEQ ID NO: 737685 - DNA, 554 bp, Homo sapiens
ttcatgagccctggagtgggaggctgttgtggttaaaggaagaaggttccttgtcaggaaggaaggcacataaaaaatgaaggaagtttggaatctacaagcaggggaaattgcaggttgaaaagggtaagaacacaggagaaacattttaatgtttactaatatagtggcttatagttaaaaataaatgataaagaaaaggcatattaacttatcaaataatgattaagtgtgtactatgtgtctgccactgtgctgggccctgggggrctaatcataagcaagaaagatacagtccttaccctcatggcaaaacctaatggggaagaggaaaaatactgaccaagcaataacaatggagtgagatgtgccaaaatggtgacagagagggacttttatgagtaatgtttgatctggtttctattctattaacaacagctccagtattatcttatttgctcagactctaaagtgtgttcatttttttttcactactccctgttacccttcaattagttcacttattattcagtcttcgtttacttccacacagg

SEQ ID NO: 737686 - DNA, 611 bp, Homo sapiens
aaagcagacatacacaataggtaaaccaatgagcatggttgtgttccaataaaactttatttacaaaaactgacaataggctaagatgtggcccgtgggctttggtttgccaatcaatggtttagccagtggaggattgggacaagaactcagagggagagaggagaataaatctttgcaggctgctctgtccttccattgggggttacagytcttctcagggagccccctccatgtggccgcgtcttttgggtctggaaattgtttcctcccctggccctctagggttagatgtgggaaaggtgccccattattactggcatgttgctttatgctgtgggccccttttccttgactctgactgtacttttgctggttcctgcgtccatctcttgtcacaaagctcaatttgcgtgtgccatcaatttcctgctgggattaagatacctggcagtgcagggtttcctgggatatgggacctctaaaaccgaaacctagacagtcccagtaaatcaggaggattaatctccctaactggaacccagccctgtctcctcccttggccctgctccaattaccttcattctggccctcagtacccccaagttgga

SEQ ID NO: 737687 - DNA, 611 bp, Homo sapiens
aaagcagacatacacaataggtaaaccaatgagcatggttgtgttccaataaaactttatttacaaaaactgacaataggctaagatgtggcccgtgggctttggtttgccaatcaatggtttagccagtggaggattgggacaagaactcagagggagagaggagaataaatctttgcaggctgctctgtccttccattgggggttacagctcttctcagggagccccctccatgtggccgcgtcttttgggtctggaaattgtttcctcccctggccctctaggsttagatgtgggaaaggtgccccattattactggcatgttgctttatgctgtgggccccttttccttgactctgactgtacttttgctggttcctgcgtccatctcttgtcacaaagctcaatttgcgtgtgccatcaatttcctgctgggattaagatacctggcagtgcagggtttcctgggatatgggacctctaaaaccgaaacctagacagtcccagtaaatcaggaggattaatctccctaactggaacccagccctgtctcctcccttggccctgctccaattaccttcattctggccctcagtacccccaagttgga

SEQ ID NO: 737688 - DNA, 573 bp, Homo sapiens
tgtaattattatcattattatttgagatggagtctctccctgttacccaggctggagtgcagtggcgcaatctcaactcactgcaacctctgcctcctgggttcaagctattctcatgcctcagccttccgagtagctgggactacagaagtgcaccaccacgcctggctaatttttgtaattttaatagagcaaagttttgccatgttggccaggctggtcttgaactcctggcctcaaacgatcgtcctgattcgacctcccaaaggactgggttaggtgtgaaccactgcgctcagcgggaattttttttttttttctttttaaacacaagtcaagtgtagtagtgagaagtgcggaaggggtagaacaaggagtttgatmtgtaactttatccttattaaaataccaatgaaattatttacagaaaaagaaaaaaaattctaaaatttatacagaaccccaaaagacccagaacagcagaagccatcttgagcaaaaagaacaaaattagagttatcacgttatctgacttacagttgtactacaaagctatagtaactaaaacagtgt

SEQ ID NO: 737689 - DNA, 647 bp, Homo sapiens
aataaaatctagtattttgtagcgtaatagggtaacaaaaattaataatttattatatattttacatacccaataagatgaaattggaatgtccctaacacaaagaaatgataaaggtctgaagtgatgaatactcaattactctgatttgattattacacatagtatatctgtatcaaaacatcataggtcccctctaaaaatatacaactattatgtacccataaaaatttaaattactttttaaaatattaatctatgtaaagggttttgaatagtagctgacctataatggtccctgaaatattagctgtcagaaacagcatagggatgattgtagctgaaagcttgctatggccctccaatatttatctttctsatatccagtaggcttcctagttaactctgcctgtcccacatgggcatctaaattcaccttcaggaagtcactattactcctaagactgttcatggagtcaaatgatgttccatagaagacaaaaccatcttgaagtttttgatgctgtcttgtttctgtcatatcagtaacactattgacaatacctgctattcactatcaaggaagcagaatacagtgctaaggggtgagaggacatgggctggctggtgttgatcaaagactttga

SEQ ID NO: 737690 - DNA, 469 bp, Homo sapiens
cctgggcatagcctggctcttgtttgaaatgtgtggtacttctctgtgacaagatatagaataagtcattggaagaaaaactgtcctattactatattttatataaaagtgtatcttgtgttataatgggcctggtatacagagggtgcttagcaaatcttccgcagagctgaaactgagctgaagctacggcccccttctctgcttgctctcctttattctctagagtgctgcttcccaatgcgtggtccatggaccaagcagcttcagcatcacctgagcacttgtcagaaatgcagcacctaggcgcygcaccagacctgttgaataggaatctacattttcacaagattccaggtgatttgcatacacagtggcatttgagaagcattaatccaggggcttctttgcagtcagtgatggtgatttgccaatcattagcatttcagaaaccccaggccgaaaccat

SEQ ID NO: 737691 - DNA, 503 bp, Homo sapiens
tggccccagccacttagaattgcaagccaggagaattgcttgagcccaggagttggaggctgcagtgagctatgattgtgccactgcactcctgcctgggcaacagagcgagaccctgtttcagcaacataaataagtaaataaagtgatayctgcctatatcctaattctgtctgctgaaagctcctagaaacagtgacaatccagtagcaatcctatcccttttccccaggtcttggtttctcaaatccattctccagagcaccttggagaaaaaagctcaagtctgggggggtgatgttggacaatcttgccaagtcagcaagtaaggaagtgctcagtgactgttgggaacatgtgaagaggatgcaggacccagcttgaaagggttcttcctggtcaaacttgacagttcagtcatcaagaaagaataaggacaataatgaattataccagtttgaatgaaaataatctactcattcaaagtgattaacaggctaggc

SEQ ID NO: 737692 - DNA, 579 bp, Homo sapiens
ctggctaattttgttgttgttgttgttattgttgctgagacagggtctccttaggttgcccaggctggttctgacctcccgggcttaagcgattctcccacctcagcctcccaaaatgctgggattacaggcgtgaggcactgcaccaggctccacttttgcctccttagaccccagcactgctgcgcaaaaaggaagcccttaggctgtgcgcggtggctcatgcctgtaatcccagtactttgggaggccgaggcaggtggatcacctgaggtcaggagttcaagagcagcctggccaatatggtgaaaccccgtctctactaaaaatacaaaaattagccgggcatgatggtgggtgcctgtaatcccagctatttgggaggctgaggcaggagaattgcttgaacctggtaggtgcaggttgcagtaaaccgagatcgygccattgcactccagcctgggcaacagagtgagactccatctcagaaacaaaaacaaaacaaacaaatgaacaaaaaagaagccctgcccaacttactggagggcgagggcttctgtggggagaactgaggcaccc

SEQ ID NO: 737693 - DNA, 639 bp, Homo sapiens
gtagctgggattacaggtggctgccactacactgggctaatttttgtatttttagtagagacggagtttcaccatgttggccaggctggtctccaattcctgacctcaggtgatccatctgcctcagcctcccaaagtgtgggygatgtgggtgagatatggaagaggacttggccccaagcttgcctggagggggcagggtcccttctcaggggccgtccttcttccccgatggtggggactggggatgggaggtgatggaggtagaggagggtcggtgcttctggaagcagagctggggtgggtatttgggctggagcttggcgaggacagtggccgtggcagccttgtcccatgtcctggcctcccagagtgtgcatcagagatagccacgggggaggaggggaggaggagggcaggagacacagacattgtgaggagtggggagtgacagacgcagggcgggtggcacacacagaatctgagaaggatgcagagggaggctgcgagggggaccgaggggaccacagaaggagtgaccaacagagagaaaggcagacacatacagagggagcgagcgaggagagagacagagacacagagacccagagagagatgagaagacgcaaagggagatcg

SEQ ID NO: 737694 - DNA, 639 bp, Homo sapiens
gtagctgggattacaggtggctgccactacactgggctaatttttgtatttttagtagagacggagtttcaccatgttggccaggctggtctccaattcctgacctcaggtgatccatctgcctcagcctcccaaagtgtgggtgatgtgggtgagatatggaagaggacttggccccaagcttgcctggagggggcagggtcccttctcaggggccgtccttcttccccgatggtggggactggggatgggaggtgatggaggtwgaggagggtcggtgcttctggaagcagagctggggtgggtatttgggctggagcttggcgaggacagtggccgtggcagccttgtcccatgtcctggcctcccagagtgtgcatcagagatagccacgggggaggaggggaggaggagggcaggagacacagacattgtgaggagtggggagtgacagacgcagggcgggtggcacacacagaatctgagaaggatgcagagggaggctgcgagggggaccgaggggaccacagaaggagtgaccaacagagagaaaggcagacacatacagagggagcgagcgaggagagagacagagacacagagacccagagagagatgagaagacgcaaagggagatcg

SEQ ID NO: 737695 - DNA, 639 bp, Homo sapiens
gtagctgggattacaggtggctgccactacactgggctaatttttgtatttttagtagagacggagtttcaccatgttggccaggctggtctccaattcctgacctcaggtgatccatctgcctcagcctcccaaagtgtgggtgatgtgggtgagatatggaagaggacttggccccaagcttgcctggagggggcagggtcccttctcaggggccgtccttcttccccgatggtggggactggggatgggaggtgatggaggtagaggagggtcggtgcttctggaagcagagctggggtggrtatttgggctggagcttggcgaggacagtggccgtggcagccttgtcccatgtcctggcctcccagagtgtgcatcagagatagccacgggggaggaggggaggaggagggcaggagacacagacattgtgaggagtggggagtgacagacgcagggcgggtggcacacacagaatctgagaaggatgcagagggaggctgcgagggggaccgaggggaccacagaaggagtgaccaacagagagaaaggcagacacatacagagggagcgagcgaggagagagacagagacacagagacccagagagagatgagaagacgcaaagggagatcg

SEQ ID NO: 737696 - DNA, 549 bp, Homo sapiens
tatgttgttcatcacaagaagattcttgacagttatattttcattgcggaattgtggattttatcttttgtcaagataaaatggctattttcccccagtgaatgctttttactttgcatcctatttttttcatattttaatattgctatccctgctttctttcgtttgtattcccttgatatatctcttactagactttttattttaacttctccatgtctttttgttaggtgaatatctggtaagaacatagagttagctttatttacttattttttggtacaatccgagagtcttaaacaaatactatttatttctataacaaatacacttggcctcacttctttcacttctttctttttgttgaatgttcccaatttttagkttttttttaatcttttactatatagattaggttttgcttctttttttctttactaatgttttaaaaagcatgcatactgatattaattctgtttttaatacttggacttccatttttgttataattatgaagaacaaaacagcatatattgcatatttcctggt

SEQ ID NO: 737697 - DNA, 627 bp, Homo sapiens
tgaaaagtttttcaaaaattaatgttagccctcactcctcctaaaacaggttcctcagcccagccccacccctgggaattctttgccagccatcttgctcacatctcccttctcccagttcccaggctctgacacgcctgtctccctcacctgccagggaaraactcagtgcagaggaatttagttctcaacctctaccctcatctaggctgcaggatgaatccaactagaaaagacttattaatgacctaaaccatggagccaagcagcccaggagaaattcctttgcttccttacaaccacaaaaattgccatgggcatttttttacaagcaaaatttgtcttccctttacagagatgtcagcatattccccttctaccaccctgagttatcccttccatcttctttgcttgaaagtggtggttgcagctcacttcctttgccaaatctgggaagcagtgacttgcctaagagattgttctagtgcttcagctcaggcttgagggtcccttggctgagccaatcctcagacctcagcaaagcctggatggaggtgtatgggggaatgggggtaagaggacaggggaggaaggaacagaaatatggtggtgagatgagagtaagat

SEQ ID NO: 737698 - DNA, 618 bp, Homo sapiens
atcacaaggatccttataaaaaggaggtagaagggtcagagttagaggaagagatgtgaccaaagacagaaaggtgtgaagttgccacactgctggcttcaaagatggaagggaggggccaggagcccaaggaatgaggacagcccctagaatctggagaaggcaaagaaaccgattttctcctggggcctccagaaggaacacagccatgctgacacctagattttagaacttctgatccccaggaactataagataataaatgtgttgttttaaagccactaagtaattgcagcaatttgttacagcagcaattggaaactaacraagtcctgaagagcagctctcaaccttgggcaattttgctccctcaagggacatttggcaatgtctagagacattttcagttgttgaaactctaggggtgcaactagcatctagtggatagaggccagggatgctgccaaacatcctaaaataaacagaacagtcccctgcagtgaagaaggtccggcccaatgtcagtgccgaggctgagaaacccagctctagaatgaatctggtggaatttctttcttttgttttttgagatggagtctcactctgtcgcccaggctg

SEQ ID NO: 737699 - DNA, 548 bp, Homo sapiens
tccaaggctctttgaaaaaatcagcagaaagcaaagttggggtcaaagccctgctgaacaataaagtttatgaactgtaactttgttgtaattcacgcccagggtcctgctgagacgcaccgtttcaggggccttgactgagacatagctgctttgcaaatgctagttcctgccctgaaacttccatttcatacaagagggaccccagaggagactgtcctggatcaggaatcagcaaactaggacctatgggccaaacccagccctcagcctattttcttaaataaagytttattggaaaacagccacacccattcatgtatgtattgcctgtggctgctttcatgacaatggcagaatcctagaccccgtgggaggacagccaagaagcatcagagcagcctttgggcagccttggtgtgggtgaggctgagcgcttgctctttgtcaagcattcagcgtacttgatctcatttcaagcactctttccccaaatatttatagagcaccagctgtgagccaaacacacttctagaggctgaagataa

SEQ ID NO: 737700 - DNA, 508 bp, Homo sapiens
gaggccgggaggactggagtggagtaagtgagaagagtaatgggatgtgaaggcagaggggcacatggagtcgattacacactccacagtaaggaccctgcctttactaggagggagctaagaggccactggtttcaagcagatgagtgaaatgatacgtttggtttatttatttatttatttagtgcaataggtagtgatctcagtccacaaacacagaaagaaaatgaacatcacttcattttccataagacatctctcactcatytctcacaggagagaaatctcatctcagtccttaccatgcctcctaccttcatctgaggtcactcttgaatgaggacagtgtgtataaaggccgtgacatgaaggcctacctctaactgaattgtgtcatggtcaatacaacaatcaccaatgtccttttcatctgatctgtaagaggtcctgtgtcgtgaatggggtacggcttgagacccctgtcctaggatcctatctttttctgcaa

SEQ ID NO: 737701 - DNA, 508 bp, Homo sapiens
gaggccgggaggactggagtggagtaagtgagaagagtaatgggatgtgaaggcagaggggcacatggagtcgattacacactccacagtaaggaccctgcctttactaggagggagctaagaggccactggtttcaagcagatgagtgaaatgatacgtttggtttatttatttatttatttagtgcaataggtagtgatctcagtccacaaacacagaaagaaaatgaacatcacttcattttccataagacatctctcactcatctctcacaggagagaaatctcatctcagtccttaccatgcctcctaccttcatcygaggtcactcttgaatgaggacagtgtgtataaaggccgtgacatgaaggcctacctctaactgaattgtgtcatggtcaatacaacaatcaccaatgtccttttcatctgatctgtaagaggtcctgtgtcgtgaatggggtacggcttgagacccctgtcctaggatcctatctttttctgcaa

SEQ ID NO: 737702 - DNA, 628 bp, Homo sapiens
cccaggccatcctgctgaaggacgacaccatcaggaagaaacaggtagtgacatgaaatgggcacctactatgagccaagggctgactcttggtgtctatttcttcatttaatgatcacggggacgctgtgagctcctttcacctctcactgcctcaatttccttacctgtaagtggcgacgataattccttcctccaggactattgtgagagtttgagagctagtttggagaaaaagtaggccaattaaccagctcccctgcatgcaaagcttgttatttctctgtgacagaggcagctctttaaaatcttaccgtgcacgttctgcaggacacctttcyctggatttttctttcacgcaaaccccattcagttcctactgtgctctgcttgcctctcctgttgttgagaggctcaggaaaaacaactggaactaattcaccactctggcttgatgaagtcacttcctgctgctctgggcattggcctctggaacaatcaaccgctgtctggtgggaattctattaacatgactgtgactgtcttactttggacagtcttactttggattgcccccgaagcagatgctgagacaagggttagggtgaaaatagtttagttgggagaa

SEQ ID NO: 737703 - DNA, 613 bp, Homo sapiens
aaatgtttgttgtgggtgtttgttgactgcttaaccaacacgcatgccctccctgcccgtctcctccggggccctgtggggaatccaccctcccccatcctcagccatgtggcttggtgcggccgaccctgctctcagcaggaggtgcgccccatggacttgaacccaagtcttgtgggtctagcagtagaacacaggctcaggacggaggttgctgtgtggccgtcaggagtgggcagccccagggtaaagctggtatcagaagaggcagagcccaacttgaagggtcttttgaaccctgaaatgaggccctgggaaagcaaggcccatgcgtgcttcaratgaacatgctcacgggtaatgagccaaggagccgtcattcaacacaccctggcctcttcatttggttctgccttggaaaaacggagccatcagtgaggcagcgtcattcttctggggtaatacccaaagtttgttgcctcctgccaaggaaatcaaggacagggacacacgtggagtgaggttaagagtggaggtttaataggcaaaagaatggaaaagagaatagctctctctcctgcagagatagaggggtgcctgagtgggtcttccg

SEQ ID NO: 737704 - DNA, 561 bp, Homo sapiens
aattttcataagtttggtatgttttgtatgtttccaggaatgtatatatttcttctaggttacccaatttgttggcatataattgttcataatcgtcctttatgatccttttaatttctgaggtgtgcattgtgatgtttcctcttctatttatgatcttatttattcaaattttctcttttwtctttagtctagctaaggatttgtcaattttatcctttaaaaaaccaacttttagtcttgttcattttttcctattgtttttctattctgtatttgatttattgctgctctaatatttatttcctcgtttatgttaactttgggcttaatttgttctttttccttagagtataaagttaggttgtttatttgaggtgtttcttcttttttaatataggcatttatcactgtaattgtctctcttagtacttcctttgctgcatctcataagttttggcatattatgctttcattttcatttgtctcaaaatacttttgaaattccttcggatccctctttgaccgaatgactgttcaaaagtgtgttgtctagtttcc

SEQ ID NO: 737705 - DNA, 670 bp, Homo sapiens
tgttagttccccctaaggctcagggcatatgaaatagtttgaacctggcagcccaaaccatctctacggggcccgtattaagtctttatatgattatcaaacgcgtcatattccccatctatttccatttaaaagaacgggggagtgatggcttttaaaacaagccaaattaccactaaattcagcagcatgttttcatgacttagcaacttatataaagtatgtttgagcctgccagtgaaaaatgtgatgtgggttgccaagaagacacacagatatagaaccaggcataacagctgtaaaattaaaatggaatagactaagataatgatttttcataggctaagatatatcatgtcccagcctgtcttctccttcagtcctctgtaagatagatgttccaataatgccagctgattcaaaattgaaatattgttcaaaatatgyttagattgatttttttaaaaaattgttattcagccccagagtgaaatgactactgaactactgaatttatagcccccaaactgagggtgggaggggctctgaactgaacttcagaaagatacctcagcctgtggtctttctcttttcatagctcaaccaagctctagactgcaggggggatatagtaaggttatttagattgattctacttaaaagatgctag

SEQ ID NO: 737706 - DNA, 633 bp, Homo sapiens
ataatgaattctgttatactgattatttttaattaaaacagaccttctcttgtttgaggggttagtgttttatttgctagtttttatggctatagcctatttgaataatcatctccagttctttccaattggaactttctcattcaagagtttcttttttgggggcgtgcagaggggggtgagcatcaggataaatagccagtgcatgtggggcttaatacctaggtgatgggatgatttgtgcagcaaatcaccatggcacatgtttacctatgtaacaaacctgcacatcctgctcatgtaccccggaacttcaattaaaaaaawaaagaagaaaaaaaaaaagattgtatcctctactcaaggaagatgggaaaatgctgtttgatttaatctgccatctcactaggtgagcatcacattagtcattgctgctcctgtcaccttctggtaatgatcatgcttcatctatttttatttccctgtcattactctcttgttttttctcctggttttacctaatagataaatgccttctaaatgattttgttgtctcacagtttttttttctgaatatttagccctgtttattcccagaaaggggcacttaaaaatacatatgaccctaatcat

SEQ ID NO: 737707 - DNA, 633 bp, Homo sapiens
ataatgaattctgttatactgattatttttaattaaaacagaccttctcttgtttgaggggttagtgttttatttgctagtttttatggctatagcctatttgaataatcatctccagttctttccaattggaactttctcattcaagagtttcttttttgggggcgtgcagaggggggtgagcatcaggataaatagccagtgcatgtggggcttaatacctaggtgatgggatgatttgtgcagcaaatcaccatggcacatgtttacctatgtaacaaacctgcacatcctgctcatgtaccccggaacttcaattaaaaaaaaaaagaagaaaaaaaaaaagattgtatcctctactcaaggaagatrggaaaatgctgtttgatttaatctgccatctcactaggtgagcatcacattagtcattgctgctcctgtcaccttctggtaatgatcatgcttcatctatttttatttccctgtcattactctcttgttttttctcctggttttacctaatagataaatgccttctaaatgattttgttgtctcacagtttttttttctgaatatttagccctgtttattcccagaaaggggcacttaaaaatacatatgaccctaatcat

SEQ ID NO: 737708 - DNA, 538 bp, Homo sapiens; identical to SEQ ID NO: 736562

SEQ ID NO: 737709 - DNA, 628 bp, Homo sapiens; identical to SEQ ID NO: 736563

SEQ ID NO: 737710 - DNA, 573 bp, Homo sapiens
atcagccattatcaaacatcaaaatgtaagaagaaagggccttctcctgtggtagtgattccctccacaggtataacttatttctcaagtaagttacagttcccattatttcaaaagctattgtgacaacttccaaatccccttccttaaattaatttaaattaatatataaacacaattgatgtcgagatmtttaaaaactgttttattgactttactgaggcacactttccataccataaagttcacccattgtaaatatagaattcaataactttttgtaaattttcagagttgtgcaggcatcatcacaatcccattttagagcattgccctaactcccttatgttctgttctcctgcgtatcggaggctctaggtcctagacttcaaaatctctcaccaatatagccattctagcttgagttactgatctctccagtgtttatgctcacttgtagtgactccccatccccacccctagtcctagggaacaactgacctgctttctgtctctgtaaatttgcctgttctggactttttatatagttgcaatcatacaatgtatagtctt

SEQ ID NO: 737711 - DNA, 606 bp, Homo sapiens
taaagatttctaaacaggttaattgtaaagagaacacattataatcacactatcaaaaaacaaaaaacaattaattttgaaaatagtaagagcaaggagacttgtcacatgcaaggaactctccaacaggctagcatcagatttgtcagtacaaaccttgcaggccaagagagagttggatgatatattcaaagtgctgaaagagaaaaaaaaaacctgtcaaggatgaatgctttacccagaaaagatgtccttcagaaatgaaggagaaattaaaactttcgcagacaatatctcagagggtttatcaccactagacccgaaacaataaaagggagttcttcaagctgaactgacagtataccaattagtaacatgaatacataagaaaatataaaactcacyggtaaaggtatgtatgtagtcaaaatcagaatactctaatactgtaataccagtatgtaaattgcttttaaactagtataaaagttaaaggatgggtggctgagcacaggagtttgaggctgcagtgagctatgattgtgccactgcactccagcccaggagacagactgagactttgtatcaaaaaataaaaagtgaaag

SEQ ID NO: 737712 - DNA, 508 bp, Homo sapiens
gggtaagtccctgagaatgggcaggacccattcagctcagctacagggggtgggtgtgaagtctagggttagtttgttgaggtggatggtagagaaaatccagctcaccatgtatcttttggaactccaaactccaggtttgccttccccatcacatccaagagttgtagagagtagaaactggtcacaagtgacagtctagtccagctagggaaattgaaacagtgtcagcaacagagacatcacacaatggtactcagccagaggaggaatggttatcagagaaggcttcctgctatggttaagaggcagcccagaaatggctttggaatgccgcttcttctattcacttccttygggttatgtttggtggactccgacccttgctgggactgactgggaaatgttctccctccaagccccactcccattcccaaatcctttgttcctcaaagagctcatatcctgctctccaggcccctgacccatctttcccatcttgctttgt

SEQ ID NO: 737713 - DNA, 631 bp, Homo sapiens
atctgagatttgaagacagatgcagaaagaagccttcttggagtttcccttctttgactaaaagcagcaacttttggaaaatgaagcttgtataaattgccacttcagactgaatccactcttggaatgaaaaatgcaaataaaacttaccccagttctcttcctggagcagtgttatggccctaaagtggatagaaagaccaatggtatctgcataggcaaacattatcacaaactttcttatctctcatttgttcttttaaaaacccatttgtctttcctaaagaaaccctcatatccttcccattggagcctttccccctccttcttttccctactaagttaggtgtatccaccccaaattttaaccaccactttgacttactaatccttgagcacctcatgtgtatgaatatagctacatcaataaatttttatcctgcttctgcctgttttcaatttaattcactgacytgcagatactgaacataggaagatagaggaaaagatatttttcctctcggatatagtagttataggcatatttccaaatacaaattgaagtatggaactcttaaagcacaatggagaaaagtgtgctgaggggtcatcacataggagaaaagaataa

SEQ ID NO: 737714 - DNA, 493 bp, Homo sapiens
ataaccacagatacaagaaggtggctaggcgcattgaaccttgcctataatcccagcactttgaaaggccaagacaggcggttgcttgagcccaagattttgagaacagccagagcaacatgatgagatcttgtctctataaaaaatattttaaaaattagccaggtgtggctgggcatggtggctcacgcctgtaataccagcactttgagaggccaaggcaggcagatcacctgaggtcaggagcttgagaccgrcctgtccaacatggaagaaaccccatctctactaaaaatacaaaattagccgggcgtggtggtgcatgcctgtaatcccagctactcgggagactgaagcaggagaatcgcttgaacccgggaggcagaagttgcagtgagccaagatcgtgccattgcactccagcctaggcaacaagagcaaaacctctatcaaaaaaaaaaaaaaaaattagccaggtgtggtggcataagtt

SEQ ID NO: 737715 - DNA, 601 bp, Homo sapiens
taagttatttagcactaggatgagagccaaacttcaatctgtaagttcagggctgtctctaccatgtcataattgtcatcttatttccattttattagactacagcccatgtttagttatattcttccatgtttcttggatccacttctatttcatcattatatggttagaaattgaattgtgaagcatgtttattgttaactatattataaatttattctgagattaattagtacatgtttgctaaacactgtatacttctgatgctttgatgctactcaattaaagaaacttttgtttctttaatcaaaaatgctctstcagttttgaaagcattcatgtttattaagtccatgtcatgggttctgtcctagaaatatccagtgcttcctaaaaatatccagtgttcctcagtcttgtagtctgtccccaggttgtaggagatcagtcagggtggtgggaaaagttataagaaacagttatagggaaagatgcaaaccttcttggaaggccgggaggttttgcaaatgcttcagtaaagaattatggctgaaggcagccaaattctcctatccggctgctgagagcaaagggcagataa

SEQ ID NO: 737716 - DNA, 616 bp, Homo sapiens
aagaaatgcgaaggtaagggtagaaggtggacaggaagacaagcaaaagtcaagccatagggaatgggattaaaacaaaacaaagcacaaaaacttttctgaaattcatttgatggcaatatatttattttaaagggaaaagttctttggcagtcagactgggacaggattaacagggaaaaggtgtgtgaatgattgtcttctcttaaacgtgatattccttgactctgctctggttcacaaggaagagtgtatgagatgaaataagaagaaaaaaatgtgcgagcccacctaccaaaatgaaataaattcagagctaacatgattttttcctgtggcacaaaagaatatgttttccmaattgccattaatttgaaatcctggtagacttgcaggaaggtctgtctatctgccatccatctctccatcaaaaatttacctattttttttttgataaataacttgcactttcagccaacttgtcaacctcacactgaaattattattttttaaaattaaatttaattttactttaaattctgggatacatgtacagaacatgcaggtttattacctaggtatacatgtgccacggtggcttgctacacctatcaac

SEQ ID NO: 737717 - DNA, 529 bp, Homo sapiens; identical to SEQ ID NO: 729133

SEQ ID NO: 737718 - DNA, 539 bp, Homo sapiens
acttggctcatgcccacttggatcccacacctgccatggctccacactcagcccatggctggactgggtgtgccacgagtggcttctgtgttgggtgctggcatctagatgaggggaacatggtggcacccaaaaacttgggaaataccatcagttgtggagctccaaggggtgttatagctcttgtttggggagtcctgagatctgagtccccagcactgtctcagctcttcactcctgtagcttggtgagtgggagcgtgttacagctctctttctcctgtagtctggtgagcgggagcgtgttacagctcttttattcccgtcaccygcagcttggcgagttttgggttcttgtcctgcaaccaagaggaatgaggtgtgcaggtaccatagagtgagtaaggcagagaagaattttattgaatgacagaagggaaactctccactgcgagaggggaccctgaaagtggtagccatctgtgaggctgagtctatcatttttatgggcttagaatgggggcatgcctgccgattggt

SEQ ID NO: 737719 - DNA, 646 bp, Homo sapiens
agagaatcactggtgtgaaggaaaacacttcaaatccacataaagtttttcccagttactggctatgtcaccttggacaaattgtgtaacctctgagccccagattccttttctataaaggatgcatagtaatacctatgctctgtttcggaatttattcttgagtcrattttaataacttattttattttttgagacagagtctgttgcctaggctggagtgcagtggggcaatctccaatctccaatctccactcactgcaacctccgcctacaggttcaagcaattctcgtgcctcaacctccatagtagctgggattacaagtgtgcgccaccacgccttgctaatttttgtatttttagtagaaatggggttttgccatgttggccaggctggtcttgaactcctgacctcaggggatccgcctgccttggcctcccaaagtgctgggatcacaggcatgagccaccatgcccagtgtcctaataacttagtctcttaaagaatcaactatttcattcatattttcaaatgtgtaggtaaaaagttacttcttatagattattaaaatctgtgtatatgtaattaagcctctcttccccattctcccatttctaaattattgtttttctacattagactcg

SEQ ID NO: 737720 - DNA, 470 bp, Homo sapiens
aagatatgttgaagtcctaagcccagtacctcagaatgtcaccttacttggaaacagggcctttgcagaggtcatcgagttaaactgagggcattaaggtgggctctcacccagtaaaactgtcacccttagaagaagaggagatcagaaaacagagacaaacagtaatagagggaagatgatgtgaaaagatacagggagaatggcttgtgcagatggaggcagagactggaattaccctgccacaggccaatgaacatctagggcyaccagaagctgaaagaggcaaggaagggtccttccctacacattttaaagggagtatggccctaccaacaccttgatttcagacttctagcctctagaacttggaaacaataaatttctgttgtcccaagccacccagtttatggtactttgctacagcagccccagaaaactaataccacagcagaaaaggctaaagcccc

SEQ ID NO: 737721 - DNA, 564 bp, Homo sapiens
agagggtgttattaagaattactctgagaaacctctaggatatatagccaagcacctgtctagccaagggagcctttcaagcaagggagtgacacaatcaaatttgcttatttaattatttatttatttatttatttatttatatatttatttatttgakacggattttcacccttgttgcccctgctggagtgcagtggcgcaatctcggctcactgcaacctctgcctcctgggttcaagctattctcctgcctcagccccccaagtagctgggattacaggcacgcaccaccatgcccggctcatgttttgtatttttagtagaaacggggtttcaccatgttggccaggctggtctcgaacccctgacctcaggtgatccgcccacctcggcctccaaaagttttgggattacaggcatgagctaccttgcaggcccaaatttacattttttaagccctccagcaaatgggtggggaatgcattgacagggaattaatccagtcaagctgctctcagaactaacagtgatttaatttgggtgatagagtggcaacatggc

SEQ ID NO: 737722 - DNA, 599 bp, Homo sapiens
caaagcatcaactaatagaattcagaaagaaaaggaggtactcatcaaggcactctgctaaggtttgactaatgggattccacatggtctgcatgtttatggcttaaatgagctaccaacactgaaactgtccacttaattagcccccaaaacaagaagtacagactgtgagtctgagacctacagagactccaaaaacagaaactaccatcgcctcaagctaatcactctaagtcctagaaatacatctgaggttgcaaacagtccatttcattcattattttatatatatatatatatctctatayagatatagataaatatatatacagatatacatatagagagagataaaacagaaaaaatctaaatgtctaaaggaccagatataagttaatcataaaacgatgacaacaaaaacaaaggcttcttgagttaaaaagaatggaaaatatttaactagagttaaaaagaaaagcaatttgatcaagagtcaggaattgtaggttctagtcctggctctttttattctttttatttattcctgttttttttttcatttcttgtatatacttcaaaaaggcaaaatatttataaag

SEQ ID NO: 737723 - DNA, 599 bp, Homo sapiens
caaagcatcaactaatagaattcagaaagaaaaggaggtactcatcaaggcactctgctaaggtttgactaatgggattccacatggtctgcatgtttatggcttaaatgagctaccaacactgaaactgtccacttaattagcccccaaaacaagaagtacagactgtgagtctgagacctacagagactccaaaaacagaaactaccatcgcctcaagctaatcactctaagtcctagaaatacatctgaggttgcaaacagtccatttcattcattattttatatatatatatatatctctatatagatatagataaatatatatayagatatacatatagagagagataaaacagaaaaaatctaaatgtctaaaggaccagatataagttaatcataaaacgatgacaacaaaaacaaaggcttcttgagttaaaaagaatggaaaatatttaactagagttaaaaagaaaagcaatttgatcaagagtcaggaattgtaggttctagtcctggctctttttattctttttatttattcctgttttttttttcatttcttgtatatacttcaaaaaggcaaaatatttataaag

SEQ ID NO: 737724 - DNA, 598 bp, Homo sapiens
caggccctccagaacctttgctatggtttatttattaccctatatgtctccttatagcatttatctttattttagttgaaaaaaaatattttaagtgtgttagtcatttaatgtctgtttcacccaacagaatgttagtgactttagacagggaccatgtcttagtcatcactgtaatccccagtacctagtaaattgcctggcaaataataggtgcttagtgaatatttgctgagtgaatgacagctttctgaagagaagtttgaaatgatgcagatactctatcacctggcatgttctgctcggagatgctggttagcaagctgcaactataagtggcttatacagttaagacaaaagtatttcttataatcagaactcctgacttagagtggtttcagggctggttaattccagaacccaggctcttttcttttttttttttttctacacagggccytgctctgtcattcaggctggactgccatgccatgatgactgttcactgcaacctcaaactcctgggctcaagtgatcctcctgcctcagcctcccaagtagctgagactacaggcatgcagcaccatgcctggctaat

SEQ ID NO: 737725 - DNA, 603 bp, Homo sapiens
cagggtaggctctgacacccctacttctctccagcattaactccagaacctgtggaaggccagctagctccataccagggcactgacactgaagacatgataggcacctttctgccctctacggatggaaggggccccctgctccttagcacagcataccttaatggttaataaccttagtcagattcttattattattaytattattattattattattactattatttttgagacagagtcttgctctgtcacccagattggagtgcagtggcctgatctcggctcactgcaacctccacctcccaggttaaagcaattctcctgcctcagcctccccagtagctgggactaaaggcgcatgccgccacacccagctaatttttgtattttcagtagagacggggtttcaccgtattgcccaggctggtcgccagcttttgagctcaggcaatccgcccgccttggcctcccaaagtgctgggattacaggtgtgagccaccacacccggccaccttagtcagattattaattgacacattggtgggaagctgaggaaagaagtggctacttcccagtgctttgatcatttaaaaaaatta

SEQ ID NO: 737726 - DNA, 540 bp, Homo sapiens
cagacatatgaagacagaaaaagaattcattgcaactccactgaaatcaggctgataaacatctgccctagagctcctctttcagccagttggagaggttaagaaaagtaagcatcactttgcactttcatgcgtgaagaaaatattattattgttgttattaatagcagcagctaacatttaattgagcacttaatttattccacaatgggttaagactttatatacacagagttgatgtgtttaatagaaccacctgtatctctgaatagagatattatgatgtgcatkttacagatgaagaaactgaggtttaaagaagttaagaaacttgcccaaggtcataagatgtatctgattctaatctttgccactataatacagcatgttttatagccgtggttatgaactggggacgatttgcacccccaagagacatctggcaatgcctggagacattttggttgccacaaacatacttgggtcacccctcccatatgagagggtaatagactcaagacacattctgggaagtcaggg

SEQ ID NO: 737727 - DNA, 664 bp, Homo sapiens
ctgactctgagctcaccagctgtgcaattcgggtgagttccttcacccttctgagccatcccttggctcgtctggaaaatgcaaaaaaaaaaaaaagaaaaacaccaggtttttgcatcctcctggatgagggatataaagtgcctgacacagcatatgacagggatttgataaatgggggctgttagctgtcccattgtggatgtgagaatagcattctgctggctaaaaggcagacatgaatgttctagaacatggcgatcccggaatgtgcagtgaaggcaggaagaggaagaatgggcagggaagaacaagttgggatggaggaatgaactcttatctccagaagcagagctaagaatgcccacggagccttggcacatgacagcctccgctgagccaaatggcccaaagacttctgaatgagcttttgctgcaacaaaaaactttggatcattttgagagcctcccgtgaggygccaatatgttgcagtaccttcccggccccgacactgatgtgattcatcgtaggtaacatatgaatacgctcaagctggccagcagcttgaaaaattggagtctatcaaattgaccttgagaaacacaggaaggtaatatttagtgacataccagatgaaatccttgcgcagagatgtgaggtgag

SEQ ID NO: 737728 - DNA, 500 bp, Homo sapiens
catggcttacccctacttcattcaggtctcagatcaaatgtcacaactttggaaggctccctgctgatgactccatcacactcacgctatcattccccccaccttcctctgctttacagtcctttatttactgacattatggcaaatattaaacttgattatggtctatttttcctacctagaaggtaagcctatgagggcagggattctgtttcgtttaatactatatccttggtcccaagactaakgcaagcccttagtaaatatttatgtagacacgtatcaacatcaacttctacatagacagagaaaagtaagaaattagagatagggttaaagcctccttctttctaatcttaacaaccataagcataacagtctcctagttgcaatcatgggcgttcaccacgttttatttttcttaataaatgagttaaaggaagaaacattctcaaacccctgactaataaagcagatgacactgacaatgaactacaaac

SEQ ID NO: 737729 - DNA, 500 bp, Homo sapiens
catggcttacccctacttcattcaggtctcagatcaaatgtcacaactttggaaggctccctgctgatgactccatcacactcacgctatcattccccccaccttcctctgctttacagtcctttatttactgacattatggcaaatattaaacttgattatggtctatttttcctacctagaaggtaagcctatgagggcagggattctgtttcgtttaatactatatccttggtcccaagactaaggcaagcccttagtaaatatttatgtagacacgtatcaacatcaacttctacatagacagagaaaagtaagaaatyagagatagggttaaagcctccttctttctaatcttaacaaccataagcataacagtctcctagttgcaatcatgggcgttcaccacgttttatttttcttaataaatgagttaaaggaagaaacattctcaaacccctgactaataaagcagatgacactgacaatgaactacaaac

SEQ ID NO: 737730 - DNA, 500 bp, Homo sapiens
catggcttacccctacttcattcaggtctcagatcaaatgtcacaactttggaaggctccctgctgatgactccatcacactcacgctatcattccccccaccttcctctgctttacagtcctttatttactgacattatggcaaatattaaacttgattatggtctatttttcctacctagaaggtaagcctatgagggcagggattctgtttcgtttaatactatatccttggtcccaagactaaggcaagcccttagtaaatatttatgtagacacgtatcaacatcaacttctacatagacagagaaaagtaagaaattagagatagggttaaagcytccttctttctaatcttaacaaccataagcataacagtctcctagttgcaatcatgggcgttcaccacgttttatttttcttaataaatgagttaaaggaagaaacattctcaaacccctgactaataaagcagatgacactgacaatgaactacaaac

SEQ ID NO: 737731 - DNA, 527 bp, Homo sapiens
ttgcaagccggctgcaaaagacaaaagacaccagagacttagaaaccagtgaagccacgctgaagatgcagacagagagctagagacaaggtcaggggcctctgttgcactccagacccggtccggaggcttttccatgcttaggggcaaggattgtcagggttctgctgtccctttctttaacctcctttatgattccccaagagcatcctgagtgcacctccactccctgccaccaggggtcagatgagccggcctggcaggcttgtttccctccaccagacaacagcaaggaccaagaytggcaaagtgacacatcctctccaaaagaagaacatgcagaacaaatcaaagaacacaaaccacgactgacaaacacagccacactcgattttaaagtactgagctgtttgaagaaaggaagcatggcaaggccccttcctactaataacagtaacaacaataatactaaatattttataataattttaaattcttaattatttatgatatttccctccattaac

SEQ ID NO: 737732 - DNA, 587 bp, Homo sapiens
tgagataaataagacaagaaaagtaaataaaaggcacacaaattgggaaagaataagtatgcattctttattagcaaattacataatataatagaaagtcttacaaaatcaacaaaacaattcctggaaccaataaatgtgtgtagccaggttacaagatacaatgttaatataaaaggctaatttccttcctatgtattagaaacgcatgattaaaatttgaactctcataaaataccatttacaatatatattaggtcattttgcattgatataaaggaatacctgaggctgggtaattyaaaaagaaaagaaatttaattggctcacgattctgcaggatgtacaagtatggcaccagcatctgtttctggtgaggggctcgggaaggttataatcatgatggaaggtgatgggcagccagcatgtcatacgaccagagagagaacaagagagagtgaggggggcggtgccacgcacttttgaccaaccggatgtttcatgaactaactgagtgagaactcacttatcaccaaggggatggtactaaactattcatgagggatccacccccatgatctaatcac

SEQ ID NO: 737733 - DNA, 587 bp, Homo sapiens
tgagataaataagacaagaaaagtaaataaaaggcacacaaattgggaaagaataagtatgcattctttattagcaaattacataatataatagaaagtcttacaaaatcaacaaaacaattcctggaaccaataaatgtgtgtagccaggttacaagatacaatgttaatataaaaggctaatttccttcctatgtattagaaacgcatgattaaaatttgaactctcataaaataccatttacaatatatattaggtcattttgcattgatataaaggaatacctgaggctgggtaattcawaaagaaaagaaatttaattggctcacgattctgcaggatgtacaagtatggcaccagcatctgtttctggtgaggggctcgggaaggttataatcatgatggaaggtgatgggcagccagcatgtcatacgaccagagagagaacaagagagagtgaggggggcggtgccacgcacttttgaccaaccggatgtttcatgaactaactgagtgagaactcacttatcaccaaggggatggtactaaactattcatgagggatccacccccatgatctaatcac

SEQ ID NO: 737734 - DNA, 621 bp, Homo sapiens
tttattcatctccatacaaaatgagagaatattattggaacatgtttatttaataagtagaatgtgtgcttcgacacaacctgggcctaagttaaaaatatagctttactggctgggtgcggtggctcacgcctgtaatcccagcactatgggaggccaagaygggcagatcatgaggtcaggagattgagactatcctggctaacatggtgtaaccccatctttactaaaaatacaaaaaaattagccgggcgtggtggctggcgcctgtagtcccagctactcggtaggccgaggcaggagaatggcgtgaacccgggaggcagagcttgcagtgagccgagatcgcgccactgcactccagcctgggtgacagagcaagaccccacctcaaaaaaaaaataattatacacacacacacacacacacacacacacacacacacacacacacacacacatataacaaatatgtatagctttactgcttaatagtcatgtatcatttttgagcctcagtatagagtcatctgttacaatgggaatggtactcttcaaatggttatttggagaaatattttcagtatattgaagcccctcggtcacattgagtgtgtatgct

SEQ ID NO: 737735 - DNA, 621 bp, Homo sapiens
tttattcatctccatacaaaatgagagaatattattggaacatgtttatttaataagtagaatgtgtgcttcgacacaacctgggcctaagttaaaaatatagctttactggctgggtgcggtggctcacgcctgtaatcccagcactatgggaggccaagacgggcagatcatgaggtcaggagattgagactatcctggctaacatggtgtaaccccatctttactaaaaatacaaaaaaattagccgggcgtggtggctggcgcctgtagtcccagctactcggtaggccgaggcaggagaatggcrtgaacccgggaggcagagcttgcagtgagccgagatcgcgccactgcactccagcctgggtgacagagcaagaccccacctcaaaaaaaaaataattatacacacacacacacacacacacacacacacacacacacacacacacacacatataacaaatatgtatagctttactgcttaatagtcatgtatcatttttgagcctcagtatagagtcatctgttacaatgggaatggtactcttcaaatggttatttggagaaatattttcagtatattgaagcccctcggtcacattgagtgtgtatgct

SEQ ID NO: 737736 - DNA, 575 bp, Homo sapiens
acctgccctggagacattttccccattgtcttgggaattaacatttggttcttcattacttatgcaaatttctgcagccagtttgaatttctcctcagaaaatgggattttcttttctatcacattggcaggctgcaaattttccaaactttcatgctctgtttcccttataaaactgaatgcctttaayagcacccaagtcacctctttaatgctttgctgcttagaaatttcttctgccagataccttaaatcatctcaagttcaaagttccacagatctttagggcaggggcaaaatgctgccagtctctttgctaaaacataacaagagtcacctttgctctagtccccaacaagtttctcatctccatctgagaccacctcagcctggaccttattgttcatatcactgtaagcatttttgtcaaagtcattcaagtctctaggaagttccaaacttttccaaatttccctctcttcttctgagccctccaacctgttccaacctccgcctgttacccagttccaaagttgcatccacattttcatgtatctttttcagcaacaccccac

SEQ ID NO: 737737 - DNA, 580 bp, Homo sapiens
attttaaaaaatattttaaagacatatttcacaacttctaaatttacctgtttaactcaatatgtatctatggattgagggactgactttgggaatggttatgctatcttactcaggaaattcaaaatcatttctaatataagcaacatctttagtttcctgtcctgtagctgaaatttaccaaaatgaagcacttcgagatgcagctaaaatttttaatatatttttcaggaaagaaagaaagttaagtaagtttatattrtttaatataaaaagagatgttatttgcacataagtaaatgtttttcttgatacatattattttaaaaacaatattaattaatgtatgatatatgatataaatgtggtatttatgtctatatttcatggagtagtaattaaaccactatttctacgtgactaatttttttagtccctgtaaaatacacatatactcaaccctagcactattcacactccaggtgagatgtggcccactttgggaggctctcctatacgtggtgggatgtttaccagcactgctgtcctctacccctagatacaagttgcatctaaccct

SEQ ID NO: 737738 - DNA, 621 bp, Homo sapiens
agcgagactccgtctccacaaaaaaaaaaaaaagtaaattcggtgacgtaccttgtctgacagtaggtgacaatactcccatttcagaaggggtctaccccataccctggaagaaggaatgtcgtctaacctactttgattgyaggtcacaataccccctacttcagaggagatcctgccatataccctggaagaaggggccacagaaagcatgaagaattggagccttgctctgtttctccacttcgtctgttagatcatggcctttgtgtccagtcatgtttctgtctggttgttcgtcacaactatccagtgcctaagagcacagggttcagggaacttccagagagctgaacacggggaggttcctggagggtggctgacccaagaaggtcagggaagctctgagcccctttccccacacctcaccctatgcatctcttcatctgtatccttggtaacatcttttttattttttttaattttttttagacagtcttgctctgtcgcccaggctggagtgcagtggtgtaatctcggctcactgcaacctctgcttcctaggttcaagtgattgtcctgactcaacctcccaagtagctgggattactgtgctatcac

SEQ ID NO: 737739 - DNA, 656 bp, Homo sapiens
caggtgaaaaatggaaagtacctctgattggccccctcctgcaatcagtcagattggtcaggggccaagtctttatgtgtaacttcctaacttctcttcagcctctgattggtcgcctcccacgaccaatcagactggtcatgagccactccttcatttacataaggtgtaaccaagtaaccaatgggaaacctctagagggtatttttaaatgccacaaaattctgtaaccagcactcttgagctgcttgcttragcccactcccactctgtggagtttactttcctttcaataaatctgtgctttccttgcttcattcttttgatgctttgtttgtgtgttttgtccaatttgttcaaaacgccaagaacctggacaactcatagtcaagaccctccactagtaacagactgggaacaatatcccttgtatgcaattgagacagggagaacagaacagcgatccctccaggtttttccttgcaagctcctaatggactagctacactcagcctggaagctgcaccaccacagacacttcctctcacaaaatcaaccaattaggcctgaaagaaacaaagcactttaaccgcaaacatcctggttgccaactgtagagactttccaagagaaacttccccaatgctgagtaatat

SEQ ID NO: 737740 - DNA, 556 bp, Homo sapiens
tcaaaatttgactggcccctttcttcgtttgcagaagttggatttgtctcctactccatagaagaaatagaggccatcagataagaatttcctcaacttggccaggtgtggtggctcactcctgtaatcccagcacttcgagaggccgaggcggatggatcacgaggtcaggagatcgagaccatcctggctaacctggtgaaactccgtctctactaaaaatacaaaaaattagctgggcgtggtggcagacgcctgtactcccaactacttgggaggctgaggcaggagaatggcrtgaacccaggaggtggagcttgcagtgagctgagattgcaccactgccctccagcctgggtgacagagcaagacaccatctcaaaaaaaaaaaaaaaaaaaaaaaaaaaaaagaatttcctcaacttgtgctcccaaagatgttctagtagattgattattgtcccatacatgttcacactcccttccccatgcttcccatagagcatacttccctgtccagtaactttggccttgaccatgtgacctgctttgacca

SEQ ID NO: 737741 - DNA, 431 bp, Homo sapiens
agatcatcacctagacacgtcattataaaaccctggaaagacagctaaagagagaatcttgagagcagcaagagaaaacccattcaccacagacaaaggatcctcaataagattaatagctgtcagctgggcgtgttggctcacacttgtaatctcagcactttgggaggccaaggtgggcagatcacatgaagtcaggagctctagaccagcctggcaacatggcgaagcctcgtttctactacawatacaaaaattagctggatgtggtagtgcacgtctgtactcccagctactcggagggctgaagtgggagaattgcttgaacccaagagatggaggttgtagtgagccaagactgcaccactgcactccagcctatgcaacagagctagactccatctcaaaaagaaaagattaacaggcatttt

SEQ ID NO: 737742 - DNA, 468 bp, Homo sapiens
cttgagcacaagtactgagggccctagttggggtgctatgaacatacgggggaaacactctgaattggggatttattgggggatttattcatttgttctttcaattaataaatacttcctacaaggaggccagcctcagtgactgaaatcccagcacttttggaggccaaggcaggaggatcacttgagtccagaaattcragaccaccctgggcaacatagtgagactctgtctctacaaaaaatacaaaagttatccaggcttggtggtgcatgcctaaagtcccagcaagtcgggaggctgaggtgggaggatcatttgagcctagaaggttgaggctgcattgagtcatgatcgagccactgcattccaacctgggtgacagagcaagaccctgtctcaaaaacaaaaacagttcctacagggaagcaggcaccaagatctgtggggattgaagagtcccagct

SEQ ID NO: 737743 - DNA, 468 bp, Homo sapiens
cttgagcacaagtactgagggccctagttggggtgctatgaacatacgggggaaacactctgaattggggatttattgggggatttattcatttgttctttcaattaataaatacttcctacaaggaggccagcctcagtgactgaaatcccagcacttttggaggccaaggcaggaggatcacttgagtccagaaattcgagaccaccctgggcaacatagtgagactctgtctctacaaaaaatacaaaagttatccaggcttggtggtgcatgcctaaagtcccagcaartcgggaggctgaggtgggaggatcatttgagcctagaaggttgaggctgcattgagtcatgatcgagccactgcattccaacctgggtgacagagcaagaccctgtctcaaaaacaaaaacagttcctacagggaagcaggcaccaagatctgtggggattgaagagtcccagct

SEQ ID NO: 737744 - DNA, 635 bp, Homo sapiens
ttggaagaaaggacattgcacagggggcactgtttaggcaaaggtgcagagaggggaatgtgcagagataaattagggcaacagcatgaaaccccggcatggggcactgcctaaatgcaaggctaagagccagtcacacgaggactggctgtgtctaccttgccccgcgccgtgggcatccccagcaccaagcatggtgcctggcatgcagtgaaccttcagtgtcacctgaccgagtaaacacaggactgaaggaagggaaggcgagatggatgcaaagggcccagtgtgcctcagtcttctttgggaggcagcggggaccagggacatttttgaggtggtttcctctccagggattaaccgagtttatccctcctcagttctcccaggctatgggatggatgccaagggamcttccagacaaactattctgaagtctgggcctgtgagaagcatcttgagagatctttatgctgctgtgaggattctaggacctggaggtctgtcagggcaatcaggaatgctccctggaggaagtggcagtgaggcagagctttgtggaggggcagcaggggagagagtgctgtggccaaaggaagggaaagggccatggcagggaagcaggccagacactg

SEQ ID NO: 737745 - DNA, 635 bp, Homo sapiens
ttggaagaaaggacattgcacagggggcactgtttaggcaaaggtgcagagaggggaatgtgcagagataaattagggcaacagcatgaaaccccggcatggggcactgcctaaatgcaaggctaagagccagtcacacgaggactggctgtgtctaccttgccccgcgccgtgggcatccccagcaccaagcatggtgcctggcatgcagtgaaccttcagtgtcacctgaccgagtaaacacaggactgaaggaagggaaggcgagatggatgcaaagggcccagtgtgcctcagtcttctttgggaggcagcggggaccagggacatttttgaggtggtttcctctccagggattaaccgagtttatccctcctcagttctcccaggctatgggatggatgccaagggaacttccagacaaamtattctgaagtctgggcctgtgagaagcatcttgagagatctttatgctgctgtgaggattctaggacctggaggtctgtcagggcaatcaggaatgctccctggaggaagtggcagtgaggcagagctttgtggaggggcagcaggggagagagtgctgtggccaaaggaagggaaagggccatggcagggaagcaggccagacactg

SEQ ID NO: 737746 - DNA, 575 bp, Homo sapiens
agttcacataccaaagtgatcccagtcccctgtagattctgaatctccagctggttcttgccctcagtgaaaattggttttgggttcttctcaaagcccccagacaggatgccaccctgccagttccgaatataaattcttccatcagcatccacaatagctgaggtggagaaatgacatggagtggggagtggaagaaaaaacaagggtttagaggcaagtcagctttctaaatggacagaacaaccaaacaaaaacacccattaatggctttattaatgaaagaacattcaatgaacrcaggcattcattagctttaaaataccttttgaggtcacgggggaagatcctcccatttagcctttcagtggagactgtttctctgattatcccttacctagaagctttgactagtccccaccacgtaactcccactgtgccaagcgaaagtttaacggaaagggggattgcagagcccattctaggcatgaagaccgtcaaaaggatgtgagaaccctctcctatagtgcttggaaccacgaacccacctaagtctatcgtttacctatgacatt

SEQ ID NO: 737747 - DNA, 647 bp, Homo sapiens
aaaaggtacatcttaattggcagcagacaggagacagcatgtgcaggggaaccatcagatcttgtgagacttattcactatcacaagaacagcacaaaaaacctgcccccatgattcaatcacctcccactgggtccctcccatgacatgtgggcattattacaattcaaggtgggatttgggtggggacacagaaccaaaccacatgatctacaatgcagtctgaaatttaaaagcactatctaaggctccagcattcctagggttcaatcttggctctgccactaacagggtgagtttggtcaaataactctatgtcctgatttcttcatgtgtaatatggggtgatactgctctgctactctttagcaattttatgaagatttaataaatggattaaacaatccaagtaaagaaagaggaggggctcrgtaaattgtatagacacaacggctatcttcccacatgagaatatagatgagaccattatttttaaccactctagaatattatattttatggatgaaacatggttatttagccaatcccatatgtaagcatattatcataacttccatttttttcctttcaaacaatgctaaaataatcactcttgcacccattatctttatacctttacataaata

SEQ ID NO: 737748 - DNA, 624 bp, Homo sapiens
cccattgcattcctgcagcagagaaggaggaggaagagaaagaggaggaggaaagcttccatgggcattaggtctgagtgtgagagcagtcaagacaaagcaggggaagattggagatgaagacacccttgccctctactgaaggcacagacaagacagagaattaggtcaccatgggtctccagagagtaactaattcaaccagaccctcagggtagtcaaaaatgtgagcctcttaagatcaggtcatcactggcttcacraggaaaggctcagccacaaacaatgggatattagattggtgaagaaagatcttgcagcatccaaaagaccattgatctgaacaaacatagatcagaaaataccagcacaccttttctccacactcattgcctttgaatgacacttgggagaattgtgtagaacgaaattatggcaatattctttgggggaaatttctcagtactttatggtccaaatcagaggaatgaactttctctttttttatgtagagaagccaagatagaaggcccaggagtttatagaatattcagatacattgttattgtctctcacctgactacttaatcacttcataactggacttccagcttccattcttat

SEQ ID NO: 737749 - DNA, 565 bp, Homo sapiens
ttgtgtatacataccatattttctttattcatttgtccactaatgaacacttagtttgattccatatcttgttattgtaaatagtactgcaataaatatgcaagtgctggtatccccttaatatattgatttgttttcctttggatagatacccagtagtgggattgcttgtagttctatttttatttttaaatctccacactgttttccacagtggtcatactaatttayattcccaacaacaggatataagaattccctctttcacatatctttgccagcatctgttgtttcgtgtatttttaataataggcatcctaactgggataaaatgacacctcattgtgttttttatttatatttccctaatgattaggaattttgggcattttttcatagccctgttggccatttctatgtcttattttgagaataatctatttatttccttcgcccacatttttttatttttatttgctttaagttctgggatacatgtgctgaatgtgcaggtttgttacataggtatacatgtgccatggtggtttgctgcacctatcaacct

SEQ ID NO: 737750 - DNA, 565 bp, Homo sapiens
ttgtgtatacataccatattttctttattcatttgtccactaatgaacacttagtttgattccatatcttgttattgtaaatagtactgcaataaatatgcaagtgctggtatccccttaatatattgatttgttttcctttggatagatacccagtagtgggattgcttgtagttctatttttatttttaaatctccacactgttttccacagtggtcatactaatttatattcccaacaacaggatataagaattccctctttcacatatctttgccagcatctgttgtttygtgtatttttaataataggcatcctaactgggataaaatgacacctcattgtgttttttatttatatttccctaatgattaggaattttgggcattttttcatagccctgttggccatttctatgtcttattttgagaataatctatttatttccttcgcccacatttttttatttttatttgctttaagttctgggatacatgtgctgaatgtgcaggtttgttacataggtatacatgtgccatggtggtttgctgcacctatcaacct

SEQ ID NO: 737751 - DNA, 555 bp, Homo sapiens
agtgatggggaggatctactccaagaaggtgaattgccttgagggattgcaatccctgggagagggcacttggagaactgcagccccggtgtcaggataacttgggtggggtccagtctccccacctcctttgctttgtgactccacatttgtcaatctgtgtgacactttcccaggcaactgacactggtggtgatgtcagtgggatttgactgtagaaggagggggtgggaaagttttytcctcctcctccatgaattattaagcctgggtaattctcatagtcaattctgggtctaagcttgattgattggaaagtaaatttcagattcagttattattattcagattattgagcagaactttgtatcagaaggggtgctagggactggcagatgtatcctatgtagggtcattctcccctccagactggcaggccagctagcatcctccagcatttccctagcaggctctatttccctcttcaagtctcagttgcaatatcgccactcatgcagggagatcttagcagaatagattgtcttctcccttaat

SEQ ID NO: 737752 - DNA, 495 bp, Homo sapiens
cgatttgggtgaggacacaaaacctagccatatcacctgggtaatcgggttaagatgcagggactctgtcaccaccaagaaaggaagtcttgagcaacctgaggttctcagccttgtttacagctgccctatggtagccagagacagagttctcagccctggctatagagaatcacctgggagctttcagttttcctgattctattgrtctatgaggaggtcaaggcacataaaagctccccaaatgactcttacgtgcagccaaagttgagcggcactgatccaggtgctgtgttggaggcagaatgagcatcctggtgccctgctctccaccagcacaactggacccacttagccacacagtgagaccaggccccgcccaccctgcagtagaggtgaagcccacctgaccccaaggtcagcagcccagggcacagccagggccctagatgttctccagccagctcctctgttcttctctctggctcttttggg

SEQ ID NO: 737753 - DNA, 687 bp, Homo sapiens
ccgccacacccggctaatttttgtgttttttgtagagacggggtttcgtcatattggccaggctggtcctgaactcctgacctcaggtgatccacccacttcagcctcccaaagtgctgggattacaggcgtgggccacctcgcccagcccgattctgtgaatttcaaatatgacttccgccactgcgtcattaaaaacatctaaattctgcccacacagctctctaacactcggactsgttttgcacaaagttgtaaaatgcaatttaaatatctcctaagtgtcagaaccatgagaaagaaaaacaaattaatcaacaaagaatcccatttcaacagttttcaagccagcttgtgtctgtcaccaaaccacaggtgaaatgctaataaaatccagcttacatcaacagcataataatttaaagatggcctatttttccgaagaaacacatatattatatatttccagacatggcctttttaatgagtgtgaacttttttagaagaaaattattagaagatagcaaaagtctgctggagaataaaacgtggcagagtcgctgttgaatggcagaaaaaatgatccgggaggcccatcagcgggggcaaaagctgtctttttcgggtaatctagcaagacgaatgcagcaggagggatcctcagagaaaaggcaaccagcaagacaa

SEQ ID NO: 737754 - DNA, 612 bp, Homo sapiens
ttgtgtgcgagtaagaaataaagagatggtacttagaaaaccatggaaggaggtgaaagggaaagatcctagagacagataaattcaattctccagtatgtcaaatggagacactgagtggaccagagaagagaaatgacttgcccaagatcacacagccagttcatggtgtggtgaggactagaacctgtccttttgaccagtgttccgtgtgcttatgctacactctgtttcttcttgttggtgtcaggaaggaactgagaaagtttcatccatcttcttatgcagacaagaccctcctcctgagcccagacagactcctcaatcagaaagwaccagatcacacctgtaatcccaacatgttggtaggccgaggcaggtgtatcgcttgaggccaggagtttgagaccagcctgggcaatatggtggaaccccgtctctactaaaaatacaaaaattagctgggcgtggtggccccagccggtagtcacagctactcgggaggctaaggtgggagaatcacctgaacctggggaggaggttgaggctgcagtgagccatgatcacgccactccactcccaggaacagtgtgacctgctctcaccatgtct

SEQ ID NO: 737755 - DNA, 625 bp, Homo sapiens
catctcagtgtccctgctctctgtgcctaggagacagcagcaggggcacaattttaagcactggctttattttctcctgaatctttgctcctgctctttcattggttcagtgtgccttctccctccttgacttctggttccataacctaagaaccctgtctaaaatttgtatagacaagaattttgcaatagggacactttcagttatgacatatccctgtatttgaagaaactgggtgaccagccrgtgagattttatttctaatagctggaggagagcccctggtgcagaatgatgggagtgttcactggaagctcacctggcacactctgttgtttcaggtgagcacatggatcccccaactggttcaggatacacctttagaccttgaagagagtattcagttccatgcaaaccagttggttctcatggaacaacagggagaccaatgagaatgagaacatggacccaactcctatctgtgagatgtgttccagcaccatgaggccttgtgaatgcttagtgaagtgcttaggagaaattgtattctttctcatgtgaaactgaataatcatagtgcattccatacatgatacaaggccctagagatctaaatagatacca

SEQ ID NO: 737756 - DNA, 512 bp, Homo sapiens
agtaagagggaaaaagagaaaggcaagcgggaaatccagatagcatgtttaaaaatctttatggaaatctcgatacggtttggggtttccgtggtgtagtttgatgcacattataaaacaaagtcagtcaagcaaactttatgaggattgctccaacagcgccaggatgagggtcctgcctgcattcttggatttcatacagttctagacacatctcaggcatccaggaactgtctcaagaggacagacttttaaaaccactaatttcagaaagcatyttttccatgaggggcctttttcttagagggaccctcggtttgtgagaatacttaagttaggcaagtatcgttacaccttaaaaaaaatctactttttactctctccctctctcttagggaaggatttattcatgcacagatagatacattgaaactaaaacaaacatgtcagtatctgagatgctttttacactgtcagattttttatgtaaatcttgtttttcatagaaggcg

SEQ ID NO: 737757 - DNA, 608 bp, Homo sapiens
tggtttgaagctgacagcaaaggatcccaccacctggtctttgctgcatccctcccggattccagctgatggatcatgaagccaacatcaattgtttgtatttaacttgttttactttgacccctgcctccctaagagccggggacagctccctctaggttggtggytcctaacattggtcacctgtgaaaatcatctgaaaagcttttcaaatacaaatgcctattccccagcccagatcaattaaataatcctggggtggtacccaggcatcaataattttttcaaagctccctgggtgactgtactgtgtagctaaggctaagaagcactgttctaaggcacgagttctaaacttcagtgagcatcagaatcacacattgcatggcctcaccccgagtttccgattcaggcagtctgagtgtagagcctgagaattacgtttcaaacctgtttccaggtgatattggaacagggacctacatttgagcacttgagaacctctgccttcagtaactaaagcaggatttggaaaacaatctgatagaggagttaaagaccacatcccatccccagctctgcagctgccatccagagaaactcacctg

SEQ ID NO: 737758 - DNA, 608 bp, Homo sapiens
tggtttgaagctgacagcaaaggatcccaccacctggtctttgctgcatccctcccggattccagctgatggatcatgaagccaacatcaattgtttgtatttaacttgttttactttgacccctgcctccctaagagccggggacagctccctctaggttggtggctcctaacattggtcacytgtgaaaatcatctgaaaagcttttcaaatacaaatgcctattccccagcccagatcaattaaataatcctggggtggtacccaggcatcaataattttttcaaagctccctgggtgactgtactgtgtagctaaggctaagaagcactgttctaaggcacgagttctaaacttcagtgagcatcagaatcacacattgcatggcctcaccccgagtttccgattcaggcagtctgagtgtagagcctgagaattacgtttcaaacctgtttccaggtgatattggaacagggacctacatttgagcacttgagaacctctgccttcagtaactaaagcaggatttggaaaacaatctgatagaggagttaaagaccacatcccatccccagctctgcagctgccatccagagaaactcacctg

SEQ ID NO: 737759 - DNA, 608 bp, Homo sapiens
tggtttgaagctgacagcaaaggatcccaccacctggtctttgctgcatccctcccggattccagctgatggatcatgaagccaacatcaattgtttgtatttaacttgttttactttgacccctgcctccctaagagccggggacagctccctctaggttggtggctcctaacattggtcacctgtgaaaatcatctgaaaagcttttcaaatacaaatgcctattccccagcccagatcaattaaataatcctggggtggtacccaggcatcaataattttttcaaagctccctgggtgactgtactgtgtagctaaggctaagaagcactgttctaaggcacgagttctaaacttcagtgarcatcagaatcacacattgcatggcctcaccccgagtttccgattcaggcagtctgagtgtagagcctgagaattacgtttcaaacctgtttccaggtgatattggaacagggacctacatttgagcacttgagaacctctgccttcagtaactaaagcaggatttggaaaacaatctgatagaggagttaaagaccacatcccatccccagctctgcagctgccatccagagaaactcacctg

SEQ ID NO: 737760 - DNA, 588 bp, Homo sapiens
agagagaaaagagagaaactaagacactaagttaccccgaagggcattcctgtattagtcatcgtataaaaattatatgtaccacagaatatctatttttagaggccaggaggttatgtgaagcaggtcagatgtcggcaaagacccaaggccagcttgcagcaatgatattggatatttggatatttgttttctttattttaactgtgcaaagctggcactgaccgcatggatatgttgggcacttggggagggcgagacaaggtccatgtgctccttcaaagatatctgaggtactcagtgattcttttgtgttatttttatctatcttctaggcctggcactacacaaacacacatgtatctgcactcacgcatgcacgcgcacacacactcacacacgaaygctttatgacgcatatttcatatcttcatgcctgacagaggccgcccccatttctcctaatgaattgattagaatactttatttcaatactttatttgtttcttaccagttaaatcttgtctgagtttatagaagccagataatttgtggcctctctccggagtcgagaacagtccatttggc

SEQ ID NO: 737761 - DNA, 573 bp, Homo sapiens
catagaattgctgagatgtctggagaaagggaaaagtggagacaagcaaaaaaagaggctgaccagtagaaatctctggccatatcctctcaaaaatggtctagttagggtactgctgctgctaccccagcagtagatgcagcttgccatcaacaccaccagcaatggactctgaaagaccccattcttcgtgctaccacttgcctttggaatgttaatcttgytgcagctgccactgccatgcagacaaacacacacacacagccacaaagacacacacacacactgccacacagacacacacacacacactgcctccccccaccacacacacaaacagtggtgggtggagactctctgtagtccttgcttccttgtgtcttttgctcctgattcaaagaccagagcaggtgcacagacaattcctaacattttcaggacttagagcaagagcacaattgaaggccaaactactgtatgcttaaacatttagaagttataaaccaaacctaggaaactattacataaaatatattctataatatgccttcagaacatcctgaaaggcccagt

SEQ ID NO: 737762 - DNA, 522 bp, Homo sapiens
acacatcgaccagtggagcagaatagagaacacagaaaaaaatccgccaacttacagccagctgacttttgagaaaggtaccaaaaacacaaaatggagaaaaggcagcctctttaataaacggttctgagaaaactgtattcacattcagaagaatgaggctagaccactatctctcaacatgtacaaaaatcaactcaacatgaattaaagacttaaatgtaagacctgaaacaataaaactcctggaagaaaacataagagaaatgyttcatggctggtccgggcaaagattttttagtgacctcaaaagcacagtaatgaaagcaaaaatagacaaatgagataaccccaaccaaaaagcttcttcacagcaaaggaaataatcaacagagtgaagaggcaacttagataatggtagaaaatatttgcaaactatggatctgacaagggattaatatccagaatatataagaaattcaaatgactcagtagaaaaagtaatctgattaaaaatggaca

SEQ ID NO: 737763 - DNA, 662 bp, Homo sapiens
attctgcatagatgaccacatcatctgtgaagaaagggagttttacttctttcctatctgaatgccacttttttctttgcactactgcactggttagaacctttagtacaatgttgaatagaagcagtgatagtgaacatacttgtctgttcttatcctcagaggaaagcacttattctttcattatgatgttgctataggttatttgaagatgctacatagttgaaaatgttctcttcaggttctacattgctgaaaatttttattagaaacgaatgttgttaaatatttgcaaacgagttttttgcatctattgagataatttttttttcttttttagtttgtgaatttggtaaactacttgatttgtttttgaatgttaaaccaaccttgcatttctgggatgaagcactactcatcataatgtattatcctttttacgtattgtgggattcaatgtgctaatattttgwtttgcagttttacatgtatagtcatgaagaatatccatctgcagccttcttttcctgtaatatctttgtctgattttaatggtagggtgatagtggtcttatagagtcagctggggagtattcttccctgtcctattttctggatgactttatacagaattggaacttgccaagtatgtgagcttgggg

SEQ ID NO: 737764 - DNA, 604 bp, Homo sapiens
gaagggatattattaatagcaaatatttgttgggcactttctagatgccagacactgtcctgagcactatccatgtgtcatcacttaatcttcacggcagcttatgaggtaggtactattatgatccccaattttggtgatgggaaactgaggcagagagctgttagtaacatttaaagtcacacagctaataaatggcagaactgggatatgaacccaggcagttyggctctagagtgcactttcttaccctttctctcttcttaccttatagatgttgttgtcattggtggtggtggtggtggtgtgtgtgcatgttgattgagataacctggaacacatgaaagatgtcaataaatgtcactttactttccacaagttctacaaaactctggaaggaatagcacactgattattttgtcttctctcaacttccatccccatgccagccccaatccagggctgactccaattagaagaggctctgtttcagcagacaggataagctgtagtcccagaagaaccctgactctcagggtagagtgcaatgccaaggccccctggccctttgctactcaaagtgtggtcctgggaccggcagcat

SEQ ID NO: 737765 - DNA, 599 bp, Homo sapiens
ttgctaccagggtgggaagggaaagaccatcacgttggggttgggctaggtgtgcctgagctcaggctctccttgggcgggtcttgctgcagctgctgtgggggatgggagtgagaatccgaggtcaatggagttgtgtacctacgaggattatggctgcctctgctgagtcacgccggtttatcagggaagtgggggaaagccagcagtcacaggactcacccagctcccatgcaaacagaagggctggtctcactcccatcatgcccccgcccccaacagcctggagtctgtttccaggaggcrggtgagacaggcttgaaagcttgccccaggctccctgcttcccagtggcgaaagaaaggggcttgtttcttctccaacccgtggagtctgcacattggatttgtgcccgcccccaagtactgcccatgaggcttcttgccccattcaaaatgttacaaagttcagctggcaatttccttctccctgtggagttttaccccctgctcctctggccgccctcctgatggattcctgtggtgccaggaaggaatggcctgcttggggacccagtgagctcccagggcctttctgct

SEQ ID NO: 737766 - DNA, 599 bp, Homo sapiens
ttgctaccagggtgggaagggaaagaccatcacgttggggttgggctaggtgtgcctgagctcaggctctccttgggcgggtcttgctgcagctgctgtgggggatgggagtgagaatccgaggtcaatggagttgtgtacctacgaggattatggctgcctctgctgagtcacgccggtttatcagggaagtgggggaaagccagcagtcacaggactcacccagctcccatgcaaacagaagggctggtctcactcccatcatgcccccgcccccaacagcctggagtctgtttccaggaggcgggtgagacaggcttgaaagcttgccccaggctccctgcttcccagtggygaaagaaaggggcttgtttcttctccaacccgtggagtctgcacattggatttgtgcccgcccccaagtactgcccatgaggcttcttgccccattcaaaatgttacaaagttcagctggcaatttccttctccctgtggagttttaccccctgctcctctggccgccctcctgatggattcctgtggtgccaggaaggaatggcctgcttggggacccagtgagctcccagggcctttctgct

SEQ ID NO: 737767 - DNA, 607 bp, Homo sapiens
agaacacttaacattcactttcttagcatagataaattattatagaccttataaaggcacttaaaaagttctatataaagatgatggaaggcaaagaaatgcacgatgcttaataagtgctttagtaattttttsaaagcaaaacaatttttactgtcaaatatatttgtcaattgtaaagcatgcttatgttctgaattaagaatttttgaaatattttaaatcatttattcaaggcaaccaattaagcccatgaagagacactttttataaaagagatacattgataatgactctatgaaaggcatctataatggcattttgatcacaatttgagaatttaatctctatacattgcagaataagaaatccattttctagttatttttgctcaagcggcattgaatgcagcctaagggacaaagaatgtgtgtgaccatcaagcatggcccactctgaacttgaatttctgctcaactctcagtctcttacatgctgcagttcagtggtgagtgaaggacagcttgagtgctgaatggcagtcttcataagttgtaaatataccatcagatgtgaaaatgccaccattttatttctgaacttgtaa

SEQ ID NO: 737768 - DNA, 605 bp, Homo sapiens
ggtcctagaaaaaaaaaaggagagagggtttattggaagttaattatttgttaaaaattataaatccacagatccaaggaaatccacaagattaacagaaaaatccgtcaagatacatcacaatgaagttgcagaaaaccaatgataaaaacaacatcttaaattcagattgagttaaaagtacacgatacataagaataaagaatggcctcagatttctcaacagaaaaaaaaagcagaaaagatacagaatggcattttaatgtcccccaaaaaataaaaaaggaattctataatcaggacaaatgtccttcaaaagtgaagattaaaagactttttgaaacaaaaacagaaaatttgttgtcagcccactgacattataagaaagactaaaggaagttttttaagaagaaaatgaaaacaaattaawagttgtatatacacaaataattaaacaatacctgatatggggattagaacgctaattacatgaggtttctttcatttaaaaaaaaaaaaatccctggatttggggaagggccaagatggctgactagaaactgcttcggtctacagctcccagcaagaggaatgtggaaggcagg

SEQ ID NO: 737769 - DNA, 474 bp, Homo sapiens
gcatatgcacataccaactgaaagtgaattaaatagttaaatgtaaactcaaaattatgaaactactagaaaaaaaagaaaatgtttcataaaattgggctgggcaaatttttttaatataagatctcagaagcacagacatgaaagcaaaaatagacaaatgggatcaaactaaaatgctatgacaccagagaaaacaattaacagaatgaaaagacagcctacaaaatgggagaaaatatttgcaaatcatgcatctgacaaggkgttaatagccagaaaatagaagaaacttaaataaccagatggcaaaaacaaaataatcctatttaaaaatgggtaaaatatctgaaaagaaacttctcagaagacataaaaatggccgataagaatatgaaaaagtgcttgacattactaatcataaaggaaatgcaaatcaataccacaatgagataccatctcactccattataa

SEQ ID NO: 737770 - DNA, 474 bp, Homo sapiens
gcatatgcacataccaactgaaagtgaattaaatagttaaatgtaaactcaaaattatgaaactactagaaaaaaaagaaaatgtttcataaaattgggctgggcaaatttttttaatataagatctcagaagcacagacatgaaagcaaaaatagacaaatgggatcaaactaaaatgctatgacaccagagaaaacaattaacagaatgaaaagacagcctacaaaatgggagaaaatatttgcaaatcatgcatctgacaaggggttaatagccagaaaatagaaraaacttaaataaccagatggcaaaaacaaaataatcctatttaaaaatgggtaaaatatctgaaaagaaacttctcagaagacataaaaatggccgataagaatatgaaaaagtgcttgacattactaatcataaaggaaatgcaaatcaataccacaatgagataccatctcactccattataa

SEQ ID NO: 737771 - DNA, 568 bp, Homo sapiens
atatatatgtattaaaacctcaaattctaccccatacatatgtacaattacaatgtgtcaatgaaaaaactatatgtatattgtatatatgagacacatctcattttcttttttgatgggtctgtttttttataaataatatcaggatattaaatcttgatatattaaaatatsctgatatattaaaagattctgatatattaaaatcttaaaatatcctgatataacaggagatttaaaaaaataaaataaaaagacccattgtctttgtccattttgtgttgctgtaagaaactacctgctgagattgagtgatttatgaagaaaagaggtttatttagctcatgattctgctggctggaaagaatgagaaacattccacaggcatctgctgggcttctggtgagggccatgtgctagataaaaacatggcagagagggtcaaaaagaaagtatccatgtgggaggagagaccaaacagaaggaagaaactccctttataataacctactctcactggagttaattcattttcagagaactaatcccatctccccagagtgagaac

SEQ ID NO: 737772 - DNA, 552 bp, Homo sapiens
gtatagtatggaatggagagcagagggatgagtaactttacagtggagaaactgacaaacactaccttaagcaggtgaccaacatcaagagtatgtcatgttgatacagtatatacccttgatatgatgtgatgtaaatagcactttgcttcwaagataatccccccaaattaataacctcagtctaaccataagaaaataccagagcaatcacaaatgagggacattctacagaatatctgatcagtgtcctcaggacgatcaagttcttcaaaaacaaggaaagtctccgcaactgtcacagccaagaggatctgaaggaaacaggagaaatcaatgtaatgtggtgtcctggatcatatcctggagcggacgaaggacattcaataaagactaaggaaatctgaatgaaatgtggactttaaataacatacaaatcttggtttattacttataataattgtaccacaccaatgtaaggtgttaataataggggaaactaggtatgtcgtatgtagaaactctctgtactgtttcacagtttttctgtaa

SEQ ID NO: 737773 - DNA, 597 bp, Homo sapiens
acacacacacacatacatatatatatatacacacaccatagaatactactcagctataaaaaggatgagataatatcttttgcagcaacttggatggaactagaggccattattctaagtgaagtaattcaggaacgaaaaaccaaataccacatgcactcgtttataagtaggagctaagctatgagtacgcacagacatacaaactggtataataaacactggagtctcagaaggggaacgagtggaagaggatgaaggataaaaaactacctattgagtataatgtacactacttgggtgacaggtacgctaaaatcatagacttcaccactataaaattcayccatataacaaaaaaccacttgaattactacagttattgaaataaaaaaattaaaaagaaagaagacaataccatttacaataacattaaaagaaataaaatatttaggaataaacttaaccaagaggtgaaagatttgtatactgaaaaccaaaaaacattgctgaaagaaatttaaaaagacataaataaacatcactacatgccatgctcatgaatgggaatacttaatattgttaaaatgttcatac

SEQ ID NO: 737774 - DNA, 561 bp, Homo sapiens
taagatccagctgagatttcacctcctccttacagactgttccagccctcattcgtttgcctgtctgctaaattcttagcagtgcacttataatctgttccacataatagtaccctcttttattgtttttattagttcaataatgataatgtgcttaagaacaaaaattgtgtctattctttttttaatgtgatagcacctagcatatgttgatcttataatagtgattaataagcagttaatgattgattaaagaacttatggtctgtctttgggattcatgtagataataggaaaggcaaagcagaaaaattcagttaattcagatgattctaataattattaaaatattttaaaatttccaactgcaaagaaaataawtttttatagaaccattagacccagagaactcatacctgtaattagaagaaccctaagtcattgtagacagaagagatcctttcttttttacaagcacttgtgtcccagggacagtaataatattgtttaatatttctgcagcagtttacagtttaaagacactttcatggccgggtacaa

SEQ ID NO: 737775 - DNA, 614 bp, Homo sapiens
tctaaaacaaaactgaaggggaaatgcttggggtatttagggggacaatgctgttgctactatatttttgttgttatagttcggctttcccacaaccccactgctagctaaaaatatctcagcgcaaaatgtttttgagtggttactactgcattggcatcccttaagctctgaaaaatgccaaaataagtatgctgttaggtttggaaatacagtatatgtttttctttttccttacctctgggaagttatagaatcactacaggaaagagaaaagaaagtcatcacaggggaaraaaggaaaactttttatttaaacaaagagtcatgctaatcccctgaatatatatatacataaatttatatttatttattttagacaaagtctcactctgttgcccaggctggagtatagtggcacaatctcagctcactgcaacctccacctctctggttcaaccaattcctctgcctcagcctcccaagtagctgggattacaggcacacaccaccatgcccggctaatttttttgtattttcagtagagatggggtttcaccatgtaggccagactgacctcaggcaattcgcccaccttggcctcccaaaatgct

SEQ ID NO: 737776 - DNA, 614 bp, Homo sapiens
tctaaaacaaaactgaaggggaaatgcttggggtatttagggggacaatgctgttgctactatatttttgttgttatagttcggctttcccacaaccccactgctagctaaaaatatctcagcgcaaaatgtttttgagtggttactactgcattggcatcccttaagctctgaaaaatgccaaaataagtatgctgttaggtttggaaatacagtatatgtttttctttttccttacctctgggaagttatagaatcactacaggaaagagaaaagaaagtcatcacaggggaagaaaggaaaactttttatttaaacaaagagtcatgctaatcccctgaatatatatatacataaatttatatttatttattttagacaaagtctcrctctgttgcccaggctggagtatagtggcacaatctcagctcactgcaacctccacctctctggttcaaccaattcctctgcctcagcctcccaagtagctgggattacaggcacacaccaccatgcccggctaatttttttgtattttcagtagagatggggtttcaccatgtaggccagactgacctcaggcaattcgcccaccttggcctcccaaaatgct

SEQ ID NO: 737777 - DNA, 653 bp, Homo sapiens
aaaaaacttttcctgtgccaaattattataagatggtatcataacttctctcgctataactaaatctgtgagctttttgaaatcctttcttgaattcttctttttaaaaaagtaattcaagttttcttctttttggactttttttccttgttgggattcaagcctgaaatcagttttagaaaaaaaaaaacttaaaaaaaaaccttttaaatctattattctcttctttttgtttctgtttcaatgggttgtatgagtgaagctaaaatgtaaacatcctactgccctatacaaaatagaatactattatttcatctttatgctagttacaagaaagataatcttaacctgcagtaaccyacctacagtagatataagtgttcaacatgttgaatatacctatgaaaatattctaggtaaacttatttatgctcacaatcaaaaatatgtgattaaatattgttggttttttctaaactccaagattgctagtatgaattttaatgaagaatttctttacatagattaattgattacttcattcatttgtggatttgaaatgtaactagttgcacatttcctttatgccagccaggtattgctgtaggagctaaggataaagaggtgaacaaaacaaccatgtggcctacctt

SEQ ID NO: 737778 - DNA, 523 bp, Homo sapiens
caggaaaccagagactttgccaccaaatctcagattattagaaactaggtgtcagggtttatcaagaaggccaggaaggccttttgggttaagccttacattcatgaagaacctcgagggtagatttttgagagcattccaaatgaatggtctctggtcaaatgaatgaatggtcaaatgaataaatctgccctcacagagatacaaaaggaaaaggaatataattcataccatttggtttaagccttacattcatgaagwacctcaagggtagatttttgagatcattccaaatgaagtcgaatctgccctcacagagacacaagaaaggaatataattcatacactattgcatttttaataaatcttttgaaatttgcagaattagattgtattgtgtattttcggttaaatgataattgaatgtaaatatttagatgcagcaccatattttataacccagctttagcatttcttcatattttaaggaaaccccccacctccttcttttaagggcgcttct

SEQ ID NO: 737779 - DNA, 535 bp, Homo sapiens
cccttgcctttgaagctgggaaaaatccctgatgactttctaagtgtaataagctatagtaaataagatgtaaaaacacaagtaactttttataacactttaagtagaattataagtgataatacatgatggcagaaggttcacaaatagtgtttctttcacttccaggaccagaccctttyatatgtttcccccaagtctacacaaatgattataaagaatagtaattaagcaaagctggtaaagaaatagtggggactcaggtttattagttattgcaagtctacactccattttatccaagtcaagtcatgggacaatagattctctactgcctaaacctaagtaaacctttacagatatctatgcttaaccaatagtctgccttctttttaaggacaaaccagtgaagccacctacaaagaaatcagaggattcaaaggtaaagaccataggaacatatttccattaaattttgttttattctagccataggggtatttggcattttagaaaactaaaacatattgaatgc

SEQ ID NO: 737780 - DNA, 623 bp, Homo sapiens
cttcctcttaggactttaggtctgcctacatgttgaagaagtttgagttttaggctttgggagcatttccttaaaaaccattgtcatgggggaggaaaaaaaaagggtagtgttaattctgtcatcacacactcagagatcatttggttgggctacattttatgagctatattccataaagatgctgcaaagttcaggtatctggtttaggaaagaaaaaaaaatcccttctytaacccaagaaatgtaatgcaaacaacttgggcctgtgtcacttagtcttctaagaagacttcaaggctgttataaagacccagtggtgggagaaacctgatccggtatagcggggccagaagaagctgcgggaccatgccgcggggacaaggcaaggagtttcgccaggatgttgatctcctggttatctacacttccgcctcagtatgatctgaattattaatgagaaagattaagatacagattccttccttcaagtgccttagtagtcacagacaggaggttaattataagactaaaagcaatcttgggttgttagaagaacttaaaaggaaaacacctttcaacttcttgttatcaatcaatcatttttgtctttagaaatcaag

SEQ ID NO: 737781 - DNA, 555 bp, Homo sapiens
ctaatagcctattattctcattcaaggtggggtaactgaagcaaagaaccattcatgtaactttgctaagttcacacaacttgttggaatgcaatccacatctgtgtgagtataaactccctgctttttcagcttcaccaagatccctctttttttttttttttttttttttgagacggagtctcgctctgtctcccaggctggagtgcagtggtgcgatcttggctcactgcaacctctgcctcccttycttttattggggcactatagtatatgaaatagatcatcaagaagtaattgaggttcttccagaatttcctgaacaatgaaattaacaagcactgttggtaaataataaaaatgctggattaatttgaaaaaaaaaaaagtactagaatgtttctattcaggccgcacctgaaaatgtgctacttatactaattaaaaatcctcaggcaagagacaactgtgcccaattttcaagttttttgttttgttttgttttgttttgttttgttgttttgttaattgttgaccacgtcctgagttcagagc

SEQ ID NO: 737782 - DNA, 639 bp, Homo sapiens
agctgctaccaccatatcatcatgttttcatcctacagacaatcatcagcggtgtagactggtgagttccagctatttcactaacaatggggaagaaccaaagaaaaattgctgtgagaggaggaaggcaggagagcctgtggctccagaggggtgtgtgtgtttgtgtatgtgtgtttgtgtgtgtgtgagggagagagagaaaataaaatgttttctaccaacaaaactcaggtgtgtttcctttacttgccttgaagcttcttcaaaacttgttatacygtaagtttgaaaaaccaaacacttttcctaggattgtttttttacgtactaaggaccagatcagatcagcaattagaagtatgacatacaaaataatcaccctcaaggaaggtttaaattagggatgaatttccagtattgacatggatctttccaagcaccctgcatattcagcacagtattctagtattttgtgagtaaagtcattatttcttaggacatcatcaaaagattgagcgtgtaatagacttcaagcacctatggatttaatatttacaattttgactatttgggtgtgacctgaaggtctagcacttgggtagtttataattttgccgagacgtaggttagagttac

SEQ ID NO: 737783 - DNA, 683 bp, Homo sapiens
acattggtagcctgtctatcacaggtaccaaaaatatttgatggcatttcccatctttctacttttcaccatttccaccgccatcctcctcattcgagtccacagtatttcttgcatagatactacagtagcctccaaattcacctcatttttgcacttgcctccttagaatccattccacacagcaggcaaagttgttttcttaaaatgggcaaaaatcttcatccttcactcaagtgtgcaagaaatacacattttcttattttatttaaatcaacaaattctatcccaagctcctaccctactaggctggtgagaaattccaagacccccaatggttgcctaaaactgcagatagtactgaaccctaagtacactatgcatgaatttctttttccttcttcacagttttatggatagaagatttgtttctaccatagatcttagcaacctcaacatacaattttttccctccttattaagtcaagaactttcacattttcrcttaaaagaagtactttactgcttctcattggcatattcaaattgccagcatcactattcttgtgctttgaggctgttattaagtaaaataagggttgctcagcacaagcatgaccatgccttgacagtggatctgataaccacaaaggttactaagtgactaatgagccggtagtgta

SEQ ID NO: 737784 - DNA, 605 bp, Homo sapiens
caacatatttatcatttttatgcttgttgtactttcttatgtcccatgcctccctctgggttaacatttctttctttctctccttctcattcccttcccttctccttccctcccttcttccttcctgtttcttttgagacagggtcttgctctgtcacccaggcaggagtgcagtggaataatcataactcactgcatccccaacttctgaggctcaagcaatcctactatctcagcctcctgagtagctaggaccataggcatgtaccaccacaccctgttaatttaattttttatagggatggggtatcactatgttgcctaggctggccttgaatgtctgatctcaagtgattctcccagcttggcttcccaaagtgctaggatcacaggtgtaagccactgtgcctggcygactttgtttcttatatgcttgaatcctttctggttgcacagtaaggatctgtacttttgccttccttcttgaatgttagtatagttgagtataaaattttgaattgacaattttttctcccaaacaccattatatgatggtatttatgggtattccttataatgtgatgtgatgtgattttatatttatt

SEQ ID NO: 737785 - DNA, 632 bp, Homo sapiens
agggatggtgctaaacatcctaaaatgcataggacagcccctcctctgcctcccctcagcaaataattatcctgtcaattctatgaagagggtgctgcataataaaatatacccaaaaaaacaaaaaaacaggaaaagggattttgcaaaaagtaaggaaaaaatcaaaacaagaattgtctagccccaaatgttattagtgctgagattgagaaacttttttcytaatagtaccattgaaactgaaatctcattaagactcctgatggctctctaagcaaaaacaacgataacatgtttccatgtttaccccaccagccacacatatattcttcaattttttcttcctcagaagcaaaaagtaggatcaggaagactatgaaaggccatttgttttgagacttgaaggaatcagtttgttcttttgtaacccttccattgtctgttgatcaccacatattttgttaaggctttttacatgatacataatcttttgatccattcctttatctaccccaaaattctctgcgatgctaaataaaacacattctcaatttatatgcattttcttttttaccgtttaattcctagtgtgggcctttctttaaaccttttttagaaggaaaagtaca

SEQ ID NO: 737786 - DNA, 583 bp, Homo sapiens
gatatgttaatcctcaaatgatctcactttagcatacctcagtgttgcctttcctggtctcaaagtgacctgcccaaggatgggactgactggggggtggagggggacagtcaggcctgaaagctctgcccattgttctcaccatgtccaccttaaactgggccacttagactcccaaacctctccctgggctagtagccacaacacttatccatccattccagccagcctgattgaggatttccccttagatcatcacatttgggggacaaatggttttgatatgagcatgagaggaagggatgagtaaggctggagagggtggcaggtctctcaaaggccacagcaagaagactgggctgtgtgcaaagaatctcttccaccctcagttctggatacttgggtccttccagkttactctgctcagaactcttccatgggtctcttaagtctgctctctggaccaagtccaaactcctcagcctggcatttgaggacaaagtgctgaccctgtcttctcagcaccctgtgctgacttcagcaactaactttctgagattgtagttggctggtcttatcctct

SEQ ID NO: 737787 - DNA, 642 bp, Homo sapiens
gcctggctaattttttgtatttttagtagagatggggtttcaccatgttagccaggatggtctcaatctcctgaccttgtgatccacccgcctcggcctccccaaagtgctgggattacaggtgtgagccaccacgcccggcctttttttttttttttttttgagacggagttttgtttttgttgcccaggctggagtgcaatggcgtggtcttggctctctgcaacttctacctcccaggttcaagggattcttctgcctcagcctcccaagtagctgsgattacaggcacgcattaacacacctggctaatttttttgtatttttagtagtgacggggtttcattatgttggtcaagctggtcttgaattcctgacttcatgtcatccgcccacctctgcctcccaaagtgctgggattacaggcatgagccaccgtgcccagcccaattctttagtatcataaattatctatcatgttcaaatttatctgattgtccaatttttaaataattcattggtttgaactgtaatggagctcagaccgcccacattgtaaatggttgttatgactcaatcttcaggttcttcttttttttgtcttccttgcaatttctttgttgaaaaaatcacgtccttgtc

SEQ ID NO: 737788 - DNA, 611 bp, Homo sapiens
ctaaaggccgggccctgtccatgccatttctgaatctgtacgctggcgtggagcctgggaatctgcattgctaacaaggttccccaggtgctcgcactcggagaagccctgtgggcgattaagcttattgcttcacgagacactgagaaacagctcctgcctcgaagcccaccatcgagcttgaagactgtcgggtgaacagatgagtccaactgggagtaattrgtttccaacagaggaagctcaggtgccctgtgggagcacacaggggcagcaccagcctcaggtcaagggaaaagcagcccgagacaaacttccggtgccacagaaagccagatggtttcatggaggccacccagcccccgtcacccatcatgactctgcttgcacagtttgagcaatgccattggttttgcccgtgtgaccaactcttaggcatctccatagggccacagggcaggcccccagctgtcggcattgcctggtcttatgatctcaggctcccagcaccctcactgcccagcagcctgttccatagcagcatctcccaccttctccctgacttctagaggggagcaccccatgagcttagctgtgcctgccctctcacc

SEQ ID NO: 737789 - DNA, 631 bp, Homo sapiens
gagcactggacatgggggactaaaggcagagaaaggcacctggagtgtgtgggtcagcagtggtcccagtgacaactccagggggctatggattgcagagcctggccaaggactgctgccttccagaaagccccacgggtcaagctagcttcagcaggtagggcctaaattctaaacccagggtggagccgtgagcaggcaagagatatgaagacctcagcttcctgagaaggctgggttgccaacattaactgcagcctggaaagggaacggtagtgctgcccctttgtgggtgacaaggacaacttcaagcccacctcccctgggccacacagacacaggcagtgcagtcagggcttctaaacagatgcatttaatgggaaatcttaaggcaggggtggcaggagctgcgggctcagttggcggccaggatcttctgcacccagggtatgagcttggygacacgggcgtacacagcgggcgtggtggtagagcaggtgcggctgccccaggacacaatgcccaccagggtccaggctccgtccttctggcagaccagggggcctccagagtcaccctgcaggaaggagaggaagtatctctaggcctgaaaggggtgccagggcctagg

SEQ ID NO: 737790 - DNA, 632 bp, Homo sapiens
ctccagcctgagtgacagagcaagaccctgtctcaaaaaataaaggaacttatttgccacaacatgggtgaacctagaggactttatgctaagtgaaataagcctggcatggaaagacaaataccacatgacctcacttatatgtggaatctaaaaaagttgamctcatagaagcagagaacagaatagtgattaccaggggctaggggtgtgggaggggataagagaaatgttggtgaaaagaaacacaatttcagtttaataggaggaataaatttaatctattggccaggcgccgtggctcaagcctgtaatcccagcactttgggaggccgaggcgggcggatcacgaggtcaggagattgtgaccatcctggctaacacggtgaaaccccgtctctactaaaaatgcaaaaacaaaaattagccgggcgtggtggtgggcgcctgtagtcccagctactcaggaggctgaggcaggagaatggcgtgaatccaggaggcagagcttgcactgagccatgatcgtgccgctgcactccagcctgggcgagagagcaagactttgtctcaaaaaaaaaaaaaaaagagagatctattaagagaggaggtctcactatgttgcccaggct

SEQ ID NO: 737791 - DNA, 632 bp, Homo sapiens
ctccagcctgagtgacagagcaagaccctgtctcaaaaaataaaggaacttatttgccacaacatgggtgaacctagaggactttatgctaagtgaaataagcctggcatggaaagacaaataccacatgacctcacttatatgtggaatctaaaaaagttgacctcatagaagcagagaacagaatagtgattaccaggggctaggggtgtgggaggggataagagaaatgttggtgaaaagawacacaatttcagtttaataggaggaataaatttaatctattggccaggcgccgtggctcaagcctgtaatcccagcactttgggaggccgaggcgggcggatcacgaggtcaggagattgtgaccatcctggctaacacggtgaaaccccgtctctactaaaaatgcaaaaacaaaaattagccgggcgtggtggtgggcgcctgtagtcccagctactcaggaggctgaggcaggagaatggcgtgaatccaggaggcagagcttgcactgagccatgatcgtgccgctgcactccagcctgggcgagagagcaagactttgtctcaaaaaaaaaaaaaaaagagagatctattaagagaggaggtctcactatgttgcccaggct

SEQ ID NO: 737792 - DNA, 541 bp, Homo sapiens
ttgtagtatgcagccttgatgaaaatgtactttacctctgtggtcttcttccgaaaacacatgatcccaatccaattatgaggaaaacaagacaaattcaaacagaggagcattctaccaaatacctggccattatgcctcaaaccttttcgggtcatcaaaaacamagaaaatgtcacagaaaacaggagcctaaagagtgacaagaactaagtgtaatgtgtatcctggacggaatcctgtaacagagaaaagacattaggtaaacactaacctgaagcaatctgagtaagcatggactttaaataacgatcatgtatcaatattggtttattaactgtaacaaacaccttatcaatgtaagatgttaataataagggacactagatgtgaggtatatgggaactccctgtactgcattcacaatttctctgtaaatctaaaactgttctaaaaaaacaaagtctatttaaaaataaaaattacaaaacagctgtatagtgctccattgtgtggatgcaccataggtcgttcaactact

SEQ ID NO: 737793 - DNA, 541 bp, Homo sapiens
ttgtagtatgcagccttgatgaaaatgtactttacctctgtggtcttcttccgaaaacacatgatcccaatccaattatgaggaaaacaagacaaattcaaacagaggagcattctaccaaatacctggccattatgcctcaaaccttttcgggtcatcaaaaacacagaaaatgtcacagawaacaggagcctaaagagtgacaagaactaagtgtaatgtgtatcctggacggaatcctgtaacagagaaaagacattaggtaaacactaacctgaagcaatctgagtaagcatggactttaaataacgatcatgtatcaatattggtttattaactgtaacaaacaccttatcaatgtaagatgttaataataagggacactagatgtgaggtatatgggaactccctgtactgcattcacaatttctctgtaaatctaaaactgttctaaaaaaacaaagtctatttaaaaataaaaattacaaaacagctgtatagtgctccattgtgtggatgcaccataggtcgttcaactact

SEQ ID NO: 737794 - DNA, 474 bp, Homo sapiens
aggaaacaaagaaacagagatacataaagttttcaccatgctttaaaagttgaatacatagagcaaagaagtttgactactaaatgatgaagttctgacctttcacaactggtagtataattcaaatacaacatggtacctgattacgaagactggaacagtcgttggggccatacccaagccacccatggaggacaccgaattgacagcatgtggataaacaaggaatgttttttatttagctgagtgcctgaagtctgaaatacagtwaaaaaaaaaaaaaaaaaaaaaaaaaattaagaattcccatggattcggtctctgatttaggaacatatttctgacagaggccatcatcaccaaccattgcatggttgactttacatctgccttgacaatttttctgtcacttaaattagagaaatttaggatacatgcaaaaatagttgctcttgattcgctaaaagtactctt

SEQ ID NO: 737795 - DNA, 530 bp, Homo sapiens
tctccctttgtcacccaggttggagtgcagtggcatgattttggctcactgcaacctgtacctcctgggttcaagtgattctctcctgcctcagcctcccaagtagctgggattacaggtgtgcaccaccacacctggctaatttttgtatttttagtagagatagggtttcgccatgttggccaggctgatttcaagtgatctacccatctcgacctcccaaagtgcttgggattacgggcttcggccaccatgcccagcacctgttctrttgttttctctacagcgtttactaccttattgtatgtttttggctaaagggccttggagtcaaccccaggagaacagtgctgatgaatcaggagtggcgctcccataacttcatgcgtcttcaaagctggctagtactgcacctcattctcgtgatttcatgcccacagttacctccagggtgttggctgagcagagcaagtgacatgagggtagttggtgacaaagtcagaagtagctgaggcctcactgtagagagc

SEQ ID NO: 737796 - DNA, 598 bp, Homo sapiens
tccagggtgttggctgagcagagcaagtgacatgagggtagttggtgacaaagtcagaagtagctgaggcctcactgtagagagctgggcttttattctgggaaaagtgagtctctggagggctctgcatagagcagaggcttgtcatggcctgaccgaggttgtagcaagctcaatgcggctactgtgtagagaagacgccgtagcaacctgggccagaattgggaagattaaggagctactgcaatggtccaggagtccagagatgaatwgagtctgtggggaaaaaagtgtcggctgacaagccgttctgtctccatgttctcctctcaccttttgaccaccctgtccccactcctcagctgtgctttgtattttgtaattcgcagcactcaaagcactcacacaggaggcctgacattatttatctgcaggtcagagggtttgagttgagggtgggggtattggaaacaattaggcattgtggcctcagttgcctccgcttcattctccaccctcctccacacacccgcagcactcattttaacccctcagtatgtcttttactttttccttcctttttagagttagggtctca

SEQ ID NO: 737797 - DNA, 598 bp, Homo sapiens
tccagggtgttggctgagcagagcaagtgacatgagggtagttggtgacaaagtcagaagtagctgaggcctcactgtagagagctgggcttttattctgggaaaagtgagtctctggagggctctgcatagagcagaggcttgtcatggcctgaccgaggttgtagcaagctcaatgcggctactgtgtagagaagacgccgtagcaacctgggccagaattgggaagattaaggagctactgcaatggtccaggagtccagagatgaattgagtctgtggggaaaaaagtgtcggctgacaagccgttctgtctccatgttytcctctcaccttttgaccaccctgtccccactcctcagctgtgctttgtattttgtaattcgcagcactcaaagcactcacacaggaggcctgacattatttatctgcaggtcagagggtttgagttgagggtgggggtattggaaacaattaggcattgtggcctcagttgcctccgcttcattctccaccctcctccacacacccgcagcactcattttaacccctcagtatgtcttttactttttccttcctttttagagttagggtctca

SEQ ID NO: 737798 - DNA, 553 bp, Homo sapiens
ccaacatggtgaaaccccatctctactaaaaatacaaaaattagctgggcatggtggtgtgcacctatagtcccagctactagggaggctgaggcaggagaatcgcttgaacctaggagagggaggttgcagtgagccaggatcgtgccactgcactccagcccggcaacagagtgagacttcgtctcaaaaaaaggaaatcaagaagctaaggcttcttggtggctcatggtggctcatgcctgcaatcccagcactttgggaggccgaggcgggcagatcacctgaggtcgggagtttgggaccagcctggccaacatggtgaaaacctgtctctaccaaaaatacaaaaattaactgggsgtggtggtgcacacttgtaatccctgctgcttgggaggctgaagcaggagaatcgcttgagcctggaagacagaggttgtagtgagccaagatcgtgctactgcaccctggcctgggcaacagagtgagactctgtctgaaaaaaaaaagaaatcaagaagctgttacacaggatcctgaaattgaaaaa

SEQ ID NO: 737799 - DNA, 522 bp, Homo sapiens
ataatctcaaaatgctgggattacaggcatgagttatcatgcttggcctccttgagttaattttaaatgacgtgtgctcattgttaaaaaataaaatttacatgagaaaaaagttttaaaaatttacagtcatgccatctagacatatctatttataggtttgagatggattcttctgttgttttgtatccgtatcgtatactaatattgatgatagttccctgggtaccaatttttcctactaccatatgctccgtgttgtgtcaagatataaaagaaatgcaaacagaagtgtggatgggctgggcgcartggctcacgcctataatcccaacactttcagaggctaagatgcgaggatcacttgagctcaagagttcaagaccagcctgagcaacatgataagaccccctctctacaaaaaaaatttaaaaactagccaagcatggtggcatgcgcctgtagtctcagctactagggaggcagaggtgggagattaagcccaggaggtagaggctgcag

SEQ ID NO: 737800 - DNA, 522 bp, Homo sapiens
ataatctcaaaatgctgggattacaggcatgagttatcatgcttggcctccttgagttaattttaaatgacgtgtgctcattgttaaaaaataaaatttacatgagaaaaaagttttaaaaatttacagtcatgccatctagacatatctatttataggtttgagatggattcttctgttgttttgtatccgtatcgtatactaatattgatgatagttccctgggtaccaatttttcctactaccatatgctccgtgttgtgtcaagatataaaagaaatgcaaacagaagtgtggatgggctgggcgcagtggctcacrcctataatcccaacactttcagaggctaagatgcgaggatcacttgagctcaagagttcaagaccagcctgagcaacatgataagaccccctctctacaaaaaaaatttaaaaactagccaagcatggtggcatgcgcctgtagtctcagctactagggaggcagaggtgggagattaagcccaggaggtagaggctgcag

SEQ ID NO: 737801 - DNA, 621 bp, Homo sapiens
aaatgtcatctgccccatacaggactcttgacagactcaccctgcctctgtccaatcacactgcttctctgttgtgaatcttgtgattcccatctcattcagctccttgcagcagcttatagagtcctcagtgatctggccctctccctcctaccccttccccacccacgttcacagcccctccagccacgttttccaagtgctcactaagcctatgcctgagcagtgcccttgtgctcgttctgcctggagcaccttccctgcctgtgcctcatgcctcgctccttctcatcaattagttctgggcccaacatcatctcccagagaggcctcttggaccratctgcttggaatgactcctcacatctctccaccctccaccttgctttagttttcttcctgatcctaatggtctctgaaatgacagtgtttatttacgttcttgtgtgtgatcttccttgccgactgccaggggcaccccacgagcacagggactctgtctcttgtttgccgctcctacaggcgcctgctagagagccttgctcatagttggaaccccaaaatatttgctaactataagaagacattttggagagaattgagaagaatcaaataagaact

SEQ ID NO: 737802 - DNA, 510 bp, Homo sapiens
cttagtgcatccctttagaaagtaagcaatcagaaaacaagcctcggctgtgtgatcattgtgcttccgtaagactggtccttgacatccgagtcagaaccagcataggagaaactggtttttctcctgaccaaaagaagagtccttagaaagggcttcttaggaaggaaggcttaggagtaaaaaaaaaaaaaaaaaaagtgggaggggtccagggtcctcagagggacattagaaagcacraagtgtaaaggggctggttgagaacacacacacatgccccacgcccatggcacgacttggttttgtggggacttggcttccttgtgtgcagagtgggggactgattggggcagtgagagagggaaatgctatcaacatatggaggcaaggaaggagacctttgtgtgcttacaaccacagaccccaaaaggggacctgaaacctttcagagctggtaggtgcctcaacatcagcaagtccaggaccttattcatttgaataaaagaa

SEQ ID NO: 737803 - DNA, 634 bp, Homo sapiens
atagcttcaggaacctggacacatgaggctggtttcctgagaagggaacactcgagatggggcagggccttgacagacacttgcctcctgttcatgtcacaccccgcttgccaagagcgaccccaggagtggtccctactgagcctccatgtgggcttctgactcctgtgtgcacaatggttggattgacgtggacgctactgctctaagaatggcgtgagctttcggtttcttctagaggaggagattatggagcaggattctggyggccggggccaaggtttttcccttaccagatttcttggggccatccttgatgtagctgccagggaccatgctgaggtgtttccccttttgctccactccatagaggcttcggtaggaggcggcgtccttcctgaatctctttcctaaggccttggagggagcaggtgagaagtcacaccccagttacaggacctggctcgccctccccgctccatcccaagcaaacagcaatttcaagggtttgccaaaaggcaggcaaaggcaaccaaggagagagcttccccgggccctgggagaggtcggaggggcagggtctgcccacgggtgcttgctcaccaacgcctccctcttctccccaccatatatc

SEQ ID NO: 737804 - DNA, 453 bp, Homo sapiens
actgcactccagcctaggtgatagagcgaaaccctgtctaataaaagaaaaataaaattaaaaggctacatggatatctgggggaagaatagactcaatatcccccactcccattccaacactcaagaagaaaagaaaattcttgcaattatttttttactcaagtgattttgtgaggcttgacccaataatggaatggcttygccaaggctagagaactcactcagccggttttcccattacagacctcttgggtgatagcaattctgttaaagtggaaactgatggcatcatttgccatttttactgtccccatacatagtccttaccatggcatgcagacccctacgctatccagctcctgcctcccatttcataccactcctccttctcctgccaagttctagcccctggactttctgttgctcacatttccagttcgttcctgcctct

SEQ ID NO: 737805 - DNA, 731 bp, Homo sapiens
cgcctgtaatcctagcactttgggagacagaggtgggtggatcacttgaggttaggagttcgagaccagcttggccaacatggcaaaaccccgtctctactaaaaatacaaaaagtagccaggcatagtggcacatgcctgtagtcccagctacaggaggctaggctgaggcaggagaatcacttgaacccaggaggcagaggttacagtgagccgaggtcgtgacattgtactccagcctgggcaacagagcragactccatctcaaaaaaaaaaaaaatacaaaaattagccaagcgtggtgacacacacctgtaatcccagctactcaggaggctgaggcaggagaatcacttggacctgggaagcggaagctgcagtgagccaagattgcaccaccgcactccagcctgggtgacagggcgagactctgtattaaaaagtaataataataattttagtgattctgttacagtgtgtagtatacctctttaaactagcacagtctatcttccttttatgtaaacataagagccttatcagagtatacttccatttctcctttccccttctacatgctgttgttgccacacattatatttttccatattataaaccccgcaagtgttatgatttttgccccaagcaattatgttttcaagagacttttgtgtttactcacatatttaacatttccagtgctcttcattggatccagatttctgtgtgga

SEQ ID NO: 737806 - DNA, 731 bp, Homo sapiens
cgcctgtaatcctagcactttgggagacagaggtgggtggatcacttgaggttaggagttcgagaccagcttggccaacatggcaaaaccccgtctctactaaaaatacaaaaagtagccaggcatagtggcacatgcctgtagtcccagctacaggaggctaggctgaggcaggagaatcacttgaacccaggaggcagaggttacagtgagccgaggtcgtgacattgtactccagcctgggcaacagagcgagactccatctcaaaaaaaaaaaaaatacaaaaattagccaagcgtggtgacacacacctgtaatcccagctactcaggaggctgaggcaggagaatcacttggacctgggaagcggaagctgcagtgagccaagattgcaccaccgcactccagcctgggtgacagggcgagactctgtattaaaaagtaataataataattttagtgattctgttacagtgtgtagtatacctctttaaactagcacagtctatcttcmttttatgtaaacataagagccttatcagagtatacttccatttctcctttccccttctacatgctgttgttgccacacattatatttttccatattataaaccccgcaagtgttatgatttttgccccaagcaattatgttttcaagagacttttgtgtttactcacatatttaacatttccagtgctcttcattggatccagatttctgtgtgga

SEQ ID NO: 737807 - DNA, 637 bp, Homo sapiens
aacttgtagcctaagctctgcggactatgatacctggattcagacctcagctctatcacttactagcggtgtgacctcaaataaagcccttaacttctctgagcctcagtgttttcattggtaaatgggaaaaataaaaaataatacttatctcacaaagttgtgaaattaaaataagaatgacggtgacgtttaataacattattggtgcctggtattctcctaggcaccgtgtattaactcccctaatccacacaataactaacgttatcacgtgggtactgttatctcttttttacaactgaggaaactaaggcaaagagatgctaacttgcccaatgctcagattctaatgctggcagtccggttccaaagccctgttcccagccccaagaagcccttgagcagagcacataagaaatggctagctccaggccgggcacagtggcccatgcctgtaatyccagcactttgggaggtctagatggggggatcacttgaggccaggagtcggagaccagtgcggacaacatagcgagaccctgtctctacaaataataataataataataaaaatcagccatgcgtggtgccctgcctgtaatcccagctacttgggagactgaggcagagtatc

SEQ ID NO: 737808 - DNA, 542 bp, Homo sapiens
gatgctgaaagtgaaatgacagagatgctagaaatgcctggcaagggttttaaagcagcaaccataaaaatgctttaacaagcaactacacacttgcctgaaacaaaggaaaaaatagaaagtctcagcacagaaatagaaggtatcaaaaaataccaagtggatattttagaactgaaaaattccataacttaaaaaaaattaaatcaacaggctcaacagcaaaatggagggaacaggaaaaaaattcgtgaactagaagatagaataatagaaattatccaatctttttttttttgtatttatgtttctgcccaactattaacaatcttaatttaaaaagaacaaataaaccgggaaaaaattaaacagaaccttaggaaactgtgagaytataacaacaacaaaaaaaaccctctaacattagtgtcattggaattatggaaaaagaggagaaagagttagggcgtggtggctcatgcctgtaatcccagcactgtgggaggctgaggcgggtggatcacaaggtcaggagattgaga

SEQ ID NO: 737809 - DNA, 494 bp, Homo sapiens
ggaacccagccaggagtcctcaggctgtcagggcaggcagttctccttcaaggaggccgatcagagctcttacttcgttaagaagacagtagggccggggtaatgtcctcgttgtattctcagagctgattttcttttctgttttctatgagactttaaaagccatcagctaataaaactgtcyttcgggtgctcagtgtgccacaaagtgttgccaagtgcagcacatcctcatatcccctccacagttcagggtgcagacatccttctccccagttacagattcagaagccacccatgagccccatcgcagatccaggcctcccaaggaagcctcattcgcacagaaagctctaaagctaagatcatctcagacagctgtgattaaacactcatttcacagacgaggaaaccgaggccctgagtaggaaaggggcttgcccagagtcacagggggaaatgatgacagagaagagcatggatgcccagcccag

SEQ ID NO: 737810 - DNA, 512 bp, Homo sapiens
aatatggtgaaactcccgtctctactaaaaatacaaaaataatctgggcatggtggtgggtgcctgtagtcccagctactcatgaggctgaggcaggagaatcacttgaacccaggaggcagaggtggcagtgagccgagatcactccactgcactccagcctgggcgacagagcaagactctgtcaaaaaaaaaaaaaaaagcattakagatccatggaaaggtatagcatgttgcatgcgtgcgcacacacacacacacacacacacacagagcacccagagggtttcaaatggaaaattcttttttgaatcatgggatatgaagcttgcagaacatcagacaaggccttgtattccttgttccttttctcctctctagactagagataattgttcttgccttacctcctccaggaaggcttgggagtgggggaagaggttggtgccacaaattacaggggatccagcacttttttaaactggataattctatgtgcatatgaaggatta

SEQ ID NO: 737811 - DNA, 589 bp, Homo sapiens
ggactgcataatatctattaatctatctccatgtttgctctttcttcttgtagttcaagtctattgctgaacacttctagtgaacttttcataacagttattgtgttttacaaccccctcatttttatttgcttctatttttataatttctattactttattgatattctctatttgatgagattaccaatatacttcctttacttcttcaaatatagttttcttcagttctttgaacatttttataatggctactttgaagtcactgtctatctgacccagagttgctctcacgggcagtttttaatgcctatactttgtcttgagtactagccaggcttcctttctcctttgcctgactcccaatttttggttgtaaacaggatgttttctatgatataytgtagcaactttgaattctacttacaccgagccctccaagacttatgttttcttgcttgtatatttgtttagtgactccttttgttactgtagtcattactctttcccctaagtacaatgcttctgatgttgctccacagagggtggagtcttgaacacaattatagtcaccctcagatggcagtgg

SEQ ID NO: 737812 - DNA, 469 bp, Homo sapiens
gattacttgtctaaaatgaatcagtataacttttagcttaaaaaccaggcccacatttaacattttagtttgtccatatggtctagttgtgagaaaaatgcacaatcttgaaattttaacaacagatcataagctatttttgaaaaattctataaattagagaattttgttttttggggtttactgttgctttagaagggcaaaggtaagttacattttgaatatatcattcacttactccataatgtaaattctacaagtattgatttaacgtatactatggagggtccctcaaacctgatwactgatattctctacataaagactttcttggattatgcaggtttaggagactgacagagaaaaacggaagagtattgccctgtctgtacactcatatacccacatttaagctgggatgtggggaataaacaatagtgaggagtttacttggctctgagactatgac

SEQ ID NO: 737813 - DNA, 565 bp, Homo sapiens
aaaacagaccaataaaacaccatatagatcccaaaaataaacccacatatataaagccaagtatatttccaccaaagtgcccagaatacacaacggagaaaggctgatctctttaataactggtattgggagaactggatatccacatgaaaaataataaarttggacacttacatagtgcacaaaaatcaacacaaagtggattaaagatctaaatgtaagatctaaagttgtaaaacttctagaagaaaacactgaggccaggtgcggtggctcacgcctgtaatcccagcactctaggaggccaaggcaggtggatcacgaggtcaggagatcgagaccattctggctaacacagtgaaaccccgtctctactaaaaaatacaaaaacttagctgggcctagtggcgggcgcctgtagtcccagctactcgggaggctgaggcaggagaatggcatgaacccaggaggcggagcttgcagtgagccgagatcgcaccactgcactccagcctgggcgacagaatgagactccgtctcaaaaaaaaaaaaaaaaagaaaacat

SEQ ID NO: 737814 - DNA, 565 bp, Homo sapiens
aaaacagaccaataaaacaccatatagatcccaaaaataaacccacatatataaagccaagtatatttccaccaaagtgcccagaatacacaacggagaaaggctgatctctttaataactggtattgggagaactggatatccacatgaaaaataataaagttggacacttacatagtgcacaaaaatcaacacaaagtggattaaagatctaaatgtaagatctaaagttgtaaaacttctagaagaaaacactgaggccaggtgcggtggctcacgcctgtaatcccarcactctaggaggccaaggcaggtggatcacgaggtcaggagatcgagaccattctggctaacacagtgaaaccccgtctctactaaaaaatacaaaaacttagctgggcctagtggcgggcgcctgtagtcccagctactcgggaggctgaggcaggagaatggcatgaacccaggaggcggagcttgcagtgagccgagatcgcaccactgcactccagcctgggcgacagaatgagactccgtctcaaaaaaaaaaaaaaaaagaaaacat

SEQ ID NO: 737815 - DNA, 565 bp, Homo sapiens
aaaacagaccaataaaacaccatatagatcccaaaaataaacccacatatataaagccaagtatatttccaccaaagtgcccagaatacacaacggagaaaggctgatctctttaataactggtattgggagaactggatatccacatgaaaaataataaagttggacacttacatagtgcacaaaaatcaacacaaagtggattaaagatctaaatgtaagatctaaagttgtaaaacttctagaagaaaacactgaggccaggtgcggtggctcacgcctgtaatcccagcactctaggaggccaaggcrggtggatcacgaggtcaggagatcgagaccattctggctaacacagtgaaaccccgtctctactaaaaaatacaaaaacttagctgggcctagtggcgggcgcctgtagtcccagctactcgggaggctgaggcaggagaatggcatgaacccaggaggcggagcttgcagtgagccgagatcgcaccactgcactccagcctgggcgacagaatgagactccgtctcaaaaaaaaaaaaaaaaagaaaacat

SEQ ID NO: 737816 - DNA, 609 bp, Homo sapiens
atcaaaagcacaagcaacaaaagcaaaaactgacaaatgggattacattaaactataaaggttctatacaataaaggaaacaacccaaattaaaaggcaacctatggaatggcagaaaatattttcaaattatatatctgataagaggtaacaaccacaatatacaagaaactcatacaactgaatatcaaacaaacaaaacccaaattattcaaataaaaacgggcaaagaacctgaatagayattttcccaaagaagatacactaatgtccaacaggtatatgaaaagctgcttaactcactaatcatcacggaaatacaagtcaaagccacaatgaatatcacctcacacttgttaggatggctattattaaaaaagtaataaatttaacaagtgtttagcaaggatgttgaagaaagggaatgattatacaccaatagtgtaaatgtaaattgatagagccatatggaaaactgtttaaagttcctcaaaaaattaaaaatagaactttcatgtggtgtaggaatatgacttctgggtgtatatccaagtaaactgaaataaatatattgaagatatattggaactcccttatttatttaaacat

SEQ ID NO: 737817 - DNA, 609 bp, Homo sapiens
atcaaaagcacaagcaacaaaagcaaaaactgacaaatgggattacattaaactataaaggttctatacaataaaggaaacaacccaaattaaaaggcaacctatggaatggcagaaaatattttcaaattatatatctgataagaggtaacaaccacaatatacaagaaactcatacaactgaatatcaaacaaacaaaacccaaattattcaaataaaaacgggcaaagaacctgaatagatattttcccaaagaagatacactaatgtccaacaggtatatgaaaagctgcttaactcactaatcatcacggaaatacaagtcaaagccacaatgaatatcacctcacacttgttaggatggctattattwaaaaagtaataaatttaacaagtgtttagcaaggatgttgaagaaagggaatgattatacaccaatagtgtaaatgtaaattgatagagccatatggaaaactgtttaaagttcctcaaaaaattaaaaatagaactttcatgtggtgtaggaatatgacttctgggtgtatatccaagtaaactgaaataaatatattgaagatatattggaactcccttatttatttaaacat

SEQ ID NO: 737818 - DNA, 609 bp, Homo sapiens
atcaaaagcacaagcaacaaaagcaaaaactgacaaatgggattacattaaactataaaggttctatacaataaaggaaacaacccaaattaaaaggcaacctatggaatggcagaaaatattttcaaattatatatctgataagaggtaacaaccacaatatacaagaaactcatacaactgaatatcaaacaaacaaaacccaaattattcaaataaaaacgggcaaagaacctgaatagatattttcccaaagaagatacactaatgtccaacaggtatatgaaaagctgcttaactcactaatcatcacggaaatacaagtcaaagccacaatgaatatcacctcacacttgttaggatggctattattaaaaaagtaataaatttaacaagtgtttagcaaggatgttgaagaaagggaatgattatacaccaatagtgtaaatgtaaattgatagagccrtatggaaaactgtttaaagttcctcaaaaaattaaaaatagaactttcatgtggtgtaggaatatgacttctgggtgtatatccaagtaaactgaaataaatatattgaagatatattggaactcccttatttatttaaacat

SEQ ID NO: 737819 - DNA, 607 bp, Homo sapiens
tcctgcatttgcagagggttctaggtgtcttgaggtttactttcaaggctcagtcagaaaatataaaattctgtcttattctttactttctactttctcaaagtaaaccagagctgagagccttggatattctcaggtttttctgttttatgctaaaactccttgatgtgcayacaaccctatacctgcatttgaagcttcatccaaagcctgctatgaacatttcattcccaagccttctctttcgggtattttagtcagcctctttttatcgctgttatcactacctcagaaagaggtggtgcagaaccattatctctctttggattcaacagattccctccagggaaatgactgtttgccttgactgaggactaaggtcaaataaaacaagaaatcctccctgtgagtgggaattcctaggaagcatccagagtgatcaaataatgacaattctctgggagtggagcatttgggaagcttcagtcctgttttatccctgccaatgtctgcttggctgctggcgttcattgtgatcatgggcctactggtttccaaggctacaatggaggcgatagagtgggatggaaataagacagaatactac

SEQ ID NO: 737820 - DNA, 374 bp, Homo sapiens
tctgacagtttcatttctaaggtatgagaaaaaattgataataaaagaaaccagaaggctgggcgtggtggctcacacctgtaatcccagcactttgggaggccgaggagggcagatcacggggtcaggagattgagacctgcctggccaacatggtggaacttcgtctctactaaagatacaaaaaattagccgggcrtggtggcacgctcctgtaatcccagctactcgggaggctgaggcaggagaatcactttaatctgggaggtggaggctgcagtgacctgagatcgcgccattgcactccagcctgggtgacagggagatactccatctcatagataaataaataaataactacaaggggagcaaaa

SEQ ID NO: 737821 - DNA, 522 bp, Homo sapiens
gtagcccgtgacctcactcggtgggcaggactggtctccagaaatgctttgggttcatctttcattgctgcaaggaacctccatgcctctaacactcatcttcagaagactgggactgctgagatgtcctctattcttaaagagcatgttcttggagmtgatacctctgctgaccttgaagaaactgggcatgtcttaagtattggtgatggtattgtccatgtacatgggctgaggaatgttccaagcagaagaaatggtagagttttcttcaggcttaaaggatatgtccttgaacttcgaaactgacaatgttggcattgtagtgtttgaaaataataaagtaaggaaggaggtatagtgaagaggacaggaaccattgtggacgttccagtcggtgaggagctgttgggtcgtgtagttgatgcccttggtaatgctattgatggaaagggtccaatgggttccaagacccataagtgagtcggtctgaaagcccccagaatcattcctcgaacttca

SEQ ID NO: 737822 - DNA, 522 bp, Homo sapiens
gtagcccgtgacctcactcggtgggcaggactggtctccagaaatgctttgggttcatctttcattgctgcaaggaacctccatgcctctaacactcatcttcagaagactgggactgctgagatgtcctctattcttaaagagcatgttcttggagctgatacctctgctgaccttgaagaaactgggcatgtcttaagtattggtgatggtattgtccatgtacatgggctgaggaatgttccaagcagaagaaatggtagagttttyttcaggcttaaaggatatgtccttgaacttcgaaactgacaatgttggcattgtagtgtttgaaaataataaagtaaggaaggaggtatagtgaagaggacaggaaccattgtggacgttccagtcggtgaggagctgttgggtcgtgtagttgatgcccttggtaatgctattgatggaaagggtccaatgggttccaagacccataagtgagtcggtctgaaagcccccagaatcattcctcgaacttca

SEQ ID NO: 737823 - DNA, 532 bp, Homo sapiens
cccaacgataattcatctttaatttactgtttctcatagaggttataaatggggaatgttatttcatttgcggtattagtagggggcacatcccaatatttaatatatgatatccggctgggcatgatagctcaagcctgtaatctcaacactttgggaggctgaggcaggtggattacttgaagccaggagttcgagaccagcgtggccaacatagcgaaaccctgtctctactaaaaatacaaaaattagccaggcatggtggtgtgcacctgtagtcccagctacttgggaggctgaggcaggagaatcgcttgaacctgggaggtggagattgcagtgagcygaggttgtgccactgcactccatcctgattgacagagtgtgactctttctcaaaaaaaaaaaaaaagtatgtatgtatgtatgtatgtatatatatatatatatatatatatacacacacacacacacacacatatatacatatgtatatatgatatatctttctagtggggtcacttaaaaatat

SEQ ID NO: 737824 - DNA, 653 bp, Homo sapiens
aacgataattcatctttaatttactgtttctcatagaggttataaatggggaatgttatttcatttgcggtattagtagggggcacatcccaatatttaatatatgatatccggctgggcatgatagctcaagcctgtaatctcaacactttgggaggctgaggcaggtggattacttgaagccaggagttcgagaccagcgtggccaacatagcgaaaccctgtctctactaaaaatacaaaaattagccaggcatggtggtgtgcacctgtagtcccagctacttgggaggctgaggcaggagaatcgcttgaacctgggaggtggagattgcagtgagctgaggttgtgccactgcactccatcctgattgacagagtgtgactctttctcaaaaaaaaaaaaaaagtatgtatgtatgtatgtatgtatatatatatatatatatatatayacacacacacacacacacacatatatacatatgtatatatgatatatctttctagtggggtcacttaaaaatatttcagcaatggataaaactgggcttctctttgtctttagataacaggactagctttcaatcccttcaaggatttggacaacagaaacattgttggaagcattggaagtgtgttactaagcgcta

SEQ ID NO: 737825 - DNA, 724 bp, Homo sapiens
cctctcaccatctccactttgcctccggttctattttccaaggtcccgggtgcaaatgtttgttgaatgactgatgaatgaaaatgatttgagtttgttaccttttatgcttatatgttgtggaaaatgaaattctcctcaaaagggaaggaaatacttgagagctgcataggaaggaaattatctaattaagaatgtatagaaacttcactgttgggcaaatcatcgttgtgacactgggggaagaagccatttaggtgctcagaagggaggctggaattcagagcaggactggacgtgccccacgacggtggttcttaggtcaggagtcagcaaacagtggcctgggggcccgatatggccsacgacctgtttttgcacaacctgccagctagagattgaagatgaacactgataatcgatttgatgatagggagcaccacccccaaagaattctatttgtctcatttgtaaacccgtattacaaacaaattgtactcaatcattatgtttgaaatttccctaatgacaaatttgtggaaaagtattttctgtcttgttatataagtacttgtacaacatattctatcagcctcttggtctgcaaaacctaaaatttactatctggctgtttacagaataagtgtgctaatccccgccccaggctaacagagctggacctgggaggcagacatctggatgctgggttagttagggtgaccga

SEQ ID NO: 737826 - DNA, 620 bp, Homo sapiens
ggcctagctgggcgacttcgagactgctgaggccccctgtaggcctctctccctcccctgctgcccacagcaacacaagtgggctggggcctttcgctggggcctcctctcctctcctgcctctaggatggcctcacccagcgcaaggcatctggccctctggacccacagacagaggccagccatgttgcccgttctcccctgccgtcctcccactgggacttgctcaacaaccctatagggtaggtcctattatcacccccatttcccaggggacgggatggaggcctagagtggaactgccagaaatgctggggtgatggcatacccgggtgagtggggtctgtctgagatggcttctagktggaagctgccttgtgaaggcattcattcattcattcattcagagatggggtttcactctcttgcccaggctggagggcagtagcatgatcataacccactgcagcctcaaactcctggccttaagggatcctcctgccttagccttccaaggagtagtgctacaggtgcaagccatgcacctggcctgggaaggcatttagatgggccagttaggaaccaagaggttgggggaggttgtttgggaggtggtgatc

SEQ ID NO: 737827 - DNA, 623 bp, Homo sapiens
gggctgccagagctcaggaagatagagtgagtagccagccctacagaggagggccacaggggtcacacgatggtcctaggagatactggcccctagctgaggccagcatggtaaaatctcccctgcgccaacctcagtgtccaggcagtggggctcggtgacctcctggccctcactgygggaccttaagccaccccagcccctgctcttctctgggcctttctgcctcattgtctgggtaggtgtgtggtgtcggggggttgtctcttaggccccctgaagcaggggtggcagacccagcagatgtgctggggtgtcggggagagggggcatcagaggacctgatggctgcccccctcccacagcctctcagggaatagcatcagctcagccgggggagtgcagttggcagagtctctcgttctttgcaggcgcctggaggagttgatgtgagtgtctgcccaggtggcctctgccctctgtgccccccaggtccacctggcctcctctcccgcagtgggcacagggcagggcgggggtcccgagtgggcaggcccagtactcaatgctcattcctctcctcttccaggcttggctgcaatgccctgggggatcccacagcc

SEQ ID NO: 737828 - DNA, 581 bp, Homo sapiens
gtctcaaacacctgaccttggcctcccaaagtgctgggattacaggcgtgagcaaccacgcccagccaagattaattttttaaagtaagaaaaaagagggggccaatttaaagaaaaatatgatgcatcttaaatacaggaggtacatgtatgtggcaaaaatggcaacatcttgtgaacaacgtcatgattcaaacttgacggggaggggagcagggaggaaggtaacctgcaccctgacgtcttcaggggaggacacacaagcaccctatcaggtggcctctcttgaaaacccttgcccccacgactggcrccctgctttccccattcactgccttgtctccacccctcgacctccttgctctcctgccgctgactttgggacccctaccctgcaggctgtcctggaatctcctcggggatgaggcagctgccgagctggcccaggtgctgccgcagatgggccggctgaagagagtggagtatgaggggccgggggaggaatgggacgggctaaagggggacctacatcccgggaacaccaagaggccactgggtcagtcccctgcctcccagaaagc

SEQ ID NO: 737829 - DNA, 581 bp, Homo sapiens
gtctcaaacacctgaccttggcctcccaaagtgctgggattacaggcgtgagcaaccacgcccagccaagattaattttttaaagtaagaaaaaagagggggccaatttaaagaaaaatatgatgcatcttaaatacaggaggtacatgtatgtggcaaaaatggcaacatcttgtgaacaacgtcatgattcaaacttgacggggaggggagcagggaggaaggtaacctgcaccctgacgtcttcaggggaggacacacaagcaccctatcaggtggcctctcttgaaaacccttgcccccacgactggcaccctgctttccccattcactgccttgtctccacccctcgacctccttgctctcctgcygctgactttgggacccctaccctgcaggctgtcctggaatctcctcggggatgaggcagctgccgagctggcccaggtgctgccgcagatgggccggctgaagagagtggagtatgaggggccgggggaggaatgggacgggctaaagggggacctacatcccgggaacaccaagaggccactgggtcagtcccctgcctcccagaaagc

SEQ ID NO: 737830 - DNA, 619 bp, Homo sapiens
ccagctggcttcacccagtggatcccgcaccggggctgcagttggagctgcctgccagttccgcgccgtggtcccacgctcctcagcccttgaacggtggatgggactgggcgccgtggagccaggagcggcgctcgtcttggaggctcgggctgcgcaggagccyggggcggggggaggttcaggcatggcgggctgcaggtcccaagcctgctcggcggggaggcagctaaggttgggcgagaaaccgagcacagcagctgctggcccaggtgctaagcccctcactgcccagggcttgcgggctggccaggcgatcccagtgcagggcccgcggagcccacacccacccggaactcgcgctggcccgcaagcgctgtgcgcagccccggttcccgcctgcgcctctccctccacacctccccgcaagctgagggagccagctccggccttggccagcccagaaaggggctcccacagtgcagcggtgggctgaagggctcctcaagcgcggccagagtgggtgcacaaggccgaggaggcgctgagagccagcgagggttgcgagggctgccagcatgctgtcacctctcactaccccagccagcatcccttctct

SEQ ID NO: 737831 - DNA, 577 bp, Homo sapiens
agttggggtgagacataagacacatactcaagatcccaagatctcaaatatcaatgagttaatttagtttggggacacatataatcaattcccaaggaaaacatggctccaaggctcctaacaaatgggaatgatgccaagataccaacatccagcagtcctacaagtggcatctacaaccatttgcagctgcatggcccatgctgactggagcaaaggctgccagaagcccagtgygggaaccacactctgccacacagtctgctgtggggtcctgggcagatcacttctccccggcctcggggttcctgatcagcagaacacttgcagctcttgtcaggctgcatgggggagcctcacccactgaacacggctcactcccccagggctgagctctggggagaggctgtcagggccattcaccttcttccaccagataaactgaacttcccctaaagctctgtagctgggggagcctcagccatcacagagcactcagggactgcctccgaaagctgccaattctctccatgtgaccaagtggagtgaccaaggacaaccgaaaggagaacagaga

SEQ ID NO: 737832 - DNA, 634 bp, Homo sapiens
cttttctgagtttagacgcactagttcccaaattacatcttaatctcccctgtctgctaaaacaaggtttttcaaccttggcactctggtattttggatcagataattcccttgaggggtaggaggtgggctgtcctgtgcattgcagaatgtttagcagcatctctggcttctacctacaagataccagttgcactcccccaccccaaatcatgacaattgaaaatgtctctagatattggccatgttccctgaaaaacaaaattgcctccagttgagaaccactggcttaaggaatctaaccagcagttaaaacttcaaaagagtttgtattctcttctctctaagcaaagccatcttacacattttaaaaagatctcttctctctcttgtaagtcatkaaaagactcagattcttcagtgcgacaaagtgtgcttcaaaatactattcatctttctgggaaatttactaaacttcacattgcccatttgtagttgcatgttaggtataatttattagtcaatttcacaagattttttctccccacgtgcgggccctgagacatagatggcagatgtctgttacttagatgtccattttctgttgcttagaacagactacctggaactgggt

SEQ ID NO: 737833 - DNA, 610 bp, Homo sapiens
gccagaagtcggtgggtagaaatactctggatagaatggatagattctgtttcacagggaaagacaaaaattaataatgtggcaattaatacttgggcaaaagtctcccatgatgggagatatttcttacttcacttaaatgggaactagtaaaagcctgtatctgtggaaggatggtatgtatcttgttgaaaaacttctggattttttctccacctctcccacaccctttaaacgttggtagacatgaggatagtgagttttatatagtatattcatcatgttatttaaaaaaaaatatagtccctaagccagtttttaaacagctctctgctggagagtagtgcttatgtcaagctaaacagagggcagtaaatgasgtaagtcaagtccttcatgagagtcatgccttcttctaaccaaatacaaaggaggctcatcacccaggagagggaagctacttttagttgcttttgcagcaacatgatttcaggatgaaaacagaatatactcaagtctttctctgcatatacaatttcttatcttcttattagaagctagttggccatttctcagatgaaaattgaaatgttacagatgttctttccaa

SEQ ID NO: 737834 - DNA, 632 bp, Homo sapiens
aacatattcattaactaaagaacaaataactaaattatgacattttattacatgtgccatacatcaattaaaataaattacctaatgctacatacagaaacatggatgaatctcacaaacaaaataatgagacaaaaaaagcagacacaaaggagaatataacacttgattttattcatatcaaatcaaattcaaaaatagacaaagctaatctgtggttttagagattaggacagaagttatcattggggaagaagggttagtgacagggaggaatcatgaagggtattttaaagtattgttaacattctctttcttgatatggctgaarttaattttttccaagctataaaactgggaattttgtactttttaattcatattaaaatttaattacttaattcacatagaaaaacagtaaagtaaaaactcttactttaaactgtgctcctatatcagtgccttaacaaataaaatgtgcagggtcatgatcattttgaacaaagtagagtaaactaattcccctacagtacatcccactgccccaaaggtagcactttcagggaaacccaagatgccaccaatgccacattctaatataaatcatgcacctatagaaagttttaaagttt

SEQ ID NO: 737835 - DNA, 562 bp, Homo sapiens
attgcatttgcttttgggtttttggtcatgaaatccttgcctaagccaatgcatagaaggagttttccagtgttaccttgtagaatttttatagtttcaggtcttaggtttaagtccttaatccatctcgagttgatttttgtataaggtgagagatgaggatccagttttattctcctacatgtggctagccaattatcccagcaccatttgttgaaaagggtgccctttcctcactttacgtttttgtttgttttgcaaagatcacttggccataagtatttgggtttatttctgkgttctctattctattccattggtctatgtgcctgtttttataccagtagcatgctgttttggtgactatggccttatagtatagtttgaaatcgggtagtgtgatgcctccagatttgttctttttgctgagtcttgctttggctatgcgggctcttttttggttccatatgaatttcagaattttttttttctaattctgtgaagaatgatggtggtattctgatggggattgtgttgaatctgtagattgcttttggcagta

SEQ ID NO: 737836 - DNA, 654 bp, Homo sapiens
atactaaaattgtaaaacataaaatgtgaagtgaatctcctttatccacaatggctgagagctgaactaaatagaatgccctctgagcaggggcagaggcagcctgaagcccatgctgggcctccagggcatagcygtcagttgagggatgaaaacttcatcttcttgccaggcacagtggctcacccctgtaatcccagcactttcaggaggctgaggtgggaggagcccctgagcccaggagtgtgaaatcagcctgggcaacagagggagattctgtctctacaaaaaaaacaaacaaaaacaaaacaaaacaaacaaacaaaaaacaaaacaaaaaaattcaaaaattagctgaatgtgggggagcacgactatagtcccagctactcaggaggctaaggtgggaggatcccttgagcccaggaatttgaggccgcagtgagctatggctgtgtcactgcactccaagtccgggtgacagagtgagacacagtctctaaaaaccaaaaaagctccactttccactcttttctttcaggcttcctatccagtcgggaggagattgcttcttattaccactgtcctgaggcacccctagaagctaaggtgagccttatacaagacaccagctctgaagcaatttagggcaaa

SEQ ID NO: 737837 - DNA, 633 bp, Homo sapiens
tatggctataataacgtacaagttctgattaacccaaaagggaaatagcgagttcccagtggcctctgtccatcttttaggatttagaaggttctagaaggaatggtcagctgctgtgctttatagctccatcccatgacttactgtctttccttgcatcccacagccttttctttttccttttttttttttttttttttttttgagatggagtctcgctctgttgcccaggctggagtgcagtggcgcgatctcagctcactgcaagctccgcctcctgggttcacgccattctcatgcctcagcctcccgaggagctgggactacaggcgcctgccaccatgccyggctaattttttatttttttatttattttttattttttatagagacggggtttcactgtgttagccaggatggtctcgatatcccaacctcgtgatccacccgcttcagcctcccaaagtactagtactgggattacaggcgtgagccaccgcacccagcctctttttcctttttaaaaaattatttttaaattattttagacaacaaaaaatttgcaaaaattgttcagagagtttctgtgtattcctcacccaacttccccaatgataaaaatcctagataact

SEQ ID NO: 737838 - DNA, 633 bp, Homo sapiens
tatggctataataacgtacaagttctgattaacccaaaagggaaatagcgagttcccagtggcctctgtccatcttttaggatttagaaggttctagaaggaatggtcagctgctgtgctttatagctccatcccatgacttactgtctttccttgcatcccacagccttttctttttccttttttttttttttttttttttttgagatggagtctcgctctgttgcccaggctggagtgcagtggcgcgatctcagctcactgcaagctccgcctcctgggttcacgccattctcatgcctcagcctcccgaggagctgggactacaggcgcctgccaccatgcccggctaattttttatttttttatttattttttattttttatagagacggggtttcactgtgttagccaggatggtctcgatatcccaacctcgtgatccacccgcttcagcctcccaaagtactagtactgggattacaggcgtgagccacygcacccagcctctttttcctttttaaaaaattatttttaaattattttagacaacaaaaaatttgcaaaaattgttcagagagtttctgtgtattcctcacccaacttccccaatgataaaaatcctagataact

SEQ ID NO: 737839 - DNA, 542 bp, Homo sapiens
gtgcattgatccttttacaacttttgtgaaactgatggacaggcaggcagggaggggtcctgggagagagtctggggcactccatcttggggtatctctttcgctctcctccttagcgggcgaagctttggcctgtgctggggtgggggaagaagaaggtgatgtggagcatgaagcaaggttggggtggagcaactgagggtttccagcatgggtaacsgggctgattaggactggatccagctgcccctaatgctccactgctgcccagcacttaacctccacactctgtgccctctgatggttgggagaagtctgtgtccagcccttcggccaccagaagaaaatcaggaatggaattcctggttttgaagacacaaaaagtcagagagactttatttaaatagagttaatttgaagtaaaccagagagttttgtgtgcagaagcattttgcttaacttagggccatcaccacattatgaactcttgtgtgtgtgtgtgtgtgcacgcgcgcgtgcacaggctagtgtccttctgtggg

SEQ ID NO: 737840 - DNA, 572 bp, Homo sapiens
atatacaaatattaactcaaaatggaccatagacctaaatgtaagagctgaaactggctgggtgcggtggctcatgcctgtaatcccagcactttgggagaccaaggcaggcagatcacttgaggccaggagttcaacaccagcctggccaacatggtgaaacccctgtctctactaaaaacacaaaaattagctgggcttggtagcatgcacctatagtcccagctactcaggaggctgaggcaggagaattgcttgaacccaggaggtggaggttgcagtgagccaagattgcacaactgcactccagcctgggcaacagagcaagmctctgcctccaaaataaataaataaataaaaataagtcaatcaaatttaaaactggacaaaggatttaaatagacatttctccaaagaagatacacaagtggccagtgagcatgaaagatactcaacatcattaatcataaggaaatgcaaatccaaaccacaatgagataccaccccacatccagtaggacagctaagataaaaaataaaacagcaagtgttggctgggtggggtggctcac

SEQ ID NO: 737841 - DNA, 612 bp, Homo sapiens
ggatccttaccaagatttggaatcctgagagaatggcttctaatcaataaactctcctttattaaatcctattctccttccccttgaatttgatctaacacccttagaatctagtctcatgggtactccttggccactgtcagttcatgctgtttatgtcttggagctcctttgggttatggtctctttcctcccttaggaatcccagcacctcaatggtcagggttgtgttgctrtttaaccgtgagtagtaaccctgatggccagtggaggtggtaagggcatttcttgacagaagcaggcacctgttagcttgaggaggaaatgcctctctgcattatctccctgcacaggttaagtggtagctcttagtgggggatggtgcagagaaggcacttctgcaaacttgtaagattcagagaagtttgaaatgttaaattccttggggcatggctcctactcagataacttcatctcacgtgtcagggtcgcatgttttcccaactagagcctccaattttgtcataactggcctgctttggttgaacattcaaccctctttgatgttaagctatgctaactattcaatgtagtacttactgttctgttttc

SEQ ID NO: 737842 - DNA, 629 bp, Homo sapiens
tacccaaactcttcccatgtctgagatatctgcatggactggtgtctaatttcattccagcattctgcactcagaacagtcaccaacttctgtttccagcaaagtggaggaaacctgctgagaagacaggttcaggagaaattttcaaatttacaggttgaacaaacaaaagaatgctgttactgcatcagaagcaaatcacagggatgctcagaaagtcaaaatagagaattcaaataaaacaatgtaatgaaattatagcctggcttagaaaagaagttagcctagcatttggctgcatatttttaaaggggctttcaagggacagatgtcactaaataaagggtaatgaggtaaagaagatgcatggaaggcaagcaaaactaacacagaycgaaggcctgacactgtttcctttcaaatatacttttaagttttatttttaagttgctctgtttatggatgttttaatccctattttacatgtgatggactggaggctgtgaaaatttaaatagcttccctggccaataagagtttccatcaataagatttgatcttatttgtctgaattatagccagtgcattgttttttttttttttttttagatggagtctcactcttgttg

SEQ ID NO: 737843 - DNA, 636 bp, Homo sapiens
tgcagcatggtataagaaaagccctttgcatgaactttccaggtcactcggataatgttcaataattcatgtctttctcatagtaagtgcacttagtatcccaaatggtttaatgtagcttccaaagagtccaggaactgcctggacttagctcatttttgtagcaggatatgattaaggacagagagataaaagaggaatcaagagaacttcactaagactattttttccatttcctgaatgagaatattttttgtttttagtaatccatgtaagcttcagcttctctatatctaaaatgggaatactaacaaatctgacttgcttagaatattgatatggggcccaaatgatattaatgtaatgcgtaagaaagcatgcaagaccctgaaaaatgcccttactatttgtattaatgagctgggttttgctggcagaacaaaaaccctccratctcaatggtttgcaaccagaatattgtctctcattcatgctacacgttgtggttgcatgccactctgcaccaaatgtcttcttcttcattccagagtcaaggctaaccctctacctgggatattattacctgatagtagagagaaaaagcaatagtagaacctcatgatggttcttgaacct

SEQ ID NO: 737844 - DNA, 554 bp, Homo sapiens
acacgtaatgaatattgactctgttatgaagtagtgaggatgccacggatttctgaatggtttagcacaagtcacatgcctacagtttgaaatcttttgaagcgtattcaaaatagcttcattatgtttattttaatgcctgtggcagacagttggtgctttccagctatctgcatgctctgtgatatttctgcagcacctttgcagtgaattgaagccatgtgaccaattccagtyaatggatagggagagagaaagtgacatgtatcacctctgggctgaaacaggtaaaagccaggtccttttccatctctctgcccccgacacaataacagccaaggccatactccagataactcagcttcaagaggaaggaggacttcctaagtcatgtcagcttttgtgtggatgtgatatgtcaagccactgagatttaggggtttatttgttaccacagcagagcttaactttatcctgactaatagaaatatcattaatgtaaaaagcatgatgaccatgagtatggcgatgacatgaggtccaacgtatatcca

SEQ ID NO: 737845 - DNA, 535 bp, Homo sapiens
atctttaccatttcttcagattaaaacattttaatgatctatttatgaggtaacaatcagaagcaaattcagaagagacaccaatgactaccacactatttggttttgtttgtttttgagatggagtctctctctgtcgcccaggctggagtgcagtggcgcgatctcggctcaatgcaacccccacctccctggttcaagcaattcccctgcctcagcctcccaagtagctgggattacaggcgcacgccaccacgcccggctattttttttttttgtatttttagtagagacggggtttcaycatgttagctagactggtctcaaactcttgacctcaggcaatccgcctgcctcgacctcccaaaatgttgggattacaggcgtgagccaccgtgcccggcaactatttgtttatcttgtatacaaatatgagtttttgtcagctgaaattgctcctcattgacactctggactagactgggtctgtaaatccaggaaatcaagaaataaatcttttgtgaatcaaggaata

SEQ ID NO: 737846 - DNA, 630 bp, Homo sapiens
aaaaaataataagaagaaagaaaaaagaaaaggctgtttcatttacactgaaaatctgttgtttagtgtagccaccttcatcaattatcttagctggatcttctaaataacttactgcagcttccgcatcagaacttgctgcttcatcttgtacttccatgttatggaaacagctgctttctttcttttttttttttttttttttgagacagagtcttgatctgttgcccaggctgtaatgcagtggcgtgatcttgactcactgcaacctccgcctcccaggtttaagcagttctcctgcctcagcctcccaagtgctgggactacagtcgtgtgccaccatgcctggctaatttttgtatttttagtagagatgggcttttgccatgttggcgaggctggtcttgaacttctggcctcatgtgatccacccgccttggcctcccaaagtgctgggattacaggtgtgagccacctcgaccagcctggaaacagcttctttcttttttaaaattattttatttatttttaatttttaatttttttgaaacgaagtctcaycctgtcacccaggatggagtgtagtggcatgatctcagttcagtgcaacctccacctcccgagttcaag

SEQ ID NO: 737847 - DNA, 634 bp, Homo sapiens
acttgggctctcctgatgtttttctcttgattagactacagttaggggctttgaggaagaagaccacagagatgaagtacgtgtctcatagcatcatattgggggtacgtgatatccccatgacctatcactgccgatgtcaaactcggtcacttggttaccgtattgtatgccagatttctcctctgcaatgctcctgtcattctctgtccacactctgttctttggaagcaacccattaagtttagttcaccctcaaaggagagattaagctccacttccttgagggagagtattgacatatatgacttagaattcttctgtagagaggaatgatgytatgtcatgactcaagacaaaattggggccctgttagtaaggaaataggggagcatgagattccaaccctcaattgtaaatggggaaactaacatttgcctgacctatgctgataagagaatgtctacatctaatgttggaacaagcaggagcttggaatagtggtggggtttttaccacaggttggcaacttttgacaggcgagtttattcattcaaggcttaaagactagaggctgggatagagggaggtacacagtggtgagtaagggtgtagcgaacatacttcattgtta

SEQ ID NO: 737848 - DNA, 623 bp, Homo sapiens
tatttattctcccaattttaatgatgtggaaactgagtcttcaactggtgaagaaacgagccgaagtgcaaatagcagctgtggctctgcacgtcctgcttggtcccagaggacatgtgcgctgagcccttcctccacatggagacaagcctgagatcarcaccagcagggatgtccccttatgattgtcgtgtgacgaatgaagaatggagcagtgaagcagatccattacccgaggccacggggaagcctgaaatcagaactcgtggtccacagcctgtgctctacggctacaggttcagccctggttttagtctgggcttcctcagaagcaaagcctgggacgaggacctggcacaggtggtttcttgggaggtgaggggccagggagtgagatcaggaaggggacaggcaaccaagggtgccttcgtgaatatgttacccgtgcaggttctgaaggccaatcccagtacaactctctataagatggagcagacacgcctcaggatcgtccacccagaagctggcccagaaactggtgacacatcctgccactcctgttccccatcggttggggctgttcctggacgtgctggctttttggcccttcagacttgacctat

SEQ ID NO: 737849 - DNA, 481 bp, Homo sapiens
atttgaataacatatatggaaaccttgaatgactaagtttgctctagtagatgaatgttaaacgtacgcacattttttggtgatatttctatctcagttctcaacacattctccttttcttcccccatcttccttctgccaccccttgaaaaccatttcatttcttcttcagacrtagcctccataaaccctatagttttaacatcgcttggcactaaacaagaaaaagaaaaaagcacctaatggcatttgcaaattactttcagtttgtggcttcgaaaagaagggttatggaaagtattgatagctgcacgactttctcagagggtgggtttgaaaaaaatggcagatcaaaagcttcttgagaatttgtgtgagtatgtgctgggagtctgttctgtccaaaggaaatcactggcaggtattaatttgagggagaaaaagttttaaggcaagtcaaagggaaaagggagaaaaaata

SEQ ID NO: 737850 - DNA, 548 bp, Homo sapiens
gtccaaccctgcaggcaggtggggatcctgcgcaagggaaaaaagttaccctagctggtgggcacggctggtgatggtctgggccccaccgaaacctaaggctgtccaatcctggactccaaatcactcacagccccttrcatgagtggtttcattcatgcattcatatcagcagcccaaagacttatttttatgcacttcctcgtgatttgtcctttggtcaccatgaactaaacttctctgcacccggcactgggctatacaggcttcacattaacgtcggattaaattctcctaagctttccgggagaaggcatggcctttcccccactttacacatgaggtcactgaagtcaagagaggttaactaacctacccatggcagccagaagtagagcctccctagaagccagatatacagactctaccaagctccagatagttccacagcaagccacggctagcacaccaccgtcttacgatcctgccaaaggctttcccactacagaccaggcgagtgggctgcagggagctctgaatttgggaac

SEQ ID NO: 737851 - DNA, 536 bp, Homo sapiens
ggcgtcttctgcagctgagcccaggggcagtgtcctgggccatgtggccagcagggtgggacaacaagggacggggtcgcatccatccatgaagggacgctgacttgttgtggggccgagaggaatcccaggcctttgacaattctgtcttcgtgtgctttgggggtgcgcaggggcagaggaacgcctgctgtctgcmagcataaaacatcgtgggagttgggggtctctgagctgattctggctggaaggctgtccaatttgcaaactgttcattgctcaattaaactcttaaaataaaacattgtcagcatgaaatgacagatggacagaggggaaccgtcgtggaactatccgctccacacggggccctggctacgtgtccaccactgcactagactagatttgcgacggacatgttgatgcacacctgttgtcacagacggaccgcccagtgccgtgttgtcccagcccagtggcaagggagcaagggtgtggtggtcgcacagcaactggcattgaggtgggaaggtgtg

SEQ ID NO: 737852 - DNA, 536 bp, Homo sapiens
ggcgtcttctgcagctgagcccaggggcagtgtcctgggccatgtggccagcagggtgggacaacaagggacggggtcgcatccatccatgaagggacgctgacttgttgtggggccgagaggaatcccaggcctttgacaattctgtcttcgtgtgctttgggggtgcgcaggggcagaggaacgcctgctgtctgcaagcataaaacatcgtgggagttgggggtctctgagctgattctggctggaaggctgtccaatttgcaaactgttcattgctcaattaaactcttaaaataaaacattgtcagcatgaaatgacagatggacagaggggaaccgtcgyggaactatccgctccacacggggccctggctacgtgtccaccactgcactagactagatttgcgacggacatgttgatgcacacctgttgtcacagacggaccgcccagtgccgtgttgtcccagcccagtggcaagggagcaagggtgtggtggtcgcacagcaactggcattgaggtgggaaggtgtg

SEQ ID NO: 737853 - DNA, 487 bp, Homo sapiens
ttcacatgagcatggtcatcaagaggcaagccatggtcacctgcaggcctccaacagaagtgaatatgtcgcagtacagggcagcacatgagctagacaactgtaaattgttctacaagatgaaatagttcaactagtatcaatgctctcattacattcagaataatatgtaatttagagcaatggtccttatccttggcagggtgagmgaggagcctttgtgaggagctggggttccctcccaagaatgactcacccacaattttctgtacaatttcccagggtcgataaagactattcatgggcctccaaactacaagaagtacacaggccccaagttaagcatcaataaattagagtaacagttaaagatacacaaaaacctaagaacagccaagtgcattcctgcaaacctagaggctctcagtcttctctcatctaatacctggctctgtctcccagtgctgggtggaaagtaacctcccct

SEQ ID NO: 737854 - DNA, 487 bp, Homo sapiens
ttcacatgagcatggtcatcaagaggcaagccatggtcacctgcaggcctccaacagaagtgaatatgtcgcagtacagggcagcacatgagctagacaactgtaaattgttctacaagatgaaatagttcaactagtatcaatgctctcattacattcagaataatatgtaatttagagcaatggtccttatccttggcagggtgagagaggarcctttgtgaggagctggggttccctcccaagaatgactcacccacaattttctgtacaatttcccagggtcgataaagactattcatgggcctccaaactacaagaagtacacaggccccaagttaagcatcaataaattagagtaacagttaaagatacacaaaaacctaagaacagccaagtgcattcctgcaaacctagaggctctcagtcttctctcatctaatacctggctctgtctcccagtgctgggtggaaagtaacctcccct

SEQ ID NO: 737855 - DNA, 626 bp, Homo sapiens
ggtttgtgggtctggtgacggggaccacaggcttgtgggtgcccgagtggcttctcctgagccctcagtctcccactcaggctggccttgccttcggcacagttgaggttctggagtctgtagccatgtcctaccattcctctctgtctccaaggtattcttaacatatatcattcctgcccccagctcaggccagctctagggaaacactacaatggtgtggygggtctccacggtccaggtgcagcttgggcagaacagagcttccagggtggcggcggcagtggcagacccgggtctccccacagaggcttcacctgctgctgctgtccaggtgctcactcgggtccagcaggtgaccacgggtctcaacaggaagttccgttcttctgttgtcagtgactcataggacaccactcagccctgggagctggctgggactctgcatttcactcccgacaagggcaggcactggtcagtggccagggctgctcgacactagcgggtccagggcttcagccattttcggtttgctacggcacagagctgaggcagccaaatggctctcagcccactacagactacctgacacacggctgtcacagggagagacatcgcacgactgt

SEQ ID NO: 737856 - DNA, 623 bp, Homo sapiens
ctagggagctgccaggtgaggtattaaatttagtaaaatccagctgggcgaggtggctcatgcctgtgatcccagcactttgggaggccaaggcgggtggatcccctgacatcaggagttcaagaccagcctgtccaacatggtgaaaccccgactctactaaaaatacaaaaattagccaggcgtggtggtgggtgcctgtagtcccagctactmaggaggctaaggcaggagaattgcttgaactcaggaggcagaggttgcagtgagccgagatcacgccactgcactccagcctggacaacagagctagactccatctcctaaaaaataaataaaaataaaaaaataaaaaataaaattagtagaagccagggcaaagcctgaatagatgatttacataaaagagacgacattaagtcataaacttttccaatagctccagacatgcctttatgaacctttctcactgttcttctggccctgtctgcctccctcagaacttcttggtgttgtgttagtgtgttgtttaatcactggaataagagcttctagagagcaggactaatgtttcattttcctattccttttcaatgattagcacagtgccttgtcatgtcata

SEQ ID NO: 737857 - DNA, 623 bp, Homo sapiens
ctagggagctgccaggtgaggtattaaatttagtaaaatccagctgggcgaggtggctcatgcctgtgatcccagcactttgggaggccaaggcgggtggatcccctgacatcaggagttcaagaccagcctgtccaacatggtgaaaccccgactctactaaaaatacaaaaattagccaggcgtggtggtgggtgcctgtagtcccagctactcaggaggctaaggcaggagaattgcttgaactcaggaggcagaggttgcagtgagccgagatcacgccactgcactccagcctggacaacagagctagactccatctcctaaaaaataaataaaaataaaaaaataaaaaataaaattagtagaagccagggcaaagcctgaatagatgatttacataaaagagaygacattaagtcataaacttttccaatagctccagacatgcctttatgaacctttctcactgttcttctggccctgtctgcctccctcagaacttcttggtgttgtgttagtgtgttgtttaatcactggaataagagcttctagagagcaggactaatgtttcattttcctattccttttcaatgattagcacagtgccttgtcatgtcata

SEQ ID NO: 737858 - DNA, 572 bp, Homo sapiens
ttttgcttaatcttattaacacatagttgtattcacatattttatttttcctaggcttttttaaaattgaaatgagtaatacccctatttttgtagatgattcttggagcaggagccaatttacttgctcacaaatttgagggtaagaaattgagggaaggcacagtgaggatgggtttgtctctgtttcacaaggcagcaattggggtaactcgaattgctggggccagttcagatgcatctgcartgatcatgcgtctgggtcttgtgatttacattgtctgtatctcttggatcttgtccagtagcctcttcatatggttaatttgggcttctcgggcatgatagtctcagggtacttaaaaatctggctttcctcaagagacaaaaatcagaaacttctaagtcttaaaccttagggatggaacttacatttccacctccctctattggttacagcagttctcatgcttagcccagaatcaacgggagaggactacacaaggacatgaatacaggaagaaatcatttattagagtccaccaatgtaacagactactaaagtttacatt

SEQ ID NO: 737859 - DNA, 621 bp, Homo sapiens
ctttcttagctgcaaaacggggacactaatgcttgatctgatccatcacagggcttgttaggaatatttaaatcaggcagactgtgtgaaagcagctaagaggtcactttctgcatagtaggcactcattataattgttaattctgaataacatgccacattttaaaaagggtttagaaagcctgagttttattttgaattgaatgttgtggcacgttgggaatttctgtctgtctgattgctattaaatttagaatcaggtaattgcagtcagagagccaaaggtyttaggggcataccatattgtccttctatggcctaccaacaatgttagtactcagtagtggccaatgtattccttacagtggtgttaagtctatcacactagatggatttcaatgaaatatggttcttgtgaagaggtcacagcaatatcttattgtcttgcgtcaaacaaagtcacgagactaactggaaatacaggcactaggtatttgatcatgatgtaatgtttggaaatataatccctaagcctcccatccttccaccagtattttcaaataaacaagataatcaggattatttaaagtttggggtctggttcttctcagatgaccctaa

SEQ ID NO: 737860 - DNA, 621 bp, Homo sapiens
ctttcttagctgcaaaacggggacactaatgcttgatctgatccatcacagggcttgttaggaatatttaaatcaggcagactgtgtgaaagcagctaagaggtcactttctgcatagtaggcactcattataattgttaattctgaataacatgccacattttaaaaagggtttagaaagcctgagttttattttgaattgaatgttgtggcacgttgggaatttctgtctgtctgattgctattaaatttagaatcaggtaattgcagtcagagagccaaaggtcttaggggcataccatattgtccttytatggcctaccaacaatgttagtactcagtagtggccaatgtattccttacagtggtgttaagtctatcacactagatggatttcaatgaaatatggttcttgtgaagaggtcacagcaatatcttattgtcttgcgtcaaacaaagtcacgagactaactggaaatacaggcactaggtatttgatcatgatgtaatgtttggaaatataatccctaagcctcccatccttccaccagtattttcaaataaacaagataatcaggattatttaaagtttggggtctggttcttctcagatgaccctaa

SEQ ID NO: 737861 - DNA, 621 bp, Homo sapiens
ctttcttagctgcaaaacggggacactaatgcttgatctgatccatcacagggcttgttaggaatatttaaatcaggcagactgtgtgaaagcagctaagaggtcactttctgcatagtaggcactcattataattgttaattctgaataacatgccacattttaaaaagggtttagaaagcctgagttttattttgaattgaatgttgtggcacgttgggaatttctgtctgtctgattgctattaaatttagaatcaggtaattgcagtcagagagccaaaggtcttaggggcataccatattgtccttctatggcctaccaacaatgttagtactcagtagtggccaatgtattccttacagtggtgttaagtctatcacactagatggatttcaatgaaatatggttyttgtgaagaggtcacagcaatatcttattgtcttgcgtcaaacaaagtcacgagactaactggaaatacaggcactaggtatttgatcatgatgtaatgtttggaaatataatccctaagcctcccatccttccaccagtattttcaaataaacaagataatcaggattatttaaagtttggggtctggttcttctcagatgaccctaa

SEQ ID NO: 737862 - DNA, 627 bp, Homo sapiens
ttatatttcaggcaatagtaacaaattaaagtaataacggaggagaaagcaaatagtgtccaggaaatgtcaatgctgagagattgtaactacacagtcacattctggtttagggtttccatgtgtttgactggaaatggggattcagtatttctgggaaagagattgagaaatgcacttttgagtgtccagtattttcaaattaagtatcattatttccatcttagactgtgatttgcactggaggattcctttttgctstctcaatttggattatatgtcactgtgtggtttatgactcagacacagtcatccgtaacattactgacctagcaacaagggaatctcaaaaactgtgctggacacaggcctgttggcatggttgtgagtccatattaacattgcctgccttacagtccgcatgcaagctggtctgcagtaccaaatatttctttttttacatctgtgtgagttgtggacctgtttttcctgcctttaactaccttgtatctcataatacaatgacttaaagataattactttcttgtgattttaaataaaaagctcattaccaaaaattaaagccacccagaaaaacataaaagaagaaagcaaaaatgtataaat

SEQ ID NO: 737863 - DNA, 627 bp, Homo sapiens
ttatatttcaggcaatagtaacaaattaaagtaataacggaggagaaagcaaatagtgtccaggaaatgtcaatgctgagagattgtaactacacagtcacattctggtttagggtttccatgtgtttgactggaaatggggattcagtatttctgggaaagagattgagaaatgcacttttgagtgtccagtattttcaaattaagtatcattatttccatcttagactgtgatttgcactggaggattcctttttgctgtctcaatttggattatatgtcactgtgtggtttatgactcagacacagtcatccgtaacattactgacctagcaacaagggaatctcaaaaactgtgctggacacaggcctgttggcatggttgtgagtccatattaacattgcctgccttacagtccrcatgcaagctggtctgcagtaccaaatatttctttttttacatctgtgtgagttgtggacctgtttttcctgcctttaactaccttgtatctcataatacaatgacttaaagataattactttcttgtgattttaaataaaaagctcattaccaaaaattaaagccacccagaaaaacataaaagaagaaagcaaaaatgtataaat

SEQ ID NO: 737864 - DNA, 554 bp, Homo sapiens
caacatttcctctaatttaccaggtaaaaagtgctgtgcaaagtgctcaggagcagcatgatatatccgacatgatctctcattttctttttttttaagcaagtacttagcacctactatgttttattctggcccttgagagtcacaggctacctgagataaagtctatatatttagaatctaacagtattaaaagaggagctaatatgttaaggccaagtaccattaatacaaggaagaatatccatttataayaggggagcacaaggagtaaaggaaattctttcaaaattaaagaaaaacatttattataaaattatttatgtatttatttgacatccctcacacatttcagtcaaatgtaaccagtctaaataattgaacatttatgcaacaaaaaacagactattctatgtttctaaatatggacctgtcctgcaatagcctaataataatatattctaaactaaataacagtatccagtgtcaatttataaatcaaataaatgagcatatttactgtcagtttagaaaaatatatatatagctttgtt

SEQ ID NO: 737865 - DNA, 579 bp, Homo sapiens
tatagttttgttgtttagaaaatgtataaatggaatcatctagcacttaactttcaaagattgacatttttcacttagtgtgatgtccttgaaatccatccaagttgtcccattacctgcagtttctttctttttagcactgggtagcattctattatgtgattgtaccacagtgtgtttagccagactcctcagatatttaakataattttcaatttttttcatcattaccatctcatgcttacacttctcataggtaatagtttaaaaattcttttcccaagatctttcttgtgaatgtttctcgttaaattctctataaatcatgtcccttattgatgtgccagagaggaatatttcgacatctaacttggccctccagcattcttcaacttggaaccaagttgaaggatacaacttccccagtagtaagaacaacatggttataggatcttggcaaaaatttggaacgtacaggttacagtaagtaattttggtaaatgttcctaattcactctgttcctttgcacacattaacattttactccagggttctttagcaacgcacttttaagtgct

SEQ ID NO: 737866 - DNA, 614 bp, Homo sapiens
aaggctcagtcttgttcttttgttactgaatacatctctcataaaactcagacgcctttttgggttgaccctggagctgagggtggaggcagcaaggaggtgggttaggaggaagcccatgtatttcatgtttcttctaatcagtttctttcaggtgcttcttcagggactgcctgatcccttcacaatgctcctgctcctgatcaaggaaaagacatatgattttgcagtctcctttagctctccttcatggaaatgattctcttgatactgaaactaaaacatattctaggcatggctgaaaagtaagcatcccgggcctcttttcaatttctccaagccccagccgcgattggaaattgttaagcagtctttctcrtagtttctttctgtttttactattttggtttgctttatatgaatcatttttcactgcagcaagaaaagtgagggagtgaaaggtaacagagtgctggggaatagaataatatttgctctctgctgagtcatctgactcagatcattagtagggccctttcaaggctggatttctagctggaaagggatttttaaaatgagaaaaactgaaaataacccccatgctgatggtcagg

SEQ ID NO: 737867 - DNA, 506 bp, Homo sapiens
cttcttgtccctaatgaggctctcagggaatctggtcccagtggccaaaggaggttcctacaaatgcctgctctgtgattgccccaaacatttacttacacagaggactaagaccatgagcccctactcctcacacactcaggacccgcctgtgtttccaagacattccaactcccacagtaagtagaagcattgaccagttatgtagaaatgaggaacaactgagagtgacagcaccaaccttctccaggaaaggtcgcagaggtgaamaattaagtatgtgttggctcagatgtgaagttcttttaggaatcttctttgctacatcatccagatacaggaagtaatgagtaatgtacagagaagtgaagtacaggagtcctgaatccatcagttgtcacttgagattaacccagtaatcatcagtcattcctccagtctctttatgagctgctaactagttgggtggggaactgaatgtaccagagacacacacattctcagag

SEQ ID NO: 737868 - DNA, 631 bp, Homo sapiens
tctctctggggcccaagtgcggatccgaaggggcctgggtccacgcttcgctgccaatataaatcccaattcctacttaatattgagcccagcctctgcatatctccaaaccgtttcaaatgacccaaagaacctgcctcttcccactcccctgcagatctgcatgcacggtggaggcaagcggctcatgacagaggtttctccatgttggtcaggctggtctcgaactgccgacctcagaactgccgacctcmggtgatccgcccgcctccgcctcccaaagtgctgggattaccggcgatcccggctgctggtctgcgctgcttctgcattaatgatcagtgcggggtcagggggccagcggaggccgggaaggagggactgaagcgaaagagtagagcagcggggtagggtctgtcctgagtgtgtgcctcacgaaatggaccctcttgtcttgggacccagttcttcctcgcctccccttcccttccttagatcggaacaggaactgcagggcggcctctgtcaagcacatctgtgagaagagaccaccaaacaggctttgtgtaagcagtaaaacttttttaatcacctgggtgcaggcggactgagtccgaaaaaggagtcagcg

SEQ ID NO: 737869 - DNA, 506 bp, Homo sapiens
cttcttgtccctaatgaggctctcagggaatctggtcccagtggccaaaggaggttcctacaaatgcctgctctgtgattgccccaaacatttacttacacagaggactaagaccatgagcccctactcctcacacactcaggacccgcctgtgtttccaagacattccaactcccacagtaagtagaagcattgaccagttatgtagaaatgaggaacaactgagagtgacagcaccaaccttctccaggaaaggtcgcagaggtgaacaattaagtatgtgttggctcagatgtgaagttcttttaggaatcttctttgctacatcatccagatacaggaagtaawgagtaatgtacagagaagtgaagtacaggagtcctgaatccatcagttgtcacttgagattaacccagtaatcatcagtcattcctccagtctctttatgagctgctaactagttgggtggggaactgaatgtaccagagacacacacattctcagag

SEQ ID NO: 737870 - DNA, 586 bp, Homo sapiens
cgcggccggctccggcgcctaggcctcagtcggtcccaggcgccgccacgccggccccgtggcccatctgcgccaggacttccccgaggcaggaaccgagcgccacgcttctcaccctatagaggacccacgcaagactcagacctctgctcccacgccggaaatctcagcgcgcaagttaggcgtccacaagcccacggcgcctgctcgtgaccaatttccgggtcacgttttgcgaactccagcgcccattaggtcaggtttctccacacactcaccrcctaccaatgagaagggaagatttgcctacggggactggatgagcgagggaccaattggagacgagaggcggggccacggggcgcgccctgaaattctgggagtgactgggggcagggcagctggatccaagcgaagaaaacaagcctgaggtcgttgtgactggcgggcaacctgggttagaattactccggagcgcttgggaaaacgcagatcccagggccacgcgctctccagtgcgtcagtgtcggggtgagacccggaaatctgaattgttaatcagcttccccggatgaatcctttccca

SEQ ID NO: 737871 - DNA, 498 bp, Homo sapiens
actgcactccagcctggtgacagaacgcgattccatctcaaaaaaaaaaaaaaaaaatcacgtttctaagagctccactgacatgggaagtaagaagtggaaaatcagaactcaaaattatatgcatcgattgcagccaacttttgtaaaacaatattccaagtgcctaactgcgattacctttgagctgcaaggatacaggttactttaattttcttctttatggtttatggtgtaccataatgcatacgtagacactagctttcaaataacaaaatgattttttgtcatttgaccccgccccctaagtcaggcagccaatcagggtgctcctggccagttcccacagttcagcgttgcttyacctctgcaccacctgggctacaagcgggccagggcccaaggttcatctgaaatgcttgttacttgctgtagtactcacatttccctctgctatttctttcttattctaaagtaacattctccaaattaacatgt

SEQ ID NO: 737872 - DNA, 343 bp, Homo sapiens
tctgtagtcccagctcctcaggaggctgagacaggagaatcacctgagcctggaaggttgagacttcagtgagctgtgttcataccactgcattccagcctaggcaacagagggagaccctacctgaaataataataattattawgatgatgaaaataaaaatatataataaaagagattaaatagctgggcacagtgtctcatgcctgtaatcccagtatttcaggaggctgaggtaagaggattgcttgagcccaggagttcaagaccagtcgagaccagcctgggcaacataatgagacatcatctttacaaaaaatttaaaaattagccaggtgtgttg

SEQ ID NO: 737873 - DNA, 544 bp, Homo sapiens
tctccttccgtgtctccatgcaagcccagagacgccagcatcatgtctgtctcccatcctccacttctctgacgaccaaaggtcctgggttctctgaggcctgcgcctgggccttgttacaacccagcaggcttatcttgattccagtaattgagaggcacatttgccaagtttatataccctcttgaaactcaagtactggtttgtggattaatgcgagattcagttgcatgcatttgaaatgcaagcgtctaattccgcgtgtaaaatacrgggccacagacctcttgggcattgcacaccattccattcagatgagcgcagcaaaagcaaactgtaacccctaggattaaattctcctttaaatactcacgggttttcagcttcgggggaaaatatgtctgggaaaaatatcttggggtttcatcaaacacttggaaaataatctgaaaacatttttccaaaccctccatgcctccagcctgaatcctaattgatagttaataactacatcgacagaagccttctcactctatcacgatta

SEQ ID NO: 737874 - DNA, 544 bp, Homo sapiens
tctccttccgtgtctccatgcaagcccagagacgccagcatcatgtctgtctcccatcctccacttctctgacgaccaaaggtcctgggttctctgaggcctgcgcctgggccttgttacaacccagcaggcttatcttgattccagtaattgagaggcacatttgccaagtttatataccctcttgaaactcaagtactggtttgtggattaatgcgagattcagttgcatgcatttgaaatgcaagcgtctaattccgcgtgtaaaatacagggccacagacctcttgggcattgcacaccattccattcagatgagcgcagcaaaagcaaactgtaacccctaggattaaattctcctttaaatactcacgggttttyagcttcgggggaaaatatgtctgggaaaaatatcttggggtttcatcaaacacttggaaaataatctgaaaacatttttccaaaccctccatgcctccagcctgaatcctaattgatagttaataactacatcgacagaagccttctcactctatcacgatta

SEQ ID NO: 737875 - DNA, 623 bp, Homo sapiens
cagctcccgcactctcttcagggttttggttgcattcagtggcagatgcagggtgagcaggacaggacaggcttatctattctgtggagccaaacctccatagtttttattttcataacaccaacctgtgtgggagccagtggctgagagcattgcagggctcagcacatcctgacatcacagggacccgggaaggcagccgacctccatgcaggaacttcctcctctacagcgtcacacaggagtcccctccaaggcctcagctctccgaggcacatgcgtgctcctcaccttccatttccatttcgcgtgttttgctggcgtcagtgctgctctccgttggaaatgcgggagccgcccctagccatgttacacgtggagaagctgcggtgccgggaggaagarggcggcgttaagtgggcagagctgagagtcactcctggactcctgcgcttggggcaccacgcactgatctgagtggaaccccagccagcccgaacaatgctgggagggcactggggctctcggtcagcagggccccactcatccagggagtcaaagtgcttgggtgaagcgcgcacagccaagaatctatattctaaatattaatatttaatattaat

SEQ ID NO: 737876 - DNA, 553 bp, Homo sapiens
agactatttgttcaataggtaacaaactcttctcatgaactcaaatagcgggggaaaaaaatcctctttaaaaccttcgtctcagtatgtgacttgtgctaatattagttggcaaagtcccttctctgtgttcccttccatctttgaagcacctgcccctccccctgcctcccccgccccccacacaccaaagcttaactctgtctgcagtgatcccccacccaagagccaggcagtgtagcctaagagttaagagcatgggcgcttccctgagctggaatcccaattctgccagttcccagctgtgtgacgccgggcagcttatttcacctcactgctctcagcatcctccagtcacagtgctggcctcatggggttgcagtggggactaagtkaagatgcagagaagcacttggggacagtgtgtgtctagaatgtactgtgtacatggtagtcatcactgtaccacatcctcatctgcatcatgatatttttaaagtgtgatactctcgaacccgggcctcattcagcagcgtgtcatggtgatggatcc

SEQ ID NO: 737877 - DNA, 614 bp, Homo sapiens
ggagacactgctgctttctaagtttgacagcactggaagtctttgtccattaatgccaggaccctgagtttgtttctgtctgaactgaatctcttaggactaggcttctgtatcactggatgatgtttctaactttttttttttttcgagacagggtcttgctctgtcacttaggttggagtacagtggtgcgatcatagctcactgcagcctctacctcctgggctcaagtgagcctcccacctcagcctcctgaggagctgggamtacaggtgcatgccaccatgcccagctaatttttgtatttttagtagagacggggtttcaccatgttggccaggatggtcttgatctcttgacctcgtgacccgccagccttggcctcccaaagtgctgggattacaggcgcgagccaccatgactggcctgtttctaactttttatttttaaaaagtgtacccattaatttctagacattaaacacacctatgttgccagcacccagatgggtaaaaaacagaatactaccaaaccctcccagttgttacactcaagatagtcgctgtcccaaccccaccgctgtggtttgatctgcttttgaactttgtctaaac

SEQ ID NO: 737878 - DNA, 651 bp, Homo sapiens
ttgggaggctgaggcaggcgaatcactcaagctcaggagtttgggaccagcctgggcaacgtagcaaaactctttctctacaaaaatacaaaaattcactgggcatggtggtgctctcctgtagtcccacctacttgggaggttgaggtgggaggatcgyttgaacctgggaggtggacattgtagtgagtcgagattgtgccactgcacttcagcttgggtgacagagcgagactcttacgtcaaaaaagaaaagataagaaatattttgaagacttccacccccttagtagtagtcatgctgtccggtgttcatagtgtaaaaagaggtctggctgggcgtggtggctcacgcgtgtaatcccagcactttgggaggtcgaggtgggtggatcacctgaggtcaggagtttgagaccatcctggccaacatggtaaaacctcatctctgctaaaaatacaaaaattagccgagtgtggtggcgggcacctttaatcccagctgctccgaaggctgaggcaggagaatagcttgaacccgtgggggcagaggttgctgtgagacaagatcacgccacttcactccagcctggacgaaagagtgaaactccatctcaaaaaacaaaaaaggaggtctgattcacattcaga

SEQ ID NO: 737879 - DNA, 572 bp, Homo sapiens
actgtcctccaggccccagaatggtagatccaccaacaacttgcactgcacacttggaaaagctgcagacaatgccagctgtgacagcagccaggaggggggctacaccctgcaaagcctcaggggcagaactgcccaaggccatgggagcccacctcttgcrtcagcgtgacctgtatatgagacatggactcaaaggagatcattttggaacttcaaggtttaaggactcccgtattgaattttagacttacctggggtctgtagcccctttgttttggccagtttctcccatttgggtgtatttacccaatgtctgtacctccattgtatctagtaagtaactaacttgcttctgattttacaggctcataagcagatgaggcttgccttgtcccaaatgagactttggacttggacttctgagttaatgatggaatgagttaagaatttaggggattgttggaaaggcatgattgtgttttgaaatgtgaggacatcagatttgggaggagccaagggcagaatgatatggtttggctgtgttcccacccaaatctcatcttgaattg

SEQ ID NO: 737880 - DNA, 572 bp, Homo sapiens
actgtcctccaggccccagaatggtagatccaccaacaacttgcactgcacacttggaaaagctgcagacaatgccagctgtgacagcagccaggaggggggctacaccctgcaaagcctcaggggcagaactgcccaaggccatgggagcccacctcttgcgtcagygtgacctgtatatgagacatggactcaaaggagatcattttggaacttcaaggtttaaggactcccgtattgaattttagacttacctggggtctgtagcccctttgttttggccagtttctcccatttgggtgtatttacccaatgtctgtacctccattgtatctagtaagtaactaacttgcttctgattttacaggctcataagcagatgaggcttgccttgtcccaaatgagactttggacttggacttctgagttaatgatggaatgagttaagaatttaggggattgttggaaaggcatgattgtgttttgaaatgtgaggacatcagatttgggaggagccaagggcagaatgatatggtttggctgtgttcccacccaaatctcatcttgaattg

SEQ ID NO: 737881 - DNA, 595 bp, Homo sapiens
atttattatagcagtaattcattcctttttattgctgtatggaattctatttgatgatacaccacaatttactcattcattctattgatggacatttgggttgtttaaagggctttttttctaccagaatatgcgactatgaacatttttgtttcttgctaaacaatcccatcaaaaagtgagctaatgacctgaatagacaactcttaaaagaagatatacaaatgaacaacaaacatatgaaaaaatgctcaacatcactaatgatcagggaygtgcaggttaaaaaccacaatgtgataccaccttattcccacaagaatggccatcatcaaaaaatcaaaaaataatagatggtgtggatgcagtgaaaagggaacacttctacactgctggtaggagtgtaagctagtacaaccactatggaaaacagtgtggagattccttaaactaaaagtaggactaccatttgatccagcaattccactactgggtatctacccagaggaaaagaagtcattataagaaaaagatacttgctcacacatgtttatagcagcacaattcacgattgcaaaaatgtggatctagccca

SEQ ID NO: 737882 - DNA, 299 bp, Homo sapiens
aatctgtagagaggttgaaagaatagcacaaacatctaaagaaacttctcctggattcacctatggttaacattttgccatatttgtatcaatcaatcaatgtgtttgtctttttgtaaaatcatttgacaggaagttgcagatggcaagtcacttcatcccttatcaggggtataagggattcttacatccccgtctaagaaaagaacattttcttacatgaccacattatcattstcacaaccaagaaaatccacatggattcaatcatatcatttaatttatagtctatattcaaa

SEQ ID NO: 737883 - DNA, 619 bp, Homo sapiens
atttcctaaacttggaaatgtcctttatagatttgtttagttttaattttattatttatttttattttgagacagggtctcgctctgtcacccaggctggagtgcagtggcgcgatcacggctcactgcagccttgatctcccaggctcaagcgctcctcccatctcagcctcccaagtagctgggtgataggtggctatttatttatttattttttatttttttagagatggggtttgtctatgttgctaggggtggtctcaaactcctgggctcatgtgatcctcctacctcaacctgtcaaagtgctgagattataggcrtgagccatggtgcctggcctcaccagcaaatttaaatcgtaaaagttgctgatgccagctgtttctacttccttacttctcattctcttaacacggttgtccatcttctgtcctctccactccactgaaattctaatgtcaccaacaacctcagtgatttccaccccagtggttatttctatgtcctcacattcctcgacttttcaagtgctttccctgtagctgaccacttcccccttcttgaaacactatttgtccctttggcttttgtgacatcacactctctcctggtttcc

SEQ ID NO: 737884 - DNA, 619 bp, Homo sapiens
atttcctaaacttggaaatgtcctttatagatttgtttagttttaattttattatttatttttattttgagacagggtctcgctctgtcacccaggctggagtgcagtggcgcgatcacggctcactgcagccttgatctcccaggctcaagcgctcctcccatctcagcctcccaagtagctgggtgataggtggctatttatttatttattttttatttttttagagatggggtttgtctatgttgctaggggtggtctcaaactcctgggctcatgtgatcctcctacctcaacctgtcaaagtgctgagattataggcatgagccatggtgcctggcctcaccagcaaatttaaatcgtaaaagttgctgatgccagctgtttctacttccttacttctcattctcttaacacggttgtccatcttctgtcctctccactccactgaaattctaatgtcaccarcaacctcagtgatttccaccccagtggttatttctatgtcctcacattcctcgacttttcaagtgctttccctgtagctgaccacttcccccttcttgaaacactatttgtccctttggcttttgtgacatcacactctctcctggtttcc

SEQ ID NO: 737885 - DNA, 621 bp, Homo sapiens
gtgggtagagatgggttttcaaccatgttgcccaagctggtctcaaactcctgagctcaagcaatcctcctgccttggcctcccaaagtgctgggattacaggcataagccacctcgccgggcctattatcactttcttttaatccttcacacgctgtgagctctgggtgcctatgccatttcacaagtgaggaaactgaggctcagcatcastgaaggggctacttgtcaataacacacagctggcagtgtttctccaggcatgggatgagtgccctggagggtctctgggtgggggttttaggtgaaacatggacatttttataaaacatcgaggcccctcctcctctgtgaaaccatgatttcatattttcatcctcttgtagtctttctgcttaagtcaaaaagaaagtctcatattggtgctattgtgtcataaacacctctccaatgcttgctaatactcccccttctccttctccttttttttttttttttttttttcccgacagagtctcactctgtcacccaggctggagtgcaatggcacgatcgtggctcactgcaacctctccctcccaggttcaagcaattctcccgccacaacctcccgaatacctg

SEQ ID NO: 737886 - DNA, 621 bp, Homo sapiens
gtgggtagagatgggttttcaaccatgttgcccaagctggtctcaaactcctgagctcaagcaatcctcctgccttggcctcccaaagtgctgggattacaggcataagccacctcgccgggcctattatcactttcttttaatccttcacacgctgtgagctctgggtgcctatgccatttcacaagtgaggaaactgaggctcagcatcagtgaaggggctacttgtcaataacacacagctggcagtgtttctccaggcrtgggatgagtgccctggagggtctctgggtgggggttttaggtgaaacatggacatttttataaaacatcgaggcccctcctcctctgtgaaaccatgatttcatattttcatcctcttgtagtctttctgcttaagtcaaaaagaaagtctcatattggtgctattgtgtcataaacacctctccaatgcttgctaatactcccccttctccttctccttttttttttttttttttttttcccgacagagtctcactctgtcacccaggctggagtgcaatggcacgatcgtggctcactgcaacctctccctcccaggttcaagcaattctcccgccacaacctcccgaatacctg

SEQ ID NO: 737887 - DNA, 650 bp, Homo sapiens
caccagtgtccttaggagggaaacctgtcagcagagggacctcagccctggctgatcacatgggctatgctaggccagtatctgcagaaaccaacagcctgcccttaaagctcctaagttggagagacctgctcggtcacgatcctggctttgctagccacactcagtccccgggttcatctctcggggccaatgcgatgttgtttgtgagatggagagaatggcattgcccctacccccaccagggtggcttcaggatgaaattcaacacgggaagcagcctccccccacccccatggaccgagaggtgayactattagagttatatgggtttgtggtttccccttactgtctccacttccttcctgaaaccctgaaagaggcttcgcaggaaaggaagggtctttcagatgcctgagtgcagctgggaatggctgtccccagttagccaggctggttggagcctagggtgagttggctgggttgtgggtttgaaccaccagaatcactgaggcacagctggcccactgccgagtgctgccagccatcctgcaaacgccaccattgctcatccctgggagatgctccagcattgaccaaaagggttgccgggtcttgtcctgctcaggacaggccactctagagtgatc

SEQ ID NO: 737888 - DNA, 464 bp, Homo sapiens
tcctgcccagtgctccaggctgaagtcctctgcacatatgtgtgcgcctctgccagcatgtgcacaggcattgtttctatcaagtcacttttttatttctcattcctgccaaaaagagagagagtctacgggttaatagcaaagtagaaaccgtagctcaaaatgtctgtttgrggcatgtactcttgcatctatatagatgaatagagatttcagaaatactgggccctctgggcctcaggcattaaatcaatcagtgcaatttcactcacagggcagcttgccaagggagcccaggagagagtagcgacttctctgatttagttcagtccgttaagctcatggcagcctgcaccagctcactgttgcaaaaggcaatcaagtaatgagtactcagccactttcggggggcgggggccggctggggaaggggctctctggagcctttcaaatggagccaactt

SEQ ID NO: 737889 - DNA, 631 bp, Homo sapiens
ccaagggagcccaggagagagtagcgacttctctgatttagttcagtccgttaagctcatggcagcctgcaccagctcactgttgcaaaaggcaatcaagtaatgagtactcagccactttcggggggcgggggccggctggggaaggggctctctggagcctttcaaatggagccaacttttgatagctttttagggtagttctgagagctggagacgggtgaggaacccgggaagtgagagcttaattaacggaactacagagaatgaggcagcaaaggaatctctcagagaaccagggggttttgtgtgtgtgatgagcaaraggatagaactaggtgcttgagtactgccggctaggaaccagcattgaacagcagatgcctaactcagcacagcaagggccagcttagcacagagaccagagagcaagatgcgcggaaggataaatttagcctgcatttcaggggaaaacatcgatctcaaatgtagtgctgtcttttaaaagaaagtggaagccttaggccggtcatctgggacaatttcacttgaacagctaaaagcccaggaaaaacgagtgctcataaccagctcatgctgctagcacacccacaagatcttccctctgcag

SEQ ID NO: 737890 - DNA, 645 bp, Homo sapiens
caaccccattttacagagaagaggaacagagctcagagaggttcagcaacttgcccaaggcatcacagcaggtgactgaaagacctggatgctaacttgggtctttctggctccagacccaccctcctacatgggttgcttgctgaaagagggaaacaactcattgtgtcgaactttcmagctcagccataagaaatttctagacccaaagaatacactgaaatagatcagaagttccatgcctgggtcctctgggagctatttttggcaaaaaccgctggaaaactgtgcatccattcttcctgccagtgttgtgtaggcagggaggaatgtgtaaactctccactgttgctgagaattctgttcattgaggatctcaactggccagatggtcttacagttaactaccctgctggttaacaaacaaatgaagctattactccctttagtaggaggagacctttcttttaaatttaaatttacttttgctttctgatccaactgaggaacaagttaggaggaaagctttctaaacatgaaattctgccagagcacttgccaccgaatgggtttctccctactggtgataagtggtattgcaactcagctctattagacaaaagggaggtgagagacacatgtaca

SEQ ID NO: 737891 - DNA, 645 bp, Homo sapiens
caaccccattttacagagaagaggaacagagctcagagaggttcagcaacttgcccaaggcatcacagcaggtgactgaaagacctggatgctaacttgggtctttctggctccagacccaccctcctacatgggttgcttgctgaaagagggaaacaactcattgtgtcgaactttcaagctcagccataagaaatttctagacccaaagaatacactgaaatagatcagaagttccatgcctgggtcctctgggagctatttttggcaaaaaccgctggaaaactgtgcatccattcttcctgccagtgttgtgtaggcagggaggaatgtgtaaactctccactgttgctgagaattctgttcattgaggatctcaactggccagatggtcttacagttaastaccctgctggttaacaaacaaatgaagctattactccctttagtaggaggagacctttcttttaaatttaaatttacttttgctttctgatccaactgaggaacaagttaggaggaaagctttctaaacatgaaattctgccagagcacttgccaccgaatgggtttctccctactggtgataagtggtattgcaactcagctctattagacaaaagggaggtgagagacacatgtaca

SEQ ID NO: 737892 - DNA, 540 bp, Homo sapiens
tggtgcttccctgtatcccagccatctgggaggctgaggtgggaggattgcttgagtctgagaggtcgaggctgcagtgaactgtgatcactctaatgtactccagcctgggagacagagtgagaccctgtctcaaaaaaaacttccagttcctggtcactgactttcttttttttctttttttttttttttttgagacrgagttttgctcttgttgcccaggctggagtgcaatggcgcgatctcggctcaccgcaacctccgcctcccaggttcaagcaattctcccgcctcagcctcctgagtagctggatacagcaggcaggcaccaccatgcctggctaattttttttgtatttttagtagagacgggatttctccatgttggtcaggctggtcttgaactcctgacctcaggtgatccgcccacctcggcctcccaaagtgctgggattacaggtgtgagccaccgcgcccggctaggtcactgactttcaacaatgggcaggtaactcaattctggccaatgagacatgaaga

SEQ ID NO: 737893 - DNA, 634 bp, Homo sapiens
tgatcttcgttgtgtattatcttttcttaaattatttgtaagttggaagaagggttcactcacatgaacactaatccaaattctggtgaaaccacctgatcttccatcagcacactatttcattctcaaaataatgcccatgggttttttgtggattttttgttttgttttgtttttttgccttcaatattcaggagttggctatccaatacatttatatttattttccttgctttcccttcatatttgatctttgtttctgcatgagtcatttcacagctaagtaatttccctaccttccgcatgagaagaagaaagacaaaataatgtaaactattctagtcgtgtcaaaagagaaaaaatggaaaaggactaaactgttacaatgtcaatgcctgctggtcccggtttctcctattactttcagcgttcctctgggtatgaaaaagcctttgacctgcaactctacctctaccccactcaaaggtggagccgattytgccaaacctatctatatatgtggtaataaatgcaccagcaccatgtctgcgtggttgccaatagtcttgcttccccagtccaagaaagtgttgggtatggcatgcttatttagcattttcccttcaaattgact

SEQ ID NO: 737894 - DNA, 540 bp, Homo sapiens
tgtcactctttctttgaaaacagttgaagcatgctgggttaggcttaggtttattgttattgatgacccctggatggagcgagaaggtcacgtgtaacgtaagctcactgtgtgttttgtatttttctttttttttttggagacggagttttgctcttgtcacccargctggagtgcaatggcgcgatctcggctcactgcaacctccatctcccaggttcaagcgattctcctgcctcagcctcccaagtagctgggattacagacgcccaccaccacacccagctaattttagtatttttagtagagacggggtttcaccacattgctctggctggtctcaaactcctgacctcaggtgatccacccacctcggtctcccaaagtgctgggattacaggtgtgagccaccatgcctggcctgttttgtatttttcaaatcttgccccaccactgtatttgtcctggaggcaaaatctacagcaaagagcacccagagtaacaatggcccaaccataaaaactttgggatgaaaggttc

SEQ ID NO: 737895 - DNA, 619 bp, Homo sapiens
tctctccttctccattctccaataggaataaaatctacttgcctttacccaacctctcccgcaattgaatgttctttctttgcaacagatactgagtagggaaagaactcagtttatcaatgacattttcccttcctctttctcctttttggccatccttcctccttccctttcctttttttcctcttcctcattctttttagattccatggtggctatgtcacttctgtttgtatttgtcccttccagattttttaaaacagattttttcctaatcttaaattctggagaggctcattaatacacactgacttgtgacacctgagaaacattctaatttatgttagcgatgagcagggatttcaagggaagagagtgtaactgcccaatgggttcaccttgcctgctgcctagatagagctaatttatsaagatgggggaattgcaacagagaaagagtaattcacgcacagccggctgtgtgggagaccatagttttattattactcaaatctgtctccctgagctttggagatcaaaatttttaaggataatttggtagaggggcagggcaccagtgagctaggagtgctgattggtcaggtcagagatggaatca

SEQ ID NO: 737896 - DNA, 583 bp, Homo sapiens
tttaaaaaaaaataggttgtagaattgaaacacaaaatttcttgtaatcttataaagggcaaatcaatatcttaagaaaatgttgctttaacgtaggggaatgttctttagaaagggtattataaataattccctgttaattagagctaaattaatcacatacaaaattccttttttaaactccccttcatgaactttatcacaacttacaaagaccatctgtgacatgcttggactttctgacttgccctatgctacctctttcttaaataaccagccattttactttaggacaagaatttaccatacaagattgtttctcagataaaagtactcattttctttacaatcttccttaccaaaaagacatcttcatatccctatctttcttcacatctctctcccctacttactggtaactatctaccttgtttcataaataacmttttcaaatccataattcaaatcaactcttagataagttttgaattagacaaaattattctttttctcaataagaacacatcttctttgacatattttacataaatctgggaagcaagaaaccctgaactccctaatg

SEQ ID NO: 737897 - DNA, 680 bp, Homo sapiens
tgaaatgttctttatgcctggctgctggagaaagagaaagagactgaaccacgacagtctctatttgcctgtccagggcagggcacctttctggctggacttctgtgtggactattgcaggggtgggagtcagaggcagcactgccaaggggtggagtccagagtgttccagcctcttctttggaaactgaagcacagagagggtcagtggccagtgcgaagccacacagcaagtttttagcaagattggagaatcaggaactttctgtgccctaccagccttcaagccccccagaaaccatgtctgcttgtctagttacaatactctcagagcctagcgcagtttcaaatcccatctcttccacttacttgggcaaatcacttgtctcctctggactttcagttgtctaacctctggagggctgtcatgatgaatggaaattatgcacataaagccattaacaggaccgtgcacctagcaggcacaggatgcgctgtagccattttaaccgaacyatacattggtcatggaccacagtctcctggtcagtgtaagggtagcaataccttcttcctgttgctggatattacaggaagatgaggggattctccagcccaccgagaggtctttgccatgactgcccagggtttgcttcaggatcctgaagggctcagaagtt

SEQ ID NO: 737898 - DNA, 633 bp, Homo sapiens; identical to SEQ ID NO: 737837

SEQ ID NO: 737899 - DNA, 633 bp, Homo sapiens; identical to SEQ ID NO: 737838

SEQ ID NO: 737900 - DNA, 604 bp, Homo sapiens
ttttaaaaataaatcactttctgccctgtgaaatgaaattctgtctttgtaatagatgaaattccaatgtatcctaagatctttcccaggatttttccattcttttccactcatctctttgtctctctctctctctgcccaaaccacttagatttgattactatggctttatatacagctagtcatatccctcatcacaatttttatttttcrtgcttttcatagctattcatgaaattaccctaccaaaagaatctaagatatttttaaccgtttccaaaaataatgaaaatgttactggaattctgattagaatatcattaaatttatatatgttttctgggaagaaaagctattttacaatattaagtctttctatctgagaagatatctatttgtttagttcttgtttggggggtctttcaataagattttatagtttattcatataggtctgcatcagtcagggtctggagagagaaaccacaccagtaatttaaacagggaaaatttatgtaagatttttaactagtaaaatagtggttaactactaaaagagttaaaagaagactctaaggaagataggaatagtaaatgcgagaag

SEQ ID NO: 737901 - DNA, 604 bp, Homo sapiens
ttttaaaaataaatcactttctgccctgtgaaatgaaattctgtctttgtaatagatgaaattccaatgtatcctaagatctttcccaggatttttccattcttttccactcatctctttgtctctctctctctctgcccaaaccacttagatttgattactatggctttatatacagctagtcatatccctcatcacaatttttatttttcatgcttttcatagctattcatgaaattaccmtaccaaaagaatctaagatatttttaaccgtttccaaaaataatgaaaatgttactggaattctgattagaatatcattaaatttatatatgttttctgggaagaaaagctattttacaatattaagtctttctatctgagaagatatctatttgtttagttcttgtttggggggtctttcaataagattttatagtttattcatataggtctgcatcagtcagggtctggagagagaaaccacaccagtaatttaaacagggaaaatttatgtaagatttttaactagtaaaatagtggttaactactaaaagagttaaaagaagactctaaggaagataggaatagtaaatgcgagaag

SEQ ID NO: 737902 - DNA, 465 bp, Homo sapiens
ggatggttaaaaaaaaagctatgtttgtgaattggtgagatatagaaagttaatgacatgcaattatacacctggagcagaactccagagaaagacaatgctggctgtcatgatgtgcactgactgtcatgaggtgcactttaattttctataaatggttcacggaccttatattggatatctttctgctattactgaaatgagacaggaaggaaaaatcaaaacaaaacaaaaagcaaaaataaaacaaaaaactaaaattggcttcagctatttctgtgttccggggaagggaaggcttcttctcctaggggcgaagtgctctgcgsccgggaagacatataatggacatttggattgcaatgaggctctgagactaaaagaagctaaatttctttgctcattcagtatcaggaaagctaaaaaaagaaagctattgcagcactattcatagtagcaaagact

SEQ ID NO: 737903 - DNA, 443 bp, Homo sapiens
ggaaccgcaggatccttgctgcttcctctcggtcacctggaagctggtggtgtcagcggggcgggcgggaggttgacactggtggcgatgactcagcactgagagctgtgggagtctagttaatcagcagcgtcaaaacttcctgttgctgtttgcaaacaagggccacccccagaggaggaggaccagagctaggggagaggctgcgcaccacagaacctcagcaaagcgaagctacagtttaaaggcagcagcagcagtggtgctaagagttcagcaggtggwcaggggctgtggctatggctttccaggagcacgtggcttcccttatggcccctgtccccatctccccacccaggaggaatttttttttcccccagtagtagctgattgacttactgcaaggagccccagtgaagtgccagggtgtgagagcaggaatc

SEQ ID NO: 737904 - DNA, 599 bp, Homo sapiens
tagtggaaaaacagggagtttaagggagcaagagatcaggtcttctgggctcaccacacatcaggtgatttaagctaaaaatggcttaaaataccgcaatcacttgaaacgccttacataaactgaccaggaatctggggcattcgcgttagagacaattttcttctcctcaagataagggatggggaattagtcatagggtatytccagataatgtagttaacacctcgtgtaatattaggtgggcagggagctctgctctcaggaccaaaattgctcctgccagctctaatagggaatgtgtgtatttttaaagtctgggtaagcactgtgagtcatttccacaatacgcctccctttggcgtgaaatggggcagaaagtgccccaaacagctgttattttcgcagtgattcattcattcattcatccacccatccattcattcattcactcatcacatggcaactcatcacccctgtataccagacccagtgccaaatactggggagatgtgtgtgaacaaaatctcattttcaaggagcttattgcctgctgcacattttagcctcatctcgttagtgcaagaaataatttaaca

SEQ ID NO: 737905 - DNA, 579 bp, Homo sapiens
atatttgggaaaaacatcttcaaacgcaaacgctgttttccaaccattaaaaagtttatgcgctgcttggtttccatggatacctgaggtaatagcctccttcctctcattgaagagtgaatgttgctcagttacttttttcctgtttttttttcacttttgtcttcctgacttttttcttccatccctatttatgaaaacaaaaagataactaaattgaaacgttgacaatgtaatttgtcagaggaaggcagcctgttttataagctcaggtgatttcatttttgttcacctgtttatttcatgacacttgcaggaaaaagargaattttcatttgatcaaatcatttccatgatccatcaaacacacaagttaaaaagggaaatgctctcagtctttaataacagtcttaatcgtgtgtagagcagagattgacaaactatggcctgccggctaaatctggcccagtgccttttttttaataaataaagttttattggaatacagacacgttcatttgggtagacgttgtcgatggccgctttcacaacaatagcagagttgagtgatcgtgccag

SEQ ID NO: 737906 - DNA, 512 bp, Homo sapiens
cttccttctggcccgccctgttagacgggctaatcacaacgccaagaagcactgaagagtcatcctaatggacactgcttccttctggccctccgtgctagacgggcttatcacaacaccaagaagcaatggagagtcatcctaatggacactgcttccttctggccctccrtgctagacgggcttatcacaacaccaagaagcactggagagtcaacctaatggacactgcttccttctggccaaatatgaacaagaaactgtcatgtgttttcaccccaaacttctttggaggacatttttgaatctcttaaatttggagaactcgaccttctacaaagccaaagagctggtaaaacttccttccgattaaaatgagacttgaaaacgggtgctatcaccactgacagttcatgttgacaggtctgtgaaccctgaaaatctgagccaggtctcagctaatttagaaagtttattttgccaaggttgaggatgtgcacctgtgacacagc

SEQ ID NO: 737907 - DNA, 649 bp, Homo sapiens
ctttgccactaggcttggggtgatttaccatctaaattccatcacaagtggctctggctttgtagaacacagtacacaggaggggcacccgaaagcaaagacgaccttctctactccaaaaatcaatcgtccacctttggcaaattctccttctcagattcatgcttggtgctcatgggtactcactctactttcctcccttgctggacaattaagcagtaacaatatcttgttggtcccayacacaccacacctttggtctcttggagaattttcagccgtaccaatggcaacctctgagtgacatcttaatatgatcagatgtgatgacagtttagtaacaggttctcatttttggctcaccagcttttcggcctacatatcatcagaataagactgaggcacattagtgaaatctcaatagtaaacaagcaggtactgccaataaaagagaaagcattcttaaactgattaaaaaaaaaaaaatttaaagagcactttaatcaccatcacatgactttcattcataccaccttttggggcatcagttcataatgcagaaaagatgaaggagccatctaaaggaaataatgttaacaactccgttataaaatatctgaagcaataccttgccagttgtcatcaatgc

SEQ ID NO: 737908 - DNA, 649 bp, Homo sapiens
ctttgccactaggcttggggtgatttaccatctaaattccatcacaagtggctctggctttgtagaacacagtacacaggaggggcacccgaaagcaaagacgaccttctctactccaaaaatcaatcgtccacctttggcaaattctccttctcagattcatgcttggtgctcatgggtactcactctactttcctcccttgctggacaattaagcagtaacaatatcttgttggtcccacacacaccacacctttggtctcttggagaattttcagccgtaccaatggcaacctctgagtgacatcttaatatgatcagatgtgatgacagtttagtaacaggttctcatttttggctcaccagcttttcggcctacatatcatcagaataagactgaggcacattagtgaaatctcaatagtaaacaagcaggtactgccaataaaagagaaagcattcttaaactgattaaaaaaaaaaaaatttaaagagcactttaatcaccatcasatgactttcattcataccaccttttggggcatcagttcataatgcagaaaagatgaaggagccatctaaaggaaataatgttaacaactccgttataaaatatctgaagcaataccttgccagttgtcatcaatgc

SEQ ID NO: 737909 - DNA, 630 bp, Homo sapiens
atgggcccgatggccgcagctgggatccaccggacactgcagtcccccaggcttcgggtctttgcctccttagtcacctgtgaagcacctcctatgcgccagctctgcccgtctagggagaagcagcacagcccggccacccgaggcctcctgtgcgcttccccatctgaggtccgtgatcagaactgcgggcttctccgcagaggtcggggcagtgacaggacagccgcgggcttctcctcagaggtcggggcagtgacaggacagcctcagcctctttagacgctgccttcagggagcagtgaaagagggagggagagacagagagcacccgggcgggtctcccagccacgccaggcaggtgggcrggatttatgtgccaggtactgtgctggctatcaccggggcctggtggtctcttggagtcacaagcagccgcctgagatgaggtttatgattttgagttagaataggactgaagcttattcccagggggctggccgggccggctctccctgcccgccggcatctccactgcctctgctgtcctgaagctcttatgagggttcacattactaggacgccaatgtgggttctcctctgggctctggcccccaaggcaccccaacc

SEQ ID NO: 737910 - DNA, 544 bp, Homo sapiens
atcactcccttttccacgtctgaaggatccaggtctcaagagtgacagtgaaaagctgcagacttctcggcagcaaatccagtgaacaccccactccaggaccctttagattccagaaggccaagcaaagtcatttgagaccacagcggagacagctgtgaccatcctggaatgmcctcccaccctggctgtgtgggcgccttgtgcctgatttcctcttaacagggtcctcctgcgttctggccaaggcggctcacaaccattttgaaaagtatctcttcctcctgtcggagaaaatcctttagaagcttgaagtcagacatcttttctcttctctacctgcctccctctgcatggttttccacgaagagggacgaggagggcctagcggtgctggccaagtggcctgaaagaagtgggaaacagaacggcaggggcttcccagaatctctcctggtccacgggtgtcacgatcccactctgcccagttcccaggatgcccagaaaaacagagacaaggcctggggcaccctagcagctctat

SEQ ID NO: 737911 - DNA, 544 bp, Homo sapiens
atcactcccttttccacgtctgaaggatccaggtctcaagagtgacagtgaaaagctgcagacttctcggcagcaaatccagtgaacaccccactccaggaccctttagattccagaaggccaagcaaagtcatttgagaccacagcggagacagctgtgaccatcctggaatgccctcccaccctggctgtgtgggcgccttgtgcctgatttcctcttaacmgggtcctcctgcgttctggccaaggcggctcacaaccattttgaaaagtatctcttcctcctgtcggagaaaatcctttagaagcttgaagtcagacatcttttctcttctctacctgcctccctctgcatggttttccacgaagagggacgaggagggcctagcggtgctggccaagtggcctgaaagaagtgggaaacagaacggcaggggcttcccagaatctctcctggtccacgggtgtcacgatcccactctgcccagttcccaggatgcccagaaaaacagagacaaggcctggggcaccctagcagctctat

SEQ ID NO: 737912 - DNA, 629 bp, Homo sapiens
tcactcccttttccacgtctgaaggatccaggtctcaagagtgacagtgaaaagctgcagacttctcggcagcaaatccagtgaacaccccactccaggaccctttagattccagaaggccaagcaaagtcatttgagaccacagcggagacagctgtgaccatcctggaatgccctcccaccctggctgtgtgggcgccttgtgcctgatttcctcttaacagggtcctcctgcgttctggccaaggcggctcacaaccattttgaaaagtatctcttcctcctgtcggagaaaatcctttagaagcttgaagtcagacatcttttctcttctctacctgcctccctctgcatggttttccacgaagagggacgaggagggcctagcggtgctggccaagtggcctgaaagaagtgggaaacagaacggcaggggcttcccagaatctctcctggtccacrggtgtcacgatcccactctgcccagttcccaggatgcccagaaaaacagagacaaggcctggggcaccctagcagctctatgtggcttatggggcatctccagctgctctatgaggttacggggcacctacggctgctctatggggttacggggcgcctcccgctgc

SEQ ID NO: 737913 - DNA, 595 bp, Homo sapiens
ttgctcaccaggctctcctgtcaccaagtgtcaaagcgccagaagccatggaaactcaccagctggaagagccgcccattacccacgcacctacagtgaactcaatttcaacaaaggtggcaagaacgtacactgcggaaaggacagtctcttccataaacggtgctgggaaaactggctacacatccgcagaagagtgaaacgagacccctasctctcgccacatacaaacatcaagccaaaatggattaaagtctggaatccaagacctccaatgatgaaactactacaagaaaacactggggacaatctccaggacattgacctgggcaaacatttctcaagcaatgcccccacacacaggcaaccaaggcaaacacaggcaaatggggccacctcgagctaaaaagcttctgcacagcaggccgggtgcagtggctcatgcctgtaatcccagcactttgggaggccgaggcgggtggatcacgaggtcaggagatcgagaccatcctggctaacatggtgaaaccctgtctctactaaaaatacaaaaaaattagccaggcgtggtggcgggcacctgtagtcccagcta

SEQ ID NO: 737914 - DNA, 476 bp, Homo sapiens
agagtgaagagacaccccacagaatgggaggaaatattttcacactactcgtctgacaagggattcataaccagaacatataatgagctgaaacaactctataggaaagaatctaatcatctgattaaaaatgggcaaaagatctgaatagamgtttctcaaaggagacacacaaatggccaacaggcatctgaagaggagctcaacatcactgatcgtcagagaaatgcaactcaaagctaccatgagacatcacctcaccccggttaaaatggcctttatccaaaagacagacaatcacaaatgctcgcgaggatgtgggaaaagggaaccctcgtaccccgttggtgggaatgtaaattaatacagccgctatggagaacagtttggcggttcctcaaaaagctaaaaattgagctaccataggatccagcaatcccactgcttggtatagacccaaaagaaaggaatccatc

SEQ ID NO: 737915 - DNA, 504 bp, Homo sapiens
cacaggctgggacaggcctgcaagaatggccaggaggggcctcccagggtcgaggcatctgagcagcaccctgcaggacgggcaggcccctcatgccccgggcacctgcacagggcctgcgatctcatgcattcgaatggtgccgaatgggccagggtgtcctgggggatcctgtcgggcgccctcctcagctcttccactttccacagtaagtacttcgatagtayggctcatggtcaccccaagtccccgagaaggaaagagagtgacgccatggagatgggaggtcggccctgcaaagggcaccatagtcctgggcactacttctcctggggaatgggggcttgggcaccttcttctcctccttcctccctccctccatcctccctctctcccttctttctccctccctccctcctccctctgacttacacccccaaattgccagtatcgccccctccccagttgcaacaaccccaaacattcagatattgatttgtgttt

SEQ ID NO: 737916 - DNA, 517 bp, Homo sapiens
aagccctcaatgcggtttcaggctccaggcaaggctcagctgacagtagctgaaaacagcaatttcagccgcagagttgcccgccctgtgcaccacagaacgaacaagggtttccagctttgctcagatttgtggggaccactgggtttggactttaggaaaagctcatttgcctttaggcagaagtgaccggagctggggtcacctgaggtctgggcaggaacctctcgmtggctgatgcaggacctggggaggggccatctgtgtggggcagctctggactcagacccgtggatacctgtgaaacctgtcaggctgagccaccatccagcaagtgaagagaccgcaactgggccactgtggagtcacttggccaccacccccgggtcctcatagccctcatgtgtgtcccaaccgcgagcaggtggccgacagtgcaccctgacaaggcacgtgtgtaccatcggggacacctgcttctttaaagtgaccggatggtgcccaggaccacaagaac

SEQ ID NO: 737917 - DNA, 366 bp, Homo sapiens
cacataattgtatgatacagtttacatacatacaactttgggaattattaacataatcatatgctttagagatacaatctaataaccaaactaatgagaaacatacatttaaatgttgtaatgattatgcacattctaataatttggagcacttctctagttttagaataactcagaactcattgattggcattgtattgagtctgtasatcaatttgggggaattgccaagttaacagtattgagtattctgattcatgaacatggtatgtctctccatttatggaggtctttaatttcttttagcagtgttatacagttttcagtgttcagctcctgtgcatattttgttacatttatctctga

SEQ ID NO: 737918 - DNA, 601 bp, Homo sapiens
aaaacaacttgaactaattgacatttatggaacactctatcacacagcagcaaaatacgtttttttaaagtttgcgtgaaacttttatcaagatagaccatattctggtccataaagcaagttcagtcaatgtataaggacttaagtcatgcaaagtatgttctctgaccacaatggaattaaatgagaactcactatcagaaaaatatctgaaaataccctaatatttagaaactaaatatgcttctaaataactgatgggaaaaaaaagaactcaaaagggaaactagaaagtattttgcattgaatgaaaaagaaagtataactcataaaaatgtgcyagatgcaattaaagcagaactttcaagtttatagcaccaaacaccaaacatcaaacaccaaacacctgcactggaaaacatgaaagttctcaaatcaatgacctcaggtttaggaaagtagaaacagaagagcaaattaaactcgaagaaaatagaagaaaagaaatattaaagattaaggcagaaatcaatgaagtagcaaacaaaatttaaaacagagacaatgaaaccaaagttagtactttgggaagatcaataaa

SEQ ID NO: 737919 - DNA, 562 bp, Homo sapiens
caccagaagtacgggaagggcacgaaggtcatgtaggtatgtgctggcaggtgtgtatgttgtgagtgtgcatgccgtgaacagtgacaccaggaaagacagttgcagagtcctgagcacccctccccaatgtttagaacaccctaggtccttcttcaacatatttgcagagatctattagaagtgttctccagaatgctgtccccctctcggacctcagtccctaactatcccttttactgggcacaaagtatttggggtgagtagcatttcttggcacatgtgagcttctctcaagctatgctcagtaggaaaagattttcccacccggtggaggtgtscaaaaatgaaacaaaacaaaaagaaaaaccataaagcctatcatgagcagaaacagcccagagttaaagctcagttcaggctgggcgtggtggcttacgcctatagtcccacactttgggaggccaaggcaggcagatcacctgaggtcagagttcgagaccagcctggccaacgtggtgaaaccctgtctctactaaaaatacaaaaattagccaggcgt

SEQ ID NO: 737920 - DNA, 543 bp, Homo sapiens
tttaaccacagtaactggatccagatagtaccaggaactttgagagggttaagtggggtgctagaaattgtggaaccagaaaactccaggtttagattctcgctccagcacttgctctgtgaccttgagtaagacatttaacctctcakttcccttatctttaaaatggagttatgaaccctttcaaggttactgagaggattaaagatcaggtatgtaaaggtcctagcatagagtagaagtttaattaagatgattgatatggtttcactctgtgtccccacccaaatttaatctctcattgtaatcccttcatggaaggaaactggtgggaggtgactagatcatgggggcagttcccccatgctgttctcatgatagtgagtgagttctcaagagatctgatggtttacaagtgtggcatttcctctttgctcactctctgtctcctgccaccatgtgaagaaggtccttgcttccccttccccttccgccatgattgttagtttcctgaggcctcccagccacgtggaactgtgagtc

SEQ ID NO: 737921 - DNA, 581 bp, Homo sapiens
aaataaaatggaaataagacttttgactgacttgatcataggtcttgaaaggattgaatgagatgatacatgcaagcgtaggagctgctagaactaaaaatcacagcaactcagcgattctgctcagtgacccagatgggatgtgtgatgggcacaagacagcaggaaggcctccggctggaatttcgccaagagataactaaaaggtagcaggtcctgccccatcacttcctcccctggccctgcaaagccctgaattcctctccactccccaccaccaagctactgccccaccggccatgtctccagaacccatgatggtagtaatcacaccaratgttgccaaactccactgtggttcctgaggacaggcttcattaactttgatccggcaggcttacctgcattgggtactggctttatttccagccaccgcttctcaacctcactcaagtggctttgacactttgaggacactggtgagatggcctgggccagccaacggtccactaggagactgatgggcactgaagccttccaaagcgactgagctggaaccaggggcagggaatcatttagtc

SEQ ID NO: 737922 - DNA, 595 bp, Homo sapiens
atgcggccctcagtctttttggactaggaagaagcaagggtttgtccagagcctactctttgcatagccctaacccattctaacagccaggctgggctcttgtctctgacttccaactcccacgccagcccttggctctgccctacccaggagataattttaaagcttcctggcctaggcgggctttgtgttggcaccagaggctcgtggctcttctgttgtctctctgtgtttgaacccacatcattgcttccacctttaatttcctgtattttgagtgttktttttttttttttttttttttgagatggggtctcactgtgttgcccagactggactcaaactcctgggctcaagtgatcctcttgcctcagcctccagagtgtatttcaagaaataaaaagtagcacctaccatcgcccaaggcttgctgtacccaagcaccgtgctaggctgttttcagtcttcaccatcaccctctgtgatccgttccaatctgcccatttctcagagaagaaaacggaatcctagagagaggttaagaaacctgcctcatgtcctctggttgataagacgcagagtagagaatttcatc

SEQ ID NO: 737923 - DNA, 594 bp, Homo sapiens
acactctgtccccaggagaaagctgtctcccaccccctctgaatacccacctttctggctacttttactaagtcttacattacctacttgagaatactgaggttcatatgggctaacttgtcttctattaatagccacatcctaggtccacctctgccattacattatccccttctaattaatccaaggttggtttaycacttgaatttcaatccaagtaattcataatattaacagcctaaaaaagaacagccataagatcatttcaatggatgcagaaaaatcatgcaatgaaatgcaatgtgtatcaccaataaaaaactttcagcaaactagaaagagaggttgtagtacctaaggaaacaaatctttagaaactttccatttctagcaccgatagaggaaaaaaaaacgagggtttttcttataaggtagagttcaaactttccaccctcagcccacttataattttgtcttgcatatggtaggtattcaaaggaccccctgcctataaaagaggctggaagatctaagagtcaagggataaaggacctagaatgcagagacaagaaagactcattctgttcttcacag

SEQ ID NO: 737924 - DNA, 624 bp, Homo sapiens
attgaattgaattgtgagtgacaaaattgaaaaaataactttagagtttatgttggaccatttaatgtcgaacctcttcaaagtcttttggagatgtccagatggacaaaatcagccaatatgatgttcatgaccaggcaagggaagccaaaatgaagggcarctttatttaaaatgaatagaacaagatatagttacattcatgccactgttcttttaaaatatatccatagaaatgattagtcctttaaaagtcttcatgccacagttctgcaaagaaatcaggagactttgtaaataccctgtccgcaaaaagttagaatgacaagcacccttaaataaacaggaataattaatcataggtgtggttgttttgatgagcatgcaagagtgacaagttaataaataagcagttcatacagggaaagtggctaaggaggtgctgtggtttaatttacatctttggaaggtagcaaagatttaataatctccctgcctcatacatcaaacgaatacccctgaggcagaaaagcaaaacgtttttaactgttaatctgagaagcaataaaatcctgcctcaggtcacaaataaattgagtttctagtggtctcgatggatcccta

SEQ ID NO: 737925 - DNA, 634 bp, Homo sapiens
ttttcaataatgtccactatagtgtttttaacaatttttcaaggatccagtcaaagatcatatgctgcattaagttgttgaatttttacagtcttttttggtgtagaacagttgcccttcgactttttttgattgttgttgatttttgtttttcagcacattgacgtttttgaagactccagttgttttacagaattgctgtatcattttttcttagattcccgtgccttgmagatatcatcaagcttgtatgttagtacttcaaacatattaatcatggtttttttgtaatctgtatctaataattcccctatgtgaagcctttcatggtatttctgctatctttagtttctgcaaatttttgctcatggtgtcttactttcttgtgtttttgtttatttcttactatgtgttcctcactgtccttgaaatattatctgtaggtattcttattctttgtggtcttgaatgatggtgccttcctccaggggagatttttttttttttttttttgagatggagtctcactctgtcgcccaggctggagtgcagtggcgcaatcttggctcactgcaaactccgcctcccgggttcaagccattctcctgcctcagcctccccagtagctgggact

SEQ ID NO: 737926 - DNA, 561 bp, Homo sapiens
tagggaaaagcccaggctaccctagtggaggatgagagtgacatggagcagagcgagtccagtttcctaactgaggttattattggaccaggctcagacactggacttccagtcatgtgggagagcccagctaacatcagcagaactgccacctgaccacagctgacccaggtacatgagtaggtccacctgccaccagaagaacttctcagctgacccataccgacttgggaacaatcataaatacttattgtttgatgccacctacttttgagagagtctgtttcacagcaatagctaatgatccactacttaaagttttacagcgtttcaytgaaggaggggggaaatgctggctaggactatctgaaaagtgaccaacgtattagctatattactaaatacttaagtcagtagtgatatttttaaagtctcaagtttaatgataggtgcatgatgattcagagtaaacactggaataagacagtgctgattccaaatgcctgctccacctttgaccaaatttgggaactgctgtatgcctcgatctcgtcttctgca

SEQ ID NO: 737927 - DNA, 627 bp, Homo sapiens
aattatcatggtaaaatgtaaagtctttttctttaccgaaaaggtaaagaaaaacctcttacagtgtgattgttttttctaaagggaatctcatttagataacatggaaatcaaacctgatgaaaagattgtttgaatttaatctgacrtaggaagaatgggtctaggttataagagtaacaatttagatacatcaaggaaagtgaggaatacagaatcaaattatattggaggaaaacattgcttttttaggccattaagataaacactttcatgtcaggccataatggcagagttagaactggagaaaaagttcaggagctgatgacaaagttgaaggagagagttatcatctcaggcctttttaaggggagaaaatgctaaatgcagtgatgtatgacctataaatcacaagtagcaagatactgcaaaagtcaagcctctgaaatatgaatctgagaaattttatttcatttatttaatttttaatttttttttttttttttgagacagggtctgactgtcacccaggctgaagtgcagtggcacaatgtcagctcactggaacctccacctcctggagttcaagcagtcctcccaccttagactcccgagtagctgggacta

SEQ ID NO: 737928 - DNA, 593 bp, Homo sapiens
aataggaacaaaaatgcttcacctgcaggactcctcttatgaagactttctgtatgttaaatgtttggctgaatacctggctcactcttgagtggaatgcagtacatggtagttattgtttgcttcataaaagcagtaacaattagccaggcatggtgggatgtgccagtagtctcagctactcrggaggctgaggcacgagaattgcttgaacccggaaggtgtaggttgcactgaggcgagatcatgccactgcactccagcctggaccacagagcaagactttgtctcaaaaaataaaaatataaaataaaaaaataaaagcagtaacagtgggcttcctttaaattgtgtactactgtattcactgcctattcaccaaaaattcaggtaacactacttcataatctactctgataggtgctgaagaagggagcttgacttttgccttccaggctagttcaggggttgggagataactatgtactatattcctggaccaattatatgtcacaggctctaaagtgcaattggaatttaaagaagaaaaatcatttcatagtggttaggtgctcaatatttgaatgaatgag

SEQ ID NO: 737929 - DNA, 618 bp, Homo sapiens
gccaccacgcccagtcttttcccccctttttttttaatagatgggggaggaaacctaatttctgagagattctgtgttttgttcaaggtcaaaaaacagctcaaataagtcaaaggaggcccacctggatccaaaatctatataccttccactatatcatatgagagtcctctgactgtctttaggggaatgacattttccatttgagtcaatggaagctatagctttacagagtaatgacctttaccttataccctattttaattccctttaagcctgagggcccttgaatagttggtttctacaaaaatgaagctgaaaaacaattaccaaaatatactaacgacctccatgctataaaattattcacgagctagaccacggcgagacttctctaacaaatccacatcatccatttcaaatttttaaattaaattgatggctctttagctctgatatgtcacttttkttttcttttctttgagacagaatttcactcttgttgctcaggctggagtgcagtggcacaatctcggctcaccgcaacctccacctcccaggttcaagcaattctcctgcctcagcctctggaatagctgggattacaggcttgtgcca

SEQ ID NO: 737930 - DNA, 590 bp, Homo sapiens
gtattccactttatctcaactcttggcctattatttctttggcattaaatttctttggcatttctgtatttttttccccatgtcaacaaaatgcttctttcattcctcacaatatatcttcaaataataattcttcatgtaaaatgtgagagccttaaagtaatgtgctatcatgtataacttcagtcatttgtgttattgctgccacacattttatttctacaaatattataaaccccmcaatacatcggttttgcatttagataagtcaattatattcttaaatgagaaaatatactttactatttatccacaatagtaaaagtcttttagattttggaagcaacacataccacatttcagtgtgtgactttgactcatttacagaattacctgtagatttcaagtgagaagaacaaaagaaagtgagttcagactgcaggttaagctaatccaccacttggggcttatgatccagcagacccatagattgtcaaactgtccatggcaaataaggatgctctacagagcatctggcaagcaacaataggacaaaaaaaaaacactacacagatgtgtaagattttgaa

SEQ ID NO: 737931 - DNA, 593 bp, Homo sapiens
tccactcacttcacgtcaagcgattcccatcattgtttcactgatggagaaaccaaggcccagggcacttggggcaaggcgttcagggggctttcggtccggaagcagcgtcggggcgggaattcgaaccctgggttcccacactggcccgtggcagggcccccaagccttttcccaaactgatcacagaaagtgacgacccgttcgcccggcggaccgggggcgtcgggcaggtcctggtccaagtgagtgcccgcccctgccctgggctggcagagttcttcccccagctgcaggtagacgtgggaacccggcagggtacggagctgctggcgcggcacgctgattagaagcggcgactgcccgtcaagcattcgcgcctctcccctcccttgastttcttggcagggttaagggataagagaaagtggagttgcctcagttctgggagagcccgtttgtgggtccggcacaggtatccatcgggactgacgctgcaaaagtcctcttgtgaaacaaggaataggctcgagtcttcgattgggtcgagggagacgtcaatcaatggatgggcgtgtgcaaacgcaacacaa

SEQ ID NO: 737932 - DNA, 615 bp, Homo sapiens
gttatttactctgcagcagtgaataactggaacagagtcatcaattccagctcagtttttcctggctggtgcaaagttccatgataaatctatgccaccaaaattcttgtcactcagaaggtgacagaggtgccagactcaagacaatctggtgggtcagggcaaccacgtgcttcttctggagcccttattagtgactgactgcttctctccctccatgcaccttgcttcaaaatgaaaataacagcaataaactcccagataagcatgtttccaaagttactattacattaattttgccaaagatatatcaacaagtcakcatcacattggatgttaatttctgtggatttgttggttatatattgccttttacacatactttgacttttctaatccttgtgttacattctagctttttcttttccggctcaaaatcttttctattgtttcacaaaactctccagtaagtgctagagagcccctcactgtgttctctgctgaattcccctgtcccttatcaattacagtgttatggactgaattgctccccccaccacccagaaaagtttatatgtggcagtactaacctccagtatcttggaacgtgactgc

SEQ ID NO: 737933 - DNA, 558 bp, Homo sapiens
tgtaggtacacatacacacacacaaggatcttagagctctttaattttattttagtcatgaaatagtaatataaacacactagtttgtaaaagataattgaatcaaaattatatttctgacaaaatgggacaagttcatatggccaaattttcattgccctgataggtaatctgatgaaggctgtgggccaaatttttgagtaaggcagcttgcatagcaggttgacttcttaaaaagacatcttttttacccttttattccttcttctcagtttcaaatgagtttatagttaaattattaatgtttgtgttaataytttaagtaggactgcctgaattccataaaaaataaaatttccctgtggccttgaatttttagtaacaaatctatcttgtttgctcctctggttttttttgactagtcagtgcaggtgaggatgcaattaaacaggatgttttgctttttctgactcctgtacagcacacaaagcaactgtatatcaaacagcaataccatgtattattactccaagctcaacattttgaccagtctgatct

SEQ ID NO: 737934 - DNA, 484 bp, Homo sapiens
tctataaaatataaccatattttcaaacaaagagaaaagtggcgttgtgctacatttcttctccagtgcttggttccctagaagacagccagattctcacttcttttcctgcattcagtctcttgtgatatcacatggcatgtggcctctgaaaaactccgctgtctagttgtaaaagaatacaagtaagtagtcaagtgacaccttagcattctgatgaaaagagctttgacctcacagagcttctggaagggtctcagagacatccstgagggtcccttgactgcactttgacaaccacaggtctacatgatctgtatagccttttccagttttcacatcctatgattccaagagggaaaacaatcttccttgtaaagagagttaagtgacattgtgtccttgtctacactcagctgctaatatgctatgggacctcaggtatgtcacttaaaccttgtgttggagtttcctccttgttaca

SEQ ID NO: 737935 - DNA, 489 bp, Homo sapiens
ggggtttcactatattggccaggctgatctcgaactcctgcccttgtgatccacccacctcggcctctcaaagtgctgggcttacaggtgctagccaccacacccggcctcttctcgatagatcttatttggctgacaacgaaagctgttgtgctggtagcatcatccctttgcatgcaaaagataaactgaaatctraagtagccatatccttccggccaggtttttcaagtggttactctgttctgatcattgtcatgacaggaatagtgaaaataacaataaatcatttttctttaacgatccatttactgtatgctgggcactgcacaaaatggtttacatggtttatcttgtagcgttccatttaagtctgctaagagtagatgctatcattctctccattttacagataagaaaattgaggcttagagaaattgagtaatttttgccaatcctgagacttgaatctccgctctgtcttctgca

SEQ ID NO: 737936 - DNA, 656 bp, Homo sapiens
ttttgccattgaaagtgatggccaaaaccacagtaacttttagcaccaacttaatattttgagttgggtttgaatcacgttgtctattacatgcagcaggacacatctctaatcacgcgagaggtctgagcaaacgtcttcacatttcacactgcagatattcttacaaaaggcaaagcagagatccagagaaattaagatctgctcaaggtcgtatccagctttgggaaccccaactattgcagaaatttctgaagtcgtcatattgctacttaaagcaaaatgccttctcctaaatccaggtagagagaaactctcaaaggccagggtctggactcaagatgagcacaggatttagaatcagaaagtgtgagttcaaattgccttcggctcttcacctgggtgggcgatttgaatagagctcacagccctgaaaaccctggttttcagaytctttattggtaaatgaagtcagcttagtgatatgagaattatgaaacataaatccctttgtaaaaatataaaataatcttacaatcatcatcgtcatcctcatcatcgtgttccttcacaccagcggtatttatggtatttatcaactaactgctgtgtactatgctctattgaaaatgttagcaatatagtaatgaacaaaa

SEQ ID NO: 737937 - DNA, 582 bp, Homo sapiens
aagaaaatcccataatctcagtgtcttaataaattaaaataacttatttataacaaaatgtctaatgcaaatagggctccttcatcttgtagttactctagaacatggggtctctatggtcacctatggcatgggaaaagggattgaggtgacattcagctctttgctcagcccaagaatgaaactcatcacatctgttttcagtccagtgaccaatactagtcatgtggccccagcataactacaggagaggctggagaatatatgggaacctcctcacattcaccaaatggaatctttggtgaattytaaagattcccggcatgtcccactatctccttttggggctgagaaaatgaaagaaaaaactgacaggccaatgtactgactgctctctcacctgggtctgatcccatctgaagctactttgggtggttatcacaatgtagtttatcatagtgctgtggaatatgaactatgaccatagccagccctatattctagaaccagcatctccatttgtagctatgggtgcttggacaaacacttcaatgttctccatctcagtttcctcatctgaaa

SEQ ID NO: 737938 - DNA, 574 bp, Homo sapiens
ctcgaactcccgacctcgtgatccgcccgcctcagcctcccaaagtgctgggattacaggcatgagccaccgtgccagccacacatttaaaataatgataatagtaagccccaattatactataaaggaacaactaatttagaataggaggtctaggtmaatatgcaaatgcaaatactctggcgcaacccccctggaaaacataatgaagtggtcccgccagagtatcctcacacagggtcaccaccaacacattgcatcagctgccatgcagacgaacacaggtctgttttgcattgtcacccaagtgacattcagtattgccattggttaggcaattttccagaattggtgagattctgaaccaaacaaaaaacaagatcacctcttttgacacagggtctgcattgtggtgatgtgtggaatatgttcatctgtacgaaaatatttggggtttgagtgtaaaatcgagttgggttctagactcagataaacaagattttttttctcccccacccaaagactgtttatcagggtcattcgaaatgtatgtggggcaactctatgtagtcag

SEQ ID NO: 737939 - DNA, 617 bp, Homo sapiens
gcatgtggtgtggggtccaggacaggctgtgagtacatgttctgcaccagacataatttacatggaggcttggggagaataagcttccaggtgaggaactcagtggctgagttgcaaagagctggaaatgagagaagcaarcttaatgactttgtacgtgcttcagtttagtgcatatcccactcttgtgtcctaatccagttatttttatttctgctgaactctgtacatcctgaggatgaagcccatgctgtcaccactttttttttaattaacagtgtctgttaaacatgcatgtgattcagaattagatatcactccccaccctcatgaaatcctctttaaatacttgatttattatttattttccactagaatacttctggatttttcatgaagcctgagggaaaatgagaagttattatctacatcatttttcactgttttaatgttaatcattgatacaggaattggctttcaccatcttggagtccaccccacctataattaattataaatcctttcagtggacaaaccaataacacttctatattgaaccaggaaccagagagcctaaatgcatcccctggatatcatctagtgagtcagaggcacag

SEQ ID NO: 737940 - DNA, 617 bp, Homo sapiens
gcatgtggtgtggggtccaggacaggctgtgagtacatgttctgcaccagacataatttacatggaggcttggggagaataagcttccaggtgaggaactcagtggctgagttgcaaagagctggaaatgagagaagcaagcttaatgactwtgtacgtgcttcagtttagtgcatatcccactcttgtgtcctaatccagttatttttatttctgctgaactctgtacatcctgaggatgaagcccatgctgtcaccactttttttttaattaacagtgtctgttaaacatgcatgtgattcagaattagatatcactccccaccctcatgaaatcctctttaaatacttgatttattatttattttccactagaatacttctggatttttcatgaagcctgagggaaaatgagaagttattatctacatcatttttcactgttttaatgttaatcattgatacaggaattggctttcaccatcttggagtccaccccacctataattaattataaatcctttcagtggacaaaccaataacacttctatattgaaccaggaaccagagagcctaaatgcatcccctggatatcatctagtgagtcagaggcacag

SEQ ID NO: 737941 - DNA, 617 bp, Homo sapiens
gcatgtggtgtggggtccaggacaggctgtgagtacatgttctgcaccagacataatttacatggaggcttggggagaataagcttccaggtgaggaactcagtggctgagttgcaaagagctggaaatgagagaagcaagcttaatgactttgtacgtgcttcagtttagtgcatatcccactcttgtgtcctaatccagttatttttatttctgctgaactctgtacatcctgaggatgaagcccatgctgtcaccactttttttttaattaacagtgtctgttaaacatgcatgtgattcagaattagatatcactccccaccctcatgaaatcmtctttaaatacttgatttattatttattttccactagaatacttctggatttttcatgaagcctgagggaaaatgagaagttattatctacatcatttttcactgttttaatgttaatcattgatacaggaattggctttcaccatcttggagtccaccccacctataattaattataaatcctttcagtggacaaaccaataacacttctatattgaaccaggaaccagagagcctaaatgcatcccctggatatcatctagtgagtcagaggcacag

SEQ ID NO: 737942 - DNA, 617 bp, Homo sapiens
gcatgtggtgtggggtccaggacaggctgtgagtacatgttctgcaccagacataatttacatggaggcttggggagaataagcttccaggtgaggaactcagtggctgagttgcaaagagctggaaatgagagaagcaagcttaatgactttgtacgtgcttcagtttagtgcatatcccactcttgtgtcctaatccagttatttttatttctgctgaactctgtacatcctgaggatgaagcccatgctgtcaccactttttttttaattaacagtgtctgttaaacatgcatgtgattcagaattagatatcactccccaccctcatgaaatcctctttaaatacttgatttattatttattttccactagaatacttctggatttttcatgaagcctgagggaaaatgagaagttattatctacatcatttttcactgttttaatgttaatcattgatacrggaattggctttcaccatcttggagtccaccccacctataattaattataaatcctttcagtggacaaaccaataacacttctatattgaaccaggaaccagagagcctaaatgcatcccctggatatcatctagtgagtcagaggcacag

SEQ ID NO: 737943 - DNA, 619 bp, Homo sapiens
ggactgtagtgtgtgttgcagtctcttatctgactctcagaaataactttgagtagagcagtactactaaaacacaaattcaccaacttttctctgctggaccttcatgtcgttctccctgagtgagtcccttttgcaagttattaatatatgtcacacagagcctgtttctcatatttattgaccagactaaggagagaacatcgtaccctctaacccagtggttggcrcgcttgagccagctcataccagctttcgtgagaccgttgttaatgtctctttctcactctgtcttcactgtagcttgatatcagccatggcaggattgtcttcaccatggcaatgggcaacaccaaggattgtcttacttcttcacagagctggtggttaagttacagcagataactgccccaccacacccattatgtcctgtgcagttatcgatgatattaactttctctgcttgaggcactctgataaaacttcactgatttatctcatttaatcccaatagctacttcatgagaaaggtgccatcattctatctgttttacaggtaaggcaaatgggcactcagagaggtaagatctgacaccgtgtgtctgagagcaggtccatg

SEQ ID NO: 737944 - DNA, 620 bp, Homo sapiens
cctataaattgattttatgatctaaaaatgaattgtgaaacctggtttaaaaaatgctgatgcaagatgttaggtaagaacatatttctgcaaaaatacttaagtggagggacaggaatgagtggggctaggtgtccagtgttctggaaagaattaaattttttattagtatctatttctcatatttctccccagcacagtcagttctgcgtggcgcagccatcctaccaaggggagtctgtgggaaccaggacacttgattgctttttagctcagtcttcgmgggagtgctggagcaactctgtgcatcggaatcacccgggatcccagcaggtctgggagggactgagattctgctcccaggtgatgctgatactgctgctccccaaagtgcgttaggccatacactgaacagcaaaggaagagaaaaatgcaaagttggaaccttgtgtttcctggcctccaccgacagccccatccagtaatgcctcctttctccttcaagggcatcttattgtctcattactcacatttagagactgattatgtcatttagtaagccttcgattgaatatttaaaagccacttggatgaagttaaaagtcagcaaagaatgtatt

SEQ ID NO: 737945 - DNA, 573 bp, Homo sapiens
cttgtggaggcagctacatacctggattagactgctgagttgcttctgactgattatttatttggtccactaagcaaagctgcttcctcactcagggctatggaaacatatttttctctgaacttcattagcacaaactcctcagaagaggttcaacttgaatcttggcaggtgggagaaccccacattccttaattttctcttctccacccccacactggtctttgcacctgyggcacctggcccacactcggtacttagcacacatccatggaatgaataaatgacaggatggctacccttttttttctgttttagttgtctaactacaaccaggtctacttcatcatgctgattcttcaaattacttggcggcattttctttcccaaggtgcggaagcatcgcaatacattgggactgcaagagccttagacccattttgtccagcccagcagcccagcgaatttacagggaacaagttaaataacggggcaactgctcagactcccaggacttgagattccctggctatgacgagcattgtgagtgacactctgggaccagatccccaa

SEQ ID NO: 737946 - DNA, 573 bp, Homo sapiens
cttgtggaggcagctacatacctggattagactgctgagttgcttctgactgattatttatttggtccactaagcaaagctgcttcctcactcagggctatggaaacatatttttctctgaacttcattagcacaaactcctcagaagaggttcaacttgaatcttggcaggtgggagaaccccacattccttaattttctcttctccacccccacactggtctttgcacctgtggcacctggcccacactcggtacttagcacacatccatggaatgaataaatgacaggatggctacccttttttttctgttttagttgtctaactacaaccaggtctacttcatcatgctgattcttcaaattacttggcggcattttctttcccaaggtgcggaagcatcgcaatacrttgggactgcaagagccttagacccattttgtccagcccagcagcccagcgaatttacagggaacaagttaaataacggggcaactgctcagactcccaggacttgagattccctggctatgacgagcattgtgagtgacactctgggaccagatccccaa

SEQ ID NO: 737947 - DNA, 613 bp, Homo sapiens
tgcagattattcacctctctcagcctttatagcactgaagagagagcactttggtctggattaggctttaccttaagtgaatgttgtgagtagtttgatcttttatccagaccactcaaactttctccacatcagcaataaggcagtttcacttccttgccattcatgtgtttactggggtagcaagttttgtttccttcaagaacttttcctttgcattcataattcagctgtttggtacaagaggtctggctttcagctatctcagctttcaacatgtcttcgtcattaagcttaatcagtctaggctgagtggtggctgacacctgtaatccccgcattttggtaggctgaggtgtgcagatcacttgaggtcaggagttcgagaccagcctggccaacatagtaaaacctcatctgtgcttaaaaaaaaaaaaaaacgtagccaagcgtggtggcgygcacctgtaatcccagctactcgggaggctgaggcaggagaattgcttgaacccaagaagcaaaggttgcagtgagccgagattgcaccactgcattctaacctcggcaacagagcgggactccgtttctaaataaataaataaataaaatt

SEQ ID NO: 737948 - DNA, 640 bp, Homo sapiens
gactgctaataactcaaaaccggtggagattagagcaagggaaatgtggttaattcaactccagcttgctttgacctgaatttatgccaactgggacttttgcctgaattattcgggaaaatgccctgagctgcccmttaattcatcttgtacgtttggtctcttacatattgaaaaagtgtgttctatgattcttttccatatagctaatgtcatcttgaccaggtcagagttcctccaagttgtttttaacatacaaatttatcacatcacgtttcatcatgcctgctcccaatggtcatgagttattgaatttgtataggagagttaatttgtaatgtccttgaggtatcatttttcactattggcctatgttggccacctttgtttacatttagttcagaaagcactaatttaagaagtgtcaggttgtaacaaaacataagatcaatgcagttagtttctgttcagactttaacaacttggtatctgtcaactgaagcatgaacatagatatgggcaaaacccaattaatacacagttgtaatcacagtgggacttagtggtactttctcctttgcacagtgggactcttagaagtggcttcattaatgttgcatttgtagtttgagttctgctc

SEQ ID NO: 737949 - DNA, 640 bp, Homo sapiens
gactgctaataactcaaaaccggtggagattagagcaagggaaatgtggttaattcaactccagcttgctttgacctgaatttatgccaactgggacttttgcctgaattattcgggaaaatgccctgagctgccccttaattcatcttgtacgtttggtctcttacatattgaaaaagtgtgttctatgattcttttccatatagctaatgtcatcttgaccaggtcagagttcctccaagttgtttttaacatacaaatttatcacatcacgtttcatcatgcctgctcccaatggtcatgagttattgaatttgtataggagagttaatttgtaatgtccttgaggtaycatttttcactattggcctatgttggccacctttgtttacatttagttcagaaagcactaatttaagaagtgtcaggttgtaacaaaacataagatcaatgcagttagtttctgttcagactttaacaacttggtatctgtcaactgaagcatgaacatagatatgggcaaaacccaattaatacacagttgtaatcacagtgggacttagtggtactttctcctttgcacagtgggactcttagaagtggcttcattaatgttgcatttgtagtttgagttctgctc

SEQ ID NO: 737950 - DNA, 567 bp, Homo sapiens
tgaaaagctgtctaggacacaaggactgtaattcctatgcaactcctggtactgggctgggcttagagccagaggacctgtggggcacatgacctagagggacaccaggcttcaaggctaaggaagtgcttgaaccacccctcctccaactccaggcagcacagttggcagcaatgaaagtgactccttccttctgctcagggagaggagagttaagaaaagaggcctttttacgttgcatcttggagtccagctcagccacagttggagagggcactgggcagagtcatgaggcccccatttcaggccctagctcrtgggtgacatttctaggtataccctgggctagaagggaacccactgccttgaagagaaggacctagtcctggcaggattcatcacctgctcactaaagagctctcagatcctgaataaccaacagtgatccccaggtaatatgctgtgggccttgggccctgagaggtgctggtgtcaggtgtgaccagtacattcccagctgtggtggctatagggagagaccccttctgtttgagaaaagtggaagga

SEQ ID NO: 737951 - DNA, 574 bp, Homo sapiens
gcagtatctggcttaacaggtctggagtgggcgtgagattctgcctttctaatgcggactctagtgacatggattctgctgggtctaggaacctcactttgggaactgctgctcttgtaattttttttttgaaacagggtcttgttgtgtygcccaggctggaatgcagtggcgccgtcacagcccattgcagcctccacctcccaggctcaagcaatcctcccacttcagcctcccaaatagctgggaccacaggtgagtgccaccacaccaggctaatttttaaatttaattttaaatttcacgtagatatggggtctccctctgttgcccaagctggtcttgagctcgagcaatcattccactttggtctcctaaagtgctgggagagcaggtgtgagccaccgtgcctggcctcttgtgaacttttgaccactgagggagacgaggactaggctggtactgccctggtccctcctaggataaagctgtggtggtcccagctggaacttcccaaaccaagtggtctagtgataatgacctcatgggtatgttaagaaagagaaatgaatac

SEQ ID NO: 737952 - DNA, 558 bp, Homo sapiens
acattgctatgtggcttgagtgacagcaggagagcagtgcgtggtcccccaaggtacttaacatcattaaggtacaggctggcagctataacaaagagaccccaaactagaatagttttaagccaaatttttctcttgtgcaatagtcccaaggtgagggatgtaggtgagtatcgacaactcttattccagattctcccgccttgatgttccctcctcccctggggcgctggtccagtcctctcttcttagctgggttgcaggcccatttgtgctgtcccggctcacaggaaggatggaaagagtgtgcaagagttagatccagaggtggtttgcatcacttctgtttccagtccggaggtgaggacttagtcatrtttggccacacctagcggcaagggaagccagaaagaacagtctctgacctagccgatctgctgtgtacccagccacaactggaaaactgtgtaaaaggaggttctggtggacgactaagtttacagcacaaagctcatgggcatgaagtcgtcccccgatttccagcacagttgcaagtcc

SEQ ID NO: 737953 - DNA, 641 bp, Homo sapiens
gcaacctctaccccaagttgtgacaaccaaaaatgtctctaatctttcctaaatgctctctggggaacaaaatcgctctgcattgagaaacactggtctaactcaggccctgttccaggcaccttacttcttcattgccatstggatttgggtctgtccaaagcagacccagagacaaggacttgggcccaggttgtttatttgggaggtgatcccaggtagttccagtgaggtcatgaagagctgagaccccagggccaccaggcctttaagggtcttcaactagagtaatggggagcccggaccaagtttcactactccaaacatttgcttatttccctgctgctcagaagcctttgatcaaggcaaaagagaatacaaacagcacatattactacgtttcccacctgaaaatgtttcctaacacgtggtctgatgtggtggtggaaaggagggaagaaccgaaaggttgcgtatagaggctgaagaaccatcgcgtcattcctgttttggaggtcacagactgctggctcctttctctgctgttccaacttccatgtcattataatcagtataatcagcgagtgctcctttacagaaaaagctaaccagcatttttaccagtacccatcaatatactt

SEQ ID NO: 737954 - DNA, 641 bp, Homo sapiens
gcaacctctaccccaagttgtgacaaccaaaaatgtctctaatctttcctaaatgctctctggggaacaaaatcgctctgcattgagaaacactggtctaactcaggccctgttccaggcaccttacttcttcattgccatctggatttgggtctgtccaaagcagacccagagacaaggacttgggcccaggttgtttatttgggaggtgatcccaggtagttccagtgaggtcatgaagagctgagaccccagggccaccaggcctttaagggtcttcaactagagtaatggggagcccggaccaagtttcactactccaaacatttgcttatttccctgctgctcagaagcctttgwtcaaggcaaaagagaatacaaacagcacatattactacgtttcccacctgaaaatgtttcctaacacgtggtctgatgtggtggtggaaaggagggaagaaccgaaaggttgcgtatagaggctgaagaaccatcgcgtcattcctgttttggaggtcacagactgctggctcctttctctgctgttccaacttccatgtcattataatcagtataatcagcgagtgctcctttacagaaaaagctaaccagcatttttaccagtacccatcaatatactt

SEQ ID NO: 737955 - DNA, 534 bp, Homo sapiens
aggttgcgtatagaggctgaagaaccatcgcgtcattcctgttttggaggtcacagactgctggctcctttctctgctgttccaacttccatgtcattataatcagtataatcagcgagtgctcctttacagaaaaagctaaccagcatttttaccagtacccatcaatatactttaaaagatgctaattatttttctattctctttataaagataaatattagtaatttttatttttgtcttaytttggagtcaaacgaatgcagaggtcacaagcaaatgtgatcccagaacagttttgatctccaacatgcttaaagttttctgcccaggcacggtggctcacacctgtaatcccagcactttgggaggccaaagcaggaggatcacgcgaggccaggagtttgggaccagcctgggcaacatagggagaccgcctatctctgtagaataatcatcatcatcatcattagtaaaaaaagttttaaaattacttgtcaacacttaaaaaccagaagatttctatttttaaaa

SEQ ID NO: 737956 - DNA, 592 bp, Homo sapiens
tatcctggaactataacaaatgaagaaggagttttttttttttgtttgtttgttttttttttttttaagtaagatatatctcctactctggctaagctcacacattagtgtggaggaaaagtgatgttttcaaaatcacctttatgcagtgagattcgcaatcactatgagaatagcatcgtgagcttgaataagagcccgagaagaagcaaacagcgatttgaatgatttggccastgataatgatggtgtatctgtatttctaataacatggaaggatatccttgcacattatggatatggaaataattcagatgatacaacaggtgagtaaatggagtctcagcggaacttggcaatatggcagagctgagatggatcagagctgggattcgagtccgggtctttctaaattcttgaccacctatgtcttctaccttgcctattctgagctccctcagaatgcaaaccatgtgctagcctgtaataccatagtaggccagttcctccagttcccatttatcaggaccttgagacaaatccaaattgtcattcaaggatcaaaggactcacactggtgccccccccaaaa

SEQ ID NO: 737957 - DNA, 592 bp, Homo sapiens
tatcctggaactataacaaatgaagaaggagttttttttttttgtttgtttgttttttttttttttaagtaagatatatctcctactctggctaagctcacacattagtgtggaggaaaagtgatgttttcaaaatcacctttatgcagtgagattcgcaatcactatgagaatagcatcgtgagcttgaataagagcccgagaagaagcaaacagcgatttgaatgatttggccactgataatgatggtgtatctgtatttctaataacatggaaggatatccttgcacattatggatatgraaataattcagatgatacaacaggtgagtaaatggagtctcagcggaacttggcaatatggcagagctgagatggatcagagctgggattcgagtccgggtctttctaaattcttgaccacctatgtcttctaccttgcctattctgagctccctcagaatgcaaaccatgtgctagcctgtaataccatagtaggccagttcctccagttcccatttatcaggaccttgagacaaatccaaattgtcattcaaggatcaaaggactcacactggtgccccccccaaaa

SEQ ID NO: 737958 - DNA, 634 bp, Homo sapiens
gattgctcacaaattatacaaatcacattgattactgacaaatcataatgtttacagagcactatttggctttggctccaaagcatgagtaggtatttaattaacaactgtcagatataatttacaccattacaatgaccagaaaatggctgattgctgattttacatactagaacaaatactctgcaactagccttggtaaaggcaaaataactagggactcaacgatagacaataaaatcaaatttcagtaccgtgtttaaccggaagattcttgaaggccatgatacctctgcctccgattagaaatggamatccttttgctcataggtccgagaaactctgtaactagttttgtttcccttttttgccttgactaccaggaaactccaagccaaatctttagccccagtacataacctttttggatactgtggtgtgcaaatgtgtattttattctatttcgcctgctttttacttttacatgtgttttactacttcattgtatattaaggatctagcctggatgtcagcaaactacagtccacaggacaaatccagcccaccagcctgtttatgtacagcccacctgttctggataatctgtaatttgttatgcaaataatgggggtgg

SEQ ID NO: 737959 - DNA, 634 bp, Homo sapiens
gattgctcacaaattatacaaatcacattgattactgacaaatcataatgtttacagagcactatttggctttggctccaaagcatgagtaggtatttaattaacaactgtcagatataatttacaccattacaatgaccagaaaatggctgattgctgattttacatactagaacaaatactctgcaactagccttggtaaaggcaaaataactagggactcaacgatagacaataaaatcaaatttcagtaccgtgtttaaccggaagattcttgaaggccatgatacctctgcctccgattagaaatggaaatccttttgctcataggtccgagaaactctgtaactagttttgtttcccttttttgccttgactaccaggaaactccaagccaaatctttagccccagtacataacctttttggatactgtggtgtgcaaatgtstattttattctatttcgcctgctttttacttttacatgtgttttactacttcattgtatattaaggatctagcctggatgtcagcaaactacagtccacaggacaaatccagcccaccagcctgtttatgtacagcccacctgttctggataatctgtaatttgttatgcaaataatgggggtgg

SEQ ID NO: 737960 - DNA, 592 bp, Homo sapiens
caacatggggaaaccttgtctttaccaaaaatacaaacattagtcaggtgtggtggcatgtgcctatgggctgaggcaggagaatcgcttgaacccaggaggcagaggttactgtgagccgagatcgcaccactacactccagcctaggtgacacagcgaaagtccatctaaaaaaaaaaaagaaaatttgatgatgggcctctaaagtcacagaagccccagtgtctccttttgcccactcctctcttcccaaccgtagcacagttccttgcccccagttagagctccataagcatttgtgraaaagagccacagcagtgcagagcagcagccccagccacaaagattccagaaagcgccccttcattcatctgcaaagagcaggagaaactttaaggctatagtgcccaaaccgtttgtaacactcaagtgaactggcattcacatcatcttcctgctttcattaaacagttccacatcactcacctagtgaatgggcctttttagcagggaagatgatcatccattaagcctggaagggcaggaggcctgcggacacctctgccccctctgccagctccgtggatccct

SEQ ID NO: 737961 - DNA, 491 bp, Homo sapiens
tagacgggctaatcacaacgccaagaagcactgaagagtcatcctaatggacactgcttccttctggccctccgtgctagacgggcttatcacaacaccaagaagcaatggagagtcatcctaatggacactgcttccttctggccctccrtgctagacgggcttatcacaacaccaagaagcactggagagtcaacctaatggacactgcttccttctggccaaatatgaacaagaaactgtcatgtgttttcaccccaaacttctttggaggacatttttgaatctcttaaatttggagaactcgaccttctacaaagccaaagagctggtaaaacttccttccgattaaaatgagacttgaaaacgggtgctatcaccactgacagttcatgttgacaggtctgtgaaccctgaaaatctgagccaggtctcagctaatttagaaagtttattttgccaaggttgaggatgtgcacctgtgacacagc

SEQ ID NO: 737962 - DNA, 585 bp, Homo sapiens
agctctgttcgtattgctgctacttgcctaaaagctcccttcccgctgtccatccagttagcttggcctttttcaaaactgcttagttatcaaaacctagagaaagccttctcatgcctcctagtctgattttttatcccttcatctatgattccatgccctccagacaagtctctggggttgtagctgttaactgcaagcaacttcagggcaaggtccaccttcgtcagctctgtatcctggcttccagcatcctacctgtctgtatcagatgcttagtaaaatgttgattaagtggctgaggcttgatttctgagattcttaaaacctctgacaagtgccacgtatgtcttgtagggtagataacatccttctcgatgtcttctctctttcctcacayattttattgttgtaaccactgagcagtattcttattgcagtaatatgtttaaatcctaaggggaaattgctgtgctaaacgtaattttattagagtagttcagtcgtgctaccagaagagggtgccataacataatgtttaatttcatgctgttttaggtgagggcacgcagtgagcagttacaa

SEQ ID NO: 737963 - DNA, 742 bp, Homo sapiens
ccacggcgaaaagacaggcagccagcaaaggcaatgcctcaatggctatcttttctatcagctccttaagggagagctttggataaagtagagcagttttcaaacttgtaaaggtcaagtaaagcattttccatactaaataactttaagccattgcctatataagtagcatttcctaaagtctcataacttctctttttttttcttttttttttgagacagggtctcactctgtcacccaggctggaatgcagtggtgtgatcttggctcacagcagtctcgatctcctgggctcaagagattctcccacctcagcctcccaagtagctgggaccacaagtgcatgccactatgcctggctaatttttttgatttttagtaaagacagtttctctcctacattgtccaggctggtcttgaactcctaggctcctctcactttagcctcctaaactgcggggattacaggtgtgagccaccacactcggccttatataacatattttatataattacatattgtaattctaagctgcatgaatttcaaagatgggactaccrtggtgcaaagaaacgctgtgttccaggtgtggccctacagctacttagtggtaagcatcactgaagtttgctctcctgacattaagtcatcaagtaactgcttctccagtagttctttaaagcagctatgtgctgaagatacagagataataaggactgacagaaaatacggttttccta

SEQ ID NO: 737964 - DNA, 551 bp, Homo sapiens
ttggcaagaacggatctttggcaagatcacttaaggtgagctactctagcagcatcctgtttgacatttgtatccataacttgaataaaaatatagaaggcaaagaagagtgctgggcaagatgtgttgggtgttagatctgcaatactcttcatagtgtaatggctaaatgtaaagtcttacgtctcggttcaagaaagcacgttgctatatgaaatttcagaaaaaagttttgttgcggggggtgggatattgatcatttgaacatatgccagttgtttctcctggccctaggggaggttggcacggcaaccttcccactcygtaggtgggtagccttgctgatggggcacgtcgtcaccaagggacctgattgttgtcatggttttgtcttgtcctcctccctggtgaaagtctactgcagttttattctcagctctggagggagagggaacgagcctctgcctgtgtgtcctgacccctcttgccttgtttttgatctgctcaggccgggtgcagtggctcacgcctgtaatcccagcactttggga

SEQ ID NO: 737965 - DNA, 511 bp, Homo sapiens
caggctctccatgaaaacaaagataatctgaataaaaattgtgtgttgggaaatgtatcaagtgaccttcagttaagaaaagcacaggctgtttattagcacaacttgcttcattaaataattcgtggctttttctgccactggggttcttttcgttttgaattcagcttgtgtttggttcctcggtcttgtaccccttcagttcgccggcgacgtaatggtgataccctttgttttttgtatcataccttttgtgaattgtgacaaccatcccrtaatcattgtggcctcagcagaagttttgaacaatctttgcagccactgttggggtgtgtaccagcagcctggaagtgaccagcagagctgacaaaagcaccccctgctctgcccacctccgcagagtcctgtcctcatcagaaacggtatcgcggatgctcctcaggtaggcgtaggcagacttcattgtgtgttagcagtgacagtgatgtctgtacctatctgtgagtgagac

SEQ ID NO: 737966 - DNA, 596 bp, Homo sapiens
tttgaaggtgtttttacctttctcagcattccacaaattacttcctccttcctttgttctcctctgcctttgcctcttttaaaaagttctaagttgcgagccaatcgggacaaatacagaatgtgaggtcccgttccagccaatggaaaccggacacagcagtaggtataaaaaaaccggacacagcgtcaggttataaatgaccctggtctccttcattcggtgtactctcgtggcaaaactgctggygagtgtaccctttctgcagaaagtaaatatggccttgctgagagaattaaatttacgttcaagtgctatttctttgcagcaccagggaacaagcactctatttctaaataaacattcctaacatcagcgtggcctcaggcgctgtccctaccgcccggtattcactcagccttacgggtaagaagctcagtgcccatggccatgatcacaagggcaaaacccactcctcgaattctccaaactgcacgcatggtgcagggcaagcgcgggtgttccctcccacccagagcagcctctccgcggagtccccgggcgggaccccagttacttctgagcacgtgcagtct

SEQ ID NO: 737967 - DNA, 518 bp, Homo sapiens
cgggatccgatgatggggctggaagtccagcttctctgcgaggccagggcaggggtccgacctggaaacggccccggaagacgagagcaaggctgtgtccccggccttagcacagaccaccatctacgggaagtcctaagccccccagccatgcccgtcccagttaactcagagcggcttctgatccttcggggtcctctgcagagccaggagcaccaggtcttgtcatgagttcacccttggggtccctcccaccaggtttccagccccagyacccccgaggccccagacatcccagcctgcccttctccgggccagaagataaagaaatccaccccggcagcaggtcagccgccccacctgacatccgcgcaggaccaggtgaggggcggggcctggggcagatgcgggagggctgagtggtgccggcctgcctgcctgcctgacggcaccgtgtcccctgatccccctgaaggacaccatctctgagcttgcgtcatgcctgcaacgggcccggg

SEQ ID NO: 737968 - DNA, 634 bp, Homo sapiens
tagaaataatatacgtaggtatagatatgtttgtaatatgaattctaatatatctatgtattcactttccttccggtcttttcatactttagacgttctcttcagtttatcaattcattttttaaaaatcttccagaagggtgggtggtcaaaggcttgctatttttcacctaggaagccagccatggcgtaagttcttatttactggtgactgttcaagtttgattcatggttttaatagaagaggaaatttggtggcttgagttaaagcagagatttgacatcatcgcgtcattgtgtatgtgtgtgtgtatcctcagaaagcaaagatatccttaggcatatctctgacataagagtctgccccccacascccgctccagagctgtttatgatccataaggtcataaatccatctatatgagtgtttcagtgcagaagaacttaacacacacacctgttggactgcacaggtgaggttgagagtctctatcttttgaccagtgctaccttaagagctgccacttatgatctctctctttccttttcctttgcatttccccatttctgcggacccagatccccatctaccagaaacaaagagaaaatgccttggggaaaataaaaaataact

SEQ ID NO: 737969 - DNA, 511 bp, Homo sapiens
atactggatacagtcgttggtaaggtaccagtagaaatgtctccagacaaaccgttccttcatgtagccttaagacttgagagactgcatggccttcatgatgtgaaggttgggcacattcttgtcttctgccaggtctgggtacttaggaaggtggacatccttcttggccaccatgactccctccttaaaaaggagttcatagatggcaatcccgttcttcttaggcatcagcatcttggtggctgcagggcccaggtccggggctggagagacctgcaacttaacagagatcgcatcttccaagtcaggacatttgaaggaagagatgctaatccatcccgtagaagacaatattgtgtctctrgtaaatgttggatgtgcttttgattactcagaaaaatttttatataacctattttccacatcccccaaactagatcatagcagtggggcttaaagggtatgcaaacttcaaactttttagattaaacttaactcttcggtagga

SEQ ID NO: 737970 - DNA, 528 bp, Homo sapiens
gcctcacaaagtgttaggactacaggtgtaagctgctatacccggcccaaagtgtattttttaaatctcaaagattcatctacaggtaatgtcatgaatctttccacatcagttttttctaagtgccaaagttctaaggaaaagaattaccataaaatatgtcttcatactgatactgaatgcctgcctcatagtcagtcatctgattttacattactttccagagaatgattccctcataccctgcctttaccaaccatcaccaactctcaagtcttctctttctcccttggagagtacaatgaccttccattatgttatattttatgtacaagttatattttactttaaaaytgtttgttacttatatactattttcatttttcaattgatacttctctctcggaaaattgtttgggtatctggccagcctgaataacttctatttatttatttatttatttttgagatggagtcttgctctgtctctattttgtagagatgggggtcttgctctgtggcccaggc

SEQ ID NO: 737971 - DNA, 582 bp, Homo sapiens
ggggaaaaggtgggttgtatcgactccacaacaagtcagagtgcagtgggcccatgttttgtaaaacatatgtttggcaaatgactccctgtgggttgcagaaatccagatgggggaagttttctaagtgtgatgtcagaatgttacatctgctgatcccacggtgcatgggaccaataagaagacgtgagttggtttgtccgagaaattgcacggcgtggagatctggggggcacattcgaatctggaaaacaaaggccataatgtgcacagccctctttgggcttgcgtattgttagagctaggagaagtcttaacattgcctaaaagagctcccaattttatgcacgaggaaactgaggcatggkgtggtgggtaaggtgagttgctcaaggctgtctaaggctggaacttgaacctggggctctgtagtctcagcacagcaccctcagccccatcacgctggactaaggcagagattaaggttctgggtgtaacgtcagactgcctggagggctaaggctctgttccatctgctgaaaagctgtgccaccctgagcctcagtttcctcatctgaaagc

SEQ ID NO: 737972 - DNA, 587 bp, Homo sapiens
cgagaaggctggcttcccgcagcgaagctttggaagagaaccggcgtcccatgacggttcgtccctttggggtctggcggccggcctccgcagctgggctttctgtgtgcgcactggacaccttgaaaaaccatctgtaagacgggcagcataatccactcctcatcaccttgtggaggagggatggagacccagcttgctgagggcctgagcctggggcctgatgccttctgaaaaacccatcacacggtagctggtgttcccgtatctccaacaggaaaggggcagctcgaaaatctaatgcaccccccacacacattttatccctgccacgcctggccataagccaacatgaggacttactttggacataggaggaggcttttagaagcctgacaagtctttttcttccccygcttcaacttttattttaagttccaggctacatgtgcaggatgtgcaggtttgttacataggtaaacgtgcgccatggtggtttgctgctcctgtcaacccatcacctaggtattaagcccctcatgcattagctatttatcctgatgctctcgctcccctcacactcctga

SEQ ID NO: 737973 - DNA, 609 bp, Homo sapiens
gcctcggcctcccattgtgctgggattacaggcgtgagccaccacacccgtcctacatcttcaactctttttaggaacttttacatgcattatctcattgcatttccaccactcccgtgaggcacttggagttagtgccatcttacagatggggacatgggctcagagaggtgccgtgacttgcccaggggtgcacagctcacaagaggctgagctagaatttggaattgtttttcatccaggacagctctttatgtggaaccgcagctgcctcctttgacagattaaaggttcttggggaaatatcactgttaggatgacaggttttcagccttagttcgaagaaccattttcttgagcaggcaagaggtagaattcactctccttgagagagraccctgaaaacaactgaaccctttctccctctcctttcatgctcagcttcaaaacaaatatattttgactgtgtttagattaaaagaaagtagagagagagacatttactagtggtcggtattgtgtacactctgtaactacaaaatcatttctatttatttggaaaggtctaacctcgtattctctcaaacaacccgtgtgatggccacaaaa

SEQ ID NO: 737974 - DNA, 630 bp, Homo sapiens
gggctctcctgatgtttttctcttgattagactacagttaggggctttgaggaagaagaccacagagatgaagtacgtgtctcatagcatcatattgggggtacgtgatatccccatgacctatcactgccgatgtcaaactcggtcacttggttaccgtattgtatgccagatttctcctctgcaatgctcctgtcattctctgtccacactctgttctttggaagcaacccattaagtttagttcaccctcaaaggagagattaagctccacttccttgagggagagtattgacatatatgacttagaattcttctgtagagaggaatgatgytatgtcatgactcaagacaaaattggggccctgttagtaaggaaataggggagcatgagattccaaccctcaattgtaaatggggaaactaacatttgcctgacctatgctgataagagaatgtctacatctaatgttggaacaagcaggagcttggaatagtggtggggtttttaccacaggttggcaacttttgacaggcgagtttattcattcaaggcttaaagactagaggctgggatagagggaggtacacagtggtgagtaagggtgtagcgaacatacttcattgtta

SEQ ID NO: 737975 - DNA, 630 bp, Homo sapiens
ccacctcctgggttcaagcaattctcctgcctcaccctccagagaagctgggattacaggtgcctaccatcatgcctggctaatgctttgtgttttaataaagacagggtttcccatgttggccaggctgttctcgaactcccgacctcaggtgatccacccaccttggcctcccaaagtgctgggattacaggcgtgagccaccgtgcctggccggtgttattttataatatgaatattcatcatatgtttgccatatgtgttgcaaatttctaagttattgattatcttttaatgttttattacaaatctttataagatattgtgtgtattattctgtcctatttaacctagatccctgaagataactgaatctcttatcgatgaccyataacctgttcccttctttgtgtgctgctaaaatttgtacaactatttgccctttcgttaaatggcctctgattgccatacttctgaatactttatctattttgttatcttggtccttctaccttagtgatgtgctattcacatgtattccctgttattaatgggttaaaaatggtaatattcttccttgattttctaaatgtgcttttctcggttgtctacagctgggggatcagacag

SEQ ID NO: 737976 - DNA, 631 bp, Homo sapiens
cttgtcactatttattctcccaattttaatgatgtggaaactgagtcttcaactggtgaagaaacgagccgaagtgcaaatagcagctgtggctctgcacgtcctgcttggtcccagaggacatgtgcgctgagcccttcctccacatggagacaagcctgagatcarcaccagcagggatgtccccttatgattgtcgtgtgacgaatgaagaatggagcagtgaagcagatccattacccgaggccacggggaagcctgaaatcagaactcgtggtccacagcctgtgctctacggctacaggttcagccctggttttagtctgggcttcctcagaagcaaagcctgggacgaggacctggcacaggtggtttcttgggaggtgaggggccagggagtgagatcaggaaggggacaggcaaccaagggtgccttcgtgaatatgttacccgtgcaggttctgaaggccaatcccagtacaactctctataagatggagcagacacgcctcaggatcgtccacccagaagctggcccagaaactggtgacacatcctgccactcctgttccccatcggttggggctgttcctggacgtgctggctttttggcccttcagacttgacctat

SEQ ID NO: 737977 - DNA, 489 bp, Homo sapiens
tgttgaagatttgaataacatatatggaaaccttgaatgactaagtttgctctagtagatgaatgttaaacgtacgcacattttttggtgatatttctatctcagttctcaacacattctccttttcttcccccatcttccttctgccaccccttgaaaaccatttcatttcttcttcagacrtagcctccataaaccctatagttttaacatcgcttggcactaaacaagaaaaagaaaaaagcacctaatggcatttgcaaattactttcagtttgtggcttcgaaaagaagggttatggaaagtattgatagctgcacgactttctcagagggtgggtttgaaaaaaatggcagatcaaaagcttcttgagaatttgtgtgagtatgtgctgggagtctgttctgtccaaaggaaatcactggcaggtattaatttgagggagaaaaagttttaaggcaagtcaaagggaaaagggagaaaaaata

SEQ ID NO: 737978 - DNA, 459 bp, Homo sapiens
taggatccctctcctctgaccctctgttccagccatctggggcttcttgatgttccccaacaggcctagcaggccctgtctcaggtctttgtgttgccattccccttggccgtgggtcttccccggatgcaccaggacccacggctccccaggtgtcatctcatcataagaaccacccccaccaactgcttgcatggcttaccctcttttctcaatttgtttttctccatagcactactcttgtctgatgcaggtgcactctatagtttacttattttasttatttgtgctgtttgtctttcccctttctggctggaagttcctgaggtaggactgttatctatttttctcttggcagcatctcctgtgctagggggacgatctggatcagtgcctggcccatggaagactcctgacccaggcttgttcactgaatgaaggcattccacatgttctgtg

SEQ ID NO: 737979 - DNA, 494 bp, Homo sapiens
aagcccgggaagatggatccagcttcaagactctgggagcagccacacctggtcatgggtctcctggactgagatgtcctcccaaacttctgaaccataaactacttttactcatcattggctccccagtgcccagcacagtgcctggcccttggagggtgataaatgaatacatgtcccctactaggctgtgaactcctttaagggaggcaccacttggggatcactacagtgttgccccctcctcccctccccagtgcctgccacagtgacctgctgatgaccatggatccaaatccctttctcctcattaraagctctcagtccaaaatccgtggttccatgggtcagactgaggcccaggtggtccttatgggtgaatgatggagaccccaccaagctgagaactgggaggaatgatctccactgtttatggccaggctggttttttgcctttctgaatggcaacggcatatttcagcagaggtcctcag

SEQ ID NO: 737980 - DNA, 477 bp, Homo sapiens
tcccctccccagtgcctgccacagtgacctgctgatgaccatggatccaaatccctttctcctcattagaagctctcagtccaaaatccgtggttccatgggtcagactgaggcccaggtggtccttatgggtgaatgatgragaccccaccaagctgagaactgggaggaatgatctccactgtttatggccaggctggttttttgcctttctgaatggcaacggcatatttcagcagaggtcctcagtagagccacatgcaggagatacatgcatttgtccactcgtcactcacttagtcatttgttcacttatatatccactctctcactcatgccttcagtcatttgattactcatctgattaattcatccattcatccaacattgtgcagaacattgaacaggtttagagatgcttcaggcacagtttttttacctgagagctcccagattggggcgagaaaggtaagagcc

SEQ ID NO: 737981 - DNA, 477 bp, Homo sapiens
tcccctccccagtgcctgccacagtgacctgctgatgaccatggatccaaatccctttctcctcattagaagctctcagtccaaaatccgtggttccatgggtcagactgaggcccaggtggtccttatgggtgaatgatggagaccccaccaagctgagaactgggaggaatgatctccactgtttatggccaggcyggttttttgcctttctgaatggcaacggcatatttcagcagaggtcctcagtagagccacatgcaggagatacatgcatttgtccactcgtcactcacttagtcatttgttcacttatatatccactctctcactcatgccttcagtcatttgattactcatctgattaattcatccattcatccaacattgtgcagaacattgaacaggtttagagatgcttcaggcacagtttttttacctgagagctcccagattggggcgagaaaggtaagagcc

SEQ ID NO: 737982 - DNA, 531 bp, Homo sapiens
gttcacttatatatccactctctcactcatgccttcagtcatttgattactcatctgattaattcatccattcatccaacattgtgcagaacattgaacaggtttagagatgcttcaggcacagtttttttacctgagagctcccagattggggcgagaaaggtaagagccatgaagacaaataatcatacagcagcttagcaagtagtaaatgtcatgagaaatgtacagacacatcagccaagggatacagagagagagatttctcccaactaagaaagggagtgatcagaggtagcttcctggaggaagtataatcagcaccagctccagaatttctccatggcgaytgggtacggatggcagcttgtcagggaagctagtagctgcatcctctacagggcactttacaaaagactgaaagataggccgggcacaatggctcacgcctgtaatcccagcactttggaaggccgaggtgggcagatcacttgagctcaggagttcaagaccaggctgggcaacatggca

SEQ ID NO: 737983 - DNA, 581 bp, Homo sapiens
ttaataaatcatttttacaatattatgattatgtaagtactgtttactggagagccaaggataaatggatccacaaagaagaatatgtaactcaataaacgtgggccgcttagagaaagaagttaaggtctttcagaatttgtctarcagattttctgcttctcaccagaaaacccataaaaaaatagaaataaaagaaagaagaatattctcttctgagacttgctcagaatcaggtcacattttagtttgcttacaatttggactattatttccttacgggacttttatgtttttcctggcatttcaactgtcttttttcccccttgtataggcacatgggcagatatgtcttttttactctatcattaagataattccatttttaatcactctatttgttgagtgatctaatattcactgacttgtttccagatctgctatacaactgtcattctgagatgtattttcattgctctcctagtttagaaccattgcttcttggattcccctatcatgctctattttggactccttttcattttgctggagtacatcctcaagcaattttttaccaaaag

SEQ ID NO: 737984 - DNA, 581 bp, Homo sapiens
ttaataaatcatttttacaatattatgattatgtaagtactgtttactggagagccaaggataaatggatccacaaagaagaatatgtaactcaataaacgtgggccgcttagagaaagaagttaaggtctttcagaatttgtctaacagattttctgcttctcaccagaaaacccataaaaaaatagaaataaaagaaagaagaatattctcttctgagacttgctcagaatcaggtcacattttagtttgcttacaatttggactattatttccttacgggacttttatgtttttcctggcatttcaactgtcttttttcccccttgtataggcacatgggcagatatgtcttttttactctatcattaagataattccatttttaatcackctatttgttgagtgatctaatattcactgacttgtttccagatctgctatacaactgtcattctgagatgtattttcattgctctcctagtttagaaccattgcttcttggattcccctatcatgctctattttggactccttttcattttgctggagtacatcctcaagcaattttttaccaaaag

SEQ ID NO: 737985 - DNA, 622 bp, Homo sapiens
ttttgtatattttataatttatcattttaaataaaaagatttaatgaaaagtaagatactaagatttacaagttctcacgtggagtgacttttaggagacttgttttgctcaacagtctctttctgtttcctttcgtgggaatcatactgcatgttaaccygtattaaaggaagcagattaaagtggatgtatgtatatcacgtgtttttcgtctttctctctatagctggagggctaataacaacattcagttcagaatgggcactgaatctctgctatgtcttttcgacaccagagtgcttgttgaacttgaaagcaggagaagccaggggagattaaatgcatcagtgagtggggagagaacgtgtgatttccacgagatactcaggctggtttcagggcaattagttgttacctcagtgtccagaatgtatgtctgagggaaagaaagaactacttctgcgttgtcagctgtaaggagccagaacgactgaggctatccccaacaagcaactccggctaaaacacttcagtacagaagctattcacttacatgattcaactagtatgtgtgtatgtatgtctccttcacacaacactttagaaatgcaaattgtatga

SEQ ID NO: 737986 - DNA, 673 bp, Homo sapiens
ctactgcttgctttgggtttactttgctatttttcatataatattttaagatagaagattagattattaacttgaaatcctttttttttagtataggcatttacaactacaaatttccatatacacactgctttagctacattacgtatattttgatatgttttctctacatttgcattcatctgaaagtacttttctttctgtttatcaaactggataatctcaattgatctatcctaaatttatttattgattcgttcttctatgtgctcaaatgtgttattgagcctctctagtgatttttacatcatgattatgatacactttaacttcagaacttctctttggttcttttttgtataatttcagtctctatgttgatattctgtatttggtgagacataattctcmtactttcttttaatcatatttgaaataacttatttaaaatcttgtctagtacatgttcatctaggcttttttagggactatttgtagtgactgctttattctctctgtacacacttttttattggtttttgtttttgttttgttctgctttgcttgtgtttggtttttgtattaattttttgttaaaaactggaagcatacaattaaaagatataaattcttgaaattaaactatctgactttcccatagtttgctgttgtt

SEQ ID NO: 737987 - DNA, 624 bp, Homo sapiens
gctcaccatgttcccctaggaggctttggctatagaagaactgctggacctagacagagcaaaacagccttgcccatcagacagagctatccaatctgagtgaccccctgtttgctggcgtctcctggggccccagcctgcattggatgcccaagcaaggtgcttcccagagccctcatcatagctccttggcctgcagactgcacctggccgtcagagagctccaacagaccagccctcagagatgtgtcccagctcacctgcaccctcctcccaccacagcctccccagaacccctttgccagcacacacacatgcaggtggacctcgcctcccctcccccaatttgtatgggcaactaaacttgacaaccaacctcacatcattcaaagaataaraataaaatgtgaaagaataaacatgtaaatgataaataaaacttctagaacttaacatgggagattatcttcatgacattaaaataggcctaactcaacacttgaccaaatggaccaaatagacatctatagaacgctccatccaaaaataatagaatatacattctcatctgcacatggctcatactctaaaatcgaccacacaatcggccctaaaacaaccctc

SEQ ID NO: 737988 - DNA, 464 bp, Homo sapiens
gaagggaaatcatcctggccggatcacatggcgcgagaaccagctcttcagtgcttatattctgagcctcatgttttctctgggagatcaatagcatttctactctctttgaaaaacagggaatggcatttccctgggtccgatgagttccgactcagacaattcgtatttacaaagatgctaactccrtttgctttgctttgcaggccccaggtggtggtgatggggtaggttaatagcgtctttgaatatgaagacgtgggaattggagaacagctgagtgtaatagaaaaataaaattgaaagttgaagactagggttgggatccccattctactgcttgctacttgttccatcttgaagagctgtatgacctctctacctctgtgctctctacctctctacctctgttcaccactgtatccctggtgtcttgggcagaggctgatacatactaagcaaca

SEQ ID NO: 737989 - DNA, 556 bp, Homo sapiens
gggaagtgtgaagtattattccacggcacatatcaaagcaaatgctgcaacatgggtctgattgaagttcacgaattctagaacccggttagatgaaaaattatgccattgtttaccatgttgacttgaagtcttgggcctttttcttcccagaggaatgtttacttttatgtttttttcccactctaccttgaatgcagaagttgacactaagtggagataaaaggcagctctataaaaaaacactagggccatttctgccaccttgctgggaagaacaattcagtgaaggtagasccaatcagggtgatgagaccaggggaatcactaccactctttccatttccatagcaagacgcagtggaagaatcaatgtggtattcttcctcgaaaatcccttttgttgttccttgctgggggtcatcaggaactgctgagacagaggctgaaatgagcagacctgagtggaggagtccgcagcacacacagcagcaaaaggggaattaattcaagatcaagcctcaagctgacaccagctaggaagacaccagggcaa

SEQ ID NO: 737990 - DNA, 624 bp, Homo sapiens
tgcttcacatacttactatttcttgaggtaagaacatttacaatctactctcttgacaattttcaataatacaatacattgctaataattatagtcaccatgtggtacaatagatcttttgaacttattcctcccatctaactgaaattgtgcatttttttaaccaacatctacccagccccccaacccccacctctttcccagtctctggtagtcactattctacccactacttctgttagtgcaaatttttttttaattccatcgtcagtaagatcacatcatatttgtctttcatgcctggcttttttcacttagtataatgtcctctaggttcatccatgytgtcacgaataagagaattttcttctattttagggtgaatggtatttaattgtgcatatataccacatttttaaaaacctgttcgtctgttgatggacacaggttgatttcacattttggctattgtgaatagtgctgcaataaacattggagtgcagatatctctttgaaatactgatttcatttcctttggatatatacccagcagtgggattgctggttcatgtggtagttctatttttaattttttgaggaacctccatactattttccttaatg

SEQ ID NO: 737991 - DNA, 575 bp, Homo sapiens
aaaaaaaaaaaaaaaaaaagaacaaagacaggagtggggctttgggggctgtggtttgaagctgacagcaaaggatcccaccacctggtctttgctgcatccctcccggattccagctgatggatcatgaagccaacrtcaattgtttgtatttaacttgttttactttgacccctgcctccctaagagccggggacagctccctctaggttggtggttcctaacattggtcacttgtgaaaatcatctgaaaagcttttcaaatacaaatgcctattccccagcccagatcaattaaataatcctggggtggtacccaggcatcaataattttttcaaagctccctgggtgactgtactgtgtagctaaggctaagaagcactgttctaaggcacgagttctaaacttcagtgaacatcagaatcacacattgcatggcctcaccccgagtttccgattcaggcagtctgagtgtagagcctgagaattacgtttcaaacctgtttccaggtgatattggaacagggaccacatttgagcacttgagaacctctgccttcagtaactaaagcag

SEQ ID NO: 737992 - DNA, 575 bp, Homo sapiens
aaaaaaaaaaaaaaaaaaagaacaaagacaggagtggggctttgggggctgtggtttgaagctgacagcaaaggatcccaccacctggtctttgctgcatccctcccggattccagctgatggatcatgaagccaacgtcaattgtttgtatttaacttgttttactttgacccctgcctccctaagagccggggacagctccctctaggttggtggytcctaacattggtcacttgtgaaaatcatctgaaaagcttttcaaatacaaatgcctattccccagcccagatcaattaaataatcctggggtggtacccaggcatcaataattttttcaaagctccctgggtgactgtactgtgtagctaaggctaagaagcactgttctaaggcacgagttctaaacttcagtgaacatcagaatcacacattgcatggcctcaccccgagtttccgattcaggcagtctgagtgtagagcctgagaattacgtttcaaacctgtttccaggtgatattggaacagggaccacatttgagcacttgagaacctctgccttcagtaactaaagcag

SEQ ID NO: 737993 - DNA, 575 bp, Homo sapiens
aaaaaaaaaaaaaaaaaaagaacaaagacaggagtggggctttgggggctgtggtttgaagctgacagcaaaggatcccaccacctggtctttgctgcatccctcccggattccagctgatggatcatgaagccaacgtcaattgtttgtatttaacttgttttactttgacccctgcctccctaagagccggggacagctccctctaggttggtggttcctaacattggtcacytgtgaaaatcatctgaaaagcttttcaaatacaaatgcctattccccagcccagatcaattaaataatcctggggtggtacccaggcatcaataattttttcaaagctccctgggtgactgtactgtgtagctaaggctaagaagcactgttctaaggcacgagttctaaacttcagtgaacatcagaatcacacattgcatggcctcaccccgagtttccgattcaggcagtctgagtgtagagcctgagaattacgtttcaaacctgtttccaggtgatattggaacagggaccacatttgagcacttgagaacctctgccttcagtaactaaagcag

SEQ ID NO: 737994 - DNA, 575 bp, Homo sapiens
aaaaaaaaaaaaaaaaaaagaacaaagacaggagtggggctttgggggctgtggtttgaagctgacagcaaaggatcccaccacctggtctttgctgcatccctcccggattccagctgatggatcatgaagccaacgtcaattgtttgtatttaacttgttttactttgacccctgcctccctaagagccggggacagctccctctaggttggtggttcctaacattggtcacttgtgaaaatcatctgaaaagcttttcaaatacaaatgcctattccccagcccagatcaattaaataatcctggggtggtacccaggcatcaataattttttcaaagctccctgggtgactgtactgtgtagctaaggctaagaagcactgttctaaggcacgagttctaaacttcagtgarcatcagaatcacacattgcatggcctcaccccgagtttccgattcaggcagtctgagtgtagagcctgagaattacgtttcaaacctgtttccaggtgatattggaacagggaccacatttgagcacttgagaacctctgccttcagtaactaaagcag

SEQ ID NO: 737995 - DNA, 605 bp, Homo sapiens
agatacaacggaggctgacccctgaccaggtgaagcctcatacaggtcaagtgtgtgatgaattctcgatttccaaataaattaacctcaaactccccatatacatggaatgatgacacaaaaggaaccacactgagaccacaaaataaaagyctggtgtttgtgcctggtcttgcacagaaatctgttccctctggggtttgcatgagtaggtggtttttaaaggtaatacaaagccatagttaccaccaggattttcatagtcccatagaggaaaaagtcctgtaatgttgtatcttcttagtgctttgtgccttggaatgtttttctctccctcctggccaaaacttttctacaaagtatcccggatctactctctttctctggtagaatttgaatcgatttcataggaatttacaggacccctaggagccaggtgctggtttgagtttgctggaaccaagacacagagattaaacataaggcttctgcttcaaaacactcgcaaaatcatgagagaaataggtaagtaagaagacagtgacaaaagggtggcatgaggaagccttgtgatggaaatgccgtgtatcttgactgtggaaatg

SEQ ID NO: 737996 - DNA, 634 bp, Homo sapiens
gggcctgtacccaactacccaagaggctgaggtgggaggatcacttgagccccggagtttgaggctgcagtgaactatgatctaaatggaaagaatgaactttgaccccctacttaacaacatatacaaaagtttattcaagatgcatcacagacttaaatgtggaaagtgaaacaataaagcttctaggaaaaaaagtaggcgcaggcaccatggctcatgcctgtaatcctagctctttgggaggctgaggcaggagggttgcttaagcccaggtgttcaagaccagactgggcaacatagtgagactctgtctctaaaaaaaagaaaamagggctggatgcctgtaaaaaaggctcatgcctgtaaccgcaacactttgggaagccgaggtgggcggatcacctgagggtcaggagttcgagaccagcctggccaatgtggtaaaaccccgtctctacgaaaaaaaaataaaaattagccgggccatggtggcatgtgcctgtaatcccaactactcaggagtctgaggcaggaggatcacttgaacccaggagatgaaggttgcagtgagctgagatcgccatcattgaactccagcctggtcaacaagagtgaaactccgtcttaaaaa

SEQ ID NO: 737997 - DNA, 619 bp, Homo sapiens
gctgagagttctgtcttgttaacaagcaccccaggtggcccgatgggcctctgatctgcatagtggtggatgaacctcgagtggccagactctaagctcaacaggagggcttaggacacctgctgttggccaagagtaaatcacatcccagtaacaggtgcacacatttcctgcaagatttaatctggattcccattcaatctcctcatctagttcagctcttttttcccccatccagaagctcaaagatgtgtacttattggagggcgagtaggagaactaggaggctaacttgcatgtcccagctgcctgaagatgatttagaagttcaggtttggaagcacctgagtagtarcatgtaccgtggtgtgcaagagaattctgtccccaaacatgagcatgcagtcaagaatctgtacacattggagaaatgtgtacagaaggaaagaaagactatcttaagtgaaagaaagaaccgttgagggctgggcctttccaccgtggctgtctcctggcgcagccacttgcaaccttggtattagaaaattctttcttttttgaacccatttccttctgcaagtaattttgaaagttgccttctaaactaaaaggtcttaat

SEQ ID NO: 737998 - DNA, 646 bp, Homo sapiens
attcaaaccatgtcatgacaataacatttcctcggggcaagatttatatgtaaggactacaggtttcaactaatttagggcacagactccctcgttattgtttggcattggttggtaggactcaggtctttggtcctgaatgcataaacaagaaccacagttaaagactagcaattgcaaaaagaggagatcctgtaatcccagcactctgggaggctgaggcaggtggatcacaaggtcaaaagatcgagaccatccaggccaacatggtgaaaccccgtctctactaaaaaatacaaaaattagctgggcatggtggcacatgcctgtagtcccagctactygggagactgaggcaggagaattgcttgaacctgggaggcggaggttgcagtgagccaagatcatgccactgcactccagcctggtgacagagtgagactccatctcaaaaaaagaaaaaaaaaaaagggtcggggggagatccctgaaaattatcaggaaaagccactgtcatatgatgtgggtgcacatgagaatagcaggatggaagctgtcaaaagtagcaactattaatactaagtgcaataattaaagtccagcaaaaggatcaagaaacaagggtagggcctctgggtgaatccat

SEQ ID NO: 737999 - DNA, 569 bp, Homo sapiens
acgtttttgtttttcttatttctaaagccatattcttcggatttagaaaatttagaaaatatataaacataagaacgaacattaaactctctcattactcaccacccaggaatggccacttttaacgtattggtgggcattcagccatattttatacacataatacttaataaaaacagggtttagggcttttaagagattttgcataattaagcaaaagtgactgagtcccaccctgcttcttgggaacccactgatgttttgcaagctatgcttgatgaaatcttcragcaccagggcaaactcgtgacctacatatattcttaatatgctaatttttgttttggtttctgaacaaaactagtcttttaaagaaaaatttaacagatttgaaaccagaaaccctgtcctccctggaggcattaaaaaatgcaaactgaaggcttcccgtgtgtggaggctattactgatttccttccaaaaacaggagaagtgttgccctggctgtaacgcttgaggtcccagagccagaaactgtttgctttctgcgcactcattaaccatggtgt

SEQ ID NO: 738000 - DNA, 619 bp, Homo sapiens
agtcactcaaaaacattttttaaaaaagaaaattgtgtaacaatactcctattgaatatgaagatagaaattcttaacaaaatgttagcaattgaatccagcaacatgtaaaaagggattatacaataccatcaagtaaagtttatcccaggaatgcaaggttggtttaacatttgaaaattagtgtaactcagcattctaacaaaataaagcggataaaaacttacatgtttatttcaacagattcagagaaaacatttgagaaaattcaacacccattcatataaaaattctcaaggcatctgtgaaaggacatctgtgaaaaatcctcagctaacataattaatggtgatatactaaacactttccctctagaattgaaaacaagrcaaattctcacttgtattcaacattgtacaggtgattctaaacagtctactggtacaaagaactgaaataaaaacatatgcaggtcggaaaggaagaagtaaaaatgcctttctccatagcaaacatgatcatgcaagtggaaaatctaaaagaattacaaagaaaagtaccagaattaaggctatgaaatgtcacttgaggaagctaaaatcagtacagcaggattcaa

SEQ ID NO: 738001 - DNA, 613 bp, Homo sapiens
atactgcatcatcatggcacacactatgtgaattcacacagtccaactggagttagcaatatctcctggctgtgattggctttctatatgtttgaaatatggttctgtgaaaagacccagaatcaggaggtctgaagtctgatccttcctctgccacttacttggctgtgtgatcttagacttgcttctcacctctccaatatccttatcatgagccttaaataagataaagcagaggtgtttaggaaagctcccaagcactcaacaaatgctacagaattttactattattaacacactttattaattttaactctaaactgaagtacaatgctgtcaaaccaagacctcttcattcagtcttattttttactttatcccgaagaagttaattctttctttctatttggcacctttttgacaagaggcttcaacactctyatctgggaattattgtctttttattttcccctcctgatgccagagttgctgttaacaatatgtattcaggcaaggcagggactcactgcatttcacaatcagatgccatgcacactacttccgtcaaaacaattagtgttcatttcggctttactccatgagacctgcggtg

SEQ ID NO: 738002 - DNA, 620 bp, Homo sapiens
ttccttccatatcacataccatgcttaaactactttaataacattttcagaaaatctaatgtaaatgcatcaaaaagcatgcctttaactgattaaaagtgactcaagttcatttcctttcagatatatatatgtattatatctgaaatacaatatattgatatatatttgatacrctgtccagacatagtagtgtctttgcttctacctttggtgccttttgtagttggccagtgtgttactgtttatttattcttgtcacagaggaaatgcacaaaatattcaataaaaaccaaaaaatgaatatttttcacatgaatgttaattttcctaatcttaaactgtatgtagaattcgtttacagtagtgatcttgaattctaaatgtggcaatagataaatgagtcaaactatggcatgacttttaaaaataagatttctgttaagcttattttggaggaggatatatgatttttatgctgtaagtacaggatcctggaaagcatgttcagttgtcccttggtatccatgggggattggttccaggactccatgcagacttcaaaatccaggcatgttcaaggccttgatataaaatgctataatttttgcatataacct

SEQ ID NO: 738003 - DNA, 650 bp, Homo sapiens
attaaaggcctctttgagaaggcctccacctcctaaggatgtttacagttgttctctgcacatatggctagctgtcagcagcaggctgcaggcgttagaagcagctctcagctactcttctcttcactgttttctccatcttgaaggctccaaagacaagggggtaggggcaggattgcggggaggagaatcattctattcctacccctggtgctccattcatatggatacacttgtgtttaggaaatcataactgttatttaccmagtttagttgatcttagccaaaagggcgagaagcaataattacttagttcaaaaacgaatgggaagaatgactgggtttggaaaaatctacaaaacagcaaacaaacaagtttaaaaccatagactgaacaccttagaactgaagaggacagcaaaacctcaggagttcccataggcactgagtcactctgaagagctaaggtttctgaataaaaagttgggtctacaactggtatctggagagatgcctcgggaagtctgaattctgtgccacgcttgcgtttgtgtatggtacgtccatgtttctagaaggcagtctatagggtttattaggctctcagaaggggccaactcccagaggcggttaagagctactgctgatct

SEQ ID NO: 738004 - DNA, 622 bp, Homo sapiens; identical to SEQ ID NO: 737985

SEQ ID NO: 738005 - DNA, 673 bp, Homo sapiens
ctgcttgctttgggtttactttgctatttttcatataatattttaagatagaagattagattattaacttgaaatcctttttttttagtataggcatttacaactacaaatttccatatacacactgctttagctacattacgtatattttgatatgttttctctacatttgcattcatctgaaagtacttttctttctgtttatcaaactggataatctcaattgatctatcctaaatttatttattgattcgttcttctatgtgctcaaatgtgttattgagcctctctagtgatttttacatcatgattatgatacactttaacttcagaacttctctttggttcttttttgtataatttcagtctctatgttgatattctgtatttggtgagacataattctcmtactttcttttaatcatatttgaaataacttatttaaaatctttgtctagtacattgttcatctaggcttttttagggactatttgtagtgactgctttattctctctgtacacacttttttattggtttttgtttttgttttgttctgctttgcttgtgttttggtttttgtattaattttttgttaaaaactggaagcatacaattaaaagatataaattcttgaaattaaactatctgactttcccatagtttgctgttgtt

SEQ ID NO: 738006 - DNA, 489 bp, Homo sapiens
tctatcacctcccaccaggtccttccctgggaattacaattcaagatgagatttttgctggggacacagagccaaactatatcacccttatagctcattttatcaaaacaaacaaacaaacaaaaaaaaaaaaaaggcaagacaatctcttgccaaatcattgytccagatttgagtatgtggcttaggtagaagtaggaggatgtataacttctctttgggagtaataatgcaaactcctcttgggaaacaaaccttcttaggtaacgtaatggttcttctggctatgtagaataatttctgaagaacaatttaagtaaaatacataaatgttaatggtttccttaatgaaggcaacttgctccaggactcttttctggtttaagtcatgtgccagtctgagaccactcactgcctctagggtgatgaagccatctaacctgccaggtcataagcaaggtggcagggcctcatctctcatagccccca

SEQ ID NO: 738007 - DNA, 604 bp, Homo sapiens
  misc_feature 250: n = A,T,C or G
tctagaacagatgcatccacaatgacagaaaacagtctggctgcaaaggggcaacgaaggaagttttggtttttgtttggagtccgggtctgactgtcacccaggctggagtgcagtggtgagattgtggcttactgcagcctccacctcccatggctcaagcaatcctcttacctcagcctcccaagtagctkggatcacaggcatgtaccaccatgcccagctgatttcttctatttttgtagagatngggcatcactattttgcccaggctggtcttgaactcctgggctcaagtaatcctctcgccttgacctcccaaagtgctgggattacaggcatgagctacagcacctggctgtttttaagtaatggaaatgttctatatctccgttgtaacaggatttgcatgggtgaagacatttgtcaaaactcatagaatttgcacactttaaatgggttttctttatataattattcatcagaaaattaaaagggaaaaaaggctaggggtaacaacaaaaatacccttttagatgaatattaaataatccttagagaaccatcgtctccttatccttggcaagcatcccctcagggagag

SEQ ID NO: 738008 - DNA, 604 bp, Homo sapiens
  misc_feature 250: n = A,T,C or G
tctagaacagatgcatccacaatgacagaaaacagtctggctgcaaaggggcaacgaaggaagttttggtttttgtttggagtccgggtctgactgtcacccaggctggagtgcagtggtgagattgtggcttactgcagcctccacctcccatggctcaagcaatcctcttacctcagcctcccaagtagcttggatcacaggcatgtaccaccatgcccagctgatttcttctatttttgtagagatngggcatcactatkttgcccaggctggtcttgaactcctgggctcaagtaatcctctcgccttgacctcccaaagtgctgggattacaggcatgagctacagcacctggctgtttttaagtaatggaaatgttctatatctccgttgtaacaggatttgcatgggtgaagacatttgtcaaaactcatagaatttgcacactttaaatgggttttctttatataattattcatcagaaaattaaaagggaaaaaaggctaggggtaacaacaaaaatacccttttagatgaatattaaataatccttagagaaccatcgtctccttatccttggcaagcatcccctcagggagag

SEQ ID NO: 738009 - DNA, 581 bp, Homo sapiens
cccacatacctctcctgcagcagcgctgaacaccgtctccggacgtctggagctatcaccatgggcaacactttcgtggtctttatttttagcttctcctttagaaactcactttttggggtggttttgtgtccagaagttggtgggttcttagtctcrtcttcaagaatgaagccgcagaccctcgcggtacatgttacggttacctaaaaacggtgtgtctggagtttgttccttctggtgcgttcgtggtctacactgatttcaggagtgaaactgcaaacctccgcggtgagtgtcacagctcctaaaaatgcagcacgtccagagttctttgcccctcccagtggatttacagtctcgctggcttcgggagtgaagctgtagacctttaccgtgagcgttgcagctcacaaacgcagcacagacacaaacactgagcagcagtaagatttactacgaaaaccaaacaaggaaagctcccagaggacaaaagcagaccctaacaggttgccaccgctggctcccgcagcctgcttttattcccttatctgaccccacccacatcctgctgactggtc

SEQ ID NO: 738010 - DNA, 581 bp, Homo sapiens
cccacatacctctcctgcagcagcgctgaacaccgtctccggacgtctggagctatcaccatgggcaacactttcgtggtctttatttttagcttctcctttagaaactcactttttggggtggttttgtgtccagaagttggtgggttcttagtctcgtcttcaagaatgaagccgcagaccctcgcggtacatgttacggttacctaaaaacggtgtgtctggagtttgttccttctggtgcgttcgtggtctacactgatttcaggagtgaaactgcaaacctccgcggtgagtgtcacagctcctaaaaatgcagcacgtccagagttctttgcccctcccagtggatttacagtctcgctggcttcgggagtgaagctgtagacctttaccgtgagcgttgcagctcacaaacgcagcacagacacaaacactgagcagcagtaagatttactacgaaaaccaaacaaggaaagctcccagaggacaaaagcagaccctaacrggttgccaccgctggctcccgcagcctgcttttattcccttatctgaccccacccacatcctgctgactggtc

SEQ ID NO: 738011 - DNA, 579 bp, Homo sapiens
acttacattacctgatttaaaaatgtattacaaaaggaccataatgaagatagtgccattttaatctcctcaggctgccacaacaaaatacaccagatttgggggcttaacagcagacatttgtttctcacagttctggagactggaaatccaacatcaaggcagctgattcagttcctggtgaggcctctcttcctggcttgcagatggccgccttcttaytctatcttcacatggcagaaagtaaaatggagagagcttcctcttcttataaggccacagtcctcctgggttatgaccccacccttacaatttaatttaacctaatcacctcctaaagtccctatctccagataaagtcaccttgcgggggttatggctttaacctatgaatttgggggtaaacaattcagtccacagcaagtgtggtattagcatcaaaatggattaacagatcataaaacagggagcccagaaataaacccacacacatacatacaactgacttttcaacaaaggtgcaaaagcaactcagcagaacactgaacaactggctcttcggaggtaaagtggtgaact

SEQ ID NO: 738012 - DNA, 632 bp, Homo sapiens
actttctagaaacgcaggtcctcaggtcccacctcagacctactgaacctgcgtctctaacggatggagcgaggtgatctgtgcctcctatgcatgtaaaggtttatgtaggtgactgtgatgccagctaaagtcggagaacaacaccagattgtgtggcctcctggggcagcagtttgcccatccagaccagcagcagaatctttcttactctgggccctactcaaaaccaaacgctttatgaagaacacaaaacaggccagagaagcatccccgagtgtcttgcacctcaccttgcaaaycggaagagcctcaccaggtatgatacttctttcttagtggtagtcttgcttgccagagacagcgtgttttctttcattttggatatatattttgaccaatcagaccaatggacccacagaaagttcaccaaggtggcaggttttgaaaatgtgttattttctctttcaatttttagcaagcacgtgtcttaccaaggcatcttggcatttttcattttttgctccccaggttgattcagcctgatgtcatcagtgtggcagaccactgtgacatgctgtgcagtggcaagaccatcaagatgtctgtgactaaaaccagcagtgagccgg

SEQ ID NO: 738013 - DNA, 510 bp, Homo sapiens
cttgattctctctgaagcctccagaaggagaacagacctgcagacaccttgattttagctccataagactcacttcagacttctgagcttcaaaactgcaggacaacaaacgagtgtgtggttttttgttattgttgttgttgttgtttgagatggagtctcactctgttgcccaggttggagtgcagtggcatgatctcagttcacttcaacctctgcctcccaggttcaagcgattctcctgcctcagccttccaagtagctgggattacaagcaccctccagcacacccagcaaatttttgcatttttagtagagatggggwtttaccatgttggccagcctggtctggaacttctgacctcagataatccacctgcctgggcctcccaaagtgctggaattacaggcgtgggccactgtgcccggcctcatgttttgttttgagccactccatttgtataatttgttacagtgccagtggaaaactagtaccccgcagaatcagtg

SEQ ID NO: 738014 - DNA, 597 bp, Homo sapiens
aaaagagtaacgggaaggatggcatagatgccagtgccaatctggagacctcaaatccaatgccagaggagagagggggctggaggtgggggtgggaaggactctgagacagataacagcttcctcctagttggtctccagtgagctgagactcatctgaagtaagacttcagggatgaacagaacagataaacagggaaatcggattggttcaaaacccaaacaggtcaccatcccccaaggatgggtcatgaacaaccaattaggacaatcagctaggagtagggtggggaggaggcaggtataaaaagcgccaaagcagcctggcctggtggctcatgcctgtactcccagcactttgggaggccgagatgrgtggatcacgaggtcaggagtttgagaccagcctagccaacgtggtgaaaccctgtctctactaaagatacaaaaaattagccaggcatgttggcacatgcctgtagtcccaactactcgggaggctgaggcaggagaatcgcttgaacccgagaggcggaggttgcagtgagccgagatcacgctgctgcactccagcctggctaacagggagactctgtc

SEQ ID NO: 738015 - DNA, 696 bp, Homo sapiens
gggatccagacgttgatcagcgcccggtttgatctaaccaaaaggaagagagagagaccaacattagacattttaacttacaaaaaaataaaaaataaaaaagaggaaaggagacaattttctactccaagaggtattatgcacaagcaatttatgacaacttacatcacacctgatggcaagctaaaggacaagtttaagtcatcactcagtctgtctctctctmcacacacacacacacacacacacacacacacacacacacacacacacacacatacacacacaatctgtactccggaatgtgaaagagctcccttcagttcttatggagtgatctggcccataatgtatctgaacctcagtctccacatctgaaaatgaagataataaccggaagccccaaggacgcgatcacaggaggtcacacacagcaatgcccagcgtttctggagcacccagcagtcacgctgcctcctcactgagctgactttagaccctgaccctgagcccattttaagatcagactccacaaacgagctcaggagaccaacactcatggcaacaagggtgacagctgtttaggatgggaggagggagggaccagagaaaatgacaagttagaaaaccaggctgatgggtacaaatacctctctttcagcttttccaaaaacactgtgtatatgggtccaatac

SEQ ID NO: 738016 - DNA, 612 bp, Homo sapiens
cccacattcaggcaggctgtgtaatgcacgctcatatatcctttgtcagggtgaacaattatccgtcacggccaattgtgtttcaggttatctacatctgcttcctcctcctatatcatttcaatcaaattctgggtattatttcatgtatagacatctttgtatttatctctaaaaatacaaaaaaaaatacaatatccttatcacccccattaccagtaattgctttgtgtcatcacagtcagtgttcaaatttccaattgcctcatacctttgaatagtttttttgattcaggatccatgtgagacccatgcattgtaattggttaatatgtctctatgttgcttttcctttaaattttaaaaattagggtaaaatatacctaacataacttgtaccattttaaccatcgttaagtgtacagttgagtggcattaagtacgttcacacattttgaggccaycgccaccacccctctccagaacttttccatcttccccgactgaagctgtcccctttaaacagtcagtgcctgctccccactccccctagcccttggcgaccattctactttgttcctctatgaatccactactgtcttaggtttcttt

SEQ ID NO: 738017 - DNA, 622 bp, Homo sapiens
tacccctcatacttatgttaacaacgagtccaatatcctccctcttcagagctccgacctctctgaagattatacgtgaacgtgaaccccaggggtaagactttaagctctgatcaaaggggatactttgactttcaaatacaggcraagagagaattaatgatttggaaactagctcacctggtggcttggaacagcttttgttggcttctgagtatcctgcctgcctgcagtgcgggccccctccatcactctagcctctgccttctgttcagtgatgatttccagtgctggtctaaccagcctttcttcacttaaccctggggcctggtgttgaggctctgccactggttcagcggtcctcatggtgacatgattccttgctttgtagccttggtgtccgtttcccaagactcacaatcccaatgcatcctggaggtactagcatcaccaccaccattatcatcatcatcaccagaggaaggattgctcttcatttctctcttcccaaatgcttctggtcctcttgacaaatttgccctgtcctccccatgtccttctagtacccttgccaggtcaaggatatcagaaggggcagcacctgccaggtcacaggggtccc

SEQ ID NO: 738018 - DNA, 567 bp, Homo sapiens
ctctattaagaaaattttaaactttattgggagacacacacacacacacaaacacacaaagtgaaaatactgtgtttgttaactagaagtctcaatattgtaaagatgtcattctactgaaattgatttatagaatcagtgcaatctcaaagtcccagcattttggggtgtggtgggaaaagttgacaagctagtttaaaatgaatatggataaagaatagccaagacattcttaaagaaaaagaacaaggtgggagaacttgctcttgtagataccaagatgtattataaagttagaatatttaagacaatgtgatattagtttaaggagagacaaatagagcaatggaacataatagaaaacccagagaaagacccacacccacgtatctatgaacccgtgaaawataagagtcagcaatgcaaatcagcaggaaaagaagtctttgcaaaaaatatgctggaacaaatgagtattaatatggaaacagctaaaccagagccctgcctcatgcaattccaggtcaattaaagacatagatgtgaaagaaaagactatagagtttt

SEQ ID NO: 738019 - DNA, 620 bp, Homo sapiens
gtgtgagccaccgcacctggccttgttttacagcatttaaaatgatgaaacagtgtgagctgtttaatctgagttgaaacaaatgtgaaagctcatcaagtctgaaaggaacatacaaaccaaaagagccaaacagaatggtggcagatcccccaaatcaagatcctcaccgtggggtctgtgaactgcccgacgccatgagtaaactgcctgggtctgggcacacaagtkttagtccacagtccacagctgtcatcagattctcaaatgtagctgtagccccccaaacttccctaatctcgtattaatatagtcaagattaacagagtactattgcctctattaatatctcttcaaatcaccagaattaaaagtattgatgaagataaaaggagttgaaagtgctccctgttcactctgccctttcaagattctgaggcttcatttttactaaatgtcttaatttgctaattggatacattgagcttgcttttctagtaattggcttattttcacaggtaacgaaaatgggcggggttaccaggagaatggcaaaaaaaagccaaggtgattgtccacgtgcatcttcctttcctcactagggtcttgctgatgttctg

SEQ ID NO: 738020 - DNA, 603 bp, Homo sapiens
actgtattacccagaaattctactcctaggatatacccaaccaaaatgcacatatatggttatcaaaaaaaaaaacccaggatattcacaatagcactatgtgaaatagttccaagagcccagcagaatgatgaatgtatgaatacacaattacatgtacacacatacacacacacacatagaaacacacatgtataaatttttttttttttttgagacggagtctcgctctgtcgcccaggcttgagtgcagtggtgcaatctyggctcactgcaagcctcgcctcttgggttcacaccattctcctgcctcagcctcctgagtagctggggactacaggcacctgccaccacacccggctaatttttttgtatttttagtagagacggggtttcaccgtgttaggcaagatggtctcgatctcctgacctcgtgatccacccgtctcagttctcccaaagtgctgggattacaggcatgagccaccgcgcccggccatgtataaattttttaaaaaccttgttgtagtgacataatgaaatacaatatagattatgaagtagtgagaacctatatacagcaatatggatgaatcttgctca

SEQ ID NO: 738021 - DNA, 612 bp, Homo sapiens
gagtgtaacagttctattagaagccatgggtcacagaagagaaccgtggaacccagtgactagtgttcagcttgattaggacgaacccggacacttatctgtgcaggagcaatggcaagcctttagcccgatcgggggcggcaatrggccccttggtggatcaggagcacagtggacaccctgccggatctggagggatggaagtcagcggtgggtctgcgatggcagcaaacagcggtagtggacagcgagcgaaagctcagctcgagccgtagtaaacacagagcagaagaatgcagttgcaagatttaatagagtgaaaacagagctcccatacaaagggaggggacccaaagagggtagccgttgccggctcgaatgcctgggtttatatcctgatcattgtccctcctgctgtgctctcaggcaatagatgattggctatttctttacctcctgtttttgcctaattagcattttagtgagctctctttactacctgattggtcgggtgtgagctaagttgcaagcccccgtgtttaaaggtggatgcagtcaccttcccagcaaggcttagggattcttagttggccaagaaatccagctagtcct

SEQ ID NO: 738022 - DNA, 612 bp, Homo sapiens
gagtgtaacagttctattagaagccatgggtcacagaagagaaccgtggaacccagtgactagtgttcagcttgattaggacgaacccggacacttatctgtgcaggagcaatggcaagcctttagcccgatcgggggcggcaataggccccttggtggatcaggagcacagtggacaccctgccggatctggagggatggaagtcagcggygggtctgcgatggcagcaaacagcggtagtggacagcgagcgaaagctcagctcgagccgtagtaaacacagagcagaagaatgcagttgcaagatttaatagagtgaaaacagagctcccatacaaagggaggggacccaaagagggtagccgttgccggctcgaatgcctgggtttatatcctgatcattgtccctcctgctgtgctctcaggcaatagatgattggctatttctttacctcctgtttttgcctaattagcattttagtgagctctctttactacctgattggtcgggtgtgagctaagttgcaagcccccgtgtttaaaggtggatgcagtcaccttcccagcaaggcttagggattcttagttggccaagaaatccagctagtcct

SEQ ID NO: 738023 - DNA, 523 bp, Homo sapiens
aaaaaataattaagaagtgatgagtcttggtatttattacctttgtcatattacagaatttgctttttaataatggctgtatttaacaaccagctcacaaaatttcagaaaatttgacaactagctccctggagcacagcgaatgtgagtacgactaccgagtacctctattctcaagtaagtggatggagagtgaactgagacttgatcttcacaacatcccaaatttaccatggctaggaaataaatgcagaaagagggaaaacaaaaatgacagagcttatgaaaaacygaatacccactctaacttgaagaatggcgaaagaggtcaagtgtgaaagagtttgagaaggcaagtctagagaagggctgagtctgtgttctctaccaggctataggccatgagtggtaaacaaaacaaccttgccacctaccctcaactctctaagcgaggtcttgtgtcttctttctctgttctactgagatttgtactcacaggaaacagaggtcaagaaggagtaca

SEQ ID NO: 738024 - DNA, 566 bp, Homo sapiens
cacgcaggcaaaaaggctcctttcacatttgttccctttgctaggtgatctgttgctggggtttcagattagaatcacattcacacgcacatttccaggtgcagtgtaccgcccagtgtggggctctcatatggcttgttgtggttctgtcactaaatcctgtgttcaaagacattytgggatagctgtgaggaattagaagtgactcctgggccaggcgcggtggctcatgcctgtaatcccagcactttgagaggccgaggcgggtagatcacctgaggtcaggagtttgagaccagcctggccaacatggtgaaactgtgtctctactaaaaatacaaaaaaaaaaaaaaaaaaaaaaaaaattagctgggcatggtggcaggtgcctgtaatcccagctactcaggaggctgaggcaggagaattgcttgaacctgggaggagaaggttgcagtgagccgagatcatgccattgcacttcaacctgggcgacaagagcgagactccgtcccccaccctctccccaccacaaataaagaaagaatcctaaccgggccgggcac

SEQ ID NO: 738025 - DNA, 573 bp, Homo sapiens
aattgtccaacccactactggaattccattactgtgtacatttttacttggcattagtgtgtttagatggtaatgggaataagatgtactctattttttctttcagtgactgaatctgtatttttggttatactgtctagacagtttttaagttctaaactcatgaatatgtttttgtgattgggctggcattaaggggctgtttggtttggggtagctagccctgaccttggtcctggtgtgatcactcatcctgcctttgattaccattaatcttcatgtttttctggcaagatgaattttgggttctggctctctgggttttagtgtttarcctatgattctcagatctgtcaaaaaggttataggagaatggttatggttatttgaagttgtcgttttcctgttttcagggttgtaagttaattttaagtatagtagaaaattaaaaatttctcctgatctactcagttctttcttagaactttcattacttttctgattgctgggctgttcttctctacactgctttcattgcttacagtggtaaaacccagggataccttcccatcc

SEQ ID NO: 738026 - DNA, 541 bp, Homo sapiens
tatctatcctaagggtgtagctttggcttccttctgtgggctgtcattgaaggctcttgagcagggatttgatgtgattacagtgttatgttaggaatatttatctgtggtgaagaggctgttggtggtattaataatgaggtgtggagaggcttaattagacagtgtacatggaaaggaaggaaaagatacaagaaygttcacaccgggaagagtcaacaaggtttgtggattgctgaaatttggaatgggatggttaagttgtagattagtggatgtagatttatcaatagagatttaaagttttaatccaggaggacaggaattaagttaataaaaattggtggaactggtttaagagactctgggaaaccacaagaagttcagcttcaaacatgtagagtggtaggtgtagcctccagttgggaaccttcagatgagaagttgaatctgggtgcagtggctcaagcctgcaatgccaacaatttgggaggccaagatgggaggatcagttgaggccaggaattctagaccaacttgg

SEQ ID NO: 738027 - DNA, 598 bp, Homo sapiens
gggaaggggaaaggatgagtcttagtggggattttaacaccatcagaagcaaaattgggatggcatcgcagggtgccacaaatgagacctcacccaagtcactaatttatgtagctactgttgcttgtgggatcatctctaggcttcagaataccatgcagttagttttctcggaataagtaaaacaatgagctatacatagtagaaatataatacacataacaattacaattaaaaaaaaaaamgaatttctatgcctgaatgaaaaaaatatctattccattggaaagtcaactaaaaacatcatgaagaaaattaaaatccagtcctttcttagagacttgttgtagcaggaaataattcaagatttagatcaaattgtaggaaaataataaaaactagaaaacaatggtcagggctgaatttaaaaacaggtgtgctataattttcttctgaaccataatttctctctcttcagttcactatttctacccaagataaatgttatcaggaccaacatacttgtaaaataagctttagtattatatttggcctaattatttgcattaagtgcaacaaaaataatgaatggccatgt

SEQ ID NO: 738028 - DNA, 598 bp, Homo sapiens
gggaaggggaaaggatgagtcttagtggggattttaacaccatcagaagcaaaattgggatggcatcgcagggtgccacaaatgagacctcacccaagtcactaatttatgtagctactgttgcttgtgggatcatctctaggcttcagaataccatgcagttagttttctcggaataagtaaaacaatgagctatacatagtagaaatataatacacataacaattacaattaaaaaaaaaaaagaatttctatgmctgaatgaaaaaaatatctattccattggaaagtcaactaaaaacatcatgaagaaaattaaaatccagtcctttcttagagacttgttgtagcaggaaataattcaagatttagatcaaattgtaggaaaataataaaaactagaaaacaatggtcagggctgaatttaaaaacaggtgtgctataattttcttctgaaccataatttctctctcttcagttcactatttctacccaagataaatgttatcaggaccaacatacttgtaaaataagctttagtattatatttggcctaattatttgcattaagtgcaacaaaaataatgaatggccatgt

SEQ ID NO: 738029 - DNA, 641 bp, Homo sapiens
ttgccacggcaaaattattaataaccccctttcactcacccaaaaaattccaagttggacaatatattatatggccaccctaatattaacaaaagctctgaaaataatatcctgcctttctgcatatatataaagaatctcaaatctgctgagtagaggccagactctgcaaagccggctggtgcctgtgctttcaggggccactggagccttatcatatcagtttctggtaatcatgtgtaaagtgcattgcaaacggcgagcctaaaatcacctcccatatgcagccatcgactctgcctgcgcctaatcacagaaggctacygcaagcccagagttttcaccagagtatcccccatcactctaaaatacagcagcctcaagaaatagcagttgttttctccagtttctataactgctgtgtattatgtgtcgcactgaaaattagaaagataggtactcctgaaaaatccaaagcttagattttttctcatttttactttcagttagaataacgagctctttcttccactccactgcataagagatgacaattaaaagctgactttttctctgcaaagtacttcactgttttcaacaccaagttttatgaaagagcaaaaaaaaagagattagtgtat

SEQ ID NO: 738030 - DNA, 539 bp, Homo sapiens
tgaaacacagcattgtgtcacgaaagatactgcatattaagcgcttaataagtatgtgttgaattaatgaatgggcatccttttaatagggaatatgttaacttttatatgttatcttttatctacacagactatgagtttctggtgagcaaggactgaggtcagttaattttgtatcttcggcgtctagcaaaatatctgaagccgagcaggcacttcatatgctaagtgattgcattaatgaatcaatgcggtaggcsagaggatatgctactccagatttatgttctcaattagagaactacagagattttctattttttcattacttttttcattttaacacctattaaaaaattggaacaaaagcaaaacattatagtaagaagttatactatgaaagatatttcataaataaaaatagaatattacaagcctaaggtactatatataatttactagcttcatcatcaggaaagaaatcataattaaaaataaattcagggagaaggccaaatgtgataggtcacgcttgtaat

SEQ ID NO: 738031 - DNA, 598 bp, Homo sapiens
tcaaaaattacttgaatgtattaccaaaaatgaacatttactatagaccagtaatattctctttccaataactgattataaggctctttgaattcatctgagataaacaaagacccaatgtatccatatatacataggggaattagaatacaactgtaacagtggatgaagcaaggcctggcacggtggctcatgcctgtaattccagcactttggcaggtcaaggcaggcagatcacttgaggccaggagttcgagactagcctggccaacatggtgaaaccccattttatctaaaaacacaaaaattagccagatgtggtggcacacacctgtaatcccaggtactcgggaggctgaggcaggagaatcgcttgaacccaggaggcaggggttgcagtgagctgcgrtcatgccactgcactccagcctggacaacaaagtgaaactctctgaaaaaaaataacagttgatgatgcaagagaaaacatataaggacaattattacacaaagtaggtgacatatgaattcaaaaatgagaatttatgggtcaaggagatttattgcctagcttaataactgtaatgtccataatact

SEQ ID NO: 738032 - DNA, 585 bp, Homo sapiens
atgtatctatagatatatatagagagagagagagtttagtgatatatatatatcactaaactgtatataattctatgtagttatttaattttgggttaaaaaattgaaacaacgttctaagctaaaatgttagtttctgttgcttcttaaaagctaatccaataayggcactaaattgtaaaaataaaggtttataggataatgaatgggctaaaaatagtaccattttgtgaaattcttaaatattcttcgtgagtaaatatggaattgcatattttgattaatatagacttctattacgggcaagatttacttatttgttgcgtagaacacaatgaacttggtttaaaggagaaaggtagactttctgtttctgtttcttagttgagctgttttctatttctgtgcttttaaaataaagcttctaaaacatagagatctgcatattaatagttttcccaatttcacagtgccctcaaaagccccacaacaatttctacattttaataaccagagccatacacctttacttccagccattatgttaagaaacatctctgttaaatgtgaggcattgtataggct

SEQ ID NO: 738033 - DNA, 585 bp, Homo sapiens
atgtatctatagatatatatagagagagagagagtttagtgatatatatatatcactaaactgtatataattctatgtagttatttaattttgggttaaaaaattgaaacaacgttctaagctaaaatgttagtttctgttgcttcttaaaagctaatccaataacggcactaaattgtaaaaataaaggtttataggataatgaatgggctaaaaatagtaccattttgtgaaattcttaaatattcttygtgagtaaatatggaattgcatattttgattaatatagacttctattacgggcaagatttacttatttgttgcgtagaacacaatgaacttggtttaaaggagaaaggtagactttctgtttctgtttcttagttgagctgttttctatttctgtgcttttaaaataaagcttctaaaacatagagatctgcatattaatagttttcccaatttcacagtgccctcaaaagccccacaacaatttctacattttaataaccagagccatacacctttacttccagccattatgttaagaaacatctctgttaaatgtgaggcattgtataggct

SEQ ID NO: 738034 - DNA, 585 bp, Homo sapiens
atgtatctatagatatatatagagagagagagagtttagtgatatatatatatcactaaactgtatataattctatgtagttatttaattttgggttaaaaaattgaaacaacgttctaagctaaaatgttagtttctgttgcttcttaaaagctaatccaataacggcactaaattgtaaaaataaaggtttataggataatgaatgggctaaaaatagtaccattttgtgaaattcttaaatattcttcgtgagtaaatatggaattgcatattttgattaatatagacttctattacgggcaagatttacttatttgttgygtagaacacaatgaacttggtttaaaggagaaaggtagactttctgtttctgtttcttagttgagctgttttctatttctgtgcttttaaaataaagcttctaaaacatagagatctgcatattaatagttttcccaatttcacagtgccctcaaaagccccacaacaatttctacattttaataaccagagccatacacctttacttccagccattatgttaagaaacatctctgttaaatgtgaggcattgtataggct

SEQ ID NO: 738035 - DNA, 561 bp, Homo sapiens
tgagaaaaggaataaaaaggtagataatgaaacctggaaatgtaaagaaatatttatttaattttaaatgaacacagaaagagctcttaaagtaatgaatataaaatgatctgaacaagaatggaatcttttgcctccagtgttaatggtaaagataaaatttaaagaacaaatatgatttagctctaagtccttcatttatctttctgtaaactatatgcctttttaagtattgtttaaaactgcatctttgaagatttggattgtttattamcattgctaacataagaatccagtgaaggcatagagggactcatgctgtgaattttcatcaggtatatgatggaaaagacagttcctcacgtccactgggcacgttcactaaaaatgaacttctggggctgatcctaaacagcacatccaatcacctgtggctagagttcaacaccaatggatctgacaccgaccaaggttttcaactcacctataccagtaagtaacatacgacttaatcacgttcttttttcattttgtcaggacatatctgatacttggcttata

SEQ ID NO: 738036 - DNA, 561 bp, Homo sapiens
tgagaaaaggaataaaaaggtagataatgaaacctggaaatgtaaagaaatatttatttaattttaaatgaacacagaaagagctcttaaagtaatgaatataaaatgatctgaacaagaatggaatcttttgcctccagtgttaatggtaaagataaaatttaaagaacaaatatgatttagctctaagtccttcatttatctttctgtaaactatatgcctttttaagtattgtttaaaactgcatctttgaagatttggattgtttattaccattgctaacataagaatccartgaaggcatagagggactcatgctgtgaattttcatcaggtatatgatggaaaagacagttcctcacgtccactgggcacgttcactaaaaatgaacttctggggctgatcctaaacagcacatccaatcacctgtggctagagttcaacaccaatggatctgacaccgaccaaggttttcaactcacctataccagtaagtaacatacgacttaatcacgttcttttttcattttgtcaggacatatctgatacttggcttata

SEQ ID NO: 738037 - DNA, 616 bp, Homo sapiens
aaaaaaaaaaaataaaaggtaatatagtcatagacccatacagcaagggcatcacaaaatagagaacataacaatttagcacatatgctgtatacaggttagttgctattactgcatgacagagctggggttttcacccagatctgatcccaaagcckgtgctattccataatgcctccatgcagtcttttataacccaccatttatatacaaaagcacagtgctgctgagcatagtgggtgcctagggattgagtggaatatacttatgtagtatttttgttgacaacacaaatctataaatgtcatgcatttttgaattaagaaaacatttgaatgatctaagccagcataagcctactctcatgagggcacaaattcaccaataaattgatacggaaatagaaaacaggaggggaatgcagaaccaaccttccccaagcatctagtgtgtctggcatcatgctaggggactttccaaatgtttctttttggtttactaccgtgtatttcgtcagcatcactacacactgtaaatatacaatttaaagagttgtgatgatctcatgaagcatagttctgggcactggatcgaggttgtaacaataaacattgcc

SEQ ID NO: 738038 - DNA, 602 bp, Homo sapiens
ctcaaccttctttgtgtattgtgaaaataaacatttacagaacattggaatgtgtgaaaaatgtccttcgttgtgtgtttatggaaaacatttggcaagtatttgctataaatgcttcctgtaaatgctgtgagtgagaatcagcaggaaaatgtatgagatgagagggagccaactcccacagcaaaagaatgtccccttcccttccacacaccccacgcgctgcctccactctgcactcctccgccgcccccctccccagataaggcccaggggatccgggagtgtgagggtggggaacagagaagggacaatctgtgaaggggcctccaggctcagcattccatgttggagtgcagaaaaggaaactgactcgtgtttcytaggtgatgacgccccctaataggatttccttccccttcattcttattggttaacagttctgattccaagtcccccattccagctggaaacattgcctcaacacccacccggtcttccccacctgaagactggcctgcctctcagttaactcttggacgctttcaggtgaaaagtaaaaagtggaaagcaagagactcaaatatatttcttcagaacaa

SEQ ID NO: 738039 - DNA, 655 bp, Homo sapiens
ttagagtggtatttgataggtttagcaaatgtttgatgagcaaggatttattctttctttcgtaagaaaatcgccaattgtttttacactttctcaacttgttaatcctacctaatgcagaccatttcataaggaaattacttgactaatgatagaatgataagaygacgggaaaatgcataccattttcgctctcacaggaattttctaaagacaaatacacattttgagatgctgaaaagctctgttccatcctttctatgaccttggtgatgctaagagagactctgaacccatttacaaataacagagatttgggagcactgggcaaatatgaatattttttaccatgacttcatgagctattgcaactgcctttggaaatggtgcactttgaaaaacacacgcactggcctaacacaatggatgttttgttgtaaaattatgaattacaggaaaaatggaatatatcatacacacacaaaggcatttaacacagaaaacctgttagagcagtcattaaaatctgcctggtgatccacagcacagaaacttacattagaactatttgtggttctagggtcagtctggataatatatttatgaattctctgatgcagatgtatatttattcctttgtataaaaataatctta

SEQ ID NO: 738040 - DNA, 344 bp, Homo sapiens
gataagctgaggttcagagtgttaaaattcagggaacattcgggtaatagcaaaatacaccaaatgataaaggatttagaaatgtaacaaaaataagactcgaacaatggtgtaaggccaggataaaaagaaaagccaytgtgcaacagagagaatgttaaacatggatatgagcaggaaggtgcctgatggcatttgtattaggatgatttttttttctagtggcaatatgaagaatgaattggagttaggaaagtctattaggtgctatggggagtgcacagtgtaaaacacaggccctgttcttaaaaagcttacaatccagttggaaagtaaaatattaa

SEQ ID NO: 738041 - DNA, 614 bp, Homo sapiens
agaaagtttatattgccaaggttaaggacacactcataacacaccctcaggaggtcctgacgacatgtgcccaaggtggtcaggggtacagcttgctttatacattttatggagacgtaatacatcaaccattacatgcaaaatttacattggttcaatctggaarggtgggctactccaaggcaaaattggggacttccaggtcatacataggctttaaatttttctgacacgtagccaggcacggtatctcacgactgtaatcccagcactttgggaggccgaggcagatggatcacaagatcaggagttcggaccatcctggccaatatggtgaaaccctgtttttactaaaaatacaaaaattatccaggcgtggtggtgggcacctgtagtcccagctacttgggaggctgaggcaggagaatcacttgaacccgggaggcagaggttgtagtgagccaagatcactgcattccagcctgggcaaaaaagcaagactccgtctcagaaaaaaaaaaaaaaaaaattctgactggcaactggctgaaagagttattatcagccgaaaggaatgtctgggttatgataaggggttgtgaagacctaggttt

SEQ ID NO: 738042 - DNA, 614 bp, Homo sapiens
agaaagtttatattgccaaggttaaggacacactcataacacaccctcaggaggtcctgacgacatgtgcccaaggtggtcaggggtacagcttgctttatacattttatggagacgtaatacatcaaccattacatgcaaaatttacattggttcaatctggaagggtgggctactccaaggcaaaattggggacttccargtcatacataggctttaaatttttctgacacgtagccaggcacggtatctcacgactgtaatcccagcactttgggaggccgaggcagatggatcacaagatcaggagttcggaccatcctggccaatatggtgaaaccctgtttttactaaaaatacaaaaattatccaggcgtggtggtgggcacctgtagtcccagctacttgggaggctgaggcaggagaatcacttgaacccgggaggcagaggttgtagtgagccaagatcactgcattccagcctgggcaaaaaagcaagactccgtctcagaaaaaaaaaaaaaaaaaattctgactggcaactggctgaaagagttattatcagccgaaaggaatgtctgggttatgataaggggttgtgaagacctaggttt

SEQ ID NO: 738043 - DNA, 614 bp, Homo sapiens
agaaagtttatattgccaaggttaaggacacactcataacacaccctcaggaggtcctgacgacatgtgcccaaggtggtcaggggtacagcttgctttatacattttatggagacgtaatacatcaaccattacatgcaaaatttacattggttcaatctggaagggtgggctactccaaggcaaaattggggacttccaggtcatacataggctttaaatttttctgacacgtagccaggcacggtatctcacgmctgtaatcccagcactttgggaggccgaggcagatggatcacaagatcaggagttcggaccatcctggccaatatggtgaaaccctgtttttactaaaaatacaaaaattatccaggcgtggtggtgggcacctgtagtcccagctacttgggaggctgaggcaggagaatcacttgaacccgggaggcagaggttgtagtgagccaagatcactgcattccagcctgggcaaaaaagcaagactccgtctcagaaaaaaaaaaaaaaaaaattctgactggcaactggctgaaagagttattatcagccgaaaggaatgtctgggttatgataaggggttgtgaagacctaggttt

SEQ ID NO: 738044 - DNA, 456 bp, Homo sapiens
aatcaccactaaagaacttatctatgtaaaccaaacacacctgtttcccacaaacctattgaaattaaataaataagtacataaattggggggagaaaaaatgaaattacaattagttaaatatatatatatatgtatgtatttatgtcattgatgtattatctattacttaaaaaaaatcagttactgaggaaaagtatcctagatccataaaattgttttctgcttgaagggtcctatgggaagagttgtgtcggtaacagcagtcttctaattacacttggcttttcayatcttcaaaatattacaaaggtgaatttcacattcacacaaagtttacattgataaatagcatattatacttcaaagtgaatttataattcataaatatatgtgagacttgtccactttggatatccatttagatcagttaaattacttgcaatttaaatttag

SEQ ID NO: 738045 - DNA, 611 bp, Homo sapiens
tatgattttatttgaaatgtttgtaataatacataaattatgctaaaggtatttcaaataatcttctgaaagtattgctttataaaaataggatgcatcattcaagtatctagattttgcagtgtttttgcaatctctcaaacaaaaaatagaatcaattttcatgtctttttaaaaaattgtcttctttctgtaaaaattatctaatgtgtcaagaaaaataccctcttgtctagaatccttgtcatgattctctgcactatattgcctgtatagatgctgcttgacattgtaaataacttttacaatactatcataagtaaacaaaacaagatacatgaatttattcttgctggatgaccyacttttattacataaatgacatacactctaattttatagtaaaagtcagaaaacatttacattataaaaacttgtattacagacaaccttataaaatatcatttaagaaatataaattatagcaacaccctactatacagttcacgtccagaaataagaaaagacctacatcataagctattccttaagttagagtaatactgcattagcaaaaaaaaagaaaataaataaacataatttaaaggcag

SEQ ID NO: 738046 - DNA, 611 bp, Homo sapiens
tatgattttatttgaaatgtttgtaataatacataaattatgctaaaggtatttcaaataatcttctgaaagtattgctttataaaaataggatgcatcattcaagtatctagattttgcagtgtttttgcaatctctcaaacaaaaaatagaatcaattttcatgtctttttaaaaaattgtcttctttctgtaaaaattatctaatgtgtcaagaaaaataccctcttgtctagaatccttgtcatgattctctgcactatattgcctgtatagatgctgcttgacattgtaaataacttttacaatactatcataagtaaacaaaacaagatacatgaatttattcttgctggatgacccacttttattacataaatgacatacactctaattttatagtaaaagtcagaaaacatttacattataaaaacttgtattacagacaaccttmtaaaatatcatttaagaaatataaattatagcaacaccctactatacagttcacgtccagaaataagaaaagacctacatcataagctattccttaagttagagtaatactgcattagcaaaaaaaaagaaaataaataaacataatttaaaggcag

SEQ ID NO: 738047 - DNA, 623 bp, Homo sapiens
gtgtaccaagagcagcagtcacatctatacctgtcatctggtcatggagtccactgcaaaatggaaggcaatattgaataaatacttaaagaaaaataagtttaaacatattatagaccaaagaaaaagtactaactcttctaaaaytatatccttgggctatattatgaaaacatatatagttatgaaaacactctcacattcatgataaagtgacaaaatttcatgtacttcatcttatttcataatatctcaaaattttgttttcctactggatcttgtgctaaaaataaactcagaatttgaatctataaaacaaaattgattcctattagaagtgacagtccttagagaataaatgacagtttcatatcttgcctttcaagttttgtgcatgacaaaatgaaagccatgaataataaaatattatctcataagctgcagaaaaatttttatttcaatgtcttataaatatatctaatacaaataaaataatttcaggtatttgcattaaagcagtctaagacattccacagggaaacaatgatcacattcagtgctaaatgaaccctgagcctatttaaggtgctggtgaaaggaaagagttcagtcatcacagaact

SEQ ID NO: 738048 - DNA, 623 bp, Homo sapiens
gtgtaccaagagcagcagtcacatctatacctgtcatctggtcatggagtccactgcaaaatggaaggcaatattgaataaatacttaaagaaaaataagtttaaacatattatagaccaaagaaaaagtactaactcttctaaaattatatccttgggctatattatgaaaacatatatagttatgaaaacactctcacattcatgataaagtgacaaaatttcatgtacttcatcttatttcataatatctcaaaattttgttttcctactggatcttgtgctaaaaataaackcagaatttgaatctataaaacaaaattgattcctattagaagtgacagtccttagagaataaatgacagtttcatatcttgcctttcaagttttgtgcatgacaaaatgaaagccatgaataataaaatattatctcataagctgcagaaaaatttttatttcaatgtcttataaatatatctaatacaaataaaataatttcaggtatttgcattaaagcagtctaagacattccacagggaaacaatgatcacattcagtgctaaatgaaccctgagcctatttaaggtgctggtgaaaggaaagagttcagtcatcacagaact

SEQ ID NO: 738049 - DNA, 623 bp, Homo sapiens
gtgtaccaagagcagcagtcacatctatacctgtcatctggtcatggagtccactgcaaaatggaaggcaatattgaataaatacttaaagaaaaataagtttaaacatattatagaccaaagaaaaagtactaactcttctaaaattatatccttgggctatattatgaaaacatatatagttatgaaaacactctcacattcatgataaagtgacaaaatttcatgtacttcatcttatttcataatatctcaaaattttgttttcctactggatcttgtgctaaaaataaactcagaatttgaatcyataaaacaaaattgattcctattagaagtgacagtccttagagaataaatgacagtttcatatcttgcctttcaagttttgtgcatgacaaaatgaaagccatgaataataaaatattatctcataagctgcagaaaaatttttatttcaatgtcttataaatatatctaatacaaataaaataatttcaggtatttgcattaaagcagtctaagacattccacagggaaacaatgatcacattcagtgctaaatgaaccctgagcctatttaaggtgctggtgaaaggaaagagttcagtcatcacagaact

SEQ ID NO: 738050 - DNA, 516 bp, Homo sapiens
tagacaaggaagtctttcttaggaaagtgaatcttgagtttttgttttatttcgttttgttttcagataaaggaccttgctctgctgtccaggcaggagtgcagtggtgtgatcacagattactgtaaccttgaattcctgggctcaggcgatcctcctgyctcagcctcctgagtagctggggctacaggcatgcatgtatattgtttaatatttttgtagagatgggtacttgctacattgctctggctgatctcaaactcctggcctcaagcagtcctcttgtctcagcctctccaagtgcagagattgcaggcctgagccagtgcactcggccctgagttgagcttttaatggtaaaccaggtgttaattaagtgtatgcatgtctgagtatgagggccagagcatggaagtagatgcagaaagacttgtcatgtgctaaactagaattttcaaaaggctatattgctttctacaagtagtttaataactacatttaaaaaggttataacta

SEQ ID NO: 738051 - DNA, 635 bp, Homo sapiens
acatgggggaaatgtgatgttaaaatatgaaatagtattttcaagacaatatgaagtacttgaagtaatatttcttaaatatatatgttatatataaatgtgtgtgtatatatatatatgtatatatatatgtatatatatatatatacatatatatatatayatatatatatatatatgaagaaagagaattcagagtgaaatttatcatcagtcttttccttggcttttaaaaaccatatatataacaatgagtaatgaatagacagactgaaaaaaaatcagcataatacaatccttgtatatatttgtaatataactcgttagactagaaaatcaaattttaggctgtcagctttcattgtcttgaaaggagtacttgttttagtgcagacactatttctctaaatatatcatatgtgtgtgccctcttcatgtctcttttacttaagaaatcacatttcttactaaaccaagacaatatgtttctttaaaaggattctctcttcaaagttttgtaagttttcacaaggaaacaaaatttaaatatatccactcaatacaaggtatcaaacattttaaaaataatgccacagtgaaaacaacaaaaaggaggtaagttggagatgcaaata

SEQ ID NO: 738052 - DNA, 546 bp, Homo sapiens
cacgtgaacaaattgaaggatggtaaatgtgggggattttactgctgatggaggtggctgtcagtgggaaagggagctgaaaaggggatggggcgggaaggtaatcttcccctaaagtccaactatctctgrctggattcttatccaaagttatgccatgaagctgtcccgctgaagtaaagctgctactctccagtatccaaccgtagtcttcaatgtttagctgcttctcctctctgccagatgcgtctggggttcttataggcacaggatggggttgggtggggccatgggtggttttggaaaaagcaacattcaagtgggaaaacaaggatataagttctcactttgggccatggtctcaggcttgtcagcttaaggatggagcccttgccagggatccgccctcttctgcccagaattttcctgcctcctgtccctaccactatcacccttatattaaaacacatgctcctgttttgtttgtttttgatatttactggttatatctcatgttatgctcataatcaactttcatcttaattt

SEQ ID NO: 738053 - DNA, 546 bp, Homo sapiens
cacgtgaacaaattgaaggatggtaaatgtgggggattttactgctgatggaggtggctgtcagtgggaaagggagctgaaaaggggatggggcgggaaggtaatcttcccctaaagtccaactatctctgactggattcttatccaaagttatgccatgaagctgtcccgctgaagtaaagctgctactctccagtatccaaccgtagtcttcaatgtttagctgcttctcctctctgccagatgygtctggggttcttataggcacaggatggggttgggtggggccatgggtggttttggaaaaagcaacattcaagtgggaaaacaaggatataagttctcactttgggccatggtctcaggcttgtcagcttaaggatggagcccttgccagggatccgccctcttctgcccagaattttcctgcctcctgtccctaccactatcacccttatattaaaacacatgctcctgttttgtttgtttttgatatttactggttatatctcatgttatgctcataatcaactttcatcttaattt

SEQ ID NO: 738054 - DNA, 563 bp, Homo sapiens
tttgtaattatttttattcataaaattaaacccatatatcaacctaattaattatgacaatattttgctactatgataatacatatatttttccttgacctaactgatggactttcaacatgtaaaatgtacaagaacagtatgtcaaggtaacatcatgaatatttatctatatgtgatmatgaatatttaaatattaaaatatatatgaatattgattgaccaatttaaacaaatcttcctttcatctaaaaaattagcaataaattagacaaaatatatttttaaaatatagcttgaagacatgagataattagaaaagtggtgacaaattaatatcgaagagagaaacttaaagatgtaattcctgaattttatggctactttttccctagggttaacttttggctctagaagaaatgagaagaacgtaagaagctgaacagtacttttgatggtttctcaagatgtacaaacaaaaattggagccctggatccaccaagcttgggttggaggcctagtgaacctcctacatcttagatttgtattataaatggttaaa

SEQ ID NO: 738055 - DNA, 529 bp, Homo sapiens
gtagggaggaggtgaggggtgaaaaaaatcacctattgggtataatacacactatttgggcaaaagcccagacttcgctatgcaattcatgtaaccaaaaacctcttggaccactataactattcaaataaaaaataatttaaaaattatataattttctgtccaggtgtggtgactcatgcctgtaatgccagcactttgggaggctgaggcaaagtggattgcatgaggtcaggagttttgagaccagcctggtgaacatggtgaaacactatctgtactaaaaagacaaaaatactaaaaatacaaaaattagctgggcgtggtsgtgggcacctgtagttccagctactcgggaggctgagggaggagaatcgcttgaacctgaaaggtggagtttgcagtgagctgagacagtgccactttactccagcctgggtgacaaagcaagattctatctcaaaataaataaataaataaataaataaatattttaaaaaattaaaaagttaaaaaatatataattttt

SEQ ID NO: 738056 - DNA, 543 bp, Homo sapiens
ttctgtcctctctgaactaccaaggtttgtttgtctgaggccatgactaaagctgtggcctttctcttagctgtggcctttctcttatctcgctattcctttctggtctgttcctcttggtccctattatagaatgccgaggttgccaggtttaataatgcctccaaattttgttcagggcccagggctagcttttggagctttctcctgatatctgtggctcattgggtaataaacatcttttaggatcaattgaccctcgakggagttaggtgacaagggagtatattttcttaaagcctcccatagccactcgcagaaggcggtaggattttcttcctttccctaagttatggtggacatcattgaataattcatggggtttttcctaattctccttagtccttctgtaacacaggtcaacagatgtttgcaaatccagtccccatgatttgagtcgaggtcccagtcgggatccatactggggatggcttgctgactggtatggaatttgtccctttctttggctgtcattctatcatt

SEQ ID NO: 738057 - DNA, 543 bp, Homo sapiens
ttctgtcctctctgaactaccaaggtttgtttgtctgaggccatgactaaagctgtggcctttctcttagctgtggcctttctcttatctcgctattcctttctggtctgttcctcttggtccctattatagaatgccgaggttgccaggtttaataatgcctccaaattttgttcagggcccagggctagcttttggagctttctcctgatatctgtggctcattgggtaataaacatcttttaggatcaattgaccctcgagggagttaggtgacaagggagtatattttcttaaagcctcccatagccactcgcrgaaggcggtaggattttcttcctttccctaagttatggtggacatcattgaataattcatggggtttttcctaattctccttagtccttctgtaacacaggtcaacagatgtttgcaaatccagtccccatgatttgagtcgaggtcccagtcgggatccatactggggatggcttgctgactggtatggaatttgtccctttctttggctgtcattctatcatt

SEQ ID NO: 738058 - DNA, 627 bp, Homo sapiens
ctgctagtctgaggagggatcctaaaattctatatagtcccccccgatggggctttgggcaaaaattatgtctttctgattggtgagcccgggtgcttaaagaaaggaacagagtcccaaaatttatattagaaatcatccttacaggagaaactagaagagtaccagggacagggagtggtttttagaagcaggactagcctcggagaagagaggcaggaagaagtttgactgatgggtgttaagacccaggagacaagggtcaggatagatgggatagatgggcaagtctcactttggcaacgtaactttgagagctctgctcatggctgcagggtcaaccaactttttgtcgggaccctggagctgaatggctttcctctctgtcgaccctctgctcagcccagaagtgcaggraaagcagaagctgcttccaggcaaactaacgctcctgactccttagagttgggggttgttagagagccctttcccagaaagcctgacacccgtgtctttagtccagcagccatgctagttgcttttaactggccaacaggtgcccagtgtttagccccttaattctaaggaaaaataagacagaatagcaagcgaaaggtgtccagtggt

SEQ ID NO: 738059 - DNA, 625 bp, Homo sapiens
gttttagtatgagaagggtggtgaaagccattgcaagtgaagaatagcatctaggtccaaaacggaataaagcattccaaagattaagaatgtttcaatggagttaacatgagattgcttgtacaagacagttcagaaattattaaacagattggccaaggtcagatcaggaatggcggagaaacttaccagccaggtctggcctctgcctcttcagcctcatttcattacttcctctttgttytctgtgttacaggccctctggccttcaattattcctcccaaatctcaagtttccctctccctctggacctttacacattgcctgggatgttctttcatgcattgctcttcatcgctcttcctccttctccatcagatctgggtttcaattgtactttctcaggaaagacctctctgatcctacagaagaagtcagtctctagcttgcatcccttctgttcgctatattcttctggcatagcctgtatcatgtttgatatctaggaacatgatcattttcacactattccataagctcaagcagggaagagaacatatctgttttcctcaatattggttcctgttttaagcagaatttcttgcatatagcgggtgcttagca

SEQ ID NO: 738060 - DNA, 625 bp, Homo sapiens
gttttagtatgagaagggtggtgaaagccattgcaagtgaagaatagcatctaggtccaaaacggaataaagcattccaaagattaagaatgtttcaatggagttaacatgagattgcttgtacaagacagttcagaaattattaaacagattggccaaggtcagatcaggaatggcggagaaacttaccagccaggtctggcctctgcctcttcagcctcatttcattacttcctctttgttctctgtgttacaggccctctggccttcaattattcctcccaaatctcaagtttccctctccctctggacctttacacattgcctgggatgttcttycatgcattgctcttcatcgctcttcctccttctccatcagatctgggtttcaattgtactttctcaggaaagacctctctgatcctacagaagaagtcagtctctagcttgcatcccttctgttcgctatattcttctggcatagcctgtatcatgtttgatatctaggaacatgatcattttcacactattccataagctcaagcagggaagagaacatatctgttttcctcaatattggttcctgttttaagcagaatttcttgcatatagcgggtgcttagca

SEQ ID NO: 738061 - DNA, 620 bp, Homo sapiens
ctcttgctaagctttgtttcctaattaaaattttctgccactgccatagctactgcttctactggaaccgccatcaccacctttgtttcatggtttggcaaagtattggcctccaccaccataagggccagagcttctgcatccaaagtttcctcccttcatgggtccaaaatttgaagagtgattgttgcaattgccaaaatcattgtagcttccaccacctccaaaattgcttccatcattaccaaatccattatagccatccccactgccaccgtatccactaccactatggctgccaccaaagccaccacaaccattgaagtttcytccatgaccaaagttgtcattcccactgaaaagacctccatgaccaccaccaaagtttccggaacaacttcgacctctttggctggatgaacactagccatctctcactttgacagggctttcctaacttcacagttgtggccattcacagtatggtatttctgaatgacagtcttatccatggagtcatggtcatcaaaggttacaaaggcaaagccccttttttttgtcactgccttggtcagttatgatttcagtcacttcaatatttccaaactgttcaaaataat

SEQ ID NO: 738062 - DNA, 670 bp, Homo sapiens
ttactttctggatctatgatatattcatttattgtgtttctttccccacatttttctatgtttgtttaatgttttctttgctgtattttagatttccttttaaatcctgtcagaggcatttgcaaaagaatcaaacaaatgtctgtataaaataaacagaatattttcaaatataaacaagtgtcgcatctgggaaatataagatctgagaaatttttacctttggtttgaccaaggcacctgggaaattgagaagaagaagaagaagaagtaaggattgctcagaacgagcttatggatattaatttattttgagtccttctacctgatgccccctaacaaaatagagaaaaagcaaaacacaaagatagaagaaaagrgtgggagactgaaagggaggacatgaaggaaacaaggaagaaaatgaataaaggaaggaggaaaggaaggagagaaagaagagaaagaagaaaattatgatcagtaacgaaggccaaataaataccaatcctgggaagacgtattctatcatatgactactaaaaaaagaattatagaagtagaaatttgaattaatgattgaatgggtcactcctgttgctatgtgacactctgtaaaggttatagacttcaacattccttttctttgtatatggggtccagtaatttt

SEQ ID NO: 738063 - DNA, 578 bp, Homo sapiens
atcgggttttaaaatcaacatttttaattaggacagtgtcactttgaaaaccaagagatattatgcactataaacttcccaaaaagaattcaagtccaagagcatcactttcttatgtcttgcacatacatgttaaaatttcaaaagaatgatcagcaaatgaagacacagctctctaacaaaccacatggatcacatgcatgaatgtatatatattaaacattcctaagaaacaacataatgtttatctttgattttccgaaagttcacttccatgttctggaagtcatgatatctctactgcttctaatatttcaaacatgycactacttttaggcatacatcatcatatacattgtcatatacaatatctcattttaggaatttttaaaggcataaacttatttatttttatttactaactatatctcccatcttagagacctcattttaagtcacagaaattaagatatatcccacatcctactaaataatgtaggtttctcaaaatctcttaccaatttcataattaaagtttatattgtgaaattcaggaacaaaaagattctgaagcatta

SEQ ID NO: 738064 - DNA, 584 bp, Homo sapiens
agaatcccccaacatctcagcgcagtgactgcctcacggaggtaataataattcattgtcaacaaacacgtgcaagcaccacatgttatctcatctaatccttgcaacaacctacagcttcggaaggaaactaaagcttaagaagcttagaatatatccaaataatggtatattactcagctacaacatggatgaacctcaaaacattatgctaagtaaaagaggtcagtcacaaaaggctgcatatcgtatgaaatgtccagracgcgaatgcatggagacagaatgtagattagcggtcaccaggggcctaaggaagaagggaatggggagtgactgctaatgggtacagggtttcttggggatgatgaaaacgttctagaattagattgtggtgataactgcaaaattttgtgaatgtaattttaaaacactgaatggtaaactttagaaaagtgagttttatgataggtgatgacggtcgtggtggaggtggtagaagagaaggaggaggaggaggaaaaggagaaagaggaggaagaggaaaaatgaagaaaaggaagaagttaagaagcttgcccaag

SEQ ID NO: 738065 - DNA, 584 bp, Homo sapiens
agaatcccccaacatctcagcgcagtgactgcctcacggaggtaataataattcattgtcaacaaacacgtgcaagcaccacatgttatctcatctaatccttgcaacaacctacagcttcggaaggaaactaaagcttaagaagcttagaatatatccaaataatggtatattactcagctacaacatggatgaacctcaaaacattatgctaagtaaaagaggtcagtcacaaaaggctgcatatcgtatgaaatgtccaggacgcgaatgcatggaracagaatgtagattagcggtcaccaggggcctaaggaagaagggaatggggagtgactgctaatgggtacagggtttcttggggatgatgaaaacgttctagaattagattgtggtgataactgcaaaattttgtgaatgtaattttaaaacactgaatggtaaactttagaaaagtgagttttatgataggtgatgacggtcgtggtggaggtggtagaagagaaggaggaggaggaggaaaaggagaaagaggaggaagaggaaaaatgaagaaaaggaagaagttaagaagcttgcccaag

SEQ ID NO: 738066 - DNA, 689 bp, Homo sapiens
ctcatcaactagagtattattctttctccatccacatcttaaccctacttgaagctccaattctgtttcctcatgccctcttttcctgaccacttttgggttgaattgagctccccaaaaagatatgttgagttttatctcctggtacctcatttggaaattagggtctttgtaaatgtaattagttaaattaacatgaggtgatactggattagggtggacactaaatccaatgacttgtgtccttataagaaggctatgtgaagacacacaaagagaaacatgtgaagacagacacagagatgggagtaatatgtctgtaagccaaggaatgccaagattggccagcaaccaccaaaagctaggaaagacacaagcaargattccctgctagagtcttcagaaggaaccctgcaacaccttgattttggacttctatcctccagaactgtgagaaaataaatgttatttgttttaatccatcttggatggggtaatttcttaagacagcctgaggaaactaatacaacactcctacccaaagttatctctcttacttcttgacttctacagctcctaaattctaaacatttcacttgacacctatggtagacatcctctcacatggcccccagttattcctacctcatggtattagtccttttgtataccccctttcacattgatag

SEQ ID NO: 738067 - DNA, 570 bp, Homo sapiens
ctcaggtcaataaatacttactggatccctgctatgcgcaaggcactgcaatggcaccaagatggtttgagcactgtccctgcccaaagtagctcacagtctgatagtggcaatgagacaagttcacaaataggtgaactgtaaggtggctgccaatggaaatgtgtgaagtattatgtggattccaaatacagcgttatttggattacaaggaacaggagatcgtgccccctgggagacatggaaaaagcaagcaccrtggggtaggtagcattcagcatggtctagaatcttacttcagtggtcctcaactatgcatattagaattagcttttctaacacccaatactcaggcagcaccccagaacaattaaatcatagtctctgggaatagggcccaggtctaaatattttaaaagctcgcccaggtaactccagtgaagagtgaagcctgagaaccactattctacaaagatgagtagacattagctggcaggaaagatggggcagagaggaggccatggagagaacagctgtgagttagtatattccctctttggtaggcacaca

SEQ ID NO: 738068 - DNA, 630 bp, Homo sapiens
ttccttcaggaatgtcaataatctactatagattttctataaataataatagcctcactttttgaatgcttactatggatcaggcactatacatttgtcagatcatttatggtcaaaaaaatcctgtagccagtccaactactattcccattttacaaatggtaaaattgagactcagtgagcttgagatgctaattagtggagacattctagggtataaactcaggcagtctaactttagaagcctatgagcttaaacactacactatcatgccccatatgtgcttctarccactatataatgccactacataaatcttttacaaaagactgggagctcctcccatgtaatatgtgtgcagatttactcaactttacattcccgtagggcctggcatgtaggaagatggcctgcataaaagccataagatggccaggagagaaacatgaagtctccctggttggtacacagaacattctcccacaccttcctattatatgatctgtgttcatggctagcaacagtgccctaggaaacataagctaaacaagaccctgcagtgtcacttggaataaatgaaagttcctttcttcatctctggactttacaatggggcagttcccaaactt

SEQ ID NO: 738069 - DNA, 630 bp, Homo sapiens
ttccttcaggaatgtcaataatctactatagattttctataaataataatagcctcactttttgaatgcttactatggatcaggcactatacatttgtcagatcatttatggtcaaaaaaatcctgtagccagtccaactactattcccattttacaaatggtaaaattgagactcagtgagcttgagatgctaattagtggagacattctagggtataaactcaggcagtctaactttagaagcctatgagcttaaacactacactatcatgccccatatgtgcttctagccactatataatgccactacataaatcttttacaaaagactgggagctcctcccatgtaatatgtgtgcagatttactcaactttacattcccgtagggcctggcatgtaggaagatggccwgcataaaagccataagatggccaggagagaaacatgaagtctccctggttggtacacagaacattctcccacaccttcctattatatgatctgtgttcatggctagcaacagtgccctaggaaacataagctaaacaagaccctgcagtgtcacttggaataaatgaaagttcctttcttcatctctggactttacaatggggcagttcccaaactt

SEQ ID NO: 738070 - DNA, 574 bp, Homo sapiens
cctggagtgccaatagaagaggaaatggcactatttttggagcattacaaactagagtaaaacgcaaacttgtagtaaaacgcaaaattcatggactttcaaaataaaacttaaaactgcaaatacattttgagtttgaggcatgagcttcccactccttgcctagatctcagggggwcacaatgtttgttttcctcctccattaggggtgctttgatgggtatttgagaaaaactgtccatatgtacctctcccagggctattgacattttaacaaggtactcgtattgaaaaaaaaaaaaactgttacaaaaaaaaaaaaaacagaattaaagaaaaagtaaaaaatgaaagaagtgtttacaggagtcttcatatagttatggcattacagttggctcctcatatctacgggtttgcatcttcagactcaaccatggattgaaaatattccaaaaaattaaacaaaattaaaaaaaacaataaaaattacaaatttaaaacaatattgtataacaactatttacatagcatttacattatattcagtattataagcaatctgaagatgatt

SEQ ID NO: 738071 - DNA, 616 bp, Homo sapiens
tctattcaaatcctttgcccattttaatgtctggttatctagtattgagctgtaagcattaacactctagatataagtcccttatcaaatatatgatttgaatattttcttctccctttctgtcagtcttttttactttcttgtattctctsaacaagaagggaagttttaaatgttagagaagtcccgtttatctatttgtttccttttgtttgtgcttttggtgtcatatctaagaatccattgccaaatctaaggtcacaaagattcacccctatgttttcacctacgagttttatagttttgctcttatcattaggtcttcaattcattttgagttaatttttgtatatcgtttaaagtggtaatccaacttcattcttttgcatgtggctatccagttacaccagcacgatttgttgaatagaccattctttctccttttaatgaacttggcacttttgttgaaaaccaatttaccatagacatgtaggtttatttctggattctcatttctgttccattgatcaatatgcctatctttgtcccagaaccacactgtcctgattactgttactttgtagtaagttttgtaattggaaagtgtgagtcctct

SEQ ID NO: 738072 - DNA, 557 bp, Homo sapiens
tgattgggttttattttaatcttttactataccaacttttaaactgagacctgtgcgattggctcttaaatcaactatgcagtcagttcattaaaatatctatttttttaaattagtatgttttaataccaaggtatggcctaattttacaatattaatggctcttattttgtcaccaaaattgtttagcctgattccagttggctttaagtaggaattatatatttggaagggtaaagttagagatactccacgctacattttatgttagtcaaacttgcaaatatatttaaaggcatgaatcgttaatatttttcttatgtatttttacatgttacgattaaaatattctacattgcaggcaataccaaggctttrcattctagaggagaacaataaagtaatactatattataaacaaaactcaatactatcttagggtttagatgatcctatttttagtcaatattttaaataaagctataggaaaatatatttggcagtaagttgcatgtcagcctggatgtcacattgtcttcaaagttgagttaatatag

SEQ ID NO: 738073 - DNA, 634 bp, Homo sapiens
tatttacttgtctttatttacttctatgtggtagcattaaagaagatttggggtataatattttcttcaactgttgaagaaaaaaaagacgagtcacgatttgacagcaaaaggcattattaatatacatttcatcataactcgaatttattgacaaatgagcagaactatctaattttcttccagctcaggactttcaactccttagccctatccaagtatctaaaataatgtmattattacaaaggcattgcagttcttttatattgttccaaatgtgttttctccccttttcagggggtggggaattttctgctttctggacaaataaaatccacttttctctcacaatcaagtttcctgttgtataggtgagttattacactgccaaaacaccaaggatattaaatacaatagactcctgggacccttctctgtaatggccctttgttgttcttctaggtagaggaaaaaacaacgtatatacattgaacattttttgttagaagttatatttatgcttcattaattataacgcgtaatattatagggattaatcaaaattatttatccaaaccctcattactaggattctcggttatgtaaatctgttataaacagcataacaatgaat

SEQ ID NO: 738074 - DNA, 576 bp, Homo sapiens
taactactctgccttacctatcttgcacctagaagaatatgcctttccttcatgcacactgatcctttacagtttggactcctccagtctcctattccccaaaactccatcttttctcaacgcccatttctttttccctagtaatgtttgaatatttaatagctccaaaattttatattcagcttcttttcatatcagcttaagaagtctctacttgtaaagtattgtaaactttttatatgacaacaccttggagtgactaggagtgtaaaaaaaaagcgaggaaaaatcctaagttttagttagctgaattatcttatataaatatgacatttttaacakaattcgcccatgtgaacctagattagacagactaaatcagttttttacttgaatcataggaaaaacctcatttttcacctaggaagtgagaatgtgagttataggagatccccggagactcagttggatcaaaattcaattctgtttttaaatagatttgaaaagtgtggatcactgttttcagcagcatcccacgtaatcataaaaatttcatgctggcatctcacaaatcaa

SEQ ID NO: 738075 - DNA, 628 bp, Homo sapiens
ctgagaaatagggatgctatcaccttctatgttcagatttcagagatggttcccagattcttgaggatgacattttctgaattataaaactagcaaaatatttacatacatttcaaagggacagagaaaaatttacatttgttaagtattctaaagtaaatgttctaagaaaagagagtttggcagcctattgtcaggaagaaacctgtktaatgtaggcaagcttaggctttttgggtcaattacattcaaaaattgcctaggaaatgtaaaatgaacaaacctaccaaaaaacaaaacaaacaaacacataaattccaggtcctactgtggaccgattaaatctgaaaattagaatctctagtgacctgggcatcaatattttgaaaagctactcaggtgactggaatatggactgagcatcatatgtctatatgcctgtcccataacattatactccaacacctctcccctaactgagccataatggtctttagccccatgatcggcttattggctaggattattttagatgtatttttagatgtagtgacggtttgtaggggcaaaggggaagttttatctctgaaggcctctgaaaatcaactgacgaaaggcagattaatac

SEQ ID NO: 738076 - DNA, 607 bp, Homo sapiens
catgcaaattatttagctagctgagtttagtcactagcaggtagtaatcatgagccattgtgcatagtggatgacaacggcgaaaatacctgacttgtatctttcctatgacattaggcaagcttatcaaatattctgatcctccatgttgtcacctgaaacaaagcttcattactgaaggatatgggtcaagggatgactggtcattcactgggatagtcatgatactcatttatatcccagtatcagtcacatttgacattcagctggagtgatggcagatgtagataacatcggtctttcagtgtatgcttcatggaggataatgatggtttgcagctrttatgttcaaatgggacttagaaaatagcctactaattaaatgactaaatcaaataaaactacacattttaaaatttctcctttatttaaacttagcaaattatattttttgatcttctatactgagtttctgacttactcatctcagcccaatttgtgtatatctgagctttgagtggaatgtgcccttccaaactataatacttctatagaatgtgaatatttttacacgttgcttatggaacactcaacttcttgaaattct

SEQ ID NO: 738077 - DNA, 574 bp, Homo sapiens
catacctacttctcaaccctaactggatgactttgaagcaaatcccagatgtcgtatcacaaatatagttgctcattccacatggtgaagagaagatgcctttcctttccctgcactttgacacgaataccaattccaaatatctcacatttcctctgaagccttgtactatttctgtattatttgagatcatttgtattgcaagtaacaagctaaccagagctaacataagcacaratggtccctggtggtctagtggttgggattaaaaaaaaaaatttcattgaaagagtgccaaagcatcttacagaaccctgagaaaaaactgaattccacaggaatggcaggaaccttgacagcactggcccctgagcagcaggcatctcagacccttctaggctgttgtcatgaacgtgactcacaacacctttccaagtctctgttttggttagacgtctataatcctagaagaaagacaggagaatctgatcctagacttgggtcaggtgtacactccttgaccaattagccacagagaagaacagggaggtgctgccatcgagtccacctctgg

SEQ ID NO: 738078 - DNA, 611 bp, Homo sapiens
caggaaaaatacaataaaatcacattgtcagcatgtggaagaaatgcattctgttcattctgaagcgatttcaaacgacgcatgctgcaactgtgaacgcgcagaggccagaatacaaacgtgtgtggtccctccagaaattaggrgccatcaccagatgccccgtctggactctctcactctagtcagatgagtgcacagtccttcatttacaattctaaaatgcagaacagcctgagagcctaaagtttttattcagtacccatttggtggcaaaatctgacctaaacagaagagatatatttacttactcttacagtgattgttcttatgttccactgtaggaatattagtgtgtctggttgtaagtgctaccctaaggctcagttgaggagtcatatattatatggtatttgagctacattccgaattctgaaacacatctggccccaagtatttcaatgaaggggctgtgaacctgcattatggttcagtttagtgcaggcgtctatcacatgaggtctatgttgaggtcacacagctaacagaccaaaagtcaaggaatcatcaatagaagtaacaagcttatcatattcctgctgcttttcttt

SEQ ID NO: 738079 - DNA, 633 bp, Homo sapiens; identical to SEQ ID NO: 735755

SEQ ID NO: 738080 - DNA, 633 bp, Homo sapiens; identical to SEQ ID NO: 735756

SEQ ID NO: 738081 - DNA, 598 bp, Homo sapiens; identical to SEQ ID NO: 735757

SEQ ID NO: 738082 - DNA, 574 bp, Homo sapiens; identical to SEQ ID NO: 735758

SEQ ID NO: 738083 - DNA, 550 bp, Homo sapiens; identical to SEQ ID NO: 735759

SEQ ID NO: 738084 - DNA, 607 bp, Homo sapiens
ttgcctgctggtcactttatagtaagccttcactgcaacactgaggcattatttttatggatgagcaaactgaggctcagagaagttaacaattagcagtaggtcacttcattataaatggcagaaccaagctttaagtataagtgtgttgacaccaaggcaatgtgtctttgctactttgtggtaggacactgttttccttccatatctctttctgtcatcaggttctagcccagaatactggccattttttagctattcagtgcragcattgagtgaaattgtgaatttgcctgtcactgactccagggaagagacgagtcaatcaactctgacgaatcaagatttccagaagatctaaagcccccttgcctctctttttctcagctacccatcaaataagagaacccattgcagaaccagaagggacatcatccaagctgtctgaaatcccggttggtactccaggcttcaacaactgcagcacaatgagagacagcaaagaacatcctggcctttgacaaccccctgtcttctaacatactgaggttaatcagaccgaggacaatttggaaggggctctctgccacaacttggggagtggagg

SEQ ID NO: 738085 - DNA, 607 bp, Homo sapiens
ttgcctgctggtcactttatagtaagccttcactgcaacactgaggcattatttttatggatgagcaaactgaggctcagagaagttaacaattagcagtaggtcacttcattataaatggcagaaccaagctttaagtataagtgtgttgacaccaaggcaatgtgtctttgctactttgtggtaggacactgttttccttccatatctctttctgtcatcaggttctagcccagaatactggccattttttagctattcagtgcgagcattgagtgaaattgtgaatttgcctgtcactgactccagggaagagacragtcaatcaactctgacgaatcaagatttccagaagatctaaagcccccttgcctctctttttctcagctacccatcaaataagagaacccattgcagaaccagaagggacatcatccaagctgtctgaaatcccggttggtactccaggcttcaacaactgcagcacaatgagagacagcaaagaacatcctggcctttgacaaccccctgtcttctaacatactgaggttaatcagaccgaggacaatttggaaggggctctctgccacaacttggggagtggagg

SEQ ID NO: 738086 - DNA, 574 bp, Homo sapiens
acaatgttgaagagattgagtgacatgccccaaataaagcagtgtccccttatttaacaacttataaaatatcttacagccctgtggttctccctgatcttctgccacttataccttatgtaatggaatgggaaggtatcactgccaggaaatcaagaattaggatccggagtttctgtgctctgttcgctactacacgtgatctaccacaattgggaatctaactcattctgttctgctaaattgttgccagtgctcacaaacgcacattgtagtggacagtwtaataatattattgttaactgatgttattaatgaccacaaaatgacaaaattaaggacacacaaaaaaatcacctggagtatactcttggtgaagcaataacacagggtacaaaagaatacagaatacacagatctgggtctctgggataaagactagatcctaaaaattgtaactgatcagaaaaatacagagctgtatggtcccaagtgggaaatatttcatacaatggtgatctgacaagcttcaaatttttttcatgtgtaatgatgtgattgttaaacactagat

SEQ ID NO: 738087 - DNA, 597 bp, Homo sapiens
ttttttatacacttgttggccacatgtatgtcttcttttgaaaagtgtctgttcatgtcctttgcccactttttaatggggttgcttttttcttgtaaatttaaattccttatagatgctgaatattagatctttatcagatgtatagtttgcaaatattttctcccatactgtagatcattgttgtttactctgttggtartttcttttgctgtgcagaagctcttaagtttcattagatcccagctgataaacaacttcagcaaagtttcatgatataaaatcaatgtacaaaaatcactggcatttctatacatcagcaacagccaagctgagagccaaatcaggaatgcaatttcattcacaattgccacaaaagaataaaacacctaggaatacagctaaccagggaggtgaaagatctctacaatgagaattacaaaacactgctcaaaggaatcagagatgacacaaacaaatggaaaaacattccatgctcatggataggaagaatcaatatcattaaaatggccatactgtccaaagcaatttacagagtcagtgctattcctatcaaactatcaatgatattcttca

SEQ ID NO: 738088 - DNA, 597 bp, Homo sapiens
ttttttatacacttgttggccacatgtatgtcttcttttgaaaagtgtctgttcatgtcctttgcccactttttaatggggttgcttttttcttgtaaatttaaattccttatagatgctgaatattagatctttatcagatgtatagtttgcaaatattttctcccatactgtagatcattgttgtttactctgttggtagtttcttttgctgtgcagaagctcttaagtttcattagatcccagctgataaacaacttcagcaaagtttcatgatataaaatsaatgtacaaaaatcactggcatttctatacatcagcaacagccaagctgagagccaaatcaggaatgcaatttcattcacaattgccacaaaagaataaaacacctaggaatacagctaaccagggaggtgaaagatctctacaatgagaattacaaaacactgctcaaaggaatcagagatgacacaaacaaatggaaaaacattccatgctcatggataggaagaatcaatatcattaaaatggccatactgtccaaagcaatttacagagtcagtgctattcctatcaaactatcaatgatattcttca

SEQ ID NO: 738089 - DNA, 640 bp, Homo sapiens
aatagtaagcactatcataatttttaacattatgaattagtttttcctgtatttgaactttatataaatgtagttgaacttttgtgctctttggtgactatcttttttcattcaacattatgtttgtaatgttccatgtttttgcatgtagaggtagtttgttcactgtataacagcagtccccaacctttttgacaccaggggccactttcgtggaagacaatttttccatggacagtgggttgggggaggtgatggtttaggaacraaattattccacctgagatcatcaggcattagattctcataaggagcatgcaacctagatccattgcatgtgcagttcacaatagggtttgtgctcctacgagaatctaatgccatcactgatctgacaggaggcgaagttcaggtggtaatgtttgctcacccactgctcacctcctgctgtgcagcctggttcctaataggctacaaactggtactggtctgtgtggcctggggtttggggacccctgctgtgtaatattccattatgggaacataccactatttataaagtccattttattgttgatggatattttggttggtttgccatgttgggatgatatgaataatgctgctttgaacattcctg

SEQ ID NO: 738090 - DNA, 640 bp, Homo sapiens
aatagtaagcactatcataatttttaacattatgaattagtttttcctgtatttgaactttatataaatgtagttgaacttttgtgctctttggtgactatcttttttcattcaacattatgtttgtaatgttccatgtttttgcatgtagaggtagtttgttcactgtataacagcagtccccaacctttttgacaccaggggccactttcgtggaagacaatttttccatggacagtgggttgggggaggtgatggtttaggaacaaaattattccacctsagatcatcaggcattagattctcataaggagcatgcaacctagatccattgcatgtgcagttcacaatagggtttgtgctcctacgagaatctaatgccatcactgatctgacaggaggcgaagttcaggtggtaatgtttgctcacccactgctcacctcctgctgtgcagcctggttcctaataggctacaaactggtactggtctgtgtggcctggggtttggggacccctgctgtgtaatattccattatgggaacataccactatttataaagtccattttattgttgatggatattttggttggtttgccatgttgggatgatatgaataatgctgctttgaacattcctg

SEQ ID NO: 738091 - DNA, 559 bp, Homo sapiens
cacattggatttggcctaataaggaatttattaaacaagattatttggggataaaatggatacattcaaagacactctttttttttcttttaaagatagttgtccggaaaaggaagaggatgacactgatgaccagccgtcttgggtggttcacaggctcactraggaggcagtgttgagcctgacggatctgtgaaggcccctccgacttgtaactgtaaaatgatgactcttgatggaactctacagttgttgacacctggtgggccacctacagctgaaggtaaataaaaagctgtttcttcaaggttagaacaataaattggtagaatcctaatagggataagggaatgaagaggaaagattccacagaagggcaagtgcataaggaaaatctacaaataacgaaaaacataacagagggtcaagctctcacattctcttcagttctttgacctgaagctcttactgtattagaaagatagcaaaacaaaatgaagcatgatttttgcttcagactagaagatgttgaaggctaagggacaacagcccagaggaa

SEQ ID NO: 738092 - DNA, 641 bp, Homo sapiens
gtcagttataacttacagattctgaactacagtcttccctaccgtcttacttctctttctcatagttcaagttttggtctattcctcttacccactctctctctgggcacactgatacggtttggctgtgtccccacccaaatctcatcttgaattgtagctcccttaatttccacgtgttgtgggagggacctggtgggagataggtgaatcatggggacagttttcccatactgttctcatggtagtgaataagtctcatgagatctgatggttttataaggcaaaacccctttcacttggctcttattctgtcttctcagccgccatgtaagacgtgccattcaccttccaccatgattgtgaggcttcccctgccatgtggaactgtgagtccattaaacctctttttctttrtaaattacccagtttcaggtatgtctttatcggcagcatgaaaatggactagttatacacgaaggctttttattgactgtccctctctgaaaagtactctgacccaaaggtgcccctatgctcatccaaaaccagtgaagtgagagaaatgaaggtaaagcgtcattcaatatggtaccatttttagatgaggacatgagatcctgacttatccatagaaagtc

SEQ ID NO: 738093 - DNA, 630 bp, Homo sapiens
gagctaacagctttggtgcaggccaaccagactggttgctgtcttccttaaagctgccaaaaaggcctaggaaaggctgggcaagagatggagggaggctcctcaatgcagagtttccccccctcctatgtaatcactgcacattgtgaacttaggaaaaacataatgaatgtggacccagtccaaagaaggcagcaaaactgatmaggaagccggaagaacatgtataaaaagaaactccaatgctggcgtttcatcagcagcgtctgaaaccttagaaatgttgaagctgggaatattcagagagaatataccaaacacattaacacaattattaaatatgaaaatgaatttgttgattaaattttggcctattaagataggtgggatactcctcaaggtttaaaagagattgttagtacatatgaaaaaaagaaatagtttcagagcaataatgaatatatgaaacttatcaaatcaaataaataaaaataatgtaacttaaagatggtaataatgaattattagattagagcttcagatcatgttatttggacaaaagaaggaagtttaacttaatgataatgccccagttggcaacttcaacacatggtttcattttcttcgttt

SEQ ID NO: 738094 - DNA, 635 bp, Homo sapiens
tcatgatattttctggtaggtctgagtgggatgatgtgtgaattgtcccctgagttgaaagccaagaaaacaacatgcttttctaaagacctttctttctgccttctccccactttttatttcttgtcatcctttcatgcaccagttatgctatgtattttctttttatgcttttatggctgctggggttacttttggagggataccataagacagtgaagaaattaatgcaacaggggacttcaagcagaaaaatccatctgacctggtgacagttggtaagcattagagaaaatctcatttacttgagaaccataactttggcaatttcatttcggcttacttcactgcccttcccaaagytctggttcaatcaaagagaggaggaaaaagtaactttgctgaacttggtcacagagagactttgaagccgactgcaagactgtccaggagaaaggaactgtaagaaaaatatctcatggttgttggtctaaatctgacttcctgatgctctgttccattttaatgaaaattttaagccgtgtcccagattttcctttttagctgatggatggggagtattgctccataagaaggcacaaattctttctgcctttttctactttcagttgctt

SEQ ID NO: 738095 - DNA, 580 bp, Homo sapiens
aacaggatatgacaagaatgacatttcttgttttatttaccccggcttttatgctgactttttagggctgccttagcatgtgtcccgttctgtatgaacacatgcagccaccagttttcgattcttctttgtttagagtggaaattgaaatgttttctccagaacttttagcggctccctttccttttgaatctggaagtcagctactcttgtaggrcactctacattatatcactgtattagtccgttcttgcattgctataaagaaacacctgagactgggtcatttataaagaaaagagatttaattggcttacggttccataggctgttcaggaagcatgatgctggcgtcttcttggcttctggggagggctcaggaaacttacaatcatggcagaaggcaaagagggaatgaggcatctcacatggtggttgcaggagcaagaaagagaggggggaggtgctacacagttttagacaagcagatctcatgagaactcactatcacaagaacagcactaaggggatggcactaaaccattcatgaaggatccacccccatgatttaatcacctcc

SEQ ID NO: 738096 - DNA, 621 bp, Homo sapiens
aagaggggagttccaggaagcagccaggagggaggggtgggaactctgattgcatcctggagcgagcaactcataaaaccccgaaccctgcctccaaggctttgccccaaggagcttcttaaaacagagccagaattcacttcatttaaaagaatagctcagcatgtagccactaactccctctagcagaggaagccccttgtttctccctgaagaatgcaatgaaggttgagcttctatcttgccaattaccccataattagaacagctgatgrcatactgaagggggtgcgtgtgtaagtgtgcatgcctgtgtgttttgggagaggaaaatcactcttcacccaaaaagaaagcttgaaaggatgatgcccataatttgttcattatcaccaacccactcctttgtagggcaacatgctttgagttcggaagtaaatctagatccagtcctatgcataggtacctttgtaaagaggacatgaagccaggtattttagattgaattctggtttctcaagtaatgtttagaaatgaagaactcccttcccatttaacttcctttaacaacagtctgtgcctgcaatgccaaactctcagttttaaatatttagtcctgct

SEQ ID NO: 738097 - DNA, 634 bp, Homo sapiens
tataaaaatgtaaaacaatggtcatcttcccactatttttttttattttagaaaatttagttattttcacaaaaaaaaatgttacgtgtgttaacatgtgttatgtgttgaatcatgtgctcccaaaagatgttgaagtactaagcaccagtacctatgaagatgatcttatttgaaagtaggttctttacaaaygattaagtgaagatgaagtcattagcatgggtcctgattcaatatgattcctgtctttgtaaaaaggagaaatttggacacagacacagacatgggggaatgccatctacaagccaagaaacacctaagactgccagaagctgagagagagaactggaacagattctccctcatgggcctcaggaaggtcctccctcaggccctcttgccggcactttgaattcaaacctgtcgccttcagaactgggagacaataaatgtcttgtttaagccagacagtgtgtgatactttgttacagcaaccccagaaaacaaataaaacgtgtaattcgtttattatttttaatcaatgtattaaaatatatttaatttatccactttaatttctaatatgacaaatactaacagatttaaggcacataaagaaaagctctttggg

SEQ ID NO: 738098 - DNA, 634 bp, Homo sapiens
tataaaaatgtaaaacaatggtcatcttcccactatttttttttattttagaaaatttagttattttcacaaaaaaaaatgttacgtgtgttaacatgtgttatgtgttgaatcatgtgctcccaaaagatgttgaagtactaagcaccagtacctatgaagatgatcttatttgaaagtaggttctttacaaatgattaagtgaagatgaagtcattagcatgggtcctgattcaatatgattcctgtctttgtaaaaaggagaaatttggacacagacacagacaygggggaatgccatctacaagccaagaaacacctaagactgccagaagctgagagagagaactggaacagattctccctcatgggcctcaggaaggtcctccctcaggccctcttgccggcactttgaattcaaacctgtcgccttcagaactgggagacaataaatgtcttgtttaagccagacagtgtgtgatactttgttacagcaaccccagaaaacaaataaaacgtgtaattcgtttattatttttaatcaatgtattaaaatatatttaatttatccactttaatttctaatatgacaaatactaacagatttaaggcacataaagaaaagctctttggg

SEQ ID NO: 738099 - DNA, 617 bp, Homo sapiens
attttctgcagtctctttcatcttcatcgacacaaatgctccgatctgacttggagaatacagtttcccatgagcctcaacccaggcatcaccattggaggcacagacaattttaaagggaatatttttaatgtctttctgtacttcaggatagctggacaatgagacatttggtagcatagaatgcattgtttgggttggtgacagcctgttgcttgactggcatgccaacaagtcgctcaccatctgctgtaaaggccacaactgaaggggtagttctggcaccttcggcattctccagcacctttgcttgtttaccttccataactgccacacaggagttggtagtacccaaataaacaccaccagctgctccattgattgcttctgacgcataatcctgccttgaaacaattctaaaagcctcatgactaaggccattccagcyatcctgctggcgggcggccgtagggcccggggaggctgcggtgcccctgagacgggctgctgcagctcggctggcacttattatggcggctggatggaggagtatgaggcagcaaacaggcgctcaggcggccgggagctgcgcggtgcagtcatgattttatgatatt

SEQ ID NO: 738100 - DNA, 577 bp, Homo sapiens
agtacacaatatgaaaaggatggtttattcaacaaacagtgctgagaaaactggataccctcaggcaaaaaagaaaaaaagaaaaacgaaattggacccttaccttataccattcacaaaatcaacttaaagtaagttgaagattcacacataagaactgaaactgtaaatttcctgtaatagatacctttaacgttctctttcctggtycccacttgaaaccataaatcaacacctttgggagagcagcttttttttttttaatttttaaattcctcattagattctaatgtgcagccaaatttaagaaacacctttccttaattccatataatcccactcatttggtgtggttcagctgaggctgatcccatcttcacccttgacctggttgagtatcggcacctgatttttatctggaaaattagaataatctctcccctgagccacaataattagttcaaggttatggagtgacccaaaccaggttaattgcatttcttcttgagaattttgatagaacaaactagaaagatatattttcatctgcagagaaaatacattgtaaggataattt

SEQ ID NO: 738101 - DNA, 577 bp, Homo sapiens
agtacacaatatgaaaaggatggtttattcaacaaacagtgctgagaaaactggataccctcaggcaaaaaagaaaaaaagaaaaacgaaattggacccttaccttataccattcacaaaatcaacttaaagtaagttgaagattcacacataagaactgaaactgtaaatttcctgtaatagatacctttaacgttctctttcctggttccsacttgaaaccataaatcaacacctttgggagagcagcttttttttttttaatttttaaattcctcattagattctaatgtgcagccaaatttaagaaacacctttccttaattccatataatcccactcatttggtgtggttcagctgaggctgatcccatcttcacccttgacctggttgagtatcggcacctgatttttatctggaaaattagaataatctctcccctgagccacaataattagttcaaggttatggagtgacccaaaccaggttaattgcatttcttcttgagaattttgatagaacaaactagaaagatatattttcatctgcagagaaaatacattgtaaggataattt

SEQ ID NO: 738102 - DNA, 479 bp, Homo sapiens
aaaaataaaataggagccatctttttaatataggtgagtccttataactcttttttaatactctataaaattatcatcctttcagttccaggtctaggagatttttcccttttaaaattcttccgcaaaaaaaaaagtcacaaatctaataggacaggaactcttaaaaccacagatatgattaaggctcagttccctaataaatgtgcaatgaaacacttgtcagcccttgaaataatgagctgtgatctatgataaatgtgccaataacacattttccagggcagcatatttcagatgggtagraaatagttgaatcacagcaggatcttatttttacacaaattacttctaaactccaaacatatctaaaattaatttctttcatcacattaacactgggctgttaatcaccggaatgtgtgctcatatttgacagacataaaaactgatttacatttggaagaggaggaggacat

SEQ ID NO: 738103 - DNA, 539 bp, Homo sapiens
attggtcagggtggtcttgaactcctgacctcagatgatccagtcacctcggcctcccaaagtgctgggattacaggcataagccaccgcacctgggctcaggtaatggactttgagtatcactgactgctatggttttaatatgtctccaaaactcatgcattagaaacttaaccccgaatgcaacagtgttgggaggtggggcatactgggaggtatttaggttatgaaggtggaactctcataaaggaattagtgcctctttataacgggcctctggaagyggtttctctcttttttgctcttctgccatgttgagtacataacattcatgcccttccactgccactgagtgaggcaagaagcccatcaccagacaccagacgccggcaccttgatcttggacgtgccagtccccagagctgtgagaaataattttctgttcatataaattacccagtttataatattttgtcacagcagcacaaaacagaccaggatcctgacctacattatttcaagtaggaaagataattgta

SEQ ID NO: 738104 - DNA, 592 bp, Homo sapiens
attcaaagattatgttcaacataaaccagaaactaaaatcaatatatgaaaaaacaaatgaatgaaaaaagatatttgggtgagagccctgcttcatttatttttctattctagaagtcaaatacacaaaaatattgtgccaaaaacatccttgaccaagcagatgtacacattagaagtctgcattattaaaacaaataagccaggctgtctctgctataagawaaaacaactttagaaaagcagaaaaggaatgtctgcttattgaaattcatatcaaattaaatcctcagtccttaagaaatttactattatcttatttgccacgaactgtgtaactgagaaattaaaacaataaattgattattacaagtaaaaatcacattactttcaagggagagtagttcactcattagattttctacgtaatatatgttgtaaaatattctaaaattaccaactatttttcaacatatgtaaattctgagtctaacttctcttgttctgcagcgagtaatcaagatttataaaatattcactcttcaagacttatctcacttaggtaaacctcgagaccaatccagaaataaat

SEQ ID NO: 738105 - DNA, 592 bp, Homo sapiens
attcaaagattatgttcaacataaaccagaaactaaaatcaatatatgaaaaaacaaatgaatgaaaaaagatatttgggtgagagccctgcttcatttatttttctattctagaagtcaaatacacaaaaatattgtgccaaaaacatccttgaccaagcagatgtacacattagaagtctgcattattaaaacaaataagccaggctgtctctgctataagataaaacaactttagaaaagcagaaaaggaatgtctgcttattgaaattcatatcaaattaaatcctcagtccttaagaaatttactattatcttatttgccacgaactgtgtaactgagaaattaaaacaataaattgattattacaagtaaaaatcacattactttcaagggasagtagttcactcattagattttctacgtaatatatgttgtaaaatattctaaaattaccaactatttttcaacatatgtaaattctgagtctaacttctcttgttctgcagcgagtaatcaagatttataaaatattcactcttcaagacttatctcacttaggtaaacctcgagaccaatccagaaataaat

SEQ ID NO: 738106 - DNA, 570 bp, Homo sapiens
agctcaagggctactgaagcatagtagcagcttacaaagaaaaaaaaaaagacaaaacaaactcttagcaataatgttatgtcattcacactagagacaaaataacttcattattagagatgctatcattgaaattaattcactggttataaaaggaaggctatccaagaatatctgcagttttgatgccttggaaaataaaattaaatggaagagaaattaacaataataactcagaaataaacactattaatattttatgtaagttttccaccttccttgatatatgacataagcattttcttaactcaataaaaactctaaagaaacatagaaaacaataacaacaacttgtgtggyttctcgtctctctcagagtaaaagccaaaatcctgaggatagcccgtaactctatacaatctggtccaccatttcatctgtgggctcatcttcaatactaccctaaagcctccagttttgctttagccacatccatctccccattgactctttaataagccagacagttccctggattttggcatttcagtggctccttcctctgcctgc

SEQ ID NO: 738107 - DNA, 611 bp, Homo sapiens
aaggtcttacaggataggaagaacatcgtaggcagagaaaggagggttagaccctccaggcagagagaacagagatccaaggaaacctcagtctttgtggacatgtgacactggcttagctgctcctttctggtgcaaggtcttgccccagacctttcaaggtcttgctgggccaagtttttcagcagcaacattaattactattactttttttttttttttttgagacagagtctcactccatcacccagactggagtgcagtggctcactgcaacctctgcctcccgggttcaagcaattctcctctctcagccccccgagtagctgggactacaagagcctgccaccacgcccagctaatttttgtatttttagtagagacagggttttaccttgttggtcaggctggtctcaaatgcctgacctcaggtgatccactcatctcagcctcccaaagtgmtgggattacaggcgtgggccaccacgcccagcctactgttactattaattactccttacctctcggtgagacttcattcccatgcccaatctcactggatcctcacaggcaccctgggagaaaggctgggcaaatgtcattctctggat

SEQ ID NO: 738108 - DNA, 580 bp, Homo sapiens
aaagagaaaaagcttcacattctgcacctactaaacaggtcgctcaattcctatttcacccaggcaaggagttggcctgcagtacgagtcagtattcagctgccaggtacccctctgtatgtcctgctgatttggacagtgactacacaactcaagtaaggagcagtaaagaagtcccagttttcactcatttctgttgccttccatagtctgctgcatttggaagaaggcttctcatgaagttcagagtcttttactatcaagatgaatcaggtgttggggacatctaaccatctgagtcaagaagaaaaagccaggccaggcgaggtggctcacrcctgtaatcccagcactttgggaggccgaagcgggcggatcacctgaggtcgggagttcgagaccagcctgaccaacatgaagaaaccccgtctctactgaaaatacaaaattagccaggcgtggtggcacacgcctgtaatcccagctactcaggaggctgaggcatgacagtcacttgaacccggaggcagaagttgcaatgagctgagatcgtgccattgcactccagcctgggcaacaa

SEQ ID NO: 738109 - DNA, 580 bp, Homo sapiens
tgttatttattaaaattcatattatattggctgggtgcggtggctcacgcctataatcccagcactttgggaggctgaggcaggctgatcacgaggtcaacagatcgagaccaacctggccaacatggtgaaaccctgtctctactaaaaatacacacattagctgggcctggtggtgtgcgcctgtagtcccacctactcgggaggttgaggcaggagaatcgcttgaacctgggaggcagaggttgtagtgagccaagatcgtgccactgcactcyagcctggcaacacagcaagactctgtctcaaaaaaaattcatattatgatattttgatcaataaaattgttttaatgaataatatagaaattgttttttaacacttagagctaatgatcacaggaggttttcagttaatttcaatacctacacagttttattacagtgactataataagcatgaagacatattagaataaaattccatgggggaagtgggatggaaatgcagatccaaagagaaataagaacaatataaaagttctgatggccaaagaagacctggttggcataatttttaa

SEQ ID NO: 738110 - DNA, 680 bp, Homo sapiens
gaaaatcaggtgatcctttactaaagagttgcttttagttcgaaccgggaatgagtattcaggaataagtaaactctgcttttcaccactgtcgaggtgtccagtgtttccccattcagcaactggctaactgaggatcatatggcaagaaggatcttatgtgtcttttaatctcttaaattggtggctaaatcaaggtgattatccaaattatgaaaatacttatcagcaatgcttccttattctttctgtctgtactacctagactgcttagttaactttctctcttctcctcctacacatgttttgtagcactttactcggcaacaggaaaattctatcaccttctgaaatttgtgtctctccaagtgatctcacattgtggaattttaccttctgggctttcaacccaattttcctttctgtttccacctaaagttcctgagcattctctattgacactaaaatttccataagcagcagccattacactstcaattaccttgttaccaattttgtttgtcatttattcaaagaaaattttgtagctaatcttatttagcttagatttacttgtacatacaggtggtattagccactaaggacatttaagatataggttggtaaattttctcagccattaaaccaaaaatttattacattcttctgttttgataact

SEQ ID NO: 738111 - DNA, 471 bp, Homo sapiens
cttagcaataatttctgttctttatagattccaaaaaatattgtaatttttccccatttttctggttcaggatttgcttgttatgaatatggagtaacccttgaacatcagtaaacttcacgagtattcctgctgtcctgacccatatttccagtgacaacctgayatatgtagacactatgcaaagcccacctccattagaagtttataacactgtgttttcatgtgactgttttcttattcctgcagcacatatttcccgggataataaaataaccacttcttgcatccccctcgtttgaagttctgagacagctactctttggttctgatgatctcagcattgccccagctccaacaaaatctgttttcttgatggcaagccctgccattcacttttgaagatattactgagaggtggatgttgggcagtgttggaactgggctgttggattttgcaacgattcttgg

SEQ ID NO: 738112 - DNA, 690 bp, Homo sapiens
ctccctccccttgtccctcatgctctgacaggacccagagtgtgttgttcccctccctgtgtccctgtgttctcattgttcaactcccatttatgaatgaggacatgcagtgtttggttggttttttgttcttgtgttagtttgctgagggtgatggcttccagcctcatccatgttcctgcaaaagacatgatctcattcttttttatagcagcataatattccatggtgtatatgtaccacattttctttatccagtctttcattgatggccatttgggttggatccatttctttgctattgtaaacagtgctgcaataaacatacacgtgcatgtgtctttatagtaaatagtttatattcctttgggtatatacccagtaatgggattgctgggtcaaatggtgtttcyggttctatatccttgaagaatcaccacactgtcttcgacatggttgaactaatttacattcccaccaacagtgtaaaagtttttctatttctccacagcctcaccagcatctaatgtttttcacagacaccttctcatacttatgaagccagtgcaagaaaataaactgagactcacctacaaatatctaaatgtttaaaatgtgtaactctagctaacaaactgtcaataaatatcttttatcttccttgtttgataaatattatataccttcatt

SEQ ID NO: 738113 - DNA, 460 bp, Homo sapiens
ttgcacatactacaatatccccattgaaagggtacagttcatgagtttcgacaaatgtatacatttatgtaaccaccaccccggtgaagatgtagaataatccaccatcccagaaagttctcttgtgggcgtgggattttcgaagctcyccaggcgattctatggtgcagcggactctgagcatcatggaggctcactcaacaatctctgctttagaatctcagagaggttgtccaggacagcacttctcacactttagcatgcatctccttggatctggctgaatgcccattccatcccagagtggggcccggaaccctgcattcctaacaagcccaaaccacactttgaggctctgctacaagtctctcattttggaggtgaaggaaacggaggctgagagtgttgatgtgagtggcttgcaaatcctgattctgaagctcctggactaatgacaatc

SEQ ID NO: 738114 - DNA, 594 bp, Homo sapiens
atccctttttcatatttggccagttatttatgcctccaattttatgaagtgcctgttcaaatattttacccaattttatatcgggttcattttcttttatttatgacattcattaatcacatgtattgcattttgtttcatataagttgrgataaatatttttctccactcttggtttccattttaattcttggatggtatattttgaaacacagaagtcattatttttgatataaactaactaaattttccttcttaattgttacttttttgtccaggtcaagaaatctttctctatgagaatattttattatgttcccttcaccttcacaacatgaatccatgtggaaatgaactctgtatggtttgagataggggtcagtattcagtcatttccatttgaatatttaattgatccagcattgtcctgatcaccttgtaaatttcactttagaacagcactcttaataatgcatgagcatttgtgtataagatgagatttacaaagataagcacagcataggaggtcaaataagattacctcaaggtatggattcagaaataaaacacatgaataagtataatattgttaga

SEQ ID NO: 738115 - DNA, 594 bp, Homo sapiens
atccctttttcatatttggccagttatttatgcctccaattttatgaagtgcctgttcaaatattttacccaattttatatcgggttcattttcttttatttatgacattcattaatcacatgtattgcattttgtttcatataagttgagataaatatttttctccactcttggtttccattttaattcttggatggtatattttgaaacacagaagtcattatttttgatataaactaactaaattttccttcttaattgttacttttttgtccaggtyaagaaatctttctctatgagaatattttattatgttcccttcaccttcacaacatgaatccatgtggaaatgaactctgtatggtttgagataggggtcagtattcagtcatttccatttgaatatttaattgatccagcattgtcctgatcaccttgtaaatttcactttagaacagcactcttaataatgcatgagcatttgtgtataagatgagatttacaaagataagcacagcataggaggtcaaataagattacctcaaggtatggattcagaaataaaacacatgaataagtataatattgttaga

SEQ ID NO: 738116 - DNA, 617 bp, Homo sapiens
aaaaaggaggacttcctgcgataaaggggtttacacagcatgtggacacattaccaatttgtctctggtcagaggtgactacagtgaaagataggcctgagaagaggtgagaaggagcaattatggatggtgtatataagggaamtttgatcaacatcaacaatgctcatggttctaccttcacaatccaggaataatcctcctcggctgctaggccttggaacatatagcaccacatgtggggtgtggtaaagagcctgcagtgaacgtcctccttaacacatccaagaagaaagagtccctcctctccatctatcttgtcattctgtctcttctctttccaataattgttacagacaccaaaagcccaattccaagagtcccccacatgaacctcccaataatatttgccagatgtgaaagtctgagcgctctactcaggaaaacattcagatgttgccatgatgcggggaccatcttgagggtcacatccaacattcatgcttcttaagtctccatacaggaagatatgactattggctctttcaggatgcggagtaatatcaactgcaaatttttttaaaaaaagtatggacacgtgtaaataataaaagtta

SEQ ID NO: 738117 - DNA, 617 bp, Homo sapiens
aaaaaggaggacttcctgcgataaaggggtttacacagcatgtggacacattaccaatttgtctctggtcagaggtgactacagtgaaagataggcctgagaagaggtgagaaggagcaattatggatggtgtatataagggaactttgatcarcatcaacaatgctcatggttctaccttcacaatccaggaataatcctcctcggctgctaggccttggaacatatagcaccacatgtggggtgtggtaaagagcctgcagtgaacgtcctccttaacacatccaagaagaaagagtccctcctctccatctatcttgtcattctgtctcttctctttccaataattgttacagacaccaaaagcccaattccaagagtcccccacatgaacctcccaataatatttgccagatgtgaaagtctgagcgctctactcaggaaaacattcagatgttgccatgatgcggggaccatcttgagggtcacatccaacattcatgcttcttaagtctccatacaggaagatatgactattggctctttcaggatgcggagtaatatcaactgcaaatttttttaaaaaaagtatggacacgtgtaaataataaaagtta

SEQ ID NO: 738118 - DNA, 633 bp, Homo sapiens
ctaggctggcaccctctgcacagagtgtatgcaggaagcacggccggccaactcagagcctgtgttcccctggcactcgccccactcacacgggtcatcaatcctcatgttttatgatgctgacgcaaagtgttctcaagtyacatcctcgctggtgatctgtgaagatctctgaacataagcatttctttgtttgaacttgagccgagggcccaagggtgtcttggggaatttccatctgggacgcttgatgccaggatctcagcttctgcagtgtcttctgacagctcagagaggtgtgtgtcttgcagatggcctgtgtcagctgaatgcagacgaatgacttgggaatcacaaccttggggtctgagtcagaaagcagcaggggagcagccagggtgctgggcaggagtgagacgccccctatccaagtcccacctttgcctcaaggaagctgggaggactcagccacccatcatgccctctgcgttcagtgagggaattgggtaataataatggatagcagcagtgtcattcattgctgcttaccatgtgccaggcactgtcctaggcactcactgacatagtatcattgaatcctcaccatgctcctacgagctgtcacaattgcaa

SEQ ID NO: 738119 - DNA, 647 bp, Homo sapiens
cccacatgcccagcatactggggagggacctggtgccaggaaggtggccatggggccaaacggccctgtgcctgggcaggtggctctgcacctttctggaggctgccctgcccatctcgccagtcatcacgtccttccgctgaccctcccatagtgttcctgttcayccccctcctacatgttctatttggccgttaggaggcaggcaatgggggaggctgggtgggtggaggccagagcgggggccaggaccacagcagcccattcttccttgagaatcccaaattcctgggtaaagaagagcatggacctgctcgcggtggctcttaatgaactctgcctcattggcaaggccctggggaagtgtttgaggagtgctctgagcagaggggcacagggcctcgcagtactcagaagcgccagggagagctgccaagggctggggttgggtggtgttttgaaggcaggccccgtcccgtgaacaggagccgcaagcacaccccaggctccctggcccctgtgccgggataagcggggtggggagaaatcacgggatagacatctggtctagaccttgaaaatccttctctccagccttcacttcacagacaagaaaaccgaggccccaactcagggccttgaaacca

SEQ ID NO: 738120 - DNA, 615 bp, Homo sapiens
ttacagtacagctgatcactaattagaaggttatccttagcatggaagtagaaaatggtgacttaaaaacttgttactccaagcagctagcctagtttgtcctgcaactttatcatgttttataatttgcattaaaatgttaagtaacaggccgggcgcggtggctcatgcctgtaatcccagcactttgggaggccaaggcgggtggatcacctgaggtcaggagttcgagaccagcctggccaacatggcgaaaccctgtctctactaaaaatacaaaaattagccaggcgtgatggcaggcgcctgtaatcccagctactygggaggctaagacaggagaatcgcttgaacctgggaggcagaggttgcagtgagctgagatcgtgccattgcactccagcctgggaaacaagagcgagactccatctcaaaaaaaaaaaaaaaaaaaatgttaagtcacttttttatataaagaagtgaatggattttgtaatttcctttggaatgcaaattagaataaaaatcttacacacaaataaaaagacagaacttaaaaaacaataccatttacaattgctcatctcacaaatgaaatacttaggtatatatctt

SEQ ID NO: 738121 - DNA, 597 bp, Homo sapiens
agcaaatgtgtttgggaaaaaggaaactgataaacttccttcacacagggttgccaccaaccttcaatttgcagaaacacaatatacataaagcacaataaagcaaagtgcaataaaatgaggtgtgcctgtactacctacccattcaaacactgtatttttgttccttttcaaatgataattgccctcagtttatagagataaaaaaattctatattttaacttcttcctgttattcataaagttgtgggtgagtagagtcattaatatatgtcatgttctgtcatgaatgctggtcagaaattaagggaaaattaattgcaaagaatatacttctgtggcaaacatgtcagaagccatgatttactactgcaactagactgtctgattcagatggtggttggcagggcagcctgggttatgaccgatgtggctgactgatcaccackgaaaggcagcattaataatgtgctttcagagattgtaaatgtaggtaagtagaaggttgcctttacaagtagagaagctggagattttgctctaaatatgctcttcttctttctcccaaatctgcttaaatataggccatgcttatgt

SEQ ID NO: 738122 - DNA, 533 bp, Homo sapiens
attcatccattgatggacacttaggttgattctatatctttacttctgtgaataatactgcaatgaacatgggaatgcagatatttcttcaacatactgatttcattttctttgtatatatatccagtagtggatcatattgtagttctatttttaattttttgagggacctccatacaattttccacaatggttgtattaacttgcattcccatcaaccctgtgtgagaattcccttttctcaacatccttgccaaaacttatcttttatctagtctagccatcctaacaggtgtgagctgatatctcactgtggttttgatttgcatttcccrgatgattagtgatgttgagcactttttcatacacctcttagccattctgtgtctttttttgagaaatgtctatttagctcctttgtccattttttaattgggttatttgttttcttgctattgagttgtttgagttccatacatatttgggatactaactccttatcagatatatggtgtgcaggtattttctcctgt

SEQ ID NO: 738123 - DNA, 625 bp, Homo sapiens
agctaaagttgcatccaattctagccataaaatcttgagaatgtagggttgctttactgtttctgtggttaaatactgaagctcaaacactgtggaaattagtgtaaagaaacattccaaagatttgtgactgattttttacagtgtgataggcaattactcctttctttggtccattttaaacataatctgttaaatttctttattaaagtatgataaactacagagctgacagcttactgatgtttccattaaatatgtgacataagttcagactccccaccacaaatagcctttatttcagtaacatactaagtataatgttactgtggattgtcacatttctttctaaagggatgttctgtttgcaaagtcctgttaaaatactttgcactcattaaaatgctaaaatagaaatttgtaattaatttccaacactttctcaagaaacgttcagctgtaagagtaaccatacacaatgtttagaragactattatctcatatcaaaattaactttgctttgttgccacagtgaaattgttagaaaagctctgtgctctatgtagatcccatattatagacacatgactagagctatttatgtatttttaggaatacttgcaa

SEQ ID NO: 738124 - DNA, 654 bp, Homo sapiens
ttacactgggcccacacactaatccacaataatctcccatcttaagatcctttatcacatctgcaaagtcccctttaccacataaaacaacatattcacaggttctggggattcggccatggacatctttggggagtcattattcagcctaacacagagattgaacataaaggcactacagagctttggaaactaaactgacaatggaaacacagcccacaggaactaggccaggacttttggtctggacctagccgagttgactgtctgctaaaacaaaaaaggtcagccttcttcccaagactgtaacagggcccagaacagcataaagaatattcaaaatgttcaggacacaatccaaaatgacttgacatacaaggaactaggaatacattaaacaaccctaaggaggaaaagcaatcaagaaagccaaccacaagactgctcagatgctgaaataattaaaaactttaaaagaaattctyagctccaaaatggcagcgtagaagcaagcttgtttcacttcccccactccatccagaaaaccaaaaacaaatatacagtgccaagaccatcaccagaaatatcccagaactcatatatgaaaatgagacagttctcaggattgcagagaagtgaaaaacctccaagcag

SEQ ID NO: 738125 - DNA, 565 bp, Homo sapiens
acctcccctcaggggctttcagtatcccgtggcattcagctggataatcagggtgccagggacaccgccggggccaggtcctccatggccacgtcaatagatgggaccaaaagaattctctggctcctccagaccaaacagccaaggctgcaggcagagagaattgattgtgaggatgtggcttgcagcatggatggtggttgagagcccagattytgcagcagactgcttgggtaaattcaaactccacttcccactaaccccatgaacttctgctagaaaaagggtgtctctaagcctcagtttccacatctgtaacttggaggtaatagtgccatcctcacagacatgctttgaggattaaataatgtatgtaaagtcttaacccagtgcctggcacgtagtaggctcgaataatattagctgttgttatgaccactactgtaaatcctaaagattcttggaggagaaatcgggtctggagcaccttagcctcaggaccaccactgcttttaaagcaaggttgtccaaaataatctcccaagtctgactgaatggctcacaa

SEQ ID NO: 738126 - DNA, 578 bp, Homo sapiens
ggcagttacaggagttgaagtaatttacgtggtcataagggagtaaaattctgccctggaatgtgcatgtgtattcaagcctccccctctgtggtttgccacaggaaagcatggcaggtctgaggtctttggaagccttgctcatgattgcaaacgagaccaggccagggtctgtgagagcttagccatgcacccaacctcattgtgatgtcctgacatcttctagattgcaaacatcaacgtgttcctttgcatgagaccactggggtgggagggttactcttagctctgagatacccagtgagaagcgtgagggcaccttccccactcagtagtgcatctgaggttggtaggtycccaggctagcccaccacactgactgacatgatcttgtctgatggagacccaggggtttccatcccacatccgagcatgttgttattcatgccccagcctttgcacagggccgtgctgtttgcacaccaagccctccgcagtgtgggggtggtagtggagggctcagttaatagctgctgctttgatatcaggctgtgaaggacactcttggggctctggag

SEQ ID NO: 738127 - DNA, 630 bp, Homo sapiens
gtcgtttggtgaaaaatatgcagaagtttggctgcaacttcatctccagccttggttctgtttgtggcttcactctcctctaggcaaagcatccagccccaggcagagcctcttccagtccccattccctcgtgccacttgccgctgcatccacagagccattttacactcaccacttagaaccaatggggtttgagacgggtcgttagaggggatatctggtccataactcgggggtgagaactgaatgggagctatggcctcaagaagctttgctcactttcactcactctccggggacccctggcaccactatcataggaatgagcctgggctagcctgttggagcatgagagaccrcgtggagcagaaatgagttgtcccagatgagacatttagaccggccagtctctgccaatatcagccaggcctgacctagatctgctgagtgtagcccaaactgccaaaccagagtcacagtctaaataagtgctcatagcagcattgtttacaatagcaaaatggtggcagcaacccaagcgtccatcaaaggatgaatggttaaacagtatgtggtatctacatacagtggaatattagccagccttaaaaaggagggaaatcctgatg

SEQ ID NO: 738128 - DNA, 557 bp, Homo sapiens
ttgacctttgggatatgtgcataaaattactgaaatgaagtgaacataataatttattatgttttctaagaagattttaatattattcagagtgaaagcatgtatttattcttcctgaaaaatagtcatgctaagtattttactactttgtgtgaagcaatagtggcacctggtggtttcatttagtaaccacagactttttgttttgcttgaattttgaatgagcccagtcatgggctgcaataactagtgagtctattccacataggtcctcagtatggtttatctaaactggtgacttctrtgctcagaaaaacactaatgttcatatgagtaagatatatctgtttttttcaggcttaacaaattgcaagcacagaaaatgtactggctatttgaatatatagaattttcttttcttttctttttttttttttttttttttttttttttgagacagagtcttgtgctgtcacccaggctggaatgcagtggtgtgatctcagctcactgaaacctctgcctcgtgagtccaagtgattttcctgcctcagcct

SEQ ID NO: 738129 - DNA, 543 bp, Homo sapiens
acactaagaggaaccttcaaaaccataaaaatatatgtaaactaaacaacttgcacatgaatgacttttgggtaaacaacaaaaaattaaggcaaaaatcaaaaaattatttgaaacaaatgaaaacagaaacacaacataccaaaacgtctacatcaagaagatagaaaagtcctaaattaacaatctaaacttcacacataaaggaactagaaaaacaagaacaaactaatcttggccgggcgcggtggctgacacctgtaatcccagcactttgggaggccgaggcaggtggatcatgaggtcaggagatcaagaccatcctggctaacacagtgaaaccccgtctctgctaaaaatacaaaaaattagctgrgcgtggtggcaggcgcctgtagtcccagctactcgggaggctgaggcaggagaatggtgtgaactcgggaggcagaggttgcagtgagccgagatagcaccactgcactccagcctgggtgacagagtgagactccatctcaaaaaagaaaaaaaaaaaaaactaat

SEQ ID NO: 738130 - DNA, 639 bp, Homo sapiens
gtgttcagcccctcttcctctccatgtgatttccctagaagtcatccactttcatgccccagctagtcccatacggtaaggagtcccaacattctctccctgtcagagaccattctcctgacccgctggaagggaatggctcatattcaaaatgtctaaaaccgtacccattatctgaccctcaacacctgtccctccacctctacttcctattagaaaaaaaaattactcaagccagaacctggcaaacagctcaatattggttcaggaaatctctctcttaaccaataaaatctcaatgccaagccrgttccccaaggcactgggcacttgacatcactgctggccaaatctatgtgttcatgaattagaacgtagctgagaagaacaagataactatatccacctggcagaagtagatatttctctaaaaagtagtttaagacatatagcgaaattggagaatcgtaacactctttccaactttgagagagcttgttcccctctgcaccctggggaaatcagtcttcttaatgttttctcttttcacagctatttatgacagtttagaaccaagctcaagtcctgtatctcctggtttaagtttcctttgtgcaaaagaaccttctttttccaata

SEQ ID NO: 738131 - DNA, 639 bp, Homo sapiens
gtgttcagcccctcttcctctccatgtgatttccctagaagtcatccactttcatgccccagctagtcccatacggtaaggagtcccaacattctctccctgtcagagaccattctcctgacccgctggaagggaatggctcatattcaaaatgtctaaaaccgtacccattatctgaccctcaacacctgtccctccacctctacttcctattagaaaaaaaaattactcaagccagaacctggcaaacagctcaatattggttcaggaaatctctctcttaaccaataaaatctcaatgccaagccggttccccaaggcactgggcacttgacatcactgctggccaaatctatgtgttcatgaattagaacgtagctgagaagaacaagataactatatccacctggcagaagtagatatttctctaaaaagtagtttaagacatatagcgaaattggagaatcgtaacactctttccaactttgagagagcttgttcycctctgcaccctggggaaatcagtcttcttaatgttttctcttttcacagctatttatgacagtttagaaccaagctcaagtcctgtatctcctggtttaagtttcctttgtgcaaaagaaccttctttttccaata

SEQ ID NO: 738132 - DNA, 562 bp, Homo sapiens
ttcactgacacatacacacccgcccatttcattttttaatgaggacatcatacccacagagatttgccaggaggctagctgtgtaatatacacattacccacactgtaaacagagctcacttctgccatgccaagtaggtacgacttacccagctaagggaactgagaccctatgagactgtgcaacttgcccaagaaagactagctaagagtggaagtstttctaacccaaagccatctctatgtgttacagcttactgttttcctcttttctttgctagtggtaacctgggggaccaagactgatgaggatagataagaaatatgatatttaacgtgattgcttcatatgatctgttctcatgagatccctaggggaactgactaatgacaaccacacatgaccccctgtgccaagatggcaaaaagcagtctctgttctccacgagaatgaaataaaatgcactgcaaaaggcatggcactggctaaacagggcataaaaccttacacaagtcagctacctgcatgtgttaaatctccctctaaagagtcttaaaaagg

SEQ ID NO: 738133 - DNA, 609 bp, Homo sapiens
gccactttacttcctgtacagcctgcagaaccatgaatcaattgagcctcttttctttataaattacccagtctcaggtatttttttatagcaaagtgagaacagactaatacaaccatcctgaccaagatcttgttagatcttccagttaataccaggatggtagcgtcatgatccattcttctaatacacagggaattattttgttttgttttgtttttygcctccaaatctccccaaattgtgaggatactaacaagactagacccctatccctaaggtttcaattatctgagcctgacagcagatatggcatcagtcttccaaactttctgcgaaccagaacttgaagtaaaccccaacttgtggcctattcctgcctggcagtaccccactaagatgtctctttacagattcttctcttctgccagatagccaggtcgccaagcctggctaagcatatgttctaatggagattaaaatacctgtagtgtcttctttgagacaaccataacttggattaatattctctttgagcctctcgccctactcttagtggcagatttagagtaaaggaagcaattaaacttgctttattaacattgtact

SEQ ID NO: 738134 - DNA, 614 bp, Homo sapiens
ttatacatttagaacatttcatgttttgtgttctaatcaaaattgaaagtgtgccatattaacaacaaattctagtaatgatctcaagaatgtgcaataataaaaatattttaagcattataaaattaggaatagaaagatatgtaagcctttacacagtcaaattgctgctgtccaaagctgtcaccctagaaaatacacaytacatctctcccaatagcaaatggtatttaactgagattccagtatcttgtttaaagcattgaagattcctcttttggaaatgcctcctgaacctgcaggcactctttggaagattctgaatgttaatagtcgtcatattttgaggatagatttcattttattccaacagcaacaagttatttgaaactaagtttgatggatgagataggtgagttagctgtatgatagacaattgagatgatgatatgtttcataaaacagtttctccaagtaattccaaagaataatagactttcagggttagcaaataatcaaattcaagcttcctcgccacttagcaacttgttctgcgaagaatcctgaaaaatggtcagccagcttcagcttggaatttctaagtaacaaagatc

SEQ ID NO: 738135 - DNA, 624 bp, Homo sapiens
ttagaaataaacagaaacttgtcctatcaacacaatttttgttaaaatgtttctaggggatacaactagaatccatttaacattaaacatgcacaaactcattaagttgactgacaaggcaatattttaaaaattgggagggacaggggcaaagaaaacctcattaatcctgttatggaaaggtcaatgctcatatcaatataataaggactatatttttttctggcagccaaactgtctaccagaagagtaaatggataagtaaatcctcaaaaactggagaatagtgtctggaaaaaaacatcatctgaaattagttgtaggccygtgcttataaaaactctcttgtaaatatagcacagactgttaaatttacattcataaaacagtcagtactccccaacaaaagcaaatataaatatcttttgacttttcagaagactaccttttaacctaatttctaaccacaaaaattagagaaaaaggggccccttatccaaactgtcaggtaacaatctatgttgataacatcaatctcaatgtaacctccaaaacccaattcaaagcaaagattttgggggaatttcaagactgtaatttgctacagtgaagaacttcttttgg

SEQ ID NO: 738136 - DNA, 466 bp, Homo sapiens
gggtggagaaggctttgaagtcggtagtgacgccgtggagggtgaaggcttcggagaactgaagaggtgaacacagggccagcagataagcaacctaaacaaccaagagtgcactcccaggcacagaatgaagaatttctgacaatgagtttttgcctggcttttgcttagtctagtttttagagctatgaaggatgatgttcctgaacttggctaagccagaaatggaagaggctattagcttagcagtagtctatgaactttcccccrgagctggagctctggatctcttgcctcagttagggcttccctgtagctttctctctgtctttctgtattgaataaatcaatctagggcctacaagagtcctgggagatgcattttatgcgaatgtccatttttcttctgagagtattcaaagccttcactggagcctgtgggatccctccttgaaaagttaaacct

SEQ ID NO: 738137 - DNA, 630 bp, Homo sapiens
tggggaaaagaatcacttaaaaggatcccttatcctttactcgttacaaaaaaaaaaatactgactcttgatacctggatttttctcattcttttcagactcctcaatgcctaattgaacgggattttgattcgctgttctaatatttcacattcaatctcatggttgaaaacacctttctcatttgccacagagcagttgcaattctgcagtgatttacagttttgcaaaagtggagtctatttcctaatttaggatgggttaattaaaggtattatgcacgtacaaaatggaatacgttctgacatctctgatctctctctctctctccattaagtaaaagcaaacaaaaaaacaggttacaaactagtttgaatgcattgtcttaaaatgtctgtatgttttattaaaataacaaatgcatatgccttctgactcaggaatttcatttccagagatacttgcaaaattgcacaatgatatttctamattacagcatcttttgggataacataagattggaaacattttaaatgcccaacagtaggagcctgattaaagaaatctcgaattcccaaaagtgggggttcacacctgtaatcccagcactttgggatgccaaggtgggag

SEQ ID NO: 738138 - DNA, 563 bp, Homo sapiens
tgcacaactgcacctggttagttgctatttattgagtgtttctgggctctggactaagtgcttcatgtattttcccatttaattctcaacactgccctttgtaggaagtgctatttcctaccctttccatcttacagatgaagaagctgaacccagaaaggtcaaactgtttgcatagaactccatagcccaaggtcttaaccattacaatccamccccctttttttgtattcagaatggcggttagggctaacagtctctcaggacttattcttcagtactttggccaaataactgtctccacttttagctgcctggtgcctgctcctggcctcactgctgtctctcctgtcttcacagaggaagaatgttccaccacagaccatccctataagaagccctacatggagacatcacccagtgaagaagattccttctaccgctctagctatccacagcagcagggcctgggtgcctcctacaggacagagtcggcacagcggcaagcttgcatgtatgccagctctgcgccccccagcgagcctgtgcccagcctagaggac

SEQ ID NO: 738139 - DNA, 647 bp, Homo sapiens
tggacatgtggtaagtaccggcgacacagcagtgaacaaaaagagaggggctgtgtcctttggaacttatgatttagtgagagagagaaatagcccttaggaaattatgtgcatcctcagtggattgcagtggtggaaattactacaaagacagagtgcccaatggcataaagggataaggcaaggggtcctaaccccatctgggggaggtgactcttgagcacagccctaatgatgagtaggaattaatcaggtaaaagtttgggaggaaaagtattgcagagagagggaacagcttgtgcraagtcctgaggcagaaattgtgatggaggaatgagatgtaggtttgtaagtgggtagtaatcacctagttcacatgccttcattcagtaaacaggtaggaaggttctactatgtgcggtcgatatctttactcatacaggacctactaattgtgataggctcctttccaggtaatttctaaagttgcagaggacagactctggatgtgtgagatggtaggtttttttgtactcaggaatattacagcatccgcctggcttcctggtcctctacagtttaggacccaagcttataggacagaagaaacacaagaactttcaagagggtcagctcattagtattct

SEQ ID NO: 738140 - DNA, 634 bp, Homo sapiens
tcaggtaaaagtttgggaggaaaagtattgcagagagagggaacagcttgtgcaaagtcctgaggcagaaattgtgatggaggaatgagatgtaggtttgtaagtgggtagtaatcacctagttcacatgccttcattcagtaaacaggtaggaaggttctactatgtgcggtcgatatctttactcatacaggacctactaattgtgataggctcctttccaggtaatttctaaagttgcagaggacagactctggatgtgtgagatggtaggtttttttgtactcaggaatattacagcatccgcctggcttcctggtcctctacagtttaggacccaagcttataggacagaagaaacacaagaactttcaagagggtcagctcattagtattcttgagctcagagaggttgaaaattccccccycagattacacagctggtgtgtggcagggcttaccgtgaaacctaagttagcccaagccttaagtttcctcctctataaaaaggagataattggctgggtttggtggctcatgcctgtaattccaacacttcgggaggccaaggacggaggattgctgaagcccaggaataagcctgggcaatatagcaagacccctgtctctacaa

SEQ ID NO: 738141 - DNA, 622 bp, Homo sapiens
ttctgtgtttttctttttgcaagaggcgggttatttcacacatttctgcctgctgcagaaaactattcctcttgtgaggtttaataaaaagagtttcgacggcatcttgtaatttggcgaagaaagaaattctctaaaggacactgggtttttgttttgttttgtttttggttcctacccagtggcttccaaaaatacccacgccttatctttattggctcttccagaagtccagacaaatttgacgggcagcttgcttatcacggagagcctgcgcaggggagatgcgggcctcacctyctccgggtctgacgcgggtcttttgcaagaagttgtgcctgcttataaagtaatagtaatactactaggaatactagtaacagtaataattctagggccttctgcagtcaccttcggctgggaacggaggtgctggtagctggaaactgggggccaaactgctccctcctgtcactagaattgtgctctccaacctttctctcgttctctctctgtcctccccacccccatctccccctgcttcttgtcctcagagcagaaccttgcgcgggcacagggccctgggcgcaccatggccgacgcagacgagggctttggcctg

SEQ ID NO: 738142 - DNA, 579 bp, Homo sapiens
cagtcaccaccacacatatgcacccacaccagttagaaacaaacttgtcaaaccatagatgggccacacactcaaataccacaagaaggcatcccactgaccttatgaaatgcctagtgggaagaaaggttgcttaatggctctggtgctgccatttcatttctgggcaactgtttctgctggggtcagttttctcctctctgcctttttaatatttttcactccgagacagggtctcactctgtctgtcacccaggctggagtgcagtggcacaatcatggctcactgcagccttgacttcccaggctcaagagatcctcttgcctcagcctctggagtagctgggactataggcacacaccatcattatgctcagccaatttttaacttttgttttttgtaaagacrgggtctctctatgttgccaggactggtcttgaactcctggcctcaagtgatcctcccacattggttttccaaagcgttggtattacaggcatgagccactgcacccaattttgccactcaactggcaacagcacaggtggcaaagttgccgggatccttaggattggact

SEQ ID NO: 738143 - DNA, 602 bp, Homo sapiens
gtgctgctaagactggcaagtcaaacaagcatcaaaaatattccagaaacagtttataaccttaaaatctctagcaaagatagcatctgacctacctaattcagatcaaatgtctatattaaatcctgaagatgtttctattttatttcgccaataattataaaattatctttatttactaaagattattaaggtcatgtgaacgaaaagacatttgagttaaagtttctrgttttttgataaagtatttgatttaagcacttactttttttctttaagtcaattaattggagctctattatatattttggtagtgaaacatcatacacatgacacagatacacagatagaagcagatcttaaaggtttatacaagtctcattagccagtttttaaatagttttttttccccatacactcttccaattgcctattttattgccctaggcaattattatctaggtaaccctatacctgtctttataaaggaacattcttaggtgaaatgagatagaaaatgtatatttcaaaagcacagagctaagacattagtcctatatattgtaccatcatttgctcaaaccaaggaaaaaatggtataa

SEQ ID NO: 738144 - DNA, 626 bp, Homo sapiens
taccagattttacccaggacaacagccgatatttttggcttttgagtttctttaccaaaggtatctttctaagggtctcaatcaaaattatgacttaatcatgggtgcacgagttatctccaaagaggtggcaaacaatttttacacgatccagaatcaccctagagatagctcagagaaaggaaaacacaggacgagaaatcggaaactgtccatggaaggaaaaaggaycaataaatggcaattccctggctgggtattgaacccacgcagcattagtcaaatgggagagacttagctactgtactacggcatggggtggtgcattagcctgtatttgcattgctataaagaaatacctgaggctgggtaatttataaagaaaagaggtttgattggctcatggctctgcgggctttaaaggaagcatggtgctggcatctacttccggtgaggcctcaggacacttacaatgatgatagaaggtgatagggagccagcatgtcacatgccaagagtgagtgagagagagagagagaaagaagagagatcctagactcttttaaacaaccagaacttgcatgaactaagaactcacttatcaccaagggaatggtgttcaactc

SEQ ID NO: 738145 - DNA, 530 bp, Homo sapiens
tcctttaagaagatggttcactgggctaggaaatataaggatccctgtttatattctctgtaaagttttggttgtgaaaaagggtgttctggggactgggctttctctggcctgtctgtgtgctttgtataatgtctgcaaaaaaagctttaattaattaggcctaaagaaagacaagcccttggatcaaatttttttaaagagaagataaaagctgtaatacctttcagttcycatgattttaacctttgagaaataaaaacagccttaaagattattggtaaaatgcaggtgtcattaaaatgtaaatagttggactaaattctgcaggtcagatgcaaggtttgctaatggtcttaaggttacaaactcattaaaatgtaaatagttggactaaattctgcaggtcagatgcaaggtttgctaatggtcttaaggttacaaactgcttttttggttttgataactatttgacttgccaactttacaactggtaaggcctgtggacatatgaaactaaccatgccctt

SEQ ID NO: 738146 - DNA, 647 bp, Homo sapiens
ccttaggtggatcctccaaactgggaaaagttaatttcccaaaccttaaactggttggcttaggatcgggctcaggggaaggaaacccagaagcctgacatgctggcaaaacggtaaatttttttttttttttttttttttaaccagtcgaggttttggcctccctctctccatgcaaagtgatataaggcctctggattttttagctatccttacctctcctcttgtttcattttgatacatgttttctaatgacccagtttgtctcttctcgccttcaggccatcaaactccaaaaggtcatgcaaccagagcctcaaaaaattgccctttctgctagggacccttagataggcctctgagggagctctgactgccattttccccaaaacagcgcckcctgtcagcagaaagcagttaagactggtctttgtttttatccttacccttattccaattggcagttacatgtacttctttaaagcgattaatgagactgccaagtaaaaagggctccctggagaatcttcagccagcctgagcactgggagaatggggtgaagacttgggaattcacaccatttgctggggagaggagcctggcctctcttgttcttgggtggtaacctgggatttggccagtgagg

SEQ ID NO: 738147 - DNA, 624 bp, Homo sapiens
agattctggatattaatcctttttcagatgtatagattgtgaaggttttctcccactctgtgcgttgtctgttaattctgctcactgttccttttgtcatgcaaaagctctttagtttaattagatcccagttatttatctttgtttttattgcatttgattttgggttcttggtcatgaaatccttgcctaagctaatgtctagaagggtttttccaatgttatcttccagaatttttgtastttcaggtcttaagtttaagtccttaatccatcttgcattgatttttgtataaggtaagagatgaggatccagtttcattctcccacatgtgactagccaattatcccggcaccatttgttgaaaagggtatcttttcccgactttatgtttttgtttgttttgtcaaagatcagttggttgtaagtatttgggtttatttctgggttttctattctgttccattggtctttgtgcctatttttataccaatatcatgttgttttggtgactatgaccttatagtatagtttgaaatcaggttgtgcgatgcctccagatttgttctttttgcttagccttgctttgactatgtgggatcttttttggttccatatgaatt

SEQ ID NO: 738148 - DNA, 624 bp, Homo sapiens
agattctggatattaatcctttttcagatgtatagattgtgaaggttttctcccactctgtgcgttgtctgttaattctgctcactgttccttttgtcatgcaaaagctctttagtttaattagatcccagttatttatctttgtttttattgcatttgattttgggttcttggtcatgaaatccttgcctaagctaatgtctagaagggtttttccaatgttatcttccagaatttttgtagtttcaggtcttaagtttaagtccttaatccatcttgcattgatttttgtataaggtaagagatgaggatccagtttcattctcccacatgtgactagccaattatcccggcaccatttgttgaaaagggtatctyttcccgactttatgtttttgtttgttttgtcaaagatcagttggttgtaagtatttgggtttatttctgggttttctattctgttccattggtctttgtgcctatttttataccaatatcatgttgttttggtgactatgaccttatagtatagtttgaaatcaggttgtgcgatgcctccagatttgttctttttgcttagccttgctttgactatgtgggatcttttttggttccatatgaatt

SEQ ID NO: 738149 - DNA, 618 bp, Homo sapiens
gttagtacattctctgatgtttgcacaatgacaaatcacctaatgatgaatttctcaaaatgtatccctattgttatgtgatgcatgactgtatatacacatatacaatatatattcacttataaacaagtatgttcttttatatataccatgttttctatttttcattcttttcagattcagttaagatctatacaatgcaaagtgttaatattgttatatttttcctaaacacatctccttactaggatcccatgtgtgctttgaggaaacttgtagttaatgagattatgtaatgccaaarcatgtaaaattagtctaagggagaccaagatgctgtatcaatcagggtcttagttgcaagctgcagaaactgacttaggcaaatttaagcagagaaggaatttattgaaagtattttgggcagcttacaacctctctgggagcgcccagggactgtgttcaaaaactagaaggaaggctagtatagggcctcacattgcagagctgactgaagacctgctgttgctgcacacatgagcactgcaatttgtgccatccatgtcagtgttactgtcactgggcagtggacactgctactgcctctgtccttttata

SEQ ID NO: 738150 - DNA, 624 bp, Homo sapiens
ttttttttgagacggagtcttcctctgtcgcccaggctggagtgcagtggtgcgatctctgctcactgcaagctccgcctcctgggttcacgccattctcctgcctcagcctcctgagtagctgggactacaggtgcccaccactacgcctggctaattttttgtttttgttttttttttttgagacggagtcttgcttatcgcccaggccaragtgcggtggcgtgatctcggctcattgaaaactccacctcccgggttcacgtcattctcctgcctcagcctcccaagtagctgggactacaggcgcccgccaccgcgcccggctaattttttgtatttttagtagagacggggtttcaccatattagccaggatggtcttgatctcctgacctggtgatccgcccacttcggcctcccaaagtgctgggattacaggcatgagccaccgcgcccggccctgttttctccaactttttgttatgaaaaaattgaaacatacataacatttgaaagaatagcacaatgaactaggatccacctgcatgctacttagatccgaaagttaacattttggtgcattcactctatatatgtataataaaagcataataaatgcaca

SEQ ID NO: 738151 - DNA, 468 bp, Homo sapiens
gaaccttactaataagacaatgactacaggagtagcaatcgatctttgaaattccctacccttatctgcaaacaggatgagataaaaggtgcctggcacagagtggatactcaaatgttaatttccttttcctctcttaccctcaattctgaaatgaacrtgattttcttacctgttctttgtgacctttgaaacagtgatcactagaaatgaaggcactatgttgggagaaggtacaacattcttccattaaagcaaaatgccagagaggacagccttacctgacatagagagagatgggtaccatggtgttgagaacaatgatatagccccagaaaatgaggaatccacggtaggagggtgtatcgtcttctccatcatagaggtaccaagaggaattgcccacctgtgcttcccaataagcatggccgatggcaagaccagcagaaagcagaataagaacaacaa

SEQ ID NO: 738152 - DNA, 594 bp, Homo sapiens
attttttcctcctgtgtttttttcttgaagcttcaaaaaattgttttagggaaaatgaaaagaaattcttatttatacaaatcaatctatgtaaaaaactcatctttcttaaggatttgtcaaagtgtgttttatggtgttaataattcttgaataaaaaaaaggattccatgattcactcatttgggattatttttcagtgacttygatatgctactgagcttcatgactctctacaagaggatgattctaaatattcccaatgaattataaattttagctatttagattctgttatgtatcactgaaatctaagagaaaaaatacatttttgaaacgtttaacagcttattgagtgtctttccacacactctctcatttagtatcctgacaacaagcatatcaggtagatgttattaaactatggtccagaaatagctagttattttctcaaggttgcatagtttgtaagtggagaggccagaacctaatcctaggacttttgactgcatattttgtattcttttcattccaatcactctttataaggttaaacaagagaactcagagcccttaggctggttcagaacctgc

SEQ ID NO: 738153 - DNA, 638 bp, Homo sapiens
attctttgattaactgtcccagactccacatgttaggggaaggtgattttccaaaaggaaacaggctcacagttgtcaaaaacaatgattgtctaccatgttgcagtcccacgatgcattttctacattgaccccatctccagctccaactgctgtcctccacatrttagggccacacctctgaagaggccacatgccaatgtgccaactctcctttgcttcctgctatactttttactcaaagctgcaaccttcatatggagacagcataaaagatattgatgaagaaactctggtggcttcaaagagcactctctgttgaaaaggaaatggcagtcaaagccctgttttgaaaaaacactaggtgtccgtacttgggaggggacctcatggaaaggctggaaactctttctgaagagattgttctgcctcaagagaagtatgttttggccactgattgtttctcaggcaaatttaataggctgcattagactgatgagaatgcttcccaaaagaattaactactcaaacttaacttatatatcttcacaggcatttaatgaaaatttaaatgaattatatttgatacaattattgataagataggttttacatctactatttaaaatttgttttct

SEQ ID NO: 738154 - DNA, 638 bp, Homo sapiens
attctttgattaactgtcccagactccacatgttaggggaaggtgattttccaaaaggaaacaggctcacagttgtcaaaaacaatgattgtctaccatgttgcagtcccacgatgcattttctacattgaccccatctccagctccaactgctgtcctccacatgttagggccacacctctgaagaggccacatgccaatgtgccaactctcctttgcttcctgctatactttttactcaaagctgcaaccttcatatggagacagcataaaagatattgatgaagaaactctggtggcttcaaagagcactctctgttgaaaaggaaatggcagtcaaagccctgttttgaaaaaacactaggtgtccgtacttgggaggggacctcayggaaaggctggaaactctttctgaagagattgttctgcctcaagagaagtatgttttggccactgattgtttctcaggcaaatttaataggctgcattagactgatgagaatgcttcccaaaagaattaactactcaaacttaacttatatatcttcacaggcatttaatgaaaatttaaatgaattatatttgatacaattattgataagataggttttacatctactatttaaaatttgttttct

SEQ ID NO: 738155 - DNA, 669 bp, Homo sapiens
ctccctccctcatagactcatagtgagaaatgagtaagatggtgtgaagtaaaatgcttaacccagggcctggcgcataacgaatgctttgaaattgctagccctctatgcaccaagcaagccctgtgctaagaggtggaaatagaaatgtgtaatacataggacatagtcttttgcctcaaggagctcatagatataataaaagataaagatggcttccctatagagattttctcatgtccagtttgggactgtaatgtagcctgaacccttccacccacctccccctgcccatccccaccccttttcaaactcctaagtctgtcctgtctagtcccagttgggcaaattgcagaacctcacgtttggtggaatggtctctgatatggtttggatgtttgtcctctgcaaatctcatgtcgaaatgtaactcccagtgttggcggtggggcctggtgggagctgtttgggtcatggartcagatccctcatgaatagcttggtggtgtccttgtgataatgagcgggttctcactctgagttcatgtgtgatcttgttgattaaaagagtgtagcacctacccttctcttgctgccgctttcactatatgcatgcctgatctgccttcaccttccaccatgagtacaagctccctgaggcctcaccag

SEQ ID NO: 738156 - DNA, 681 bp, Homo sapiens
tgatatgatggcacaagtgaaaattccacacctgacacctttgctttctgatagttcaacgtatacaaactttaattcatgtacaaattattaaaaatattgtatacaattaccttcaagctaaggttatgtgtataaggtgtataagaaacacaaatgagtttgtgtttagatttgggtaccatccgtaaaatatctcattatgtatatgcaaatactcccaaatccaaaaaaaaaamaaaaaacaaaaaacaccaaataacacccgttcccaagcatttcaaatgaaggatactcaacttgtaatgtatagattcagaaacacgagctagagaacactataggtattgttttactgccaggaaaaggagcccaagagaggctaagtgacttgaagggctacacagccagtggacgacggagccaagagtgaaattcacaacccagctttttagtcctggaggcttttccacaccacctgttgtctcttctgttatagcttctatccactgaactttgcacattcaaagtgacctcaaagagccctctcaggtcacttggaccaatcttctacttgcttttttttttttgtctttttgcaagccacctcaaagagcactctcgggtcacgtggactgatcttctacataaaaatctgttctaccgcatcatttatgtatg

SEQ ID NO: 738157 - DNA, 558 bp, Homo sapiens
gtcagagaatcagaaagtcaagcagtggtgaaatcaaagctcccatctctgttcagcaacattaaatacaaaattcctgaaaaaactaggaattagggtaggagttatgcacattaactcacaagcacaacacagagctgaaaagggaatctgaccagcacccaattggttaaaagcctaaggccaaggatactctcatgccctgtctttcagcaggcacaaataataaacagaaagaaagagagagaacagggggagtaagagggacataatgtccacggcttggtgggagagcagctttctgaaatcagaggaaaattttggagggtgatttgacattgttggtagaatgaaagaagacaaggcctctaccacgaaacagggtaaaataatgagagargaaactgagatgtaaaggcaacagatgagatgagaatggagatagtggaaataagaagggcttgcatggaaactaaaaggcaaagagattttctaaagactgtggtggaaggacctcttaagcccaggaagttgaggctgcagtgagccatgatcaca

SEQ ID NO: 738158 - DNA, 570 bp, Homo sapiens
gaaaaccatataacacagtctcaccttacttgatctggcagtggctttttacaatgaaaacccaatatttcttgacattctcttgtccctctgtttataagacatgagtctcctgtttctcttttgacttctctgacttacgctttccagtttccttaatgggctctcctcctctgaccactgggttctcctttcagagttccatcatttattccctcctctyattgccctgcacatgttctcttggcgatttcacctctggaacttccaccactgccatatggaatagtgatcctgcgtgtgtgtctatgtacagcccccatctcccttgtgtccttaatcaaaatttccagtgtctttggaatgttcactaatgtttccctgtaaacccctcaccattagggcatacacatttcattacctaccctccctaataggcctttatttctattaagaacattgtactctacttcttctctttgggaaaaacctgaaagttttcggtcttcctcttttttccactgcacatttatttgctctttatatcccatcggttccacctcacaagta

SEQ ID NO: 738159 - DNA, 608 bp, Homo sapiens
tacttcatgcccactagaatagctaaaatctaagactgacagtatcaagtattggtaaggatgcagaacaattaaaactcacatatattgctgatggaagtataaaatgatataaccactttgacaaaaagtttggcagtttcttataaagttaaacacatcttctgattcagcaattgcagttgtaggtaagtatccaaggtaagtgaaaatacatgttcacaaaaagacttgtagaagaatgttcatagcagctctattcactgtagtcaaaaattgaaaacgacccaaatgtccatcaacaacaggatgggtaaacaagttgtagtatattagcacttagcattaaaaagawtgaattactgtactgatacatccaataacatgaataaaacataatgctgaggaaagaagctgcatacaacagagtatatattgtatgtttccacttatatgaagttctagaacaggtaaagctaatctaaggtgaaaaaattcagtagtgcctttgagggtttggggcattgctcccaagggaggactttttttcttacgagatggaaatatggtgagggtatagacacacagctcaaattgttcaattaata

SEQ ID NO: 738160 - DNA, 589 bp, Homo sapiens
ttaaataactaattagaatattggtctatgctgaaatctcaaattgctttaagatctttctactaagagtatgctagtattactcatctcctcttaggtctagtcttagaggtgtcatccatatacctcaacagtaaagagtgttggttctgaagatgttagttgtttctcagatatttgatattatgacactgtaggcagtcatatcctgactgatgctttctccatttgtggaaaagaagacaggtgctgttggaggaaactgaaatctaaagagactctagattccttggccgtgatcatggtaattagttggcatcaagaactctactcaaaactcagttcactgaggctccacacacagttatcacctgggctttaaaacttttttctaaaaggtagcctytcccttgacctattctttgtttggaatactgtgttttaagaagctgagtcaagaacatccatggcaggtaaactataaaaaggtaatttaatgcaactaattgagtcttaaattattactgctgttataacattgtggtctgaatggcacactctagcatagctatacgggatgacctttatt

SEQ ID NO: 738161 - DNA, 516 bp, Homo sapiens
caaaattaatcctagaaaccagtgaaaactaggtaaagctccttcctttagcccttcttagagtaagatgcaccccttaccaggctgggttttcaccttttgaaatcatgtatggaagggctccgcctatcttgcctaagctaaaggatacccatttagcagaaatctcacaagctaacttgttacagtacctgcagtctctccaacgggtacaagacatcatccagctgcttgtcaggggagcacamcccagcccagttcctgaccagactgggccctgccactctttccagctgggtgacctagtgtatgttaaaaagttccagaaaaaaggactgactcctgcctggaaaggacctcatactgtcatcctcaccacaccaacagctctgaaggtggacggcactcctgcttggattcatcattctcgcatcaaaaaggccaacaaagcccagcaaaaaaaatgggtccccaagcctaggccaggccccttaaaactgcgcctaagttgagtaa

SEQ ID NO: 738162 - DNA, 586 bp, Homo sapiens
ccacgtggttctgagatcggcttatcagctgattcctgcccaaattgccaacccacaaaatcacgagcaaataaatggttgctgtaataaccagttgggttgttacacgaaaacagctaatagatataccttcttaatctcaattatctaaaaaagatatccctcctcactgattcatagctaagtggttctagaaggaatatttttatgaataatacacatttctttattctgtgcatcacatgaaaatggtcagaatcaaaatggagtcactaatgttaaaaaacaaacaaaagactctgacaaatacagctgggaagaccatgaaaagagggttctaatggttgtacacctgaaaaccaaaagtaccacgaaagacggcgaacaccacaaccttgagcaaaggccattscaactgaacagaaaacatactctgcaaggacctctgaacaactgcctgtccaacctcagactaacaccactttcgtgattgatctttggagccaaggctaattaattcaaagaaattagataatcctcattttttccttaaaaaatttttgttttcctttattttcccaaatat

SEQ ID NO: 738163 - DNA, 586 bp, Homo sapiens
ccacgtggttctgagatcggcttatcagctgattcctgcccaaattgccaacccacaaaatcacgagcaaataaatggttgctgtaataaccagttgggttgttacacgaaaacagctaatagatataccttcttaatctcaattatctaaaaaagatatccctcctcactgattcatagctaagtggttctagaaggaatatttttatgaataatacacatttctttattctgtgcatcacatgaaaatggtcagaatcaaaatggagtcactaatgttaaaaaacaaacaaaagactctgacaaatacagctgggaagaccatgaaaagagggttctaatggttgtacacctgaaaaccaaaagtaccacgaaagacggcgaacaccacaaccttgagcaaaggccattccaactgaacasaaaacatactctgcaaggacctctgaacaactgcctgtccaacctcagactaacaccactttcgtgattgatctttggagccaaggctaattaattcaaagaaattagataatcctcattttttccttaaaaaatttttgttttcctttattttcccaaatat

SEQ ID NO: 738164 - DNA, 590 bp, Homo sapiens
tggatttgttaatcttttgattttttatgtgtgtcttaatctccttcagttcagctctgattttggttatttcttgtcttctgctagctttgggtttggtttgctctcagttctctagtttttttagttgtgatgttaggttattacactgagatcttttctaactctttgatgtgggcatttagtgctatgaatttccctcttaacactggtttagctgtgtcccagatattctggtatgttgtatctttgttctccctagtttcaaagaacttcttgatttctgccttaatttcrtcatttacccaaaagtcattcagaagcagattattcaatttccatgtaatgtatggttttgagtctcagtaggtcacatgcccccctagtccactggatctgcacccagctcagcactaggatttgcctaagaattgcagtccttgtggcccagactgccccacaagttcacttagggtcccagagcactccagcccacagtggcgaggcttgctggaactcaagctctgattgctgggctgggtgacttcgctttggctagggccaatccaaatgctccgtctgtgggcaga

SEQ ID NO: 738165 - DNA, 502 bp, Homo sapiens
tggaccagaatttgcgactgctgatttcttttcatccacttttcctaatagattcaggaagtaattttcagatacaggaacaacagatcacagataataaaagtagagcatgggcaatttgggaggcagataaacttatagagatgagatctctttataccactcctccctgttttgcacttgtractgcaatgcatgattctcttttatttcccattaaatacaaatgctttccaatggtgcctttgagggggcaggtagggggctgtacaagcactccttctgttaaacacaataggcatacacacacacgtgcacacacatttttctttcttctagagaactttatttgctgttaactgaacacttggcctatcagccccgttatgtgttgttaaaatttaaccaccactgagcatcattaagaggtcacagaaccagtcagaagagatagagggatggatccaacaaaccagcacctaaggattccaatgaactgaca

SEQ ID NO: 738166 - DNA, 520 bp, Homo sapiens
cgcccccatccttcagcccctccctggcctgaaggtggggcctcaccagggacctgcccccttttgcccaggaacctgtctccctcctgctgccgttcatggcacccaggctgtaggtgccaaggggccccctgcaggccagcactgagctgctctcagccccatttcggcttccctcttatcctcatcagtgctcaaagtccagaagggggctgaggtgtcaggggcctgacatgtcaacagtgccctgagtgtgtgcacacctggctgggctgtgacagtgcccaggctcaccccactttgcttcaagatgggagcaggtgccaatagcaggaagaagccaggccrtgggagcaggtatttccaagccttcctgggcctccaagagggcagggatgcctgggtccacagctgtggtttgggcggctgcagctgcacccaggagggaggtgcttctgcctgctctgaggagtgggaggcccaggtctgcagtcatagtttgggaggctgcagctgtgcc

SEQ ID NO: 738167 - DNA, 713 bp, Homo sapiens
accttgcatacttggtgagagtgcataatatcaactctgcatttttcaagaatacaatttattgttattaactatagtcaccttgctgtatagtggatctcttaacatttgttcctcctatctaactgtgattatgtataatttgaccaatattgccccatccttcccccactcccaagcacaccagcctctggtagccaccattctactctctacttctatgagatcaactcttttagattccacatgttagtgaggggatataatatttgtctttctgtgcctggcttatttcacttaacatgatgtcctgcaggtcaatccatcttgtcacaaatggcaggatttcattcttttttatggctgaatagtattacattgtgtatataccacattttctttatttatttatccttgatggacacttaggttgtctcygtatcttggctattataaatgtattgctataaacatgggtgtgtggatatctcttcaacatactgatttcatttcctttgcatataattccagtggtgagattgctggatcatatggtagttctatttttaagtttttaaggaacccccatactgttttccacaatggctgtactaatctacatttccatcacctgtgtataggggttgccatttctctatatccttgccaatacttcttatttttatttttgatagcagacattctaactgggg

SEQ ID NO: 738168 - DNA, 607 bp, Homo sapiens
atcagtggatctcagtcaatcagagtgagaggtgacagggtgctggcagccctcacagcccttgctcgctctgggcgcctccttggccttggcgcccactctggccacacttgaggagcccttcagcccgctgatgcactgtgggagccgctttctgggctggccaaggccagagccagctccctcagcttttggggaggtgtggatggagaggcgtcggtgggaaccggggctgcacaccgtgcttgcgggccagcgcgagttctgggtgggcgtgggctccgcggaccccacacttggagcggccggccggccccaccggccccaggcagtgaggggcttagcacctrggccagcagctgctgtgctcaatttctcgccgggccttagctgccttccctcagggcagggctcgggacctgcagcccgccatgcctgagcctcccccgacctccgtgggctcttgtgcggcggagcctccccaatgagcgcagccccctgctccatggcgcctagtcccatcgaccacccaagggctcaggagtgcgggcgcacggtgcgggactggcaggcagctccacctgtggccctggtgcaggatccactg

SEQ ID NO: 738169 - DNA, 484 bp, Homo sapiens
cttcagcccgctgatgcactgtgggagccgctttctgggctggccaaggccagagccagctccctcagcttttggggaggtgtggatggagaggcgtcggtgggaaccggggctgcacaccgtgcttgcgggccagcgcgagttctgggtgggcgtgggctccgcggaccccacacttggagcggccggccggccccaccggccccaggcagtgaggggcttagcacctaggccagcagctgctgtgctcaatttctcgccgggccttagctgccttccctcagggcagggctcgggacctgcagcccrccatgcctgagcctcccccgacctccgtgggctcttgtgcggcggagcctccccaatgagcgcagccccctgctccatggcgcctagtcccatcgaccacccaagggctcaggagtgcgggcgcacggtgcgggactggcaggcagctccacctgtggccctggtgcaggatcca

SEQ ID NO: 738170 - DNA, 657 bp, Homo sapiens
taagaattcaaataaatcactgttttacacaaagatgtgtatgtaccatggctaacctcctaaaaacactccactcatcatgttggttggctccagtaactgtctaggttatttcttttgttgctaagcaatgaatattaattgtggaaaatttgaaaaattttaaatacaaggatgaaaacaaaatgcatgcttaatataaaaaaaaggtatagagatatacatatttaatatttgggatawttccctccaataaataatgtttctactcatctccaaacacacacacatacacacacacacacaactgaaaattctgacttccattctgcttttccacttagatcataagtatcttgtcaagtccttaaacattaaaaaaaatggcatacagcattctttatgtccataacgtagaaggcaaaagactactattttttttctttttcgtgttgaatccccaacattcaaaacagtgcctgacaaatagtaggtgctcaataaacatctcatgaatggataaatgaaataactagaatgaacaaaggaatgaatgaatggttttccctctgaaaactgtgtcaggtaaagtggacaactcactgcttctccaagaaaccaataaatatgtcagaagcaggctccataacaatcatt

SEQ ID NO: 738171 - DNA, 657 bp, Homo sapiens
taagaattcaaataaatcactgttttacacaaagatgtgtatgtaccatggctaacctcctaaaaacactccactcatcatgttggttggctccagtaactgtctaggttatttcttttgttgctaagcaatgaatattaattgtggaaaatttgaaaaattttaaatacaaggatgaaaacaaaatgcatgcttaatataaaaaaaaggtatagagatatacatatttaatatttgggataattccctccaataaataatgtttctactcatctccaaacacacacacatacacacacacacacaactgaaaattctgacttccattctgcttttccacttagatcataagtatcttgtcaagtccttaaacattaaaaaaaatggcatacagcattctttatgtccataacgtagaaggcaaaagactactattttttttctttttmgtgttgaatccccaacattcaaaacagtgcctgacaaatagtaggtgctcaataaacatctcatgaatggataaatgaaataactagaatgaacaaaggaatgaatgaatggttttccctctgaaaactgtgtcaggtaaagtggacaactcactgcttctccaagaaaccaataaatatgtcagaagcaggctccataacaatcatt

SEQ ID NO: 738172 - DNA, 577 bp, Homo sapiens
tttaattatatgcaattataattatttcaaattaaattataatgaattataatcaattgttaggttagaatattcaccacttacctgatggaaggaaaatggaatatttgaataataaggattgtgcctatatatgggtaaggacaaaactttttttaattgagtggcctttgtctaagttatttattatatttatgctcttagtccarttataacactgtcttatgccatttgaaagttgaatgtctccaaatatgacagctttactgaagtcactttgaaacccaaaaacattgtagaaaatattgacaaaataatagttttgaacaatagttcaaaacctttatttttcaactaaaactgcccaggaattgaaagtaaatatgctttaatcaatttcatgttatcttcatttttaaatgtaaaagagggatttgtgatgtggcaaagagcaaaatatagtgttaccaccttttttgtctctttctgtaacagaatattaagtagtcccaaccttctgtgctctaggttgaagactaccaattatgcacaaaatagcattctactctagtaagca

SEQ ID NO: 738173 - DNA, 534 bp, Homo sapiens
ttgttctacttcagcaacatcctaaatatatccatggcttttcactactccactaataaaatctaagtcaaatttcttaaatgcaggacttcttaatctgtatcatatgttactctgaaatcatatttttcatccccataaatccacaccaatcaacaaaattcactagcccctcaacataccacatgtaatgttycatgcaagaaagccctcttctctactaactgatatcctacacttgctttctgccctagaggaagtttcatctcttctgttaggagaagttttcttctctataaactgccattaagttttcaaccactggatttccagtggggtcagaactatagaatcttaagcatggaatagaggttaaaagatctattttcttcttccactcttatccacactcacaatccttggccttgtctgacagatgaaaatagtgatggttagagagatgccatcctgactcttatactctggtagtgtctaggttttcttcaatactttgctcggtactttaattgcttc

SEQ ID NO: 738174 - DNA, 562 bp, Homo sapiens
taaaagcattatgtacttcattttagtacatgtctatgcatgtgaacacaaaatgtctcaaacagccagaaagttttgagaggtgaagagatgtgcatcatttaggcatggtgaaatgctttagtttaagtttatgaaaacttccaaaattttctgcatatttaagcgccttgtatgtattttctcttcatctctacagatcttcataaacaatgaatggcatgattcagtgagtggcaagaaatttcctgtctttaatcctgcaactgaggaggagctctgccaggtagaagaaggagataaggtgagtttctgaacactagtttcattttatgccaggtttcttggttttttgccattctgagctcctgaaccccattgcaagytccaaaagacatgccatgaaaatatggtttctggggcagcttaggaaaattgtctaagttgtccttgttaccaaaaaaaaaaaaaatgctctgtagttatgtaataatgataaacctgtgcttctgggtgtcatggtgattttttttcacatcattttcctttattttcaattgaa

SEQ ID NO: 738175 - DNA, 634 bp, Homo sapiens
attactcgggatttatttttggacacgtgttattttgaaaggtatggcttaatctttaagtattttggaactttctagctattgtgtagacatgttttcagttcatttaggtaaaaaggagtgggagttttattaaacttgttcagttatgttttatggtcaaaaatgtggcctatcatggtgaatgttccatgttagcttgagaataatatgtattctgctattgttagatgtagtctttagatgtcarttttattcagttgattgacggtgctgttgaattcaattatatcctcactgattttctgcctgctaaatctatccgacttatagctctgacagatgggtgttaaagtctccaaacatattagttgattcatctatttctcaataaagttgtattagcttttgcctcatatatttggacacttggctgttaggtacatacgcattaacaatcattatgtgctcttggagttttgattcctttaccattatataatgcctctctttacctctgataacttttttgctctaaaatgtgatctgtctgaaaataatgtagccactcccactttcttttgattactgttagcatgatatatttttctccattaatatttactttactttt

SEQ ID NO: 738176 - DNA, 634 bp, Homo sapiens
attactcgggatttatttttggacacgtgttattttgaaaggtatggcttaatctttaagtattttggaactttctagctattgtgtagacatgttttcagttcatttaggtaaaaaggagtgggagttttattaaacttgttcagttatgttttatggtcaaaaatgtggcctatcatggtgaatgttccatgttagcttgagaataatatgtattctgctattgttagatgtagtctttagatgtcagttttattcagttgattgacggtgctgttgaattcaattatatcctcactgattttctgcctgctaaatctatccgacttatagctctgacagatgggtgttaaagtctccaaacatattagttgattcatctatttctcaataaagttgtattagcttttgcctcatatatttggacacwtggctgttaggtacatacgcattaacaatcattatgtgctcttggagttttgattcctttaccattatataatgcctctctttacctctgataacttttttgctctaaaatgtgatctgtctgaaaataatgtagccactcccactttcttttgattactgttagcatgatatatttttctccattaatatttactttactttt

SEQ ID NO: 738177 - DNA, 560 bp, Homo sapiens
cctggtccagtgttctttccactgtataaacttatctttcatgtagttaatgattttgtgtcattttctctcctcaaaatttgtattttttcaagagaaactaagagggaaatgtatagctctcaaaaaatgaatcactaaaaagttgtttaaaaagactttctggacacttaaatcactttctggactaccttaaagaagtaatcttcatgttggtcctttcttgtcctgtctactcagaaagaattcccaaagatctggactgtgtakaatattctacactatagcttctgcagaggtttaaaattcataaacaaatgttcagtctttcaacagccagtttgattgcctataaattccagtcactctgattgctaaaggaacatgaataaagacaattttttaattaataaagttttcactccagcagataattgagaaatgatcatactacatggcaagtattacagtgaaggaggctgtgggtaccagtatacagtagaagaagccatcaaacaccaggagaattaggaaaagtcaaggatgatgtggcaacaaag

SEQ ID NO: 738178 - DNA, 513 bp, Homo sapiens
ccaggcatgggtgggaaggctggccttttggattatgatactggccaaaacttcaataatgactcaaagccctattacattgcccaagaattacatcacctcttgtcaccctatgactcatgttgtaaccacagataaaagaacaaaattttagtgaamtagaagagcctggaaagttttaaatgagctgtatctcacaatacaaagccttcttccaacatttttagaacttacattttaaaagttatgattttcaaattgattaaatgaaacagaggtgatcattttagccttgggaacttctcaccatcctcaatcttcaattcccaaaattacattcaaaaatagcttattcaaagcatttattttaaaaagaaacatcctcagactaaagaaataaaaattgagttagaaacacttgtactttctagacctctgttgtcaggatatagattgggctgtcaacagcatgaccagacaaaaagatgagcgaatgaaataatgggtgcagta

SEQ ID NO: 738179 - DNA, 607 bp, Homo sapiens
attctcatctcaggagtatgggtatattttaaaagtacactttaaaagtagttaggattgataatcaccaccctggaccagttgttttcaaactcaggaaggaaggatgagaaggtagacactgagagtttttaaagaatcattttccagatggacaatatccaaatgtactcttttctaaaactgatatgcctgagattatggttgggatgatggcatcgtggtggatttyctttcctatttcttacacaatcacacttcaaaaggttcctctcacacatgcccagaatctttcaactcagatgcattgtcctgaggcatataacctctggagcagcaaacaaatagaacatttgaaatactggtaacaggagaagcctttttaaatccaagaatgattaatcatcccaacccaactcattaagagatatgtttacttattaagtttagataattatttatcaaaatttgaaagatgtgtatacttattggatcaactgtgcatttattggttactacttgtaattatagaaatacctcatttgagaaagaaaaactaacacttagaggcttatgtagcagtaatattaatagacacctatatttc

SEQ ID NO: 738180 - DNA, 518 bp, Homo sapiens
taaattaggatggttgtagaaatgtaaaggaagaaggaagcattacaaggaagactctgggtgtgaaagaaaatactaataatgtaacacagttaataaaagcaaagccttttctattttacagagttggattaaattctagttattactaccatctaatcatgtaacaacaaacttttatttatcaccgccatgatgattaattttatatgccagcttggctgggccacaaattgcccagacatttggccaattattytgagtatgtctgtgagggtgtttctggatgagattaatatttgaatcggtagactgcatagagccgattgacctctctgatgtaggtgtgcctcatctgatcagttaaagacctgaatttaaaaaaaaaaaaaaaaaagcctgagtaagtgataactcctcctgcctggctgtcttgagttgggatattgattttttccagccttcagacctgaactgaaacattggctcttgagtcctaagcctgccagctttgggac

SEQ ID NO: 738181 - DNA, 518 bp, Homo sapiens
taaattaggatggttgtagaaatgtaaaggaagaaggaagcattacaaggaagactctgggtgtgaaagaaaatactaataatgtaacacagttaataaaagcaaagccttttctattttacagagttggattaaattctagttattactaccatctaatcatgtaacaacaaacttttatttatcaccgccatgatgattaattttatatgccagcttggctgggccacaaattgcccagacatttggccaattattctgagtatgtctgtgagggtgtttytggatgagattaatatttgaatcggtagactgcatagagccgattgacctctctgatgtaggtgtgcctcatctgatcagttaaagacctgaatttaaaaaaaaaaaaaaaaaagcctgagtaagtgataactcctcctgcctggctgtcttgagttgggatattgattttttccagccttcagacctgaactgaaacattggctcttgagtcctaagcctgccagctttgggac

SEQ ID NO: 738182 - DNA, 609 bp, Homo sapiens
gagaggcagctttaaatccatagtgagacaaatacaactccaggaggattctaatctgaaaagatgttatctacactcttattttttttaccctcttctccacgtctctgctgtagagtaactttcagatacttcagttcaaaagatttccaaactccactctacttctttcttctggcaatagtcttcagacaaacctrccaaagtttgaaactttggtattgcattggaatgaattttttatttttttagatgaagtcttgctctgttgcccaagctggagagtgcagaggcacgatctcagctcaatgcaacatccacctcccgggttcaagcgattcccctgcctcagcctcccaagtagctgggactacagtaatgtgccaccatgcctagctaattattgtatttttagtacagacaatgtttcactatgttggccaggctggtcttgaactcctgacctcgtgatccacctgcctcagcctcccaaagtgctgggattacaggtgtgagccaccgcacccagccaggaaggaatttttatgattcaactctgactgttttaggggccaacatgatggataagatttagtcatgtgagtgagt

SEQ ID NO: 738183 - DNA, 609 bp, Homo sapiens
gagaggcagctttaaatccatagtgagacaaatacaactccaggaggattctaatctgaaaagatgttatctacactcttattttttttaccctcttctccacgtctctgctgtagagtaactttcagatacttcagttcaaaagatttccaaactccactctacttctttcttctggcaatagtcttcagacaaacctgccaaagtttgaaactttggtattgcattggaatgaattttttatttttttagatgaagtcttgctctgttgcccargctggagagtgcagaggcacgatctcagctcaatgcaacatccacctcccgggttcaagcgattcccctgcctcagcctcccaagtagctgggactacagtaatgtgccaccatgcctagctaattattgtatttttagtacagacaatgtttcactatgttggccaggctggtcttgaactcctgacctcgtgatccacctgcctcagcctcccaaagtgctgggattacaggtgtgagccaccgcacccagccaggaaggaatttttatgattcaactctgactgttttaggggccaacatgatggataagatttagtcatgtgagtgagt

SEQ ID NO: 738184 - DNA, 609 bp, Homo sapiens
gagaggcagctttaaatccatagtgagacaaatacaactccaggaggattctaatctgaaaagatgttatctacactcttattttttttaccctcttctccacgtctctgctgtagagtaactttcagatacttcagttcaaaagatttccaaactccactctacttctttcttctggcaatagtcttcagacaaacctgccaaagtttgaaactttggtattgcattggaatgaattttttatttttttagatgaagtcttgctctgttgcccaagctggagagtgcagaggcacgatctcagctcaatgcaacatccacctcccgggttcaagcgattcccctgcctcagcctcccaagtagctgggactacagtaatgtgccaccatgccyagctaattattgtatttttagtacagacaatgtttcactatgttggccaggctggtcttgaactcctgacctcgtgatccacctgcctcagcctcccaaagtgctgggattacaggtgtgagccaccgcacccagccaggaaggaatttttatgattcaactctgactgttttaggggccaacatgatggataagatttagtcatgtgagtgagt

SEQ ID NO: 738185 - DNA, 576 bp, Homo sapiens
ccagccctcagaggaagcccttagcaacagcattgtcagactgcctcaaaaaaatcagagtctttgattccaggaacaggctgccctggggacagactcaagatgagtcagggtaagcagggacagaatccagctgggtctgcctcaggcatgtgcactaacgcaaaggtctgttcatccttattgtctactaaacacctattatgtgccagtctcaggagagtgctcaggatacagagtttacaagacagacagggttcctgtctttacagggataatgcctcacagaagagtgagcaccaacaaatcaatgagaataaggcatattgtgagstataaaatggttgacatgggccagaagacagtgagcaacaagaagctattaggaggttgtaagcaaggagatacagactctggtttgagattcaggaggcaaagtccagcttctctaaggaagatgaaaaaggaggggacagagtgaagaaagatggtccagttaggacatggtggctttgtacacatgagagatgaggtttctggcaagtaatgtggcagctgagctgggaagactgtgtg

SEQ ID NO: 738186 - DNA, 581 bp, Homo sapiens
ggctatcagcaggtagtggtcagagtgagaaaggaactgacttttttgagagattcatcaacacagccaccaactctgggacaaatggggtgactctctgtaactgtcaccccaaattacccacaggacactgagccagtcccctcattctattgcttctggttctagtccattcccctattgtccctaaacacgttgcccatgtctgagtccagggtggcagggatacctccatcccagtcaacatctacagagggcctcttctgttccyctctcacctcatgcaggttactactgttgtgggtctggtggagtggcccctggagaacacaaggtatcccttcctctggaaagccaggcatgtaatagacatggtatgggttgatgtagagcagagtggctcatccagatgcaaagcagtaagaccttggctacagaaaattatttcacaaaattccacaccctttcatgacaaaaacactcgatgaactataaatagaaggaaactacctcaacatagtaaagaccatctgtgaaactcccatagtttacatcacataaaatctgaacaaccagagaca

SEQ ID NO: 738187 - DNA, 482 bp, Homo sapiens
agtttcagagtctgcatgttataggaatagtgaaaacttagcctcaataaagctagggcctccacctaccttcctcctaggtttgcatatgaattccagaatagtttatataatgccacaatgccatctgtctatgctgacatatgctgaggtttcstatcagctgcccggtccgtaggcatcagtccacatggtttgctaccagcatgtttcctatcaacatgtcccctttggtctggcccagtctgtgctagcacctcatacacaggcaataattctgctgctactgcagtatgctggagcctggggacccttggaggttgtttaagcccatttatctaaagcagagggtctcaaactagcagcctgtggccacttcaaatatgcacatgtttttcaacctgcatgattatatcagttatttatcactgcttaacaaaccaccccaaaatttagtagtgtgaaatacaccattctatttg

SEQ ID NO: 738188 - DNA, 601 bp, Homo sapiens
tgagcaaataaatgacctgaagttggaacttaaatttaaaaataagtttagatttaaacctatatttaaattttaacttgtatttaaagggaagtagagtgtaaaagttaggaaattttgcagcctggccatgtggtagaaaagaaaagcccattttcaggagaagaattcaaacwggctgcagaaatttgcataaataaaaaggagccaaatgctgatagccaagacaatgtgggaaaggcctcaaaggcatttcacagacctttggggcagttcatcccatcacaggcccagaggcctaggagggaagaatgattttgtgggccaggcccagggccttgctaccctgcacagcctcaggacactgttttctgcatcccagctgctccagctcctcctgtggctcaaagggatccaagcaccgcttcaaagggtgcaagccataagccttggtagcttccatgtggtgttaagactgcaggtgcacaggatacaagagttaaggcctgggagcccccacctagattttagaggatgtatagaaaacttaaatgttcaggcagaagccagctgcaggggcggagtgctcacagagaacctc

SEQ ID NO: 738189 - DNA, 457 bp, Homo sapiens
ataattacacctaacataataaaactatcctttgtacatcaggaaacgcaccaatccccaacccaaatactattacataaagttaataatacttaaatgctgaggtgaagtcaataaatcttatgtcacatgatagaggggaaaggaaataaaatgaagatgttttcttagtacaggtgtatacatgcacaaacatgtttttaatgaaagaaggaggaaatacttatgacaattacagtcctcatttytgcagctggtcatgtggtcatagctggtattgatgactaccttcttcaactacccattctgtattccctttgccttcagcaagcacctcagcaggttttttttttttttttttttttttttcctggtggaatgacccaagccttcattcctgaagggtctgggtcatttgtagtcccacctgggttggggtgttgcagtttcccattga

SEQ ID NO: 738190 - DNA, 543 bp, Homo sapiens
ttctgacccttaaaaagccctgttttgaaaaattttaatagtcattcacacttctaaaaacacttcttcacaaactctagtttctttgttcttgctaacatcaattagtagtaagaattatataatattttatcaatgtattctaagagaagacaatgcctccaagatagtaaagacatgtggatcaaaattagggrtaaaattccaatatgtattataaattttaataactatttgaaatcattttatgtttatcatgtcatttaaaaatactaccagtgtttataaaattattcagtgatattaaagaatgataaggcaggcattaatcaggatcatcatgataggtatagaaaccactgcaatgaggttttgtggtggggagagagattgggctcgactccaaatataacaaggaaaaatgataatttatagccaaggaacagtgtgtgtggcaaggggtcagcggatggaaaattgctaagaagaaacatgaggagtaaggaggaattctggctaaactgacataaaaggattcttgct

SEQ ID NO: 738191 - DNA, 595 bp, Homo sapiens
gatcctgaccctgagtaggcctttgctaatgtgtgtatttgagtcttactttttaacaaaaactttcaaaaaactaaaaattataaagcattttaaaaatagaaaaaaatgtctaaagaataaggatataaagaaagaaaatatttgagcaacttccagtttgcatgctccattcatgggaaktgatctgcacaggtaacgccatttaaaatcatttataccatgtttttaatgtacattttctatgtttagttatacaaatactgaccattgtgttacagttgcctagagtatttattttagtaacatactgtacagattatagcctaggagcaatagcctatactatataacttaggtgcatagtaggctacatcatctaggtttgtgtaagtacactccatgatgttcacacaagaaatcacctaaggacacacttctcagaacacactcagcttgttaagtgatgcacccctgtgtgttaatgcagtagtgtgctagagctggctcacatggccaaggagagcccattgttcacctttctccctaaagtcaccatcagtgacatcagattgatagctcaaaatcagccata

SEQ ID NO: 738192 - DNA, 592 bp, Homo sapiens
ctacaatcatttactctccttgcttaaaatcatccacacttccccatctcactttcccctaagacaaaggatatataaaaatctgtacctcattgtgtggtggagtaatggctctgtgatttttcctccctgcacgctaataaatttgtatgtcatttctcatactaatttgccttttatcaattaacttttaagtgaaccttcagagagtgaaggtaaaagttttttcctttgcctctacaacacatagcgagaaaaggaaaaggacagagagtgtctttaaacttctgctaaaatttctctcgggtaaaaattcaataattggagtccaargaatatgcatgcttaatgtcactaagtacggccaaatttctctccagacaattcacacttctacaaactaatacatcatcattcctatttcccacattgtcacaaacaattacagcataaattggatggagaaagttggtaactgaaagatataaagctttggaagaacaccttatctatactatactttcatttagccaggtgaggcagattcagcacctaccacaatactaggaacatagaagagctcagtgaacat

SEQ ID NO: 738193 - DNA, 609 bp, Homo sapiens
aatctctgagcctcagatttctcatttgtaacatgatcaggataatgttaataccacatttggaaaataatgataatgtctgttaacatgccttttaaaagattctagtaccttttataagtgatagtttgttattcttgctataatttcttgggaatatgtccattttaacttatctaattagaaatggtgataattgggttacgaagtctacagctatctttctgtctcttgaattttggtttttagacatgtgaaaaatgatgctatgtaattagattcttcaaacattgtctaatttcttagttaaggtgctgtggkacacacaggtatgagtaaagtccctgtactcctgagctttatagcagagtgagcagatgatagatagatagatacatgcatacatacatgcatacatgcatgcatacatacatacatacacacatacatagaaacatagatagatatagatggttggatgatagattaggtagatagatagatagatagatagatagatagatagatagatagatagtatggatgcagagatagagacagagacagagggatggatgcatagaagagagatagttagatgagatagaa

SEQ ID NO: 738194 - DNA, 609 bp, Homo sapiens
aatctctgagcctcagatttctcatttgtaacatgatcaggataatgttaataccacatttggaaaataatgataatgtctgttaacatgccttttaaaagattctagtaccttttataagtgatagtttgttattcttgctataatttcttgggaatatgtccattttaacttatctaattagaaatggtgataattgggttacgaagtctacagctatctttctgtctcttgaattttggtttttagacatgtgaaaaatgatgctatgtaattagattcttcaaacattgtctaatttcttagttaaggtgctgtgggwcacacaggtatgagtaaagtccctgtactcctgagctttatagcagagtgagcagatgatagatagatagatacatgcatacatacatgcatacatgcatgcatacatacatacatacacacatacatagaaacatagatagatatagatggttggatgatagattaggtagatagatagatagatagatagatagatagatagatagatagatagtatggatgcagagatagagacagagacagagggatggatgcatagaagagagatagttagatgagatagaa

SEQ ID NO: 738195 - DNA, 544 bp, Homo sapiens
atgtagacagatagagatggagatggagattgatagagagatagagatggacaaagatggaatgcctttccttagactgattttgctcatgagtggtctttataaatagggttttgctccctactaattctgatgacaacggccatgtctgtctgtgaggatggaaagtgagtggatcaccaagaaggatgggtttatcagcagccatgcttgactaagtacttgctgagtaattttcctcatggagtcttggcaagagttgtaaaaactttactaaaagccaatagaaratggttccctgaatgttgataaaaggatttttcccattttttgtcctagttagtgagggcctcattatagaatcttggaactataaatgaaaattatctaaaagaccagaggacagagtctaatgtttttactttatgagtttttcctgggacacttttaaacagtaacaacaacagcaataataaagaagttaattcttattttttaggcagtagtgacatttggaggtacatagttcaagctcctctttgaa

SEQ ID NO: 738196 - DNA, 542 bp, Homo sapiens
acccaggctggagtatggaagcacaaccatagctcactgcagctacggtctcactttctagaaacaatttaccaatctgagctcccaccagcaaagaaggaaagtgtttaagagtgtcacattgtttccttgacagctttgagtatttctacttttacaaatctttgctgatgtttttattttacttatttatttatttttattttgagacagattctcactctatygcctaggctggagtgccgtggcatgacagcatgaccatagctcactgtagccttgacctcctaggctcaagagatcctctcatctcagccaatttgcttttattttttctataaatgtatctcattatgtcataactcacttttatagcagggaaaaagttaatacaagataagatttagatatcctctctccagcaagacccagaactttgattaactctgcctggagaatagaaggtttatgaagatgctaagctatcccaataagacgttgtgtaccaaatgcaattttaggttctgtagatgaagttccag

SEQ ID NO: 738197 - DNA, 542 bp, Homo sapiens
acccaggctggagtatggaagcacaaccatagctcactgcagctacggtctcactttctagaaacaatttaccaatctgagctcccaccagcaaagaaggaaagtgtttaagagtgtcacattgtttccttgacagctttgagtatttctacttttacaaatctttgctgatgtttttattttacttatttatttatttttattttgagacagattctcactctatcgcctaggctggagtgcmgtggcatgacagcatgaccatagctcactgtagccttgacctcctaggctcaagagatcctctcatctcagccaatttgcttttattttttctataaatgtatctcattatgtcataactcacttttatagcagggaaaaagttaatacaagataagatttagatatcctctctccagcaagacccagaactttgattaactctgcctggagaatagaaggtttatgaagatgctaagctatcccaataagacgttgtgtaccaaatgcaattttaggttctgtagatgaagttccag

SEQ ID NO: 738198 - DNA, 613 bp, Homo sapiens
taaatttttaagcaagaaagtaacgttatttgatttatggtaactgctcataactctaacctccctaagcttcagtttcttcatctgcaaaattcctgtaatcatagtagcaattcaatagttttgttgagaagactgaatttgtttgacaacaactcaataggttgagttgtgttaacyactattattacgaagtgatgagtgcagtagaagatataaatgaatgtaagacatgtccatgtactcaacagttttgctattcaacagcattaatttagtctttctgcatttttgctgctttttaaaatgcaatgtaaatttcccatgcaagaatacgttctaaataatttatgtagatactctgccctcaaagaggtggagcataatttcccactgcttaagtgtggactgtgcccagtgacttccttccaaagggtacaatatggtaaggtgtaaccaagcaccacctgcaacccaaaaatctatagaaaagtaaaattaaaaaaaaatccttaacggaaaaaaaggaagataattttgcggtagagaaacctgacaaacactacctgagccaggcgactaagattaacatcaacaataagtcatatggata

SEQ ID NO: 738199 - DNA, 610 bp, Homo sapiens
aaaatgagtatttgaaaactttaggacaggtttcaagaggtaggctagtgaccatgcaacttgtaggaaaatacatgttgtcattattgacctgagaaatgcaagggtacaagtgacaagattccatttggttggtgctactactgaacacaagggaagtggggccctaacctcagctccacaagttaaaggccaccctctggcctccttcatccatttctccctactagacaaaaaggacatgtccacccagagcctgtgtccccayttctgggatctcggctcactgcaacttctgcctccaggtttcaagcgattctcctgcctcagcctccaatgtagctgggattaaaggcacccgccatgatgcctggctaatttttgtattttagtagagacgagatttcaccatgttggccaggctggtctcaagctcctgaccttaagcgatcctcccgcctcagcctcacaaagtgctgggattacaggcatgagccaccacgcctggcaatcctacttctaaggctaattgcagcctctctcttgggtcaagggcagactgctctagttccagaggatggcaaagaagtagtagaggggtatggggagt

SEQ ID NO: 738200 - DNA, 610 bp, Homo sapiens
aaaatgagtatttgaaaactttaggacaggtttcaagaggtaggctagtgaccatgcaacttgtaggaaaatacatgttgtcattattgacctgagaaatgcaagggtacaagtgacaagattccatttggttggtgctactactgaacacaagggaagtggggccctaacctcagctccacaagttaaaggccaccctctggcctccttcatccatttctccctactagacaaaaaggacatgtccacccagagcctgtgtccccatttctgggatctcggctcactgcaacttctgcctccaggkttcaagcgattctcctgcctcagcctccaatgtagctgggattaaaggcacccgccatgatgcctggctaatttttgtattttagtagagacgagatttcaccatgttggccaggctggtctcaagctcctgaccttaagcgatcctcccgcctcagcctcacaaagtgctgggattacaggcatgagccaccacgcctggcaatcctacttctaaggctaattgcagcctctctcttgggtcaagggcagactgctctagttccagaggatggcaaagaagtagtagaggggtatggggagt

SEQ ID NO: 738201 - DNA, 611 bp, Homo sapiens
gtctctaagaagtttcaaactctccctcatcttcctgccttcttctgagtcctccagactcctccaacttctgcccattgcccagttccaaagctgcttctacatttccaagtatctttatagcaatgtcccactcctaagtactgattttctgtattaggccattcttgtattgctgtaaaggaataccagagactgggtaatttataaagaaaagagatttaattggttaatggttctgcaagttgtacaagcatagcactggcatctgcttggcttctggggaggsctaagtgagcttttactcatgacagaaggcaaagcgggagcaggcatatcacatggccagagcagaagcaagagagcaaggagggaggtgccacacactttcaaacaacccaaactgtcataaactcacttatcaccaaggagatggcactgtgccattcatgagggatcggccaccatgatccaaacacctcccaccagatcccacctccaaaactggggattatatttcaacatgagattttgcagggacatagctccaaaccatatcatccactaatcccagttagaatatgagatctttgagtgccagaatcatgtct

SEQ ID NO: 738202 - DNA, 626 bp, Homo sapiens
gtttcacccaggctggagtgaagtggtgcaatctcagctcactgcaaactccgccccctgggttcaagtgattctcttgcctcagcctcccgagtagctgggattacaagagtgcaccgccatgcccagctaatttctgtatttttagtagagacagggttttgccatgttggccaggctggtctggaactcctgaccttaggtgatccatctgcctcggcctccaaaagtgtgaagattacaggcctgagtcaccgcgcccggctgacagtagctttctaatggagccatctgcttccagtcttgcctctcaacccccaattcatcctggactccttgccataagtgaccttgctaaatggagatttgcctcaggtaacttctctgcttagaggcctggagtagctcctcatttctttccagataaaactcaatccctttcytaaggcatgtaagaccctctagaatcctgcttctgcttactgccctaaccttctttattgcacctctccattatccaggctctggagccagagaaacttaggtttccagctcaactacttattcacaaaagttcaagggcaagtgttttcatctggacttcaatattacgaactacacaatgg

SEQ ID NO: 738203 - DNA, 571 bp, Homo sapiens
ctccctaactcattttatggggccagcatcatcctgatactaaaacctggcagagacacaacaaaaaaggaatacttccagccaatatgcttgatgaacatcaatgcaaaaatcctcaataaaatgctgacaaacmgaatccagcagcacatcaaaagtttatctgccacaatcaggtctgtttcatccatgggatgcaaggctggttcaacatacacaaatcagtaaacgtaattcatcacataaacagaactgaagacaaaaacgacatgattatctcaatagatgcaggaaggccttcaataaaattcaacatccctttatgttaaaaactcttaataaactagtattgatggaacatacctcaaaataataagaagcatttatgacaaacgcagagtcaatatcatactgattgggcaaaagctggaagcattccccttgaaaactggcataagacaaggatgccttctctcactactcttattcaacgtagtattggaagttctggccaggacaattaggcaagataaagaaataaagcgtattcaaataggaagagaggaagtca

SEQ ID NO: 738204 - DNA, 628 bp, Homo sapiens
aagagtttgtttgcacttcaatttttttatcaattatttcttcacctagtgtttgcatacaaagtgattgctttagaattatgcatttgaatatgaaatttgttttaatattcctgacaccttctgccaatttaattcctccccaaaaatattatcactgaatcaatttataatttcactaagtataataaattaaaaacacaaatgttactctttaacatcttatacaaatataagacaaagtttcttatatttagtagtaacaaataatttacttcttaatttttatcagattgtattagacttttctcaatccaaccataatatacgtttrgattgcaggaaagaaacagaaatagatatcaccaaagcctttaaaacacttctataaaataaaagatatgaaaacaacagcacagggaaaggtcaacgttgtgagcagaacaaagactgaaagaaataactaactttggaatgctcaactagtcaatgctcttgcttactcctgttaaaatctaatgtatgttgattgagagaagtaaaaaattatctcctcagataaaaatatttgaatctatattctatgaaagaaagagtacttttatattatattactttctaatagttt

SEQ ID NO: 738205 - DNA, 530 bp, Homo sapiens
ttgcaattagtgaaatcatctttgttactcatcaatttagcaggtgcgagcaaagaacatttttggaatttcagaaataaaattgcagataattttaactttcaaatagattgttctgtggctatagagatacattactcatttgtttgttattcagtaaatatccattaatagtctaatactattaaaccaatgtattgggtatgcttatagaagtggtgaaaagtacacaaataaatataatactatatacaataagaattggccagttccttgagatacacagtgataagggcttatagaagaaggtggaaggggaagartatgtcttgattgagggagcagggggacggggcagtggtgttgaaggcaggctgcctagagtgtataacatttgtattagactaagaataatcaaatttgaacatataaggggagttttcaaagaaaaatccaggtgaccaatggatgtgaacaaatataccaaggcacaaaaatgtaaagcatttaccagtaacagctaaacactt

SEQ ID NO: 738206 - DNA, 593 bp, Homo sapiens
aacctctgcctcccaggttcaagtgattctcctgcctcagtctccctagtagctgggattacaggcatgtgccaccatgctcagctaattttgtatttttagtagagacggggtttctccatgttggtcaggctggtcttgaactcctggcctcaggtgatccgcctgcctcggcctcccaaagtgctgggattacargcatgagccaccgtgcctggcctttttttttttttttttttttttttttgaggcaggctctagtgccgtggtgctgtctcagctcactgcagcctctgccttctggggtcaaatgatcctcccatctcagcctcccaaatggcccggctaattttttgtattttcaaaaaagagagagagggttttatcatgttgcccaggttggtcttgaacccctgagatcaagcaattcatctgcctcggcctcccaaagtgttgagattacaggtgtgaaccaccgtgcctggccagcataatgttttcaagtttcatttatgttatatcatgtatcagtacttcatctcattttatgatatggatatattacattttatatatttatttaccatagttgg

SEQ ID NO: 738207 - DNA, 615 bp, Homo sapiens
tttgctgctcttgtgaggttataattttattaaatataggtcctaatcattctattcatatactctgatatttatacgatagaaaattaagaaaggggtcaggtcaaaagcaagctaattagagcatattctttctagtcgtcattgtagtgtgattattctgaatacgtattaaactctgtgaaaaatagggtgttcctgagaggcctcaaatctagtcttgagggttctcagataagtaaaagggacataaattttccataggtacatgatagttaacctgtgtcagtttgtttgaatattttaattgtgataggtcttttgagaggaaaggtctttgacacctgtgaatgctaaatttctattttgatatgcaattatgataaayaaatttgttcaagttcttagaatggaaggggattggtgataaattttcagttacagtgaaactgtccttcaaattagtgacattctgatgaaataagaaaaaataaaaattgtgaaaagtaatgaaatgtttaaagttttaaatataaagtcaaggatatgatggatttatgacatctgataccatttttggtagaaagtatatgggaaagaagacagaagaagata

SEQ ID NO: 738208 - DNA, 598 bp, Homo sapiens
tgcaaggactatctatatttgttaacttagattagaaatgttcatattcttgttgagaaatttgttattcattgttagcagcctgattgatggccactgaagacatttgagagagtggataccaaattcagacggctgcaaaatttgtttaaaatgagacttccctttcatttttattccctatgattctcgccttataggtttctgttttcccctgattcttaaaagtgtttaaggcatggcttccattttatgaagtaagcattgatttgcaactctcagaaatttaagccttcttgaagcaagtgctttaaactagagggtgtgggatgggggaatttgagcaggcctctgtgccacagtgaagaaccttaacttgtggaagaatgagagtggtgcctcgacttctccyggtgccaagcacatcatattgacatgttcctcaccagggtgacagtaattattaggtattcactgcgaagggttctgaggtatgtacatctttctttcattgccactagggctgaatggaaatgcctagacaattatccaagtttcttcccttccccccacttcccgcccacccagcctcccttct

SEQ ID NO: 738209 - DNA, 618 bp, Homo sapiens
aagaggggagttccaggaagcagccaggagggaggggtgggaactctgattgcatcctggagcgagcaactcataaaaccccgaaccctgcctccaaggctttgccccaaggagcttcttaaaacagagccagaattcacttcatttaaaagaatagctcagcatgtagccactaactccctctagcagaggaagccccttgtttctccctgaagaatgcaatgaaggttgagcttctatcttgccaattaccccataattagaacagctgatgrcatactgaagggggtgcgtgtgtaagtgtgcatgcctgtgtgttttgggagaggaaaatcactcttcacccaaaaagaaagcttgaaaggatgatgcccataatttgttcattatcaccaacccactcctttgtagggcaacatgctttgagttcggaagtaaatctagatccagtcctatgcataggtacctttgtaaagaggacatgaagccaggtattttagattgaattctggtttctcaagtaatgtttagaaatgaagaactcccttcccatttaacttcctttaacaacagtctgtgcctgcaatgccaaactctcagttttaaatatttagtcct

SEQ ID NO: 738210 - DNA, 550 bp, Homo sapiens
tatgtttatggaattgcaagaaagtacatgtgattcacttatttttataaactattttccttctttgggtagagaagtcaggattttttttaattgatgagacagcctgcattataataagcatcagaaatagcaacagttatttgctgggttccttgattttccaaagctattctacataaaaacaacataatgwatttgatttggttcaaaccggaaaggatttgtctcaaggcactatgttcttacctaagttgataaaaatgtaaataagagccttgtgcagggaaactccctcttataaaatgatcagatctcatgatacttattcactatcatgagaatagcacgggaaagacccacccccccactcatgattcaattatctcccactgggtccctcccacaacacgtgggaattatgagagctacaattcaagatgagatttgggtggggacaagccaaaccatatcaggtggtacttgaaatgctgctaagatttccttaagcaaagataaattagaatagaaactctcaaactgtggtctg

SEQ ID NO: 738211 - DNA, 626 bp, Homo sapiens
tgtaaaacaatggtcatcttcccactatttttttttattttagaaaatttagttattttcacaaaaaaaaatgttacgtgtgttaacatgtgttatgtgttgaatcatgtgctcccaaaagatgttgaagtactaagcaccagtacctatgaagatgatcttatttgaaagtaggttctttacaaaygattaagtgaagatgaagtcattagcatgggtcctgattcaatatgattcctgtctttgtaaaaaggagaaatttggacacagacacagacatgggggaatgccatctacaagccaagaaacacctaagactgccagaagctgagagagagaactggaacagattctccctcatgggcctcaggaaggtcctccctcaggccctcttgccggcactttgaattcaaacctgtcgccttcagaactgggagacaataaatgtcttgtttaagccagacagtgtgtgatactttgttacagcaaccccagaaaacaaataaaacgtgtaattcgtttattatttttaatcaatgtattaaaatatatttaatttatccactttaatttctaatatgacaaatactaacagatttaaggcacataaagaaaagctctttggg

SEQ ID NO: 738212 - DNA, 626 bp, Homo sapiens
tgtaaaacaatggtcatcttcccactatttttttttattttagaaaatttagttattttcacaaaaaaaaatgttacgtgtgttaacatgtgttatgtgttgaatcatgtgctcccaaaagatgttgaagtactaagcaccagtacctatgaagatgatcttatttgaaagtaggttctttacaaatgattaagtgaagatgaagtcattagcatgggtcctgattcaatatgattcctgtctttgtaaaaaggagaaatttggacacagacacagacaygggggaatgccatctacaagccaagaaacacctaagactgccagaagctgagagagagaactggaacagattctccctcatgggcctcaggaaggtcctccctcaggccctcttgccggcactttgaattcaaacctgtcgccttcagaactgggagacaataaatgtcttgtttaagccagacagtgtgtgatactttgttacagcaaccccagaaaacaaataaaacgtgtaattcgtttattatttttaatcaatgtattaaaatatatttaatttatccactttaatttctaatatgacaaatactaacagatttaaggcacataaagaaaagctctttggg

SEQ ID NO: 738213 - DNA, 603 bp, Homo sapiens
atgactgcaccgcgcagctcccggccgcctgagcgcctgtttgctgcctcatactcctccatccagccgccataataagtgccagccgagctgcagcagcccgtctcaggggcaccgcagcctccccgggccctacggccgcccgccagcaggatrgctggaatggccttagtcatgaggcttttagaattgtttcaaggcaggattatgcgtcagaagcaatcaatggagcagctggtggtgtttatttgggtactaccaactcctgtgtggcagttatggaaggtaaacaagcaaaggtgctggagaatgccgaaggtgccagaactaccccttcagttgtggcctttacagcagatggtgagcgacttgttggcatgccagtcaagcaacaggctgtcaccaacccaaacaatgcattctatgctaccaaatgtctcattgtccagctatcctgaagtacagaaagacattaaaaatattccctttaaaattgtctgtgcctccaatggtgatgcctgggttgaggctcatgggaaactgtattctccaagtcagatcggagcatttgtgtcgatgaagatgaaagagactgcagaaaat

SEQ ID NO: 738214 - DNA, 587 bp, Homo sapiens
agtacacaatatgaaaaggatggtttattcaacaaacagtgctgagaaaactggataccctcaggcaaaaaagaaaaaaagaaaaacgaaattggacccttaccttataccattcacaaaatcaacttaaagtaagttgaagattcacacataagaactgaaactgtaaatttcctgtaatagatacctttaacgttctctttcctggtycccacttgaaaccataaatcaacacctttgggagagcagcttttttttttttaatttttaaattcctcattagattctaatgtgcagccaaatttaagaaacacctttccttaattccatataatcccactcatttggtgtggttcagctgaggctgatcccatcttcacccttgacctggttgagtatcggcacctgatttttatctggaaaattagaataatctctcccctgagccacaataattagttcaaggttatggagtgacccaaaccaggttaattgcatttcttcttgagaattttgatagaacaaactagaaagatatattttcatctgcagagaaaatacattgtaaggataatttagtcttttct

SEQ ID NO: 738215 - DNA, 587 bp, Homo sapiens
agtacacaatatgaaaaggatggtttattcaacaaacagtgctgagaaaactggataccctcaggcaaaaaagaaaaaaagaaaaacgaaattggacccttaccttataccattcacaaaatcaacttaaagtaagttgaagattcacacataagaactgaaactgtaaatttcctgtaatagatacctttaacgttctctttcctggttccsacttgaaaccataaatcaacacctttgggagagcagcttttttttttttaatttttaaattcctcattagattctaatgtgcagccaaatttaagaaacacctttccttaattccatataatcccactcatttggtgtggttcagctgaggctgatcccatcttcacccttgacctggttgagtatcggcacctgatttttatctggaaaattagaataatctctcccctgagccacaataattagttcaaggttatggagtgacccaaaccaggttaattgcatttcttcttgagaattttgatagaacaaactagaaagatatattttcatctgcagagaaaatacattgtaaggataatttagtcttttct

SEQ ID NO: 738216 - DNA, 457 bp, Homo sapiens
ttttaatataggtgagtccttataactcttttttaatactctataaaattatcatcctttcagttccaggtctaggagatttttcccttttaaaattcttccgcaaaaaaaaaagtcacaaatctaataggacaggaactcttaaaaccacagatatgattaaggctcagttccctaataaatgtgcaatgaaacacttgtcagcccttgaaataatgagctgtgatctatgataaatgtgccaataacacattttccagggcagcatatttcagatgggtagraaatagttgaatcacagcaggatcttatttttacacaaattacttctaaactccaaacatatctaaaattaatttctttcatcacattaacactgggctgttaatcaccggaatgtgtgctcatatttgacagacataaaaactgatttacatttggaagaggaggaggacat

SEQ ID NO: 738217 - DNA, 557 bp, Homo sapiens
cccaccccgcgccgcagggctagccccgagggccgaggctgctgggcgctggagtcacgagaccgctctccgaggcggttcgggctcgggtggtgaccttgggacgtctaccgccaccccgcagagtcccggcggcccgccccacccgccttgctgtcgggagggaatgccaycctccttgcgtggacccgggccggggcggcgggaggaagtttgggagacttgcgcgcaccagggaggtgtcccgctgggtcagcgcgccggggcgttcggggtgggacgcactccaggggtgctgtgtggcgggggacccggctctgggcggaaaggctgcggcttctccagaagagggcggggttcttttccaaaggtgtttgttaagtactcacttagtgctagggagggggtcatgagtggtttgcggatttccacgtttgctgggaatacagggaaagtgtattcattttcttttggctgcaaataccacttagcatctcataggtagtttgcatctgtcgtccctttcagttgattttactcaaaggctagtctagttt

SEQ ID NO: 738218 - DNA, 557 bp, Homo sapiens
cccaccccgcgccgcagggctagccccgagggccgaggctgctgggcgctggagtcacgagaccgctctccgaggcggttcgggctcgggtggtgaccttgggacgtctaccgccaccccgcagagtcccggcggcccgccccacccgccttgctgtcgggagggaatgccaccctccttgcgtggacccgggccggggcggcgggaggaagtttgggagacttgcgcgcaccagggaggtgtcccgctgggtcagcgcgccggggcgttcggggtgggacgcactccaggggtgctgtgtggcgggggacccggctctgggcggaaaggctgcggcttctccagaagagggcggggttcttttccaaaggtgtttgttaagtactcacttagtgctagggagrgggtcatgagtggtttgcggatttccacgtttgctgggaatacagggaaagtgtattcattttcttttggctgcaaataccacttagcatctcataggtagtttgcatctgtcgtccctttcagttgattttactcaaaggctagtctagttt

SEQ ID NO: 738219 - DNA, 627 bp, Homo sapiens
agccactgccctgcccgaattcattctttttaaccctttacaaagatagctagacttggcctgccttccagcttacaacaactatagtggacggaaattgaaagtttattgggctttgtgtaagagctcattgttgtttgtctttgtcagaaatttagcttcaacaactggatgtattaaccagcctggtggatttttattgcttcaagagagggtctttcattcccagcagatcagacagtggcccttttccatttgatttcagtgttaatctgctaagtgaatttggagtcatacattcccatttagtgtcttgtgccaaaattacttcacaagttatattgcaaaagtaaacttctccatgctaggggtgagtggatggaagcctgggccctgcatctgtggtggggtggccagtgggtgtccattagataggtgttgaggcagtgatgatcctatttttttttgkttttttttgtcttcttctcatgttttcataataaatgattgaacaaatgaagtgttcctgttttacaccccagaagttttaagaaagtacttatattatctcattttctttttctgctgacttgaactacaactactctttagcttctcttttcttag

SEQ ID NO: 738220 - DNA, 497 bp, Homo sapiens
gtcagaaatgcatatgcaacatgaggcaggagcgtcagcgaagggactttcagggacagcagacaggtctgtggtgatgaggaaagtctttggtcattggagtgaagtcaaaccagggtttgaaactctgctgtgccacccagaaaaatgtggatgttggcagccgtaaaatggcgtcaatacccacagacgtgtgctggggacattcccaggaggcaccaggaagacacctggttcattccctcccacacatttctccttctaggcgagaggaaaagatgaaagtgaatcccttccttctttctcaccactccaagacttagayacaaagtttacactttaggtaaagaccataattttgttttaaactttgccaccaaaaactattttcttatagtcatgttcactatcaatcactaagggagtaaagtattctattgtgaacagagcaccgcaaaacgttttacaactgtggcagacattaccagggatcacca

SEQ ID NO: 738221 - DNA, 535 bp, Homo sapiens
acaaatgtagtcacttaaaataacacacatttattgtctcactgtttctgtggggcagcagttgggcacagcttagcagcaccctctgtgagtcttacaaggctgcagtctcatctgaggctctactggggaaggattcgcttccaagcttacatggttgttggcagcattcagttccttgcaacctgctcactgaggtcaccagtttttgctggccgttagctggaggctaccygcagttccttgtcacatgagcctctcctacattgccacttatttcatcaaagctagcaagggagggcatctccctgcagggcaggcattatagacttacataacgtaattacatatatgtaatcaaaagactgccttttctctgtggtgtattctgttggttagaagcaaggcacagcttccgtccacacccaaaagaaaggggttacacaaaggcaggtgtgaacatcagcaggtgggaatcatggggccattgtagagttgtctaccatggtttgcttattggtcttttaatcatact

SEQ ID NO: 738222 - DNA, 634 bp, Homo sapiens
aagaactcactcgttcccaaggacaatggaaagcttattctccaactcaaattctcgaactcagccaaggtagtatttcattggcattatagctagtggggatatgggttaatctgttgtaacaaatatacaaaatatacaaatatacaaaaaaattatagtagtcaatcaagatagaagttgccgcttttctctctaaacagtttaaaggtggtgtagggtgagtagcactctgcaacaggaggtcacgtggagagccagggattgctactcctctgggatgtagagtgttgytctagtctacatgattgcgactggccatcagcatcacatccatgtcctagaccggggaaggggaaagagaggggcggaggacagctcattttcattttaaaggttgtgacctgtgcgttgtacatataacttccactaaccttccattagttatgtggttctatatgattacagggcaggctgagaaatataactacgttgtattgtattacaaataaaataagtcagtcttcatgtgagattggctctgtggaggaccagatggtcggatgctggtggagatgatgaggtgtgtgaagatgacggtggtggaggcagtgagatgatgttggttgcagac

SEQ ID NO: 738223 - DNA, 634 bp, Homo sapiens
aagaactcactcgttcccaaggacaatggaaagcttattctccaactcaaattctcgaactcagccaaggtagtatttcattggcattatagctagtggggatatgggttaatctgttgtaacaaatatacaaaatatacaaatatacaaaaaaattatagtagtcaatcaagatagaagttgccgcttttctctctaaacagtttaaaggtggtgtagggtgagtagcactctgcaacaggaggtcacgtggagagccagggattgctactcctctgggatgtagagtgttgttctagtctacatgattgcgactggccatcagcatcacatccatgtcctagaccggggaaggggaaagagaggggcggaggacagctcattttcattttaaaggttgtgacctgtgcgttgtacatataacttccactaaccttccattagttatgtggttctatatgattacarggcaggctgagaaatataactacgttgtattgtattacaaataaaataagtcagtcttcatgtgagattggctctgtggaggaccagatggtcggatgctggtggagatgatgaggtgtgtgaagatgacggtggtggaggcagtgagatgatgttggttgcagac

SEQ ID NO: 738224 - DNA, 536 bp, Homo sapiens
ggcctgtttgatattgactttccatcattattatttcatttctgaaagtttgatttggttctttttcaaatcgacccagccattttttgtcttttgttctttactaatttttattccatattttattttacttatttttatttgtatacatttggggagtacaagtatagttttgttacattataccatattttaaacattttatctacagttatgccttattctatatctagtattcctgtatccagagtccttggagcatctaaatctgtttatagtttccactgattcttacattgtagacttgtcttgtcttatagtgacttgtttccttgtgtgtctggtaattttgtrttgtggtttcatcttttgatgagctttgtgggaattctggggtcctaaattggagatgttttcctccacataggacttacatttgcttcttctgggagccagggtacaactgatctggaccactttgtccccttcttgggcttaattacagaagactcaggtttagcttttccaccttttgg

SEQ ID NO: 738225 - DNA, 696 bp, Homo sapiens
ataattttaatgcacagtcttcacaactctgacagagatagatgtggttttcatttttagaagttacataccatgcatttttaagctatgatttattttgacatttcattgaatcaattttgcagccacgtctgagtcttgagtggtgactaggttattttatttaccaaagctaatcaaacaaatgtgtataattttcccaacaaaataaacatgtgcactttggaatgtttaactattttttgctgtaagtgtaaaaatgtgtttttgctgagataaattgaactgtttgagacaggtccaacccaaaacacttgtaatattatattttggagttaactcagtctttaccctttccttcctgcttatttttatgttagaaaagaaaggtaagcttttcaacttttgtagttccgaaatgatttccaagtttagactgaatcagtctcctttggaaaacattcttgctatgtgtagagaagaaatagctgtaatgacaaacttgatatttatcttcrttattgccatgaatccatatacttgacttctgccggctattggtatgaccttcacgaggccttatccttatctttcatgattaactgagctttaccatttctgaaacagattctcttcactgggatccactgggttttattttcggaaagtattctcacagcaacaatgcatttgaaa

SEQ ID NO: 738226 - DNA, 522 bp, Homo sapiens
acaataaaatgtatagtcctcatcaaggactccaaagccatatatgagctgacatctccttccctgccaccctgacctcatctcttttcttctttctttcactttcctgccccagtcccgccggcccctagctggtccttaaacccacagcatgtctcaggcctttgcagttgttttccctccaggaagctgcatgattaccctatttagaggaggyttctcttgcatcgttccccaaatgctgttccccccccctctttattccccaaatttaatttttgtcatagtagagattatttatcgactgatatgtccatctcttccactagaatgcaaggtccacaagggcaaaatctttgtttttttgactattctatttcccatgtctagaacaatatctgcatatagtcaacatgcaacaaatatttatatttaagtctcatgtctataactaacatgttttgagtgcatatcatatgccaggcatagggcaaagttatttctattatctaaacctcacaa

SEQ ID NO: 738227 - DNA, 507 bp, Homo sapiens
tcacagcattgcccttgtttgtttcggctgtgctggctcctggctgtcagctgcctccccttgggcacgccgataaattgctgccgagcatttttcaggctgggagaaaatggatgagtcacagggtttggggagcctaagtgcaagcttgtttgagttcagtgtaaaatgggcaggtttcagaaggaggtggtgttcaggtgagggacacacccagaggtctctcagcatctctgttcctgaggacagracagcctaggcaagacccagatggtgtggccatgtctaggtttcttccagaggaacaatgggacctacgtggtcccctttctaacaccaaaactgatctcttatgtttatgggctcctttctggaagctgggtgagtgccaggtcctgactgaacttaggaaggcactttgtgaatgagtagatggtggaatagcccgtggtcaacctgggaagaagtccttggtcgagggatcccactgtatgccctgccatgagg

SEQ ID NO: 738228 - DNA, 551 bp, Homo sapiens
accttgttggccaggctggtctcgaactcctgacttcaagtgatccacttgcctcagcctcccaaagtgctgggattacaggcacgagccaccatgcctcgtaaaacaatcttgaaaaagaacaaagttgaaggcgtcatacatcctgattttaaaccttaatacaaatctaccataaacaaaagtttgtgttgttgtcatatggataggcatataaatcaacagaatgcagttgatatttcataaatacacccttatatttatcatcacttgactttaactatgatgggaaaactattcaaggggaagtacagacttctcagtaaaaggtactgtgccaactaatagtcacatgcaaaataatcaatctagacccatacttcacaacattygttaagagaaaaaaatctcaaaacaaattaaagacataaaggtaagatataaatctataaaatttgtataagaaaaaataggtctaagtatttgtgaccttaattaggcaacgatttcgtggatataaaaccaaaagcagagcaacaaaaaaatacata

SEQ ID NO: 738229 - DNA, 530 bp, Homo sapiens
cttcaatagccaattcgatcaagtggaagaaagggtatcagtaattgaagataaaattaatgaaataaagtgagaagacaagattagagaaaaaagagtaaacagaaatgaccaaagcctccaggaaatatgagactatgtgaaaagatcaaatctacgtctgattggtgtatctgaaagtgatagggagaatggaaccaagttagaaaacacccttcaggatattatccaggagaacttccccaacttagcaaggcargccaacattcaaattcaggaaatacagaaaacaccacaaagatactccttgagaagaacaactccaggacacataattgtcagattcaccaaggttgaaatgaaggaaaaaatgttaagggcagccagagagaaaggttgagttacccacacagggaagcccatcagactaacagtggatctcttggcagaaaccctacaagccagaagagagtgggggccaatattcaacattcttaaaaaaaagaattttcaacacagaattgcatatc

SEQ ID NO: 738230 - DNA, 644 bp, Homo sapiens
catcatttcatacattgtattgtctttgcccttttgttagagatcggttgactatatttatgtggagctattttggggttctctatactgttcaactgatctatttgtccattctttcaccaatattacattgtctttattactgtagttttatagtcatttttgaagttgagtggcatgagtccctaaacactgttcttctccttcaatattgtgttggcaactgtgggtctcttgtctctgtataaactcaatcagtttgttgacatttacaaaataatttgctgaaatttttgactgrgattgcattgaatctatacattaagttgagaggaaggtcttagcaatattaagtctgcctatccctgaaagtggaatacctcttcatttatttctagcaagattggagaaacttttgtgggttatatatcctcagttatgttttccaaattgtttactctctctcctctctcaggaatgccaatgagttataggtttcgttttttacataatttcatatttctcagagcttttgtacattttaaaaattctttttgtctttttttatggctgtctgaattgatttgaagtaccagccttcaagctctgagattctttccatcagctattctgatgtcaatact

SEQ ID NO: 738231 - DNA, 602 bp, Homo sapiens
tgggtattggagatattggtatgaccacaatgtgagcacaaactaaagatatatctatgtaatataaaaagtgatgaaaatatgcagcccttctagaacatcttgaaatatctagaaaacttctctctgtaccttgccaatggcactggattaaaggaaggyatcagtggtgtattagtccattttcacgctgctgataaagacatacccaaggctgggcaatttacagaagaaagagttttattgtacttacggctccacatggctgaagagacttcacaatcatggcagatggcaaggagcagcaagtcacatcttacatggatggcagccggcaaagagagagcttgtgcaggaaaactcccccttataataaccatcacatcttgtgagacttactgtcttgagaacagcacaggaaagaacttcccctatgattcaattacctcccacagggtccctcctacaacatgtgagaattcaagatgagatgtgggtggggacacagccaaaccacatcaaagggctgaaccttctcttctacagaaagagcaggttcattgataagtgataaggatgaacctaaaaaagtactcacagtt

SEQ ID NO: 738232 - DNA, 602 bp, Homo sapiens
tgggtattggagatattggtatgaccacaatgtgagcacaaactaaagatatatctatgtaatataaaaagtgatgaaaatatgcagcccttctagaacatcttgaaatatctagaaaacttctctctgtaccttgccaatggcactggattaaaggaaggtatcagtggtgtattagtccattttcacgctgctgataaagacatacccaaggctgggcaatttacagaagaaagagttttattgtacttacggctccacatggctgaagagacttcacaatcatggcagatggcaaggagcagcaagtcacatcttacatggatggcagcyggcaaagagagagcttgtgcaggaaaactcccccttataataaccatcacatcttgtgagacttactgtcttgagaacagcacaggaaagaacttcccctatgattcaattacctcccacagggtccctcctacaacatgtgagaattcaagatgagatgtgggtggggacacagccaaaccacatcaaagggctgaaccttctcttctacagaaagagcaggttcattgataagtgataaggatgaacctaaaaaagtactcacagtt

SEQ ID NO: 738233 - DNA, 628 bp, Homo sapiens
ttgctctgtgtaggacttccattactatattgaataagagtgctgagtgggagcatccttgttttttccattttttagagctttcagcttttctccattaactacgttagctgtaggtttgtcatatgtggcctgttttatgctgaggtattttccttctgtgtctaatttgttgatagttctaatcgtgaagagatattaaattgtgttaaatgctttttcagcatctattgagaaaattatatggtttttgtcctcattctgtttatgcaatgtgtcacatttattgaatatatatgttgaaacatccttgcatccttgggattaatttcacttgatcatggtgtattatctttttcatgtgttcttgtatttcctttgttaatattttgttaaagatttttgcttctatgttcatcaggaatatttccttgtagttttcttttmtcattgtatccttgtctgattttgatatcagggtaattctggcctcattgaattggctagaaaacttccttcctcttcaattttttagggactagtttgagaaaaagtgatactagttcttctttaaaagtttggtagaattcagcagtaagactgtcaggtcctgggtttttatttgttg

SEQ ID NO: 738234 - DNA, 624 bp, Homo sapiens
ggttctttcaaaaactttatctttgcgttcacaaattttttcttctgcttcatcttatatattgttgaagtccttgaatatatttttatttcgtttcattgagttatttacttccagaatttccgtttggttattttttaagatatctarctctttgttaaatttctcattcaggttatggatttttttttcccaccgacacctttgtttgtttatttgtgttctcttgaatctcagtgttttcctaagataattattttgaatttcttcaggcatttaatagattttcttttccttgggaactgttattggagaattattattcctttggaagtgtcatgttttcttgttttttaaatgtttcttgtgtccttatgttcctatctgtgcagctggtataacagtcacttcttacaattttttggattagttttcctaggaaaatatttttttctgtagatgtatgtataatgttggtggtgtaaattgctttgcctttgattctgggtgggtgcgttaatgtagtctccacataatttctgtggctgtattcaatgctggtggtgtctgtgagttccttagtggcctaggctatggcaatgctttgcttggcataaggatggc

SEQ ID NO: 738235 - DNA, 489 bp, Homo sapiens
ttaattttcaagtcaattgtatctaaatttttgaccactatatgaaagcttctaattcattttttattatagaatgcaaacacctctttccctactttgaccttgctgcttgaggagcatatttgtacagttattttaagaaggatacaaatctttggtaaatcaatgactgaaatttgtcttcatagaatagtaataaacacatttttaataatgttaaaagtatrtcaccatatgtttctctagaagccctaattttgtcttttaatattgtacatttattttgagttgtgaatgacaaggagtgatggcttgtcaccatcagttctcaattgcatctgaaatataaaataaaatgaacaaaagtcacatttaatgaaaatttcgctacaagcaagataagttttattagctgtttctcagtgaatagtttttgtaatgtactccagttcatagattcttatattatcataaacaaaatttaaatat

SEQ ID NO: 738236 - DNA, 578 bp, Homo sapiens
acatgatctctatcaaaatcccatcaggcttcattatagaagtagaaaaattgattgtaaaactcacatggaaatgcaaaggatctagaccagccaaaacaactttgaaaaatagcagacttggaggagtatcactggtttctagaatcactctcaagctacaataatcaagaaaaagagatggtagcataacgatatacactttgatcaatcaatacagcagagaatccaggaataggtcaacaaagaaatgaaaaaatgcatgttttagcacctttgttgaagaagatcctctcttcccagatccttcgcatctttagaaaggttattctacaacaaaggatgataaaacaattggatacccatatgtgaaaaaaaatttgttgtataccttacaacattaaacaatcttctgaaactggcttgtggaccgaaatgtaagatataacactatttaacttctaaaagaaaacacaggagaaaaactttgtgaccttggtcaggtagatatcttaaatattgtgcaaatatgcaccaaaaatatagtcyataaaagactaagttgttaaattaaatgt

SEQ ID NO: 738237 - DNA, 540 bp, Homo sapiens
aggtgctcagaatcactggacggtttctttcaaaattgtagaagaaccaataatattatgctccaacatattactttcatagaaattactcaagatggcagacaacaaaacaaagaaaaattatcaatattcaaaggagtagtattaaacttaattgaactcagtatcattattattaacatgttaaaaagtataagatgtttattaatttttattgcttttaaaatcaagaagtggctaccataattttctcacaagcaatgctaagatacctagaagtaatatgtatcatactaatagtatattacactawtgcatgatgatgcaaaaacgtgcttacttaagaaaaagttaaatcacttcggtgtgttgcactaattacttataaagttttccagaatgaacatatttaattatcattctattgataattgaaaaatactatacttacaaaatgtaactgttctttaatagctaataataactaaagattatggttgtccaatactgaggatcacagtaaaaaataaaatcatatta

SEQ ID NO: 738238 - DNA, 632 bp, Homo sapiens
ctttataatgaaggttgcaaaaaccttaaaatacattagaatgacataaaaaataaatgttacagtcaatttttactactttattctaatttgttgagtttgctagatctccatatcttaaacacaagcctaagagtccttatttactagagaatgtgcaacatttttgtctccattcttaatggtttttcaaattcacctattagaccatcacagaacttgtttaaactgtatttcaattttggcttgggcctgacacttccaaaacccatttcactgaactttgaagtaaaatgattactactgctaaacctgagactcatccttcaaaaactaattgaatcattaattgatcattaattgaatcctacaagaatgtcttattcttggccaggcrcagtggctcatgcctgtaatcctagcacattgggaggccgagctgggagggtcacttaaggtcaggagtttgagaccagcctgggcaaagtagtgagacctcatctctacaaataattttaaaaattagccaggcatggtggcacatgcctgtggttccagctactcacgaggccgaggtaggaggatcacttgagcctaggaggttgaagctgcagtgaggcatgaccatgcca

SEQ ID NO: 738239 - DNA, 632 bp, Homo sapiens; identical to SEQ ID NO: 735823

SEQ ID NO: 738240 - DNA, 614 bp, Homo sapiens
gctaattgagacttggcttacaaggctgacagcagaggaagaacagtagtctggtttcagaaccaagattaacaggagagaaaaaagatctaattggaagctgcattaactttttgaagaggcagataaccgctgagaggcagggcaactctmttcatagggacaggctcatcatggaaaggaaatagaagattaatccactatggattctctacgcttggactgatttaatttccaaagacctccttcaagtctgccttctctttgctccctctcagggtcatttctagacatggaaaggtggcatttgtgtttcccttccatggaatgaaccttgtggggctgaaaaggggtgacaacctggtggtgccagagagatgactgcgagtgactgccagatgcaaaccgtggaggctcagggctgttccaggtctcttgggacctcgggacagacatgcacaggggctgtaaaagaatgattgcctcctagctgcaccccggcctgaaccagggtcagggtagctggtttacaaggaatttgtcaaagctttgcagggactacatgttgaaacgttggggttgtaaacatggtaggaaggcatggagacaaaagc

SEQ ID NO: 738241 - DNA, 529 bp, Homo sapiens
ttttagttttgaaaggaaattgccaaactgtttttcagcctggctttactattttacgtttccaccagcaacgtatgagtaatacagtttttccacatcttgctagtatttggtgttatcactactttttattttagttatcctataggtgtgtagcgatatgtcattgtagttttaatttgtatttctctaatggctaatgatgttgactatcttttcatgtgcttatttgccatrtgtatatcctctttgatgaattttttctgcatactttttgcccattttctaattggattgtttctttactgaattttgatagttttttacatatggtagatattaatcctttgttggatacgtggtttgcaaatatcatctcccagtctgtatctcttagcaggatcttttgtggagacaaagattttaactttgttgaagtccagtttatccatttttcatgttatggaacatcggttttcttttcaccaaaatgattatagagcttgaaaggactttacaaagattctac

SEQ ID NO: 738242 - DNA, 529 bp, Homo sapiens
ttttagttttgaaaggaaattgccaaactgtttttcagcctggctttactattttacgtttccaccagcaacgtatgagtaatacagtttttccacatcttgctagtatttggtgttatcactactttttattttagttatcctataggtgtgtagcgatatgtcattgtagttttaatttgtatttctctaatggctaatgatgttgactatcttttcatgtgcttatttgccatatgtatatcctctttgatgaattttttctgcatacyttttgcccattttctaattggattgtttctttactgaattttgatagttttttacatatggtagatattaatcctttgttggatacgtggtttgcaaatatcatctcccagtctgtatctcttagcaggatcttttgtggagacaaagattttaactttgttgaagtccagtttatccatttttcatgttatggaacatcggttttcttttcaccaaaatgattatagagcttgaaaggactttacaaagattctac

SEQ ID NO: 738243 - DNA, 529 bp, Homo sapiens
ttttagttttgaaaggaaattgccaaactgtttttcagcctggctttactattttacgtttccaccagcaacgtatgagtaatacagtttttccacatcttgctagtatttggtgttatcactactttttattttagttatcctataggtgtgtagcgatatgtcattgtagttttaatttgtatttctctaatggctaatgatgttgactatcttttcatgtgcttatttgccatatgtatatcctctttgatgaattttttctgcatactttttgcccattttctaattggattgtttctttactgaattttgatagttttttacatatrgtagatattaatcctttgttggatacgtggtttgcaaatatcatctcccagtctgtatctcttagcaggatcttttgtggagacaaagattttaactttgttgaagtccagtttatccatttttcatgttatggaacatcggttttcttttcaccaaaatgattatagagcttgaaaggactttacaaagattctac

SEQ ID NO: 738244 - DNA, 510 bp, Homo sapiens
tcagtggcatcccacaaattttgttgtgttttcatttcatctacttcagaatgctttctaatttccctttagattcttttgacccatgagctatttaagaagtacgttatttagaagtacaaatattgagggcttttccaaatatcttggttgctgatttccaaattccattatgcccagaggccacatcttgaatccttttaaaatcctctgtaccaaataaaattaggaaataggtccaggttttgcttctgtcacgggtgagattttttagtgtgtctctaaaggttggtacgggctttttttttgcmaacaggtgaaaagggcaagagtgactacactatgcaagaatttgtttgtgggttagtctggtttcaaagagaaaaaccatgtttagaatcagaacttagcttagcaagttaatttctactgtcccaggaaatgatgaggaactgagacacacagggctaagatcacatagccaattagaagttgatccttaaggctgaa

SEQ ID NO: 738245 - DNA, 542 bp, Homo sapiens
actaatccaaagaaagaaatggatacaactcctgaagatataaccataacaaaatgaagacataaccataaaaccactgggtttgaaaggcattggcagactttcgaatcccccccccgccgtgatcacatgtgagtacattattctaaacagaaattctacatttcacaaaaagtttgcccagcttcatatagcagagccagaaaagggttcttagttagttcaatgccctcagagaacactttattgcacttcaaaaattaagagctgtaaattgtcatagtcttttgggaacrgagtttgaaaatagcaattaaaacacttaaaacacattttctgttggctcttcaagaaaaaaaaaagcacccacacaaggttagatgagtatgtatgtttgtgtagcagcatttacagcggcaaaaactagaaataacctgactgccccatagaaggggcaatagtgtatccacactatggaatattatgcagtgatgaacaaggataaggtaaatgtatacaaggcctaaagtgatagcaataat

SEQ ID NO: 738246 - DNA, 598 bp, Homo sapiens
cacacacacacacacacaccccccataccaaggagatgacagttgttctggtttgttgatgctaaattcttggatatagcaggatcaacatactgctggagtcaaattgtgaagttgaattatctttatgatcaaatggcaacattaagattatgtatataaagttcctcacacagtgcctgataaagaaaagttattaattttaatagaatcttcttttagtgcagatactggcagaagaaacccctttcctggagtttatgtgaccttaccttacagaatgtttctttcccagggtgggtgtmtcttggttctggaacctcctcatctatcggcatgtccccaccactttctgatttgcttgtgagagtcatggaggacagatgggatataactactatttcctctccactaacaagctggcaaaccttaaaagattggaggaatgggggctggtgggcaaaggaatttggtcaaagtacagacaaaaataaaatgtccctgactggggtaccatatacagtgagacccatactaagcagtgtttcatatgactgtttcatgatctcaaaatccttatggtttcttaaatcccaag

SEQ ID NO: 738247 - DNA, 416 bp, Homo sapiens
atttttgctttataagcatagcattattttcagcacactgaaggtaggtgtcgggagggcagaaaagtgcctaaggcatgctaaaatgatagattttaaaaaatcacctgctttgtggttacttctattgctttataaattatacttatgygttattcgcataagtgattttctaattagttagaataggagtcctcaaggaaagacagccaatgctgttgctcctcagaacctagtagataaattgacttgacagaaacatttccaagggaatatattttagggcccaagggtcagaacgtggtgtcatgaagtggatcagcacaccaccgcatgaattctcctgatacacactgttctgcgccttcacagctcggttgctggacagtggtcttcaaagtaacactcgcagggtc

SEQ ID NO: 738248 - DNA, 513 bp, Homo sapiens
gccgccttcgagggggcgcacctgctcctgggcccgctgtgcagtctctgggccgtcagggcttcgagccttgtcacttgtttgctttgcttcattgaggaaattgaaacataaagttatttgtgtttcctcgctgttttctctcttttttttttttttttttttttttgagacggagtctcgctctgtcgctcaggctggagtgcagtggcgcgatctcggctcactgcaagctccgcctcccgggttcacgccattctccagcctcagcctcccgagtaragtagctgggactacaggcgcccgccaccacgcctggctaatttttttttttgtatttttagtagagacggggtttcaccgtgttaaccaggatggatacgatctcctgacctcgtgatccgcacgcctcggcctcccaaagtgctgggattacaggcgtgagccaccgcgcccggccctcgctgttttctccgagtgtctctggagatagtccttaggaaaacggatttc

SEQ ID NO: 738249 - DNA, 547 bp, Homo sapiens
acataattctctaaatggagtgttttcagtgtgtaagcttatactgagaaagtgctctgaatgtctgcagggaggagtagacatggtcccagccctcaacatgtttactgatgtgtcacggaaaatgacataggtacacacgtaattaaagcgcygcaaaggagataaaggagggggagtaacatcctttgggggaatcagaaaaggcttcgggagcttggggaaaatttggaatggaccttgaagaacagtaagatttcattagatggagattaagtttgggagaggaggaaggatgtgacagtttgagggacagaggaaagaaaaggaactatccaagtgttcagtgtggttagggaactgggttgaggaattgactaaataggacgggaaagtgagttggagttagaatgtatcagaccatggctgaccattaagaagattttgcagttgttgatacaatagcgatatatatgtatatatgtatgcgtgtgtgtgtgtgtgtgtgtatgtgtgtgagagagagagagagagatgtggtttaaat

SEQ ID NO: 738250 - DNA, 524 bp, Homo sapiens
tgtggcatatacatataatttatagcaaaaataatggcaatgtatttaaagtggcattttacgtttacctagatattcagtaggtgcatttcatcatcagagtattcggtgtaagatctaataataagaccttattttgaaagaagaataagagccttagaattcatcatctccaaagaataaatgacaccacaatatagtagttacttggatttcagagtttggaatccaagctctgccacttactgattatacaacatggggcaatgtactcaccatcccttacttttcctatccgtgaaatgaagataagaaaatctactttacatcatggttttcaggarcaaatcagataatcattgtcaagtccttggtgtattttctggtatatagttattcatcttaaccacagctaccatcattgttactgctgctgttactgttgtgattattgttgctattataattagcattactactatttgtactagtagtggtggtggtggtgcctaattctcttccta

SEQ ID NO: 738251 - DNA, 602 bp, Homo sapiens
ttctggccttaactagggcctcggggatttttctgggaaactgatgctctgcagaataatcaacatcactaattaaattcttccatcgatccaaagtttggtgagcccataattacagtgtgccaggctagtagctggggagataggaaggaactagatagacagacagggtccctgcctttagcaagcttagagtacaatacagagacattcacccaacatgcttgtaaataaaatgtaaaatggaaaatttgctcagtgtcaaaaaggaaaattacatggtgctttgaagggaagtgtcagttaagcttagacaagaayggtgacctctgtgatagaattgccgctggtcatcattcatgttctaggtagagggaagcttcaggagggcccccaggtggaagtgcttaaaaagccttgagaaaagctatgtggtgaacaagcaaggaattcctggagaagtaggcatgagttgggctgaacagggctttgtgtgtcatagaaaacaaattaataatacaaaatggactttatcctaaggtttagagtcactgaagggttttaagtaggggagtgatatgatcggatctctctctctctct

SEQ ID NO: 738252 - DNA, 551 bp, Homo sapiens
ggttgtcctgacatgagaaaatgcacttattatgacagcaatcatactatgatgtctaggtaacaggagagctacccaacctttgttgctttttggtgacaggagtgcctgtcaactcaacagctgacattttcattcactctgacatagacatttgggaggaaagagataaaggagcaaatttgagaagtttgtgtctctccctgttctcaccctccccactgctcttgcttctgctctgcattgtgtccataggcattaagtggcttctctttgtttyttcagcaaagtctttgccatatcggaatgagccacttttggcatctatttgtggcaataatcagaagagtcactgacaaagcagggctgggtggatggaccgcgtgctcatgaaccacctgagctgcaccagttgggtcccggcctttctcacagtcctgatccccgatccctgctgcatgtgtgggatgggctgaacttgtgctgggctgtaggcatagtgcattaatgcaacccattttgacctttgctcaatgtcagacactgttctg

SEQ ID NO: 738253 - DNA, 498 bp, Homo sapiens
gaaaaggacattgcaagtcattactgaatgtgaagagagtgaatggtagtttattttttggggaggtggtcaaggtgttgcatttggactgcccaatttagctaatgtagctgcagcagtaataactaaagtggcagtgcagaatattaaggaaagtaatgtgggaagcaatttgaatatgtcatgatgactactctgtgtttrcatacaggatgacgagtaatgtgcaatgcgtgagttctttttcattgagtttaaaggagttttaacctccaaactgatactagtgatagaaatttcaagaaaggaataaacctttgggtgagaaatttcaggctggttagcactgtacctgccttcaagtttgcttggagccctaggctacctcttccttctccacgtataacagttctggttcctctcttagggttactttcatttctttaggtactttttttttctctcacttgcttagatttgccatttatttatttattt

SEQ ID NO: 738254 - DNA, 666 bp, Homo sapiens
aggtacattttcctaggccaaattaatatggattttgaattatctcctgttgttcagaaagatcctccctgcattggtggttttgacatttcccaggctccaagagccatggatctcctctgagagctgcactggagaaggttctgaaagtcttctttacatctctaaccagacaggtccttaggaaactcctccagcaagcactgaccccttcacagccagtcctgtgtcggactctgaggtaaagacaccacccagttgctgccctcagaatcaacctagcccttgcttctctcacaagagtgaaacttggaggcattaatatatatttttgttctgcaaaactttaaagaataaaacattagaaataaaactataacaatcatccatgtgcctgccacccagatttattgttttttaaagaagtaaaacataaatatagttaaaattccttgtgtatccctcccagtyccaatcctccctcagaggcaagcactgtggtgaagcttgttactgttctacatgtatttcacagttttattatatattcatatgcacatagcacataaacttaaaagacataaactcatactgtatataaattaaattttacacttaatataaatataatttatatattacacattacaaaaagttgtttatgta

SEQ ID NO: 738255 - DNA, 628 bp, Homo sapiens
cttgttactgttctacatgtatttcacagttttattatatattcatatgcacatagcacataaacttaaaagacataaactcatactgtatataaattaaattttacacttaatataaatataatttatatattacacattacaaaaagttgtttatgtactgcataagctttacatttaaatattatacttagtcaaaaataaactatatatttacataaatataaactaacatttatataccgtatgtctaacattaacgtttatactgtgtatagtgtgtataaattaaaatgtacaaaattagcttcaaacccttcacataatgatggtctaacttgccttttgtccaacacaatatatttttatttctattcattttgatgcatcttgattcccttcattcattccaactgcagtggagttttccattattggaatatgtcacaaataatttatgactgtcctrtgatttgcaaagtacacttgtttgaaatttcctatgactacaaacaatgctgccacacattctgtggctgttttcttgtgtacacatgcgagtgattttaggacagatacatagaagtggatgcttcccctttaccaggtattgtcagttgtttttaaa

SEQ ID NO: 738256 - DNA, 695 bp, Homo sapiens
tatccttttctttctgggatccctgggctcttcatacccatcccttggctgagcagctctccatgctggagtactctaaataaagactttgctacaaggcccataatgttccttatctctcttctcatggaaatttgtcaggtgactctcttaggtccttgttctttgctgggtttaataccataaaccactgtgatttagggtgttaatggttatcagtcatcaaatgccttgtttcatcatcctttgcatttgaagaatacttttcaatgttttgctgcaaaggaaggtgtggtggatgtggcagtgcattgccctggttctctattccacatggaagaattcattctccagctgctcagtgttggctgctgatggctcacagctgcatccctctccaagaaccacaagggctgccttgcccaagtttgtgtccttttcctgggggccaagcacgttcaatgactagtgaaayaggagtacaaaggctataaagaccagcgccccttgctgtacgtggggaatctctgaaaggcaccccctttgcagttgcagagttccctgtgagtttggctaaagtttctgtgatgagtgcattgcagttcaacttctctctctgcccaactggattcccccattccttatgaagttgtgttgctgatccaccaatcccactctcaacatacacaacaaaa

SEQ ID NO: 738257 - DNA, 695 bp, Homo sapiens
tatccttttctttctgggatccctgggctcttcatacccatcccttggctgagcagctctccatgctggagtactctaaataaagactttgctacaaggcccataatgttccttatctctcttctcatggaaatttgtcaggtgactctcttaggtccttgttctttgctgggtttaataccataaaccactgtgatttagggtgttaatggttatcagtcatcaaatgccttgtttcatcatcctttgcatttgaagaatacttttcaatgttttgctgcaaaggaaggtgtggtggatgtggcagtgcattgccctggttctctattccacatggaagaattcattctccagctgctcagtgttggctgctgatggctcacagctgcatccctctccaagaaccacaagggctgccttgcccaagtttgtgtccttttcctgggggccaagcacgttcaatgactagtgaaataggagtacaaaggctataaagaccagcrccccttgctgtacgtggggaatctctgaaaggcaccccctttgcagttgcagagttccctgtgagtttggctaaagtttctgtgatgagtgcattgcagttcaacttctctctctgcccaactggattcccccattccttatgaagttgtgttgctgatccaccaatcccactctcaacatacacaacaaaa

SEQ ID NO: 738258 - DNA, 695 bp, Homo sapiens
tatccttttctttctgggatccctgggctcttcatacccatcccttggctgagcagctctccatgctggagtactctaaataaagactttgctacaaggcccataatgttccttatctctcttctcatggaaatttgtcaggtgactctcttaggtccttgttctttgctgggtttaataccataaaccactgtgatttagggtgttaatggttatcagtcatcaaatgccttgtttcatcatcctttgcatttgaagaatacttttcaatgttttgctgcaaaggaaggtgtggtggatgtggcagtgcattgccctggttctctattccacatggaagaattcattctccagctgctcagtgttggctgctgatggctcacagctgcatccctctccaagaaccacaagggctgccttgcccaagtttgtgtccttttcctgggggccaagcacgttcaatgactagtgaaataggagtacaaaggctataaagaccagcgccccttgctgtacrtggggaatctctgaaaggcaccccctttgcagttgcagagttccctgtgagtttggctaaagtttctgtgatgagtgcattgcagttcaacttctctctctgcccaactggattcccccattccttatgaagttgtgttgctgatccaccaatcccactctcaacatacacaacaaaa

SEQ ID NO: 738259 - DNA, 455 bp, Homo sapiens
ttacatgggtggcagcaggcaaagagagaatgagcatgtgcagggggactcctctttttaaaaccatcagatctcatgagatttattcactatcatgaaaacagcatgggaaagacttgcccccatgattcagttacctcccaccaggtccctcccacaacacatgggaattcaggatgagatttggttggggacacagccaaaccatatcacatggtggttgtggtggagataacagtatatatttagaagatrtcttctgacataacataatctgaagggatctagatcatctaaacatttttaaaatcaccatattagtttactacattgaagaaaacatgttagttgcaccggataagcaaaaagaagcaagtatattggagggtttggtaagacacatgcttcagagggtggaaggtaaaactctatagagattcatagatctgtcacaa

SEQ ID NO: 738260 - DNA, 561 bp, Homo sapiens
gcattcttcacatagttctcgagcattggcttaaactccatcagctcctttaagcacttctctgtattggttattctagttatacattcttctaaatttttttcaaagttttcaacttctttgcctttggtttgaatttcctcctgtagctcggagttgtttgatcatttgaagtcttcttctctcaactcatcaaagtcattctccatccagctttgttctgttgctggtgaggaactgcgttcctttgraggaggagaggtgctctgctttttagagtttccagtttttctgttctgttttttccccatctttgtggttttctctacttttcttctttgatgatggtgatgtacagatgggtttttggtgtggatgtcctttctgtttgttagttttccttctaacagacaagaccctcagctgcaggtctgttggagtttgctagaggtccactctacaccctgtttgcctgggtatcagcagcagtgtctgcagaacagcggtttttcgtgaaccacgaattctctggaagttttgtctcagaggagtacccggcca

SEQ ID NO: 738261 - DNA, 561 bp, Homo sapiens
gcattcttcacatagttctcgagcattggcttaaactccatcagctcctttaagcacttctctgtattggttattctagttatacattcttctaaatttttttcaaagttttcaacttctttgcctttggtttgaatttcctcctgtagctcggagttgtttgatcatttgaagtcttcttctctcaactcatcaaagtcattctccatccagctttgttctgttgctggtgaggaactgcgttcctttggaggaggagaggtgctctgctttttagagtttccagtttttctgttytgttttttccccatctttgtggttttctctacttttcttctttgatgatggtgatgtacagatgggtttttggtgtggatgtcctttctgtttgttagttttccttctaacagacaagaccctcagctgcaggtctgttggagtttgctagaggtccactctacaccctgtttgcctgggtatcagcagcagtgtctgcagaacagcggtttttcgtgaaccacgaattctctggaagttttgtctcagaggagtacccggcca

SEQ ID NO: 738262 - DNA, 561 bp, Homo sapiens
gcattcttcacatagttctcgagcattggcttaaactccatcagctcctttaagcacttctctgtattggttattctagttatacattcttctaaatttttttcaaagttttcaacttctttgcctttggtttgaatttcctcctgtagctcggagttgtttgatcatttgaagtcttcttctctcaactcatcaaagtcattctccatccagctttgttctgttgctggtgaggaactgcgttcctttggaggaggagaggtgctctgctttttagagtttccagtttttctgttctgttttttccccatctttgtggttttctctacttttsttctttgatgatggtgatgtacagatgggtttttggtgtggatgtcctttctgtttgttagttttccttctaacagacaagaccctcagctgcaggtctgttggagtttgctagaggtccactctacaccctgtttgcctgggtatcagcagcagtgtctgcagaacagcggtttttcgtgaaccacgaattctctggaagttttgtctcagaggagtacccggcca

SEQ ID NO: 738263 - DNA, 561 bp, Homo sapiens
gcattcttcacatagttctcgagcattggcttaaactccatcagctcctttaagcacttctctgtattggttattctagttatacattcttctaaatttttttcaaagttttcaacttctttgcctttggtttgaatttcctcctgtagctcggagttgtttgatcatttgaagtcttcttctctcaactcatcaaagtcattctccatccagctttgttctgttgctggtgaggaactgcgttcctttggaggaggagaggtgctctgctttttagagtttccagtttttctgttctgttttttccccatctttgtggttttctctacttttcktctttgatgatggtgatgtacagatgggtttttggtgtggatgtcctttctgtttgttagttttccttctaacagacaagaccctcagctgcaggtctgttggagtttgctagaggtccactctacaccctgtttgcctgggtatcagcagcagtgtctgcagaacagcggtttttcgtgaaccacgaattctctggaagttttgtctcagaggagtacccggcca

SEQ ID NO: 738264 - DNA, 638 bp, Homo sapiens
aatgcttaacgttagggattgataaccttttaagaaacatagataaagctactgatgccaattcttctggatttttagaagaagaatgagaaattataacttcaaatcaactctcaaaattagggttgagagttatttttaacagagtgaatttccaaggccacatcatcagttactctagcaaagaaaacaatgtcattgggttagctactcaaaaattacctgtgaggatgaggtaacaatcacgtgcttctgaaaagcctgttgttcytcacagctggagcctatcccagtatctattcagaatgcgtttcagtctttaaaacttcttgcttgggctctccatcacagaggtctctctcttcagaatatggtcattcgccataaaacaatcgcataatatagtcattatgcaactattttttgagcatttttgtgctaagagtgtgtggtaggcatgtgccaaatcctgggtataaaatggtggacaagatagacctggctcgcctaggtggagcttacagagcttacaaggaagacagaaaattaaacgattatggtaaactatgatgaatgcagtgaaaaggaagcacatcacaggagcaacatcctagccttgggaaggggtctggggatgg

SEQ ID NO: 738265 - DNA, 511 bp, Homo sapiens
tgtgcctgagtcattaccacacgtcacagcgaggctgatcgatttaaaaaagtcagtcccagtttaaacgccccacagtagggggatgtctacatacattaggcacagccatgctattgagcatgttgctatggctaaaatgaatggagtagctctagatattctctgagagaaagattgcttaaatgtattgttaagtgaaaaaaaagagctgcagagcaatacatgacacygtttatgtaaaggttactcccatataacagtagtatatatttccatgggtacacttatgtgagtgtaaatgcaaggaaacattctggaagaagagattgcaaagagtggcagcagttatctctgcagaagataggattgtggatgactcaataggacttggtcctcatctatagcagttggggatttttgttacctgtgtttttgttgttgtttacaaggagaacatactcatgtgctacatgtgcgaatttaaaaactaaagagaaactaagtagaa

SEQ ID NO: 738266 - DNA, 595 bp, Homo sapiens
cccaattttgccgggaaatttcttaatttaaaggtaataaccaagctgacattttactgtagccaaatcctacagagggtttcaaaatgagtgggtgaaaaaatatacaagcttaacatgcttatacttatttaacatgaagtgaaaatcattagcatagttcaggtatgtgcatggtatgtgcacgcacatggggcagtgctgtcatctaacagaagcccacctttttacttgactaatggtttactgttaatacctcgataatagtgtaatctttgatagacttttataaatgattatttcaaatgctttttgatcaccttcaagaatatgacctgagacaggtaatgtaatttagcagtttgcatctatgaactgtggaggatacctacagacactgaagygttactaacagtaggatgcaggcattatgtgaatgcgtgggtattttatttccatttatgggctactatagcaaaaataattggggagttgccctatgatgaaagaagactgcatgttttttaaaaccatacctttgtccaaaagcaaatggtaaataaaaatagactgttgacataaagcttcgctattt

SEQ ID NO: 738267 - DNA, 593 bp, Homo sapiens
tgaatgcctgaaacctccttgactgcaagccattttcacagattatgaaagacagttagggctgaaacggatccttctacagattatctaacacaaccccctctttttaaaaacttttattttaggttcaggggtacatgtgaaggtttgttatgtagataacatacaaagtttgccgtgacwcaggcaaacttgtgtcacgggggtttgttgtacagatagtttcatcacccaggtattaagctcagtacccaataattatttttttatgctcctctcctttctcccaccctctatcctcaagtagacgctagtgtctgttattcccttttttgtgttcaaaaggtctcatcatttagcttgtaagtgaaaacgtgcagtatttggctttccattcctgcattagtgtgctaaggataatagcctcctgttccgtccatgttcccacaaaagacaagatctcgttcttttttatggctgcatagtattccgtggtgtatatgtaccatagtttctttatccaatctgtcattgacaggcatttaggttgatgccatgtctttgctatagcaaacagtgctgcaatgaacatt

SEQ ID NO: 738268 - DNA, 585 bp, Homo sapiens
aaatgaaaaacataaagtataagagcaaacaaataaccaaaccaaacacacacacacacttgaaaattatagcggccaggcacagtggctcatgtatgtaatcccagcactttgggaggtcgaggtgggtggatcacttgaggtcaggagttcaagaccatcttggccaacatggcgaaaccccgtctctactaaaaatacaaaaattagccaggcatggttgggtgcacctgtagtcccagctactccaggggctgaggcaggagaacttcttgaacccgggaggcggaagttgcagtgaacaaagattgygccactgcactctagcctaggtgacagagtgagactctgtctcaaaaacaacaacaacagcaaaaaaaaaaaaaaaaaaaacaaaaaaacaaaaaacaaaaaaacagaaaagaaaagaaaattatagcaacattgactatctttggaaggaaacacaataaattgataacagtggttatatctgaaggggaaatttgaggattaggggacagggataggaaaaaatacctgtttttcactgaaaaactattttgtaactttagccatttgtat

SEQ ID NO: 738269 - DNA, 593 bp, Homo sapiens
tgaatgcctgaaacctccttgactgcaagccattttcacagattatgaaagacagttagggctgaaacggatccttctacagattatctaacacaaccccctctttttaaaaacttttattttaggttcaggggtacatgtgaaggtttgttatgtagataacatacaaagtttgccgtgacacaggcaaacttgtgtcacgggggtttgttgtacagatagtttcatcacccaggtattaagctcagtacccaataattatttttttatgctcctctcctttctcccaccctctatcctcaagtagacsctagtgtctgttattcccttttttgtgttcaaaaggtctcatcatttagcttgtaagtgaaaacgtgcagtatttggctttccattcctgcattagtgtgctaaggataatagcctcctgttccgtccatgttcccacaaaagacaagatctcgttcttttttatggctgcatagtattccgtggtgtatatgtaccatagtttctttatccaatctgtcattgacaggcatttaggttgatgccatgtctttgctatagcaaacagtgctgcaatgaacatt

SEQ ID NO: 738270 - DNA, 591 bp, Homo sapiens
tcccatgagttctttcctaaataaaatccattaatttctaacgcttggggaagttttaaagttgtggtgaatgaactcacacggaaggttcaaattagaatgtgtgtctagcagtggtcatttacaggtagtgagattggttggtttttcattgttttatcagtgttccttcatttaattgttcaaccgttaaagtttatgggaggccattgttttggaccagtctcctgtactaggtcccagcagacctgggkgtgtgtgtgtgtgtgtgtgtgtgtgtgtgtgtgtttgttgctctgtcacccaggctggagtgcagtggggtgatctcggctcactgcaacctccgtctcctgggttcaaggaattcatgtgcctcagcctcgtaagtagctgggactacaggcgcaggccaccacgcctggcaaattttttgtatttttagtagagatgaggtttcaccatgttggccaggctgatcccgaactcctgacctaaagtgatccacccgcctcagcctcccaaagtgctgggattacaagtatgagccaccgcgtctggcatgttgtttcatttttaagagacagggtc

SEQ ID NO: 738271 - DNA, 591 bp, Homo sapiens
tcccatgagttctttcctaaataaaatccattaatttctaacgcttggggaagttttaaagttgtggtgaatgaactcacacggaaggttcaaattagaatgtgtgtctagcagtggtcatttacaggtagtgagattggttggtttttcattgttttatcagtgttccttcatttaattgttcaaccgttaaagtttatgggaggccattgttttggaccagtctcctgtactaggtcccagcagacctgggtgtgtgtgtgtgtgtgtgtgtgtgtgtgtgtgtgtttgttgctctgtcacccaggctggagtgcagtggggtgatctcggctcactgcaacctccgtctcctgggttcaaggaattcatgtgcctcagcctcgtaagtagctgggactacaggcgcaggccaccacgcctggcaawttttttgtatttttagtagagatgaggtttcaccatgttggccaggctgatcccgaactcctgacctaaagtgatccacccgcctcagcctcccaaagtgctgggattacaagtatgagccaccgcgtctggcatgttgtttcatttttaagagacagggtc

SEQ ID NO: 738272 - DNA, 556 bp, Homo sapiens
ttaccttgcataatgcctggcacaagtgagtgcttactcagtacctctgaatgaatgcctgcaagctaagacgacgtagaagcaaaaaaggcagaaacttctaaaaaaacaaaccagagttatagacaccaggcaccagtgaaagcccwccttggcgcttagaagaaacatattccaaaaaaagaatatgttttaaaattaaacatattttttaaaaacttttttaaaaaacatatttttaaaattagaaaaagaagccttaaataactttaaagtagcttcaaatatacatgaggaacaaactgatggtatgtgagagtagtttagaacattgagtgctttatgacacccttggattgcttttgatgattcttgggaagccagaaatggtgactggaagaccagcagtatttatgtagcagacaaatcatctctacctttgggaaaattgcttttggagtctgtcctagttgaagccacttagtgaacttaaatggtgaactgcagggtataaaggtgtgggtggaaggcacggggaagcacgttgcctgccaaa

SEQ ID NO: 738273 - DNA, 580 bp, Homo sapiens
ctgtttagtgccttaccttgcataatgcctggcacaagtgagtgcttactcagtacctctgaatgaatgcctgcaagctaagacgacgtagaagcaaaaaaggcagaaacttctaaaaaaacaaaccagagttatagacaccaggcaccagtgaaagcccaccttggcgcttagaagaaacatattccaaaaaaagaatatgttttaaaattaaacatattttttaaaaacttttttwaaaaacatatttttaaaattagaaaaagaagccttaaataactttaaagtagcttcaaatatacatgaggaacaaactgatggtatgtgagagtagtttagaacattgagtgctttatgacacccttggattgcttttgatgattcttgggaagccagaaatggtgactggaagaccagcagtatttatgtagcagacaaatcatctctacctttgggaaaattgcttttggagtctgtcctagttgaagccacttagtgaacttaaatggtgaactgcagggtataaaggtgtgggtggaaggcacggggaagcacgttgcctgccaaataactggaaaag

SEQ ID NO: 738274 - DNA, 640 bp, Homo sapiens
taaactcaggttctttccactatagtatcatgtaccattagtctaaattatttatttaaatctttgtggtgttttttcttccagctccatggcaccaagaatcctttcatccaggacactgaaaatagtcttctgtctattgaaataagacataacaagtttttccaaatattttttacttatatattttttaacatttagygatttttaatgtttgtaaatgtggtaggaaatataaatcatatggtcctttgtaaaatatacaaataatctaacacatatcatataggacatcaatttctaacatctgatataccagaattatttccatgcaattataaggggagggtaatatgatcaaagttaagcaatagtggtaaaatctttaaaactagattcttgcttctgatatgtttcaatacattgttgatggcattgtgccatttgagctgaaagcaggattttttttcattagtcatcaaaccaagaattttataattcttgacactttattatataatttacaattctatgccagatatggcaaatttcttcaatttcagtattttatagtttctacttgtaaaatatttttaataagaaaaattggtttgcataatctcagtgtttccttgagtag

SEQ ID NO: 738275 - DNA, 477 bp, Homo sapiens
cgcggtggctcacgcctgtaatcccaacactttgcaagaaaaaagaaaattctttttcctgacccatccatctagcatcccacctgactattcagtttagttcatctgaaatttattgagctccacagtttggtactctacaactcttggatattcaaatatttacaagttactgaatttgtcctcaagaaactcagcttatccgactttgtggttctatggagaagaaaaaaaaaaactgggaaagatagccctgtaagcaaataaacayaatgcagttcctgagtgctatgatagagatatacacagggtgttgcagaaccatacccagaaggcttgcaaaaggctttccaaaaggaagtcacgcctacgttgtgttcaaaggttaggaatctgggcaaggatgtccgggaagggtgggatttcaagtttaggaacctgagtgcaaaggaactaccagtgattattgctgcagtt

SEQ ID NO: 738276 - DNA, 495 bp, Homo sapiens
ctcctaagcaaaacccatgtgatactttgcttaatactcttctctttcattgtgtgacacaattttttcaaagacctatttgtttgttttgatttgttctcagttcattcattcattcttttctattttggaaatctgctaaattttatggttctgaaaacaattttcttgtctaaaatttccaagagtagaacagaatgtttgatttaaataaaagtttatttcacttctgaattcaatattcatttattcttgcctgaggagatatatatatattatatatatatwatatatataatatatatatatatataatatatataatatatataatatatatataaaatatgtgtgtttatatatatgtatatatgtgtatatgtgtctgtgtgtgtgtatacatatatatatatatatttgaaatggagctttgcttttgttgcctaggttgtagtgtaatggcacgatctcagctcactgcaacctccacctccc

SEQ ID NO: 738277 - DNA, 495 bp, Homo sapiens
ctcctaagcaaaacccatgtgatactttgcttaatactcttctctttcattgtgtgacacaattttttcaaagacctatttgtttgttttgatttgttctcagttcattcattcattcttttctattttggaaatctgctaaattttatggttctgaaaacaattttcttgtctaaaatttccaagagtagaacagaatgtttgatttaaataaaagtttatttcacttctgaattcaatattcatttattcttgcctgaggagatatatatatattatatatatattwtatatataatatatatatatatataatatatataatatatataatatatatataaaatatgtgtgtttatatatatgtatatatgtgtatatgtgtctgtgtgtgtgtatacatatatatatatatatttgaaatggagctttgcttttgttgcctaggttgtagtgtaatggcacgatctcagctcactgcaacctccacctccc

SEQ ID NO: 738278 - DNA, 617 bp, Homo sapiens
cttatacatatcagccatcttgatcacttcttgttggcatcagtttttaaaccctcttcccaaatctgcagcactgtccatttctatagactaatactaatattatctgttagcacattttgagtataacacattgtcactgtcaggctgctcttccttccaagacctgcaggtgtgttggcaacattctgtcttctaagtgtttctgtccaagcctaaagcttgctcagtttctctgttcctactgaagtgaaacagaatatgccttgttgggtcctaaaaaatgcctctgcctattaaaacaagtttttcactgttaaatttatggctcataaacttatttgtaaattkttgtgcatagtagatacatattgtcataaaatgtcacttcatttgtgtactgagcaatcacatcaattgctaagtaataaaagccaaaggttaaatatacatcatagtagactgacaaaaatatttaagtcaatttaatttaatttgtattatactcttatgctcatgaatgatattcaaattggaaatttaggaaatacaaaaaaggtaacaggaaaaatatcctttaaaccaatacctgagtgaaatcactgtttaaaaaaaat

SEQ ID NO: 738279 - DNA, 627 bp, Homo sapiens
ttcccacttcctaaacatatcctattttgacctagaactaaaatattcatctacatcatagggttatttgctatattgcacaaaaattactttgaatattctaaacatattcttatctctactgtttttatttctttaaaaattgttattgacatgcatagtctgtgttatgattcacaattaagtctcaggatgaaagatctgaaaattgcaccataatattagcactctagtgactatatcacattaaaggaagagtgattaattagcattctattatttaagaaatgtacatcatctagtttgtaggagttggcattgtttcatgggaaycaataatgctgattacttttttaaatgtaacattttttatgattttgtttttcaaaaacaaaccacaagtaaacattataatttacagttgagattattcatttatgaaatactagcatcactaaattttctatcttttaatctcagataaagtcccacaacttcacatgaacttattatattacaatatcattgttaatatcttatttaatgtattattttttcagctttgtctttgatccagtgcatatgcagcgatgtccattgatgtagaattccatgttaaaataacct

SEQ ID NO: 738280 - DNA, 627 bp, Homo sapiens
ttcccacttcctaaacatatcctattttgacctagaactaaaatattcatctacatcatagggttatttgctatattgcacaaaaattactttgaatattctaaacatattcttatctctactgtttttatttctttaaaaattgttattgacatgcatagtctgtgttatgattcacaattaagtctcaggatgaaagatctgaaaattgcaccataatattagcactctagtgactatatcacattaaaggaagagtgattaattagcattctattatttaagaaatgtacatcatctagtttgtaggagttggcattgtttcatgggaaccaataatgctgattacttttttaaatgtaacattttttatgattttgtttttcaaaaacaaaccacaagtaaayattataatttacagttgagattattcatttatgaaatactagcatcactaaattttctatcttttaatctcagataaagtcccacaacttcacatgaacttattatattacaatatcattgttaatatcttatttaatgtattattttttcagctttgtctttgatccagtgcatatgcagcgatgtccattgatgtagaattccatgttaaaataacct

SEQ ID NO: 738281 - DNA, 628 bp, Homo sapiens
aaatgttcattaatggtaatctgaataaacaaaatgtgttacatattcactggaatactatgcagccatagaaagagatacactgggaatactatgtagccataaaaatgagatcatgttctttgcatgaacatagatagagctggaggccattatctttagcaaactaacacagaaacaaaaaaactaaatagtgcatgttttcccttrtaagtgggagctaaacagtgagaacacatggacacagagaagggaacaacagacactggggcttagttgagggtagagggagaaaggaggaaggggatcagaaaaaataacaattgggtgctaggcttagtacctggatgatgaaataatcagtacaacaaagccccatggcaccaatttacctatataactaacctgcacatgtacctatgaacctaaaataaaaggtttccttttcaaaaagaaaagactgacttccctcaaagaagaaggaattctgccagcaggcagcattcagactccaactacaacaccaatgtttcctgggtctcctgcctgccagcctaccctacagattttggacttacaagcctccataattatatgagccaattctttaaaataaatagatgataga

SEQ ID NO: 738282 - DNA, 579 bp, Homo sapiens
ttctagagagactaagattaaaaaatacaaattattaatatcgggaataaaaacagaaggtatagctacaaattctacagccactaaaaaagtaataatgaaaagcaatgaacaattctacacttatgaatttggcaatttaggtgaaatgaaccaattttttcaaaattacaaactatcaaactcatacatatgaaatagaaatttaactcacaattaaaaagcttttaaaaagccaagaaagtatcattggaaacaaacaggcccatatgatttcactagagaactgaacaaaacttttagagatgaattgtcaccaattccaaacaatctattccagaaaataaaatacaaggaacatttctagctcattttatgagaaccctattaccctgatgacagaaccagacaaaggcatcacaggacaragaaaactacagaccaatacctctcatgtacttagatgcaaaaattctcaacaaaatactagcaaatcaaaattagcaggatatgcatgtaattatacaccattatcaagtgcagtttattccaagaatgcaaagctgtttcaatattgga

SEQ ID NO: 738283 - DNA, 627 bp, Homo sapiens
tatttataagtaatgtactgttttcaaaccatggatgaaaaaaaactgaagaatccttcttactcaaatgctattgctaccagtaggcagagaagtcaccaaagtttccgctgatgactccccgaccacacagcacgtggcccatgccgtgcactgggtgagaaagctggagcagtggcatgaagcacagggttctcttcctggctgcggagtaaaactgtgttctgggatttcaggctgaacagccmaaaagtgctctcctacagcacactgggaaacagaccactgaaactgactatctataaccatcttcaaagaaaattttgaacaaaatcttacattctgtacatgtttatagacacttagggccttcccagaacctagtacacaatgtatactcaattaatattaaataattggaaatttgtttttaggtgggctttctgggaactaaaaagaaaaagcctcacaatagcctaccatcagctctgattttccatctataatcctgtaattatcagaactaacaggaatgctcttatttaaaatactgatatttcaaaacagagaagggacaagttccattcaaaataagtcttcacattattatgagcctaatggtttcaa

SEQ ID NO: 738284 - DNA, 493 bp, Homo sapiens
cagcccaaaagtgctctcctacagcacactgggaaacagaccactgaaactgactatctataaccatcttcaaagaaaattttgaacaaaatcttacattctgtacatgtttatagacacttagggccttcccagaacctagtacacaatgtatactcaattaatattaaataattggaaatttgtttttaggtgggctttctgggaactaaaaagaaaaagcctcacaatagcctaccatcagctctgattttccatctataaycctgtaattatcagaactaacaggaatgctcttatttaaaatactgatatttcaaaacagagaagggacaagttccattcaaaataagtcttcacattattatgagcctaatggtttcaatgataagccctgtgactggggaagtagcttatttttaacaaatatgtatcagttacacatgatatacttgacaaaatactttttaaaagaacagaaggataaaatttg

SEQ ID NO: 738285 - DNA, 641 bp, Homo sapiens
tcacgcatatatcacattttattacaatatcttggagagtgtatgtttctctctttgaatgtgaactgaacaataaaaacaacacttatgtatgtttactatgtgccaagtttgatctaagtgttgtacttgtattgactcattttgtcctcatagcaaccgttatttccattttacaaagcagagatcacatccttcttattcactatcaccccttgctggctacataacaggtacttaataaatrcttgttgaatgaaggcctgaatgagtcattctatagtgtttagcagtgggacagatgttcatagaaaaactgggtatgattaatgtactagaatgaaaataaagaccctgtttctaggcagaatgacattccaaacaatagctgggatttaataagtgccaattagaaaatcccatcatattttcgctgcagtccatgctggggttgcaattttagcagctttgtgtgtggtggaaaaatcctcttatgtatctcttggtatttctccacaatttcattcacttgaaaattggctattagtgagcacttcctgtaataagtcctgaagtgagtggacaataaagaggcacactgagaattccaagccatggcaagaagataaatctatagcaaa

SEQ ID NO: 738286 - DNA, 351 bp, Homo sapiens
tactaaaaatgcaaaaaattagctgggtgtggtggtgtgtgcctgtaattccagctactcgggacgctgaggcaggagaatcacgtgaacccaggaggcggaggttgcagtgagctgagatggcaccattgtactccagcccaggagatagtgcaacactccacctcaaaaaaaaaaaaaaaaaaaaaaaaaaaaaaaaaaamaaaagaaatgatcatgtttgtaggtcaaaaaccattgaatatcagcaattacacataattcatccaagtattgactaattccttttgagaactgagttcacttcaactatcaaattactaattacggttcatttgtttttaaggtaac

SEQ ID NO: 738287 - DNA, 596 bp, Homo sapiens
ttgacattaacaaattctcttaatccacatatctgcaaaagaacaatgtgtttttatatctaggccactatcatcttttggttgcaaacagtaatttgtgcaatgatgttgtagcagtttttcagtgttattccatgaatcaatagtcttcttggtggacttagtttatggtgctgaatcaatctccttttaagcaaggccttgttaaargtcttcacacatttaaactattttgtttccacttcatttccttggttgaataacacattgagatacggttgtaagaactaggaaacagaaattaccaactttatttccttggttgaataacacattgagatacagttgtaagaactgggaaatagaaatttccaactttatttctaaactctgcatggataaacctgtataagtctcttaacccataggagtggcagaagaaatgaccgtatcttgtgagaagaaattaagatatttttcatgccatagtagtacaataagtttattaatcgttggtatgctattctattatctgtgcatgcatttacactacatttttcaacatcattaagtagccatttgtttcaacttttaac

SEQ ID NO: 738288 - DNA, 629 bp, Homo sapiens
catcaaaggaataaaaggaaagtaggaaaactatatgccaatatccctgatgaacactgaggcaaaaatccccaacaaaatactagcaaactgaaatcaagaacacattaaaaagatcattcaccatgatcacatggaatttatccaagrgaggcaaggatggctcaacatgtgcaaatcagtcaatatgatacatcataccaacagaatgaaggacaaaaaccatatgatcatttcagttaatgctgaaaaaagcatttgataaaattcaacatccctttgtgataaaaacactcaaaaaactgggtatagaaggaacatacctcaacacaataaaggctgtatatgagacccacagctagtatcatactgaatggggaaaaacgaaaagcctttcctctaagatctggaacacaacaaggatgaccactgtcaccaatgttattcaacatagtactgaaagtcctaactagagtaatcagacaagagaaataggccaggtgcattggctcttgcctgtaatcctagcactttgggaggtcaaggtgggagcattgcttgacctcagcagtttgagaccagtgtgcagtgtgggcaacatagtgggatcctgtctcaaaataaataaa

SEQ ID NO: 738289 - DNA, 585 bp, Homo sapiens
agttttccagaataacagcttatgtagaatgtttattttttaaaatgcacataactgaccaagaaaggcagggttttatggttggtgctttccttattttttaggtcaaggtaactcctcttagggaaagcagtgtagaagaaaagggcttttgtgcctgtataaaaacctgaaataactggaagcaggtactagaaaaatggaatcacaaatatttattgctctattgagcatatgtaaataaatctgaattaagaagggaagggaggacatgaatcattattgagcaattactgtgaggaagacacttccacagacatttaattccataacgtaatattgtaaggttgatattattatcactgctatactaatcacggagcaaaaagctcaraatggctaagtaactccttgaaagtctctcagacacaatttttatccatggccacttgattctgaagcccatggtctttccagtctactcacgtacttggcagtggtagagattaaaaggtgctttctcgctgcgtgcagtggctcaagcctgtaatcccagcactttgggaggctgggttgggcggatta

SEQ ID NO: 738290 - DNA, 597 bp, Homo sapiens
aggcagctggctcctgggggcagaaaggtgattagacacagtgataaaaatcataatccctgatcttctggactcactgtctgtccagtggggagacagacacataagcaaatacaacttgataactacaacaatcaagagaatgacataatctaccctggagaaagagagagcaaacattatcataagacagtgtgtccactacttactctctaacagatttcctgataaactactaggcttgcccacttgttgcataagaaaattgagggtatcaggggaggggaaatacatatgcctcttggtaattyattcagtaaatacataaataaaccattaatgatataatcatgttgattcaataagtttgaaaccaaaattgataatatttagaagaaattgtgtatgtgtgtatatgtgaacacacatagacatatacatactgctttctgaaattttcaatgactttatgcttcttctgaagcaattcaagtttagaatttgagacccatgggttcaaaacatcttcttgagtatactggaggacatttagattaatttcagacatgtattttggtttatatgtgttttttatct

SEQ ID NO: 738291 - DNA, 590 bp, Homo sapiens
tctgtaggttgcctgttcactctgatgatagtttcttttgctgtgcggaagctctttaattagatcccatttgacaattttggcttttgctgcaattgcttttggtgatgaagtcatgaagtctttgcacatgcctgtgtcctgaagggtattgcctaggttttcttctagggtttttatggtcttaggtcttatgtttaaatctttaatccatcttgagttgatttttgtataaggtgtaaagaaggggtccagtttcagttttctgcatacggctagccagttttcccatcaccatttattaaacagggaatcctttccccattgcttgtttttgtcaggtttgtcaaagatcaaatgcttrtagatgtgtggtgttatttctgagggctctgttctgtttcgttgttctatatatctgttttggtaccagtaccatgctgttttggttattgtagccttgtagtatagtttgaagtcagatagcctgatccctccagctttgttctttttgcttaggattgtcttggctacagggtcttttttaattccatatgaaatttaaagtagtttttttttttctaattctg

SEQ ID NO: 738292 - DNA, 610 bp, Homo sapiens
aactcaagatgaagaggaaagtctattttatttgtttatatttttgttatcatttactttcttttttctgatgttccaagagtctttaaaaagttatttcttttctgtttagagaactttcttagccattctgctattataaattttctgctgacaaattatcttaatttttttgcatctgaaaatgtcttgatttcctttcattcctaaataatattttcactggctaatagattaccacttgacaattttttttttgtaaagcacatggaaaaatgttatgtcactttcttctggccttaatgatttctgatgagaaatccactgttatttgattttttttcttatgtaggtatcgttttactgtttcttcatcactttcaatttttatttcttttsagaactttgactataatgtgtcttgttatgaatttctttgtttttttttttctctttgtgattcatccagcctttggatctgcagatttatggaaatttcttggccaaatttggggagtttgagttattccattaagaacattttcagctcctcagttttcctcctttaattctggcatttcaatgacacaaatgttatgtcttttgttat

SEQ ID NO: 738293 - DNA, 586 bp, Homo sapiens
aatatttgtgcataaagcagcccactccaagttctttaatcacatttcttgagaaagagtggcaaaatggaaagccacgtgtcaggctacttccattagtgtgttctaaatcagtataaagaggaataagcagatacgaagaaaaagaacactgaaraagactgcagatcagaaacagcttctggctgtttgaattcagcaaattgggacatcttctccatgtgactaggacagagtattggaaaataattttatcctaaagtaatctgatatttaggattgttgaaaaatatcttagtttacaattcttctttgattcctaaaagagagaatggctcacccagaccccattttttcttacttcatacctagactttggcacttttttagtattgtggatagtgaatggaaacatgtcgtaaagttctagaagatggaattcatacttttccgtaagtttttttttttaaagaccaacaatcttatcttcttccaagacgatcccaaaaagatttaaaaggaaatttaatcatattacaaggtatctcctaatagaaaatgaaatttggaaacatggtttttcata

SEQ ID NO: 738294 - DNA, 544 bp, Homo sapiens
taactctcaaaataacccttcaaagtaagtatttactaatatacatatttttatagttaagaaaattggtaaaactacgaagcgtatttgaatatagctgtttctcaatccgcatgcagcttcccgatcactaagcacactttcttgcagtacaggggctgggttcaagtctagattttgtctcttaatgtttgttgagcctcagttttcttaccttaacatctggatgatgatcatcttggctctacttatctcccaggaggatgttytaatcaaagggcctagaggatgtgaaagggtttgtgtagaacccataacacaatagtgtggaaagtgataaatgatgcaatacaggcactgaggagaaggtagcggtgtccagagggagagacacccctgttgggatatcagaacagtaataaacatttgtggatataggcttttggggagcagccatggcttctgctctgaaagagtggctctcctctggcaggcagatacactctgacaactataatggagttctaatcacaaggcaaaaatc

SEQ ID NO: 738295 - DNA, 555 bp, Homo sapiens
taagaagtctaaagattgttttggagaaactaccatctctatcaaaaggcatacaagatctgaatgaatacagagataaaccatgttcatggatggggcaacttagtattttaaagaggtcaaattttgccaaattaaataaaaaatgtatagaattccaatcaaaacttatacagagaaacttaggtctaaaatatattktgaaaaacaaaagtccataagtaaatgataattttggaagagcaaaaaggaataccttccctaccctctattattatataaccataaaagaaaaaaaaatagcctgccacatgatcagacaagtaaaacaatgggataaagaaccataaaccgtcccttatggaatatggtataaaattaaggtgactattttaatttgcctgtgaaaattttactgcatttatgcctattggcctagcaaaattaaaaataatgtcctcttttacttttcagtttggaatatattgtatgatgtcttcatatataatcaattgatataataaatcaatggaggaaagataggctttttaaaag

SEQ ID NO: 738296 - DNA, 641 bp, Homo sapiens
cagctctagatttggtgaaaggaaacagaatcagggaacccctgagccacagccattttaggatgtcgctaggctcctctacttcctctttccttattgctcccaattctttgcttccttcttgctaagttggaaggagcccacctccccctagaaagaggatcatttcataagctggattctcatgtagcatggtcattgcattccttaaactcacctctaggtcccaaatgataaactaaaagctgcttgagttattcaagtaacaggaaaaatatagtattgcaactaagaatctgaactttgaaatcagagagtctcggattcaaatcctggctcttccctttctggctgtatgctttgggcagattatttaacaactctgagcctctttagcacgtacttcacrggactattgtgattaagtaagcactcaatgtgtgggagatattattgtttctaattagggagcaaagcaaaactgcacatggggcatgggcaaggcactcatggcttcccttctcaccccatgtggggaggtggaacaagcttcctagtcttagccctttactcagatgccagcaattttctgccatgttacctggtgatggggccctctggtggcaggagagaatgtgatt

SEQ ID NO: 738297 - DNA, 641 bp, Homo sapiens
ttccagtatgatcctggacccagcccttgcataataaccaaaatgctgataaatgtgtttttcaaacaaaggagcagctttctctcgaataattctacctatttctcctggcagagaaaatatttgcagccagcataaaaaagtaaatamataaaaaataaagtaaatggatgaaaggaaacttgttcttattcagaagcttgtaagattatccatcttcagaagagaaaactcttaatattgcaatcagcagccctgtctaaaacagagctttctgaaacatgggactctcaatgagttcagtcaaaaatcaatacaggttgagtatttcttatctgaaatgcttgggaccagaagtatctcagattttgaaatatcttggggttttgaaatgtttcatataggcaataagatatcatgggggataggacctaagtctaaacacaaaattcagttatgttttatatacaacttatacacatagcctgaaggtaatttatgtgtgtgtgtgtgtgtgtgtgtgtgtgtgtatgtgtatgtatatttagtgttgtacattaaacaaagttttgactgctttttgactgagccccatcacatgagttcaggtgtggaatttctcacttgtggcattatgtcag

SEQ ID NO: 738298 - DNA, 624 bp, Homo sapiens
agcctataccttggttttgaatcctattttccttggcatatgaaatgtgcgtcaccttcattgctctgggttttccccggtgaaagcttagccgatacaaccagtccctgctctgagcatggaaaccggaagccctgaaggttttttcaacgtaggctatttaggcaaactagacattgcagtttaattacrccattgctcaacttcatagatccttcagattgccttcagagaaaaacatttctctcaataattcaaacccctgataatttcctctgagaaattaccagcagattgcaaaaacagcatagttattcactacgtgaccttttcttcagtcccattgtcttgtaccgctctgcagcattgcatatttttgacaattttacctctagtacctcttgaaatttaacgttactctggttctcctatacctgcatcctggccttctctaaaaacttcgtagctttttccttctctaccttataactttggacatttccctaagtctaaacctgtggtcctccgttttttcttctctttttttctttctttttcacctgctctgccagtgttgtgctaggcactaggaaacaaagacatgtgaaacatcatatctaacct

SEQ ID NO: 738299 - DNA, 562 bp, Homo sapiens
attttaatcttttttatttatgcttctcaactgtctgtgttttgggacatagcaaattcaaatgaatactattttgaaatttttataacaattccttagactttctaaaaccaatccttaaattaactgcctgttattttgcatatacgagtcttccgatgtctcaagggatggcccccgacatcctttttttgactcctttccagtcacatcccaccattccaaactatatccttytcttaaccacatctgttccttgcctcatgttttctcttactttttctttttactattaaaccctattttctttctttttttgaattctattttattttaaattgacacataataattgtacatatttatgagctacaaagtgatgcttggatacctgtatacagcgtgtaatgatcaaatcagggtaattaacaaatccataacctcaaacatttatcatttttctgtggtaagaacattgtctgttttacctgttttgagatatacaatgcattattgttaactagttaccctactgtgcaatagaatactagaacttattgtt

SEQ ID NO: 738300 - DNA, 562 bp, Homo sapiens
attttaatcttttttatttatgcttctcaactgtctgtgttttgggacatagcaaattcaaatgaatactattttgaaatttttataacaattccttagactttctaaaaccaatccttaaattaactgcctgttattttgcatatacgagtcttccgatgtctcaagggatggcccccgacatcctttttttgactcctttccagtcacatcccaccattccaaactatatccttctyttaaccacatctgttccttgcctcatgttttctcttactttttctttttactattaaaccctattttctttctttttttgaattctattttattttaaattgacacataataattgtacatatttatgagctacaaagtgatgcttggatacctgtatacagcgtgtaatgatcaaatcagggtaattaacaaatccataacctcaaacatttatcatttttctgtggtaagaacattgtctgttttacctgttttgagatatacaatgcattattgttaactagttaccctactgtgcaatagaatactagaacttattgtt

SEQ ID NO: 738301 - DNA, 515 bp, Homo sapiens
  misc_feature 493: n = A,T,C or G
atatgctccttgagggcaaggactgtgttttcttcagtgtcacttcaggctccttgcaccattcttagataaatgttggttgtatttgttctgatgcacagttgggactcggtggaatagagaacatgttctatggctgtagtctacatttatttctcccaccagcttcttataaataagctagtaactacatgggatactgggcatgaatagggataagtcagctcaaactsccttagctgaaatttacagctgaaaaataagccaatccacaatcagtaaaactatattttggtcctatttaatgtgccagacataatgttgtatgtagaagatggtgtgtttctagtgtcattttcataaaggacagagtatttttactgtttatattattttatacctatagatgttcaaattatgtgcatttttgcttttgtgaacttagaagtatggtatcaagggtttttaaaactttttttcacaattcttttanaattgtagtcactatcttgaat

SEQ ID NO: 738302 - DNA, 638 bp, Homo sapiens
aggttttcttccagaatttgtatagcttgaggtcttacatttaaatctttaatccatctcaagttaattttcatatactgtgaaaggtaggggtccggtttcattcttctgcatatggctaatcagttatggtattcccgtaccatttactgcatrgagagccctttacccattacttatttttgttgaaacttaatataagataaatagacactgggaactactagagagggggtggaggagggggaacacgggctggaaaactacccattgggtactatagggtcactacttgggtgacgggatcatctgtatcccaaaccatagagccatacaacatacccacgcaataaatctccctttgtaaccactgaatctaaaatcaaacttacaattatttttaaaaagaattattggaatgtttaagaaactttatttccattcacgtgcctaatcaattacttgattcatttagcatggcatacacaaactgtgttctatagtgtattttttctacaagatgttaatacatatgctttgagaggaaatgttctctgctcaaataattttgagaaacactgaaaaggctgaattttaaacaggagatttattagcgcatcttttttttattgtacttt

SEQ ID NO: 738303 - DNA, 498 bp, Homo sapiens
tctgtcggccactctgtgcatcacctctaggtgatgactgggagggggatcatgggaggtcaagtggaggcgggaagaagcaagattggaggtgaaggagggaagctgcgaggccgtggctctaggcactgcattatcagaacaggggattcagattctgakagcgaccttggaatgtgcagaaaaagctccaacagataaatgcttattgagtgcagatggtgtgggcgggtggtggctgggctgagctgacatctagcttgggtaactcagttccacctcatgtgaattgaatcaagctaattaccccaagcccatctcgtcaattacttcttatccaccagctacttctccaaccttgattctgaacaaaacaagcctttgtgcttttatggaaatgtcagaaatctgtcccttcttgcatatgcttctcacaaagctgccttgttcctgaagctctgaaaccacgtgttctgacaataaaaaaaaagtacagct

SEQ ID NO: 738304 - DNA, 498 bp, Homo sapiens
tctgtcggccactctgtgcatcacctctaggtgatgactgggagggggatcatgggaggtcaagtggaggcgggaagaagcaagattggaggtgaaggagggaagctgcgaggccgtggctctaggcactgcattatcagaacaggggattcagattctgagagcgaccttggaatgtgcagaaaaagctccaacagataaatgcttattgagtgcagatggtgtgggcgggtggtggctgggctgagctgacatctagcttgggtaactcagttccacctcatgygaattgaatcaagctaattaccccaagcccatctcgtcaattacttcttatccaccagctacttctccaaccttgattctgaacaaaacaagcctttgtgcttttatggaaatgtcagaaatctgtcccttcttgcatatgcttctcacaaagctgccttgttcctgaagctctgaaaccacgtgttctgacaataaaaaaaaagtacagct

SEQ ID NO: 738305 - DNA, 498 bp, Homo sapiens
tctgtcggccactctgtgcatcacctctaggtgatgactgggagggggatcatgggaggtcaagtggaggcgggaagaagcaagattggaggtgaaggagggaagctgcgaggccgtggctctaggcactgcattatcagaacaggggattcagattctgagagcgaccttggaatgtgcagaaaaagctccaacagataaatgcttattgagtgcagatggtgtgggcgggtggtggctgggctgagctgacatctagcttgggtaactcagttccacctcatgtkaattgaatcaagctaattaccccaagcccatctcgtcaattacttcttatccaccagctacttctccaaccttgattctgaacaaaacaagcctttgtgcttttatggaaatgtcagaaatctgtcccttcttgcatatgcttctcacaaagctgccttgttcctgaagctctgaaaccacgtgttctgacaataaaaaaaaagtacagct

SEQ ID NO: 738306 - DNA, 633 bp, Homo sapiens
gtgagagcatctgtgcccttcatagccctgcctccccatacacacccatctccatggggtccgcactcctgatgtgttccctccctgagagccgggatgcgcagcttttagatccgcttagttacagacattgcacttggtgggcccccactgctaacacacaagaatacacgcacttgcccctctccgagcacacacacccttcccgcccattctgatgggagacggaaaatcaccaagccttggaaagwaggttacagggactgacttccccacccaatgccaagcagcaatgggtgaatggccagtatggagggcagaggagcccctgctagaaggggctcctggaacaattgcagatgttcccccttcccccatccccacagcaacatgtctccccctctttttccccaaggagagggtttggccaagccaggagagagctcttggtgggagaggaggtgttgaaggagggcatggatattttttcttgctagtaggacccagagtccatcaaaaattagtcagtgagcctgggaggctgaggctgcagtgagctgtggtcatatcactgcaccccaacctgggtgacagagtgagaccctgtctcaaaaaaaaaaaaaaaaaaaaaaa

SEQ ID NO: 738307 - DNA, 559 bp, Homo sapiens
tgtgtaatgctacccttgctccagagcagggtggtgccgggcacagccccaggccagcccatgcacagatgccatggccctaggtgtttcaggttgagctgggaagtagacggttaagcctccctaaagatctcaagtgaccttcactctctcacagtgtgccacctacagctgcaccccacccacaggccacccctccacctgcccactttgggtgaggatgctggggtctgtccctaagcctgtggtgatctctctgccaacaatcctgagtgtgctgactttcttctcggtccttcagataagccaacctggaacatggctgactttcagagcctgctccaggccaytacttcctctccccagatgatacaattgagtttagcaagggtcatgcttcatggtgggataaacacaggggcacaactctccaaaatgggcaagctaagctggcagtgcccactaacagagtggtgctgagctctagtctggcatgttggttctcccattaatctgagcccactgcggacatttatcaatatggcacttgtgcatctat

SEQ ID NO: 738308 - DNA, 633 bp, Homo sapiens
agtgggccttaataatcacattcctttcacttcagatgcactaagaaagggaagctaaaagcagacttggggaatatgcctgcagctgcagaaagatgtatgggaacagacacacaactctccctcccaaataagcacaacaaaaagacacagaagcagtccaagcctctgataaactcccscacaatgaatccttaaaaactcttagtctgtaaaagagtggggctctaacctaactcagccagcagcccctctcaggtttgtttaatgaccctgttaactgtaaacccacacttcgtgtttctctcctctttctttaatttcttacagatgtgtgaagtttgaccaacttgtgagtaaatggcagagatgtcaccagctggggatggatgcctctggagctccagttgctggaatccaacctctcctgtgtcatcacctctgtgttcccttcttggagcccatccagtgagtgggtaaaaaatgatgtcacaaggacttttctttgaaataggtcaggaaggggaggagagcctctggaatgtggaatgggactgattaattcttgaatttaaaagggtcactgtgttttgagaaattctgggtgcctcacaggacccaactttgttcctt

SEQ ID NO: 738309 - DNA, 471 bp, Homo sapiens
tctgtgtttataattcttcatggggcaggggctggggtgggggctcctgagtatctccgcagggggttaacaaggcctctctctctactgctactgcaacatcttacattgtgaggctaatcatggaagggaggggtctgtattttaggggcctgagagacagaccagagtgaacccttggaagacatcttggctcacagagatagtgacaaagaaggaagagggggaagggaagtcacttttccaagagggaggaactggcctyccatcctctacagaacacagggagagcctaagcactgtcatgtctcctggaaatgactggcaaaggaagtagtttgggaagtactttgatttgatttagacaaaaagaccattctaggaatgaatattttcctccagatgctgcctagattccatctactttggaaataactagccaaccttagtctacacttttgtagctttgat

SEQ ID NO: 738310 - DNA, 549 bp, Homo sapiens
tactaatagtaaaattatagtaagagaaataacaatagctagaatggaatgaattgctgtattaaccaaggctagaaagaatttcagccctccgaaagttaaagcgagggaagagagagaccctctcatattgttttatactcagtacctgttttttttttttttttttaaaaaaaggaagtgaaatcaaagacaggcagcccagcgccaggcccaaaactggacctgggcctgcctggcctaaacctagtagttaaaaatcaactcatgacttagaaaccgatgttattcatagattccagacattctatagaagaacattgtgaaactccctgccctgttctgtttctcyctgaccatcggtgcatgcagcccctgtcacgtaccccttgcttgctcaaatcaatcacgaccctttcatgtgaaattttagtgttgtgagctcttaaaagcgacagaaattgtgcactcggggagctcggattttaaggcagtagcttgccaatgctcccagctgaataaagccctttcttctacagctccgtgtct

SEQ ID NO: 738311 - DNA, 457 bp, Homo sapiens
ggagggtgaggaaggaagggttgtgatttttaaaagggcaacacaaaggatccttgtggcaatggaattgttctgcatcttgactgtggttatagacgcacaagcctaacatgataaattgtatagaagtaaatacacacacacgtacaagtaaaatagggaattttgaataagatcagtaaatgtcagtatcctggttatgatattgtacaagatgttactattggagaaaactgaataaarggtacaacgggatctctctgaattatttctttctttttttccttttatttttagttggcatgtaataattgtacatatttatgggatacagagtgatatttcttttcttttttcttttttttgagacagactttttttgagacagactttttttttgagagacagactttttctttttgagacagacttttccttttttttttttttgtttgag

SEQ ID NO: 738312 - DNA, 582 bp, Homo sapiens
acagtccattgcattcatttttctttgggattttcattaaatcagtaaatgttttgccatgcttcttgaagataaattttagccaggcattagagaaatattttttctttttgctattgtattattttattcttgttctgtattttctctaatcttacatttccatattcttaagctctagaactttctaaaactggtcacagaactcttgctctgaatattttaattctctttttcatcttcctttaacccaccatatcctcatttcagtacttagaaaagagcattgtttcttagcatcttgtagtttttaactgtctttactttcctgtgattatatcttttacatgattttttaaattcagacaacaaaaatctttcacttctctctgttgaaagatttaagtggtttgtttaccaagtttggacargtcttccatttctctgagtgtgtaaattcaagaagaggagaggaaaaaatatcacagggctgtttactttccacttctctttctcacatcatcttccaatcttcagcagccatggccatgacgaagctaagttaaaaaactgaaaacctag

SEQ ID NO: 738313 - DNA, 628 bp, Homo sapiens
attaaacttgaatacttcataattcctagagttccccacttccagcaaacatcaagcagctgctatgcccatgtcctcctgcctatgccttctcttcacactgtacctgctcctctggctctacaaatcccacatgtcagtccttaaaggacaacaaaatgatccccacttcactggcccagtcttttcggtgagtgttccatgattcatracttggtggtttagtttggatatttgtccccacccaaatcttatgttgaattgtaatcctcaatgctggaggtagggcctggtgggaggtgtttggatcatgggggtggatccctcatgacttggtgctgtctttatggaagtgggtgagtactcaaaagaactggttgcttaaaagtgtgtggcatccccgtaccccactcgctttctctctagttcccactcctgccatgtgagatgcttgctcctccctaacctttcagcatgactgtaagcttcctgaagccctcactcaaaactgagtagaatgctggtgccatgcttcctgtacagcctgcagaaccatgatccaattaaaccttttttcttataaattacctggccccaggtatgttagaacacctaaaatagcaatgca

SEQ ID NO: 738314 - DNA, 628 bp, Homo sapiens
attaaacttgaatacttcataattcctagagttccccacttccagcaaacatcaagcagctgctatgcccatgtcctcctgcctatgccttctcttcacactgtacctgctcctctggctctacaaatcccacatgtcagtccttaaaggacaacaaaatgatccccacttcactggcccagtcttttcggtgagtgttccatgattcataacttggtggtttagtttggatatttgtccccacccaaatcttatgttgaattgtaatcctcaatgctggaggtagggcctggtgggaggtgtttggatcatgggggtggatccctcatgacttggtgctgtctttatggaagtgggtgagtactcaaaagaactggttgcttaaaagtgtgtggcatcccygtaccccactcgctttctctctagttcccactcctgccatgtgagatgcttgctcctccctaacctttcagcatgactgtaagcttcctgaagccctcactcaaaactgagtagaatgctggtgccatgcttcctgtacagcctgcagaaccatgatccaattaaaccttttttcttataaattacctggccccaggtatgttagaacacctaaaatagcaatgca

SEQ ID NO: 738315 - DNA, 611 bp, Homo sapiens
agtattgaactgaaatagacagccaaaaacagataattcatccagggagggggaaaaggagcaagagccaaggacagaattaaatggtgcccagaatgtcatggagctgaggcatactggcatgaacagatgcctggaggggtccctaggagaagagcrggtgcttgtagcacttttattctttcccatagcgctttttaatgccagtcttatgttgtatcatgcagacaatcatggggtttgaagctggccagagatataatccagagacatggacactttgccttgtgttttcagcactcacttaatatcaaagtcagaattccccagcttcgaaatgtccatgtcctgactactcaggcttcacgagccagtgagtagggaggtggctgcattaaacgggcccttgaaggctatgagttccaaccaactgatctgtaagcatttcagtcttgggaagaatttccctccctgagctgcattatctggaaaggctcgaggggcgcatgcatgcatctgagaatcagttctggtcattgctggctaccatggctggtaaatagatggccctgtaggtatctcagagatgcccctctgagctgaaccctacc

SEQ ID NO: 738316 - DNA, 593 bp, Homo sapiens
tgtaatcagaaaagatgcttgatatgattcctacttttttgaatattttcatcagaattttgtggcctaagatatgatctattctggagaatgttccatatgctgatgaaaggaatgtgtattctgtagcaggtgggtgaattttctgtaaatgtcagttaggcccattaggtctagtgtgtagtttaactctgctgtttctttgttgattttctctgtggatgatctgtccattactgagagtggagtgttaaagttcccaactattattgtgatgtagtctatctctccctttagatctattaatgtttgctttatatagtggagctctggtgttgggtgcatagatatttataattcttacatcctcttgctgaatcraccccttgatcgttatatagtgaccttctttgtctcttacacacagtctttcatttgtagtctattttatccgatacaagtatagccactcctgctcattttggtttccagttgcatggaatatgttttttcactccttcactctcaggcagtgtgtttcttgtaggtgaagtgggtttcttgcaggtagaagatagttagtcttgcttctt

SEQ ID NO: 738317 - DNA, 603 bp, Homo sapiens
tgtatttttagtagagacggggtttcaccgtgttatccaggatggtctcaatctcctgacctcgtgatcggcccgcctcggcctcccaaagtgctgggattacaggcgtgagccactgctcccggcctctgtgtatttttaaaaaatttttcaacttttattttagattgaggggtagatgtgcaggtttgttacaaggtatattgtgtgatgctgacttttggggtaggattgaacccatcgctaaggtagtgagcatagtacccaataagtagcttttcaaccctttcctccctccctcccscttcttgtagtccccagtgtcgaccgctccgatctttatgtccatgtgtacccaatgtttagctcctacttataagtgaaaacatgtggtatttggttttctgttttgcactcatttgcttaggataatggcttccagcagcatccatgttgctgcaaaggacatgacttcattcttttttatggcttttttatatatagtattcatatatatatgcaccgtattttctttatccaatccataattgataggcacctaggttgataccacgtatgctattgtaaatagtgttgtaatga

SEQ ID NO: 738318 - DNA, 680 bp, Homo sapiens
gggagaatttccagtgaatgggtgggaaaagttttggggatcaggagatttttttctggaccaggatgttacttctagggaggttcactcaaaccatgacctctagcacctgtcccgggactcatgagggacacttgcagggactcttgcaaaccactccactggacatgagatctcaacatcttattgggcactgctctagcagacttctctgttcagggctttgaaatctcccccctcaccactttcttcctagccctattctgtaatgattttgagatggaaaaacatatgttgccctcagaggtggcatgaatgcttccaaatgagacaaaataatattcatgtcttctggcctcccaggagaccagcagaatgctgagacacagtgcatgatgtgctaggcactttgcatgcgccttctcattcagtcctgatggctcagaggaagccttcgtgatctcatttacagctgagaactctgtaactcagcaaggttaggtaaatcacccaagtttgcatggtttttaagagggaggatcaggacttgaatttgggaytgctacctccagtagcccttaatcaaagcagactaaaaggcaggcagtccctatttcctctaatcccaagccggagtcttgattttactgctttgatctaaggaaagtccatggacatga

SEQ ID NO: 738319 - DNA, 590 bp, Homo sapiens
aacgttgaactcctaggttcaagggatcctcccatcccagcctcccaagtagctgggactataggcgtgagccactgtgcccagtcctatctacatttttagctccagttcctagcccagtacctggcacacagatgatatccactatctgtgctggcrtggatgaagaagagaacagatgaatgggaaaacttgaggacaagatggttttgaaggcagataggcactgatgaaggacaaggcatttctccattgatactgaattaaggatgacacagcgggtacagagacagacacacaagaatgtaaagaaaaaggggccaagagatttaactagcttacctcaatgaaccatgataagggaaagaagaagtaaaaacaatagccagatagaaatattcttgataaacagcatgataaataaaggaactggcatagttccttctttgttccagattaattgcttattcttgtggtaaaagattaaaaataattctctgagagacaaaagtagctctaaagtctgttaaataaacaagactacttagaactcagtttcttacctatgttttataaggttcaaaagagct

SEQ ID NO: 738320 - DNA, 614 bp, Homo sapiens
cgccaactgatttttccactatatatatatccacatgaacctcaggttccaaaaaatctcagcaggcccatttcttccattctcacagcatccctatttacatggaagagtgagaacatactaagggatcataacaattcccgagtggctcctatgagcaaggtactgtttccattcatccttaggctggcatgtgaggcaagtgttactaaaggtgaagctcaccaaggttaagtggtttgcgcaaagtgacagagctgaggagtggcaaagctgggtctgtagtgcaacctgtctgattctggcagctttctcacaacattcagaaagaaatgtcgaagaaagaaaaagtgggcgtcagctcaaacatcccaagcctgccctgtttgtcctgttttgttttgctttgttcraaagatgagatccggccgggtgcggtggctcacacctgtagtcccagtactttgggaggccgaggcaggcagatcacctgaggtcaagagttcgagaccagcctgactaacatggcaaaaccccatctctactaaaaatacaaaaattagctgggtgtggcggtgcgtgcctgtaatcccagctactcgggaggctgaggc

SEQ ID NO: 738321 - DNA, 614 bp, Homo sapiens
tgaggaggaaagtcagaaggagcaggtagaaatcactggtttttattataacctttttttaggattacttgactttttagcttatacattaatcattttgataaaatagttgttaaaattttgaagctctttacatttgtaggttctgttatatcttgagaaataaacttacaaataggaaagaaaaatctgttaatttaaaatacagagaatgtattcagtaaagaagaatgtaagtgacttaaatatactttaygcacccttagttggatatttttaaggacattgaattgcagaaatcttgaattctactaagtagatttattgtttagagtgatattagagtaattctggatctgctttgtgtattagttggggagagtaagtgagtaaatatattgatgttattgggaactagggagataaatagtgaatgtgaatgagaaaagtaataatgatctttatggtgtttggtttgaattggaagtatcatggtgggctgctactttaagtaaataaatacattgcccactttaaccactgaaagcatgtagaagcagtgatactcctgtagtaatgagcacagtttacacccagttcttggtttctaaata

SEQ ID NO: 738322 - DNA, 515 bp, Homo sapiens
ttgaatagcagtgacaataatcattaatgctgctacaactttggattaatacggcttctttcctcctgtggtcttaaagtattttcatctataaaagtctttactatgggccaggcgtggtggctcacgcctgtaatcccagcactttgggaggccgagttgggcggatcatgaggtcaggagattgaggccatcctggctaacacggtgaaaccccgtytctactaaaaatacaaaaaaattagccaggcgtggtggcaggcgcctgtggtcccagctactggggaggctgaggcaggagaatggcgtgaacccgggaggcgtagcttgcagtgagcggagatcgcaccactgtgctgcagcctgggtgacagagcaagaattggtctcaaaaaaaaaaaaaacaaaacaaaaaaaaaaaacaaaagtcttcactatggcatttttgcacattttagagatctttaattctttctttcttctttctctttctttctttcttcgtttctttcttt

SEQ ID NO: 738323 - DNA, 639 bp, Homo sapiens
ctgttaaaagttactggatatcaaatggacagctaagtcttcattctgtgactaatacttacatatgtttgccccctgctgaagaaagaggcactctggatttggttatgtttcaggcttttctggtatcctgctttcagtcttaaccctctggaggcctaatggtcacatcggacactcagactaccagaacttgctgctgctctgtcattccatttacaactgtggaagcaaaacatycaccctcctgcctcccaagttgacaaagttgatctagataggtgaaccagtcacgttaaaatagcttacttaggaactgaccagttcttctgggacagatggctttatatatatatttgcttctatggcatattcctagaaaaagttctgtgtacagacctcaaaagtacaaacattgggcatcttcctgaaaaaccagagtctgttttcctaactgtttacattgtctcaagaaatttcccactcaatgacaatccactaccttaatgtccatttccccaaaagcaagagccagtgatggtgctgtccttactggaaatggctttgcagtcccccaaaaatgcagtttcccaaaagtgatccctcttaaaacaaaacctgagaatatagttacaaaac

SEQ ID NO: 738324 - DNA, 639 bp, Homo sapiens
ctgttaaaagttactggatatcaaatggacagctaagtcttcattctgtgactaatacttacatatgtttgccccctgctgaagaaagaggcactctggatttggttatgtttcaggcttttctggtatcctgctttcagtcttaaccctctggaggcctaatggtcacatcggacactcagactaccagaacttgctgctgctctgtcattccatttacaactgtggaagcaaaacattcaccctcctgcctcccaagttgacaaagttgatctagataggtgaaccagtcacgttaaaatagcttacttaggaactgaccagttcttctgggacagatggctttatatatrtatttgcttctatggcatattcctagaaaaagttctgtgtacagacctcaaaagtacaaacattgggcatcttcctgaaaaaccagagtctgttttcctaactgtttacattgtctcaagaaatttcccactcaatgacaatccactaccttaatgtccatttccccaaaagcaagagccagtgatggtgctgtccttactggaaatggctttgcagtcccccaaaaatgcagtttcccaaaagtgatccctcttaaaacaaaacctgagaatatagttacaaaac

SEQ ID NO: 738325 - DNA, 639 bp, Homo sapiens
ctgttaaaagttactggatatcaaatggacagctaagtcttcattctgtgactaatacttacatatgtttgccccctgctgaagaaagaggcactctggatttggttatgtttcaggcttttctggtatcctgctttcagtcttaaccctctggaggcctaatggtcacatcggacactcagactaccagaacttgctgctgctctgtcattccatttacaactgtggaagcaaaacattcaccctcctgcctcccaagttgacaaagttgatctagataggtgaaccagtcacgttaaaatagcttacttaggaactgaccagttcttctgggacagatggctttatatatatatttgcttctatggcatattcctagaaaaagttctgtgtacagacctcaaaagtacaaayattgggcatcttcctgaaaaaccagagtctgttttcctaactgtttacattgtctcaagaaatttcccactcaatgacaatccactaccttaatgtccatttccccaaaagcaagagccagtgatggtgctgtccttactggaaatggctttgcagtcccccaaaaatgcagtttcccaaaagtgatccctcttaaaacaaaacctgagaatatagttacaaaac

SEQ ID NO: 738326 - DNA, 555 bp, Homo sapiens
ggttttcatgtaacgggtggtacttcatactgaagtgacccacttcaaagctgccctttgttctatgtcttgatgtatgaattttgagatggccaccttgagttgcagagggaaatgtactggaaattattatttaaatgatgcccactcaccacaattatgtatgtgtgtgttttcttgaattttgtctttatctcttttttttttgtaggctcttcargtttcttttgatatctgtggaggcgaatctggaacaaaatggaaaactctcagtagcagccggttcttgcttacaaacacttacatgttgaagggcttttcccacttgaaggacgtcatagtcaatgtgactattgtatatggtacccgtgaccatccagacgccttctccccggcaaaacacagactcagttggctcctggggagcgagggcccctttaacgccaaaatccatggctggatgggggaggggagagcccggacgtgagggaagcgccagaccctctagccaggtgggtcagaggtgcagggaagccaatctgctctcctcctgcc

SEQ ID NO: 738327 - DNA, 580 bp, Homo sapiens
tgtgtgtttctggtcattgcaaatggagagcctaaatcactcagaaggcttggttctttcattcagtgttaacattggagagaaccatttttctctaaacggtttacagacctcactaggcagactggtgcagttcagggctgaaaagtgctgcctgggatggcaaagcattctctgaaggtttatgcaaattyctgcagcaaaaaagtgttcgcttgttgcctcaatgcttggatgttgacacatttgagcccattagaagggcatcttgtgcgcaagtcactgccagtctgtctgcatgaaacaccatgatggggggtggggatgtctagtcagtgtaagaaagaaggtggcgagtgtgtgtgatgtgtaattcccccaggtctttatttgaacacaaatctatgctctttcccagctacaaaaggaaacatttacctacatgaataatcaacactctgggcgtgtgtgtaagctatgtatacatacaaattcataatctaatatataccagctattgcaacagtctgtctgtacatgaggtatgaatttaccatggtttaggcggccagtggggcca

SEQ ID NO: 738328 - DNA, 580 bp, Homo sapiens
tgtgtgtttctggtcattgcaaatggagagcctaaatcactcagaaggcttggttctttcattcagtgttaacattggagagaaccatttttctctaaacggtttacagacctcactaggcagactggtgcagttcagggctgaaaagtgctgcctgggatggcaaagcattctctgaaggtttatgcaaatttctgcagcaaaaaagtgttcgcttgttgcctcartgcttggatgttgacacatttgagcccattagaagggcatcttgtgcgcaagtcactgccagtctgtctgcatgaaacaccatgatggggggtggggatgtctagtcagtgtaagaaagaaggtggcgagtgtgtgtgatgtgtaattcccccaggtctttatttgaacacaaatctatgctctttcccagctacaaaaggaaacatttacctacatgaataatcaacactctgggcgtgtgtgtaagctatgtatacatacaaattcataatctaatatataccagctattgcaacagtctgtctgtacatgaggtatgaatttaccatggtttaggcggccagtggggcca

SEQ ID NO: 738329 - DNA, 614 bp, Homo sapiens
gaacattttcattacctagaagtttctttgtatccttttcagtctgtttctccctcaatttcaagcccttggtcactggtaaaatgctttatgtcataatagatgagcttacaacttctataatttgatataactggaatcatacaatagacaattttgtgatcagcttctttcactccacataatgatgttgacattcatccgcagtgtygcattcttcagtagttgttcctttcactgctgagtaggactctgttgtatggagatactgcttattgcttatccctgcagttgttgatatacatttgggttgtttccagtttttacttattgtgaataatgctgccctgaacatttgtgtgcaggtctctgtgtgggacagtattccctgaggaacacatacgagtgggattcttaggttatatggttagtgtatgtttaacttttaaagaaattcccagttttgtaaaataaatgtattattttatattcccagcaacaatgtgtgtcagcacttggtattgtcagttcttttaattttagacattactctgggtgtgtagtggtatctcattatggtggtttatatttaatataacatcttattgatgtag

SEQ ID NO: 738330 - DNA, 547 bp, Homo sapiens
cacacagacagggatagacacaggggaaggggtgggtgtgcatgtgcacacacagctgagagatatccagaatcatgcagaagaaagaaaagagacagagagaaacgtaacacggctctgaaagagacagttaaatcatgacaaaatgacactgacacttaacagtgcacactcgtacactccaagcagaagtgtacccggaacatggcatttgctgcaagagctcacagagggacccacacgtycatgataagagaaaccatatccaggctacagaactacgtaatttgcaaataatctaatagctaacgtttgctgaatgttctttctgagctaagctcttttacatggaatatctcattgaatcctcactcactccaggagatcaatactgtttactaaatccccatttcacaggtgcacacggaggctggggtgatctgagctggcctctgtcttcagctgtctcactcaccactttcccccttctcccctcctggcagcccgtccggtgtcctcaaaaacacatgtcacatgccgtctctgg

SEQ ID NO: 738331 - DNA, 488 bp, Homo sapiens
gttttagccttgtcatataccaaataaaatatgctaaatgtttattttcactaattattacttactgatacttaattgtagttgtagttctgtcttagtccatgtgtacagctgtaacaaaatgcctccaaaagggtaatgtgtaagtgagagaaatttgtttctcacggttctggagcctgggaagtccaatatcaaggcactggcagatttggtgttgatgagggcctggtctctgtgttcagttttgcttgttkctgtgtccttgcatgaaagaaggcagaagggcaaaaagggcctagcaagctttcttcagtgctaatcccattcatgagggcagagacctcgtagcctaatcaccttctaaaggcctcacctcttaatactgttgaattgagattaagtttcaacatgaattttgaatgagacacaaacactgaaaccatagaagatataataggctcttcttacattactataaaaaaata

SEQ ID NO: 738332 - DNA, 584 bp, Homo sapiens
ttctatatgctcaacctcacctgtggtctctaagtccggggcagtctcttcatgaacagtgaagtgacctggaaacattaaacattcataatactcttctcagtggtgtcatacttttctaatttaataatcacaattggaaaaaagaaaaaagaaaaaattatatatgattacattttattttctttgcactttgataaccaaaatccatttttttttttaaattaaagctctccggggtagccagcaattcacatggacacaattaaaggataatcgatgtctgtcttataacaaactctttttggcagcttgtaacttaatcawgttattttctgccatgtgtatgtgggcctgaaagaagctggaatcattgaaagtaaaaatggtggcaatgcaaggcagcccatggattggaatccagttgaggcaaagaatatatcaggtttgagaggacaaagcagacttttttgggataaacttttttgggataaactttgagaagtgagacatctggaagaaatttgtgaataatctcttatttgtagcccttaagccaattgcattttgaagtttcccaggtc

SEQ ID NO: 738333 - DNA, 614 bp, Homo sapiens
tttctgtatttttcacactaaatctatttattcattcagattctcaggaattactttgaactttttatatcttcaagcaaataatggctgcaaaagaagaattaattttcgagttgagtgtttcttttttttttctagtgaggatttgaacttcttccaatgttagagagcacatgcaataatagcagtgcacagaaatgctctccacaccatgttatttaggaagggagagtttagaggttaagaggttgcactccaaactcagaaagactaccccagaatttcaccttcactgctttccaattttgtgacattaagaaagtcgattgatctctgtgaacaagtttgatctgttttattataaggaaaaaaagaaatgatatatttgtgtgtgtacacacacacacacacacacacacacayatataaataaaacaaagcctctacaatgactaatatacatgtcttaagatttttagcaattttcacaattgcgattgaaatcatctcagctaagcaaattaaaaaaaaacttttctcagttgttaagcttggattcacatttatcggaattttggcagcaaagagatccagctcaagtgatggaaaatggt

SEQ ID NO: 738334 - DNA, 618 bp, Homo sapiens
gtaatgtgttgtatacttatccaaattatctgaatattattgacaccaactgacaaggctccaggctaccagtattgacatcatcaaaccagccacctatctcatcttgactcttgattcctggaagctaccacaaagtgtagctaattcttctcagatggctattgccccagctgagtggtaccataacaccgtttctccaaagagacatttcccagacttttccagcacacagacagactgcaaatgaggttgtcgaggcatcctggaagaatgccttcacccattccctctgaactggctcartgagcctcttgcttcacctaaactcattttccaaatccattacacggggaaggctcattctgaaatttaagtctgatactgttgaagtatcccatgtcttcctaattcccttgggaggtccagattccttagagctccaacaaagcttaggctcttcctgcctctccagcatcatcttccccagcccccattcacctccagccaggctgagaaccaggggcctcctgtacatgcatgtccttattggacatgctgttcccccagcctggcaagctcccacgtgttcaacttaccctcctccacctccttcac

SEQ ID NO: 738335 - DNA, 585 bp, Homo sapiens
aatctccatactatcctccatagaatttgtactaatttacattcccccgatgggtgtataaagcatccccttttctatgcatcctccccagcatctgttatttggtgattttttgttaatagacattcggggccaagtgcagtggctcaagcctgtamtcccagcactttgggaggccgaggtgggaggatcacttgagcccagaagtttgagacaagcctaggcaacatagcaagacctcgtccctactaaaaatcaaaaaaattagcagggcgtagtggcttacacctgtagtcctagctactcaggaggctgaagtgagaggatcacttgagcccaagatatcaaggctgcagtgagctatgatcacaccactgcactccagcctgggtgaagagcgagaccctgtctcaacaataataattaataatagcaatctggactgctgtaagatgatatctcactgtgattttaatttgctttctctgatatcagtaatgttgagcattttttcacatgcttgttggccttttaggttatatccagaagaaaaattactaggtcacaggattataatttttccta

SEQ ID NO: 738336 - DNA, 585 bp, Homo sapiens
aatctccatactatcctccatagaatttgtactaatttacattcccccgatgggtgtataaagcatccccttttctatgcatcctccccagcatctgttatttggtgattttttgttaatagacattcggggccaagtgcagtggctcaagcctgtactcccagcactttgggaggccgaggtgggaggatcacttgagcccagaagtttgagacaagcctaggcaacatagcaagacctcgtccctactaaaaatcaaaaaaattagcagggcgtagtggctyacacctgtagtcctagctactcaggaggctgaagtgagaggatcacttgagcccaagatatcaaggctgcagtgagctatgatcacaccactgcactccagcctgggtgaagagcgagaccctgtctcaacaataataattaataatagcaatctggactgctgtaagatgatatctcactgtgattttaatttgctttctctgatatcagtaatgttgagcattttttcacatgcttgttggccttttaggttatatccagaagaaaaattactaggtcacaggattataatttttccta

SEQ ID NO: 738337 - DNA, 585 bp, Homo sapiens
aatctccatactatcctccatagaatttgtactaatttacattcccccgatgggtgtataaagcatccccttttctatgcatcctccccagcatctgttatttggtgattttttgttaatagacattcggggccaagtgcagtggctcaagcctgtactcccagcactttgggaggccgaggtgggaggatcacttgagcccagaagtttgagacaagcctaggcaacatagcaagacctcgtccctactaaaaatcaaaaaaattagcagggcgtagtggcttacacctgtagtcctagctactcaggaggctgaagtgagaggatcacttgagcccaagatatcaaggctgcagtgagctatgatcacaccactgcactccagcctgggtgaagagcgagaccctgtctcaacaataataattaataatagcaatytggactgctgtaagatgatatctcactgtgattttaatttgctttctctgatatcagtaatgttgagcattttttcacatgcttgttggccttttaggttatatccagaagaaaaattactaggtcacaggattataatttttccta

SEQ ID NO: 738338 - DNA, 620 bp, Homo sapiens
cttccaagtaaattacctgtacacaggttcatgactaaggctctgctttcaggagaacaccaatgagaacaatcaggataccaactagggcaaccatggaccccattttacctgttagaaaacgaactctaagaatccaggtagcttcttcagggtcacatagctggtttttctgattctaaagttcatgctcttacccaccaggcagttctgcctgatcagcaraacttcagatcacaggtgggcaccaaggaatggtgttcagatacattcaatgctgcattttggctggtgaaagaaactgattgggtttgacagaaaggaagtcaggcagtttttttttctcctaaaattaaccttactttcagtcatccaattcaggaataatcatgctcactctagggaactccaccaatgtttcagagcttctaggtaattaaaacacttcattaaatcgaattccatgagaagaatatggcaaagataagcattttttttttgaggcggagtcttgctctgtcacccaggctggagtgcaatggtgggatcttggctcactgcaacctctgctcactgcaacctctgcctcccgggcttaagtgattctcctgtctcagcct

SEQ ID NO: 738339 - DNA, 555 bp, Homo sapiens
ttttcttttctatcacattgtcaggctgcaacttttttggacctttgtgttctattttccttttaaaactgaatgcttttaatgacaccgaagttacctcttgaatcctttgctgcttagaaatttcttccaccagttaccctaaatcatctccctcaagttcaaagttcaacaaatctctagggcatggaacaaaatgctgccagtctrtttgctaaaacatagctagagtcatctttactccagttcccaaaaagttcttcattccatctgagaccatctcagcctgaatttcattgtcagcattttggtgaaagccattcaacaggtctctaggaagttccaaactttcccatgtttttctgtcttttcctgagccctccaaactgttccaacttctgcctgttacccagttccaaagttgcttccacattttcaggtatctttacagcagtgcctcactcccagtactaatttactgtattagtccattttcatgctgctgataaagatgtaccagagactggataatttataaagaaaaatatgtttcat

SEQ ID NO: 738340 - DNA, 555 bp, Homo sapiens
ttttcttttctatcacattgtcaggctgcaacttttttggacctttgtgttctattttccttttaaaactgaatgcttttaatgacaccgaagttacctcttgaatcctttgctgcttagaaatttcttccaccagttaccctaaatcatctccctcaagttcaaagttcaacaaatctctagggcatggaacaaaatgctgccagtctatttgctaaaacatagctagagtcatctttactccagttcccaaaaagttcttcattccatctgagaccatctcagccygaatttcattgtcagcattttggtgaaagccattcaacaggtctctaggaagttccaaactttcccatgtttttctgtcttttcctgagccctccaaactgttccaacttctgcctgttacccagttccaaagttgcttccacattttcaggtatctttacagcagtgcctcactcccagtactaatttactgtattagtccattttcatgctgctgataaagatgtaccagagactggataatttataaagaaaaatatgtttcat

SEQ ID NO: 738341 - DNA, 580 bp, Homo sapiens
gaatggaactcagctgtggtttaaataataataatgcaagagacaaattcaagagctttgtctcttgaatcaaaaatggttgtcaagttttctggttgcatatacttaaacctgccaaaggtaatgatggctacttcaagaagtctgcctaagatgttgatacaatcaacgactctgtttagttgttcttgccaagaaagaaagaaataattccagattccaggtgttactacttagctggatgttttactttataaggaggcagcaattcatgaraaacagctgtaattacacagcattcaggtatttcataattaaactaacagctgattttaaggtggcacatggcatgagattttgcaactaggctaagtaagcatgaaagtgtagcttagttctcttgctgtcggctttggacaaatcctctctgtgccttggtgtacaagagtaggccaataccagcatgtttctcagtggggagtggggtaaaggaggaggacaagagggttaattaatgcataaaagtgcctagatcaaaggcaggcaccattgtaagcaaaagacatctccttgaatattt

SEQ ID NO: 738342 - DNA, 549 bp, Homo sapiens
ccattctggccaaatgagaagaagcttagcaaatttaagatatttgatctatacatcgctcaaatcccagacggttcaactgattgttttgttcccctactaattgttttttgcccctggattgttcctgacaccatgttcagaatgaatcagtggagtgtaaaaattataggactcttctctgctagcaaagaaaagttgagattcccaatgacattgtttttctttatggaaactgattccttagtggagactcttttgagtatcttttgttcatttttcctgcaggaarttgacatatattgaagccctagtgtgttccaggcactatgtttgaggttggaaatgcaacaaacaaaaaatccaaaacagaaacaccaacttgacacggcctttacttgtgaacaaggggtgtatagtcctcccaggaagcaaaggaaaatgtgagaaatgtttaacatgtggttaatgttatggcagatgtctatagggaaacagtaggacaaacaggcaagaatggccacttctatatggaaggagtgatggccc

SEQ ID NO: 738343 - DNA, 641 bp, Homo sapiens
catgactgcttagtgctggagaattggttggtgttcagcaagcaccacacatctggtgtcagaaacaaaagacaccataggtcagaaccttccactgactcacagtgagcgagtggtctttggtgggcattgagaccctggtggaaggactgtgtccacactgtggggaggggctacaagggtgttagtagaagtcccagaagtaattttctggctgctcacatttscctcacacactgcctaggagtgggccagcctggcctgtgtctccacagtccaagtggttcctaagcttgggaatgtgtaactattggagtgtgggtttccttgtgagctgtgggtgaggcaggctgcctacctgagctgcctccgttttgtttcttttatagaatcttgctaccatggaattgctctttctgcatgcatcagatcattcattcgtttgtttgctcatttatttatttatttatttttcaaacagaatctcactctgtcgcccaggctagagtgcagtggcgtgatctcggctcactgcaacctctgcctcccaggttcaagcgattctctttgctcagcctcccaagttgctgggactacaggcacatgacaccacaccttgctcatttttgtgtgtgttttta

SEQ ID NO: 738344 - DNA, 569 bp, Homo sapiens
gtggattgtgcctgattaagcataaatttcatttccctatacattagtaattttcacgagttgtatttaaatatgatttcaggatccttaggtaggaccttaggacacctcacacagtttggcctcattgcttcttatttaaattttttcacattctccagggcaactggtttccccttacattttccaaatatatgggatgcagcgtctcaaatcctccaccctcataccacagcctaactcttcaagggyttgcagtgaaatctgtttctgaacatttcacatgagaggaaagcagagaataaccactagacatttgcctgaaaaatcctttctgcctctcctccttttatctttcctagacacagacaccttatcaggatgtctttgggatgaggttcctttctggaaactttacagggtgatgtgtcttcagtacaccctcctatcttttcctggttttgggttttagaattgcctggggctggctcaagatccccacaactgccatgtctcctggagggtctcatgggtattagtgccttaggggagtgggacctcccgaggga

SEQ ID NO: 738345 - DNA, 616 bp, Homo sapiens
ctttctcacacaaagacttcatggctatcacattgtcttcagttggaatgttgaattcactcttttaaattgaaaaggaaataaaaaccagctagaaagaaaagaaaacaagctctgggggaaaaaagcaaacgataacaaattaagttgttagccaggtgcactggctaacgcctgcaatccyaagacttgtggaggccaaagaaggaggactgtttgaggccaggagctagagacaagcctgggcaatgtatcgagaccccacctccataaaaaattaaaaattacccaggtgtggtagtgggcgactatagtctcagctacttgggaggcggaggtgctcaagatggggaagtcaaggctgcagtaagccgtgatggcaccactgctccagcctgggccacagagcaagacattgcctcaaaaaaaaaaaaaaattaaattattgtacctcatacatcagccttctatggaaaatgtaatcctattatatttatttgccgtttccctatataagtgttagggaagcaggtgcctaggggagccagagaaagaccaaccagctccatcttgagactaacaagaaacactccttgccagtcacaacccatagtca

SEQ ID NO: 738346 - DNA, 488 bp, Homo sapiens
gctgaggcaggaggatcccttgagcccgagtttctacagtgagctatgatcccaccactgcactccagcctgggaaacagagccatactatttctcttaagaaaaaaaatccagacatttgttggtctttggattattggagagcatttatctgacacttagcccaatgttttagaaaggggcactttgggactgggacacagctctgaaggaagctttggacaggttaatgtgttagtatggcaggcacaagcctcaggcacacctttagagggtagagctgtgacttgggatgatayagctgctgctgagggtacaatttgggacttacggcaaccacagtgtggtaaatcagtccctttaggattgtggttgtaattatgacatggagatgaaaccagacactcttgagtcagtgcaggcagtatataatgctttccagcaggtggaatccttaagaaagagcctttgcatgactgtgagaatgg

SEQ ID NO: 738347 - DNA, 488 bp, Homo sapiens
gctgaggcaggaggatcccttgagcccgagtttctacagtgagctatgatcccaccactgcactccagcctgggaaacagagccatactatttctcttaagaaaaaaaatccagacatttgttggtctttggattattggagagcatttatctgacacttagcccaatgttttagaaaggggcactttgggactgggacacagctctgaaggaagctttggacaggttaatgtgttagtatggcaggcacaagcctcaggcacacctttagagggtagagctgtgacttgggatgatacagytgctgctgagggtacaatttgggacttacggcaaccacagtgtggtaaatcagtccctttaggattgtggttgtaattatgacatggagatgaaaccagacactcttgagtcagtgcaggcagtatataatgctttccagcaggtggaatccttaagaaagagcctttgcatgactgtgagaatgg

SEQ ID NO: 738348 - DNA, 594 bp, Homo sapiens
tagtggttttttgtttttctattcaggatccaatcaaatattacattttgttgtcatatttccttagtctactgtacagccatttcctagactttttttttgtcttccatgacattgacatttttaaatattctagactgcttgttttacagatatccttaaatttgattgttatccatgtttgatggttcctacatgtttagattcagatttttaaaaatctgcaggaatattgcttagtgaaactgtatccccagtgtayaacatttgggagtatgtgatgctattattttgcagtattggtgatggcacatttgatcatttggttaagactgtgttcaccagatggcttcattttaaaggtgccttttccctttgttataagcattctctggtaagatattttgagatgtatgcgtgtcctattccctaatagcctctccccattggtatctactgattcttgtttgaatcacttactcttatagtttttgtaaaatggtgatttttcatttctgtctttccttctacatttattagctggattctctgtaaataatagctttctcttgtgtggtaggcagaataatggtc

SEQ ID NO: 738349 - DNA, 544 bp, Homo sapiens
tcttactttttgtacttggcagatttgtcttatttttgtctgtcacttcatctatttcaataatagtgtattattatgcttttatactgacttccttttttaccttcctatttctccactcgcataaaatcaaaatcacttaaaacttgtgttttcagatgacctccctcatcatcatgtagaagctgaaatagccaagatcctcttctgggatcagtgatggacagggcccatttggctgccttcttggagtacccagggtagtcacgyttgtgccaggcctcttgaagtccagcaaccacagtgatagccttttggccacagctcttttctgtgttactgatgtctctcatctcaatatttccccctcaaattgtaaaacatttcacagcccaactttttcatttgtgatataatagattgttccttggttttgtgtcttatgtctcaattctcttaattgttcatctcctgtgctaaaaatatacccactgaaataaatacacatttatttttctattgagggcatcttcagatttttcca

SEQ ID NO: 738350 - DNA, 504 bp, Homo sapiens
ttaacaaccttcttcacatggtggttgtgatgaataagcagtttgctttgtaaatagataagcaagtacaaataattattataatttttctctataatttgtccttttttgttttttattgatgtccctccagctcacagcactctactcttttatgagaatgttctcaatttatctgtctgcttttctgcaaagatgccctccttggcctaatgtcatgttgaatttctgtattaaaaatttctggagtgcatgtgtgtgtgaacttaagagagactacctgaatagcattctctaacccggwtgtcctttctgcttctgtaggggaaacccaagaagaagcttattgacaggaagaacacggtaattgacttttaaaagttgagaaatgctttccatgtgcataatgtgtgaccatgcacagactaagcataataccttatataaccatttttagtttggttcagcttgaatagtaacataaaaattttttctattgaaaaa

SEQ ID NO: 738351 - DNA, 680 bp, Homo sapiens
acttcccctattttgaaggagtcctcttctctgaatgattggctcactcaaatccatagcagggaaatggccaaagataaactcaggagtttggcaatagagctgccaattactataactaatatttatgagacatgaagataaacctcaggacaagaatcattcagtcaatacaaaaatggttgaaaataatttttagctactttgggatgcttgatatgactttatctactggttagtaagattactgtttattatgtgagtgaacagtaaagaataaagacacagtggtaaaggagaaaaggccttgaacctcaatgagtggcaaagtatcaatttatttcaactgtgcaaatctcttaaagtagactttttcatgaaaactacagagtcccaagatttggtggaaagaaaattggcttctgggagatggacatgggggtggtgagcggaaacctgccacaatccctagtcaacaytgcctgagaagcaccatttggcctccctgggtagggttgatttatcctcccactggattcccttattttttatcatccacataccagcctttctcactgggttgtaacccccttgaaaactaaggctgtatcttatttagaacagatgagcccttaattaaaatgtgttgaattgaattaatctcagttccatcacactga

SEQ ID NO: 738352 - DNA, 680 bp, Homo sapiens
acttcccctattttgaaggagtcctcttctctgaatgattggctcactcaaatccatagcagggaaatggccaaagataaactcaggagtttggcaatagagctgccaattactataactaatatttatgagacatgaagataaacctcaggacaagaatcattcagtcaatacaaaaatggttgaaaataatttttagctactttgggatgcttgatatgactttatctactggttagtaagattactgtttattatgtgagtgaacagtaaagaataaagacacagtggtaaaggagaaaaggccttgaacctcaatgagtggcaaagtatcaatttatttcaactgtgcaaatctcttaaagtagactttttcatgaaaactacagagtcccaagatttggtggaaagaaaattggcttctgggagatggacatgggggtggtgagcggaaacctgccacaatccctagtcaacactgcctgagaagcaccatttggcctccctgggtagrgttgatttatcctcccactggattcccttattttttatcatccacataccagcctttctcactgggttgtaacccccttgaaaactaaggctgtatcttatttagaacagatgagcccttaattaaaatgtgttgaattgaattaatctcagttccatcacactga

SEQ ID NO: 738353 - DNA, 572 bp, Homo sapiens
agatccaagttgagaatgtagtatttaagaaaaatttagaagtatataccatgacacatattgacaattttatattcaacttttatgtgtgttttcaatgaataatccaaaactatgaaccaatttatttaatcagcccatttataatgcctctctaaattaatttatactagaagctccaaactccataataaaaatctttccaaactagagtttgccatattaaatggggtgtcttttgatgtgtctattctatatccaaagtgaaaaagagaaactttgstaatggctaattctttaatttctcccccactctgagaagtaaccaaattttggtggtctcttacatcaaagtgtactagagaaaagggaagccatgtctttgttaaccaaaaaatcttcttaagtgatgaagttgatagcttaactaatccttgttcccaccccagtcactctccactcttaccactcacactgtacatgcccttctctaaaccattttaataatcttcctaatgaatatttagttagcatgcaagcagattttttctattgccgaaggccagcaatct

SEQ ID NO: 738354 - DNA, 622 bp, Homo sapiens
cctccaaaattcatgttgaaacttaatccccagtgtggtattaagaggtggggccttttaggaagtgattaagtcacgaaggctccaccctcatgaaggaaatcagtgcccttctaaaagagccttgagaaagctgcctgtcctttctatcttttccaccatgtgaggacacagttttcatttctttttgctttcccattatgtgaggatgcagcaagagctttccatctttgaagcagagagtaatttgctagcaccttgatcttggtcttcccagaatccagaaccatgagmaataaatttctattacttaaacatgatccagtctaagatattttgtcctagcagcaggaacagactaagatccccacctgttcccaccatgccaggccccgtttgaggcagtaagaaggcagcaatgtacaaaacaaatgtcatcatggagttacattttggcaagaagtacaaaacaaaatctggcttattattaggaagggatatgccataattgagtctacattcagacctcctgggtttaagtcctgtgagtatcactaactgctatgaccttgggcaagttagtttaccaagctccagttctatcagtggaaaaattaaaaaa

SEQ ID NO: 738355 - DNA, 622 bp, Homo sapiens
cctccaaaattcatgttgaaacttaatccccagtgtggtattaagaggtggggccttttaggaagtgattaagtcacgaaggctccaccctcatgaaggaaatcagtgcccttctaaaagagccttgagaaagctgcctgtcctttctatcttttccaccatgtgaggacacagttttcatttctttttgctttcccattatgtgaggatgcagcaagagctttccatctttgaagcagagagtaatttgctagcaccttgatcttggtcttcccagaatccagaaccatgagcaataaatttctattacttaaacatgatccagtctaagatattttgtcctagcagcaggaacagactaagatccccacctgttcccaccatgccaggccccrtttgaggcagtaagaaggcagcaatgtacaaaacaaatgtcatcatggagttacattttggcaagaagtacaaaacaaaatctggcttattattaggaagggatatgccataattgagtctacattcagacctcctgggtttaagtcctgtgagtatcactaactgctatgaccttgggcaagttagtttaccaagctccagttctatcagtggaaaaattaaaaaa

SEQ ID NO: 738356 - DNA, 565 bp, Homo sapiens
ggaacagcattaaaggcgacaggaagctgtaggtaggaggtccagaattcacaggccatctgaacagacttgtcttcgaacctcatatttagccccatagtggtcactcagcaccaggagcactgcaagacccaagatgtgacaacactgtccggccacttttgggataagtaagcccctgctaaaaccaacaaataaactaaaaggcttgagaatgtcggctggtataatcaaatgatgatatttgagtagcccaaatgtccagctcttaattrttatctaaatatttatttatacatttatcttggcttcttctgtaccttaagattcctaatgtgttagactaggacctctgccaatggcaagggaatggaaaaaggagtcatatccaactttgctgttgtttggactagcaagaaaagtaataataataataaattagcagccaattagaaataaacccaaagtaaatctcaacaatgacaccggaattatctcattttttaaattcttcccttctcccactaccctagatacagaaactagatacagaaagcactattca

SEQ ID NO: 738357 - DNA, 609 bp, Homo sapiens
ttctcttcttattcattcttttttgcctggaggggaaactttcaacactaccttgcctcaaaaactccttaaatgtgagatgccatgttaatacaaatttatggtatccattataagatgggatctagcaatttcacatggaaaaggctgcccagcattgagactggtttggcctgagaatctgaggctctggccaccctgtcttgatggctttcaggggccagctctgaggctgcaggtggttgtggactctggccaggtgccactggcgtgtccagcacccaccactgctcttgctccccgttgctgccgggaagctgtgactcctgccctgggaagctgaggcatcagattctttgctttggaatttctgaccctccctctgtgtggcctcttcccacccacaggttgyatcaggatgtagggctctgcaggtgccagcacgctggaactcatgctcgggttggcgggtggttggaggagtgtgggctgtgctttttcatccccgcatccccagcacctagcatggagaaggggtgtgatcaatatctgtcggaaatggaacaagcctcgggataaacagcctcatcctgggatgtgccagacagt

SEQ ID NO: 738358 - DNA, 612 bp, Homo sapiens
cgatgggactcaggagaggagaaaggtagtggaaaagatattatgtgccagtgtataattgcggatatgggcaattaccaaccatttatccaaacagcagttggtcttaatcttctaacctttctcttgttcagggtatcagctctaaattgcttctgagtcctgggggacccaaagtaatctttaagcttgaaattgaagtatctctctcagcacctaaattttgtgtctcgtcaagtcgaaagacatttcggcactgttcttcatcagaataaaaatagcgcgtctgtggttcttggtgaggccagcagggggcccasaagaggctaaaggggcggcctagagacactcaaagcagaatagtcctctcctgggtaccacactccctcccccactgcaagatgtgcagatttctagttgggggtgcaggttgtaagacgcactttctggaatagaccggacagttggctatggagaaggaagaaacgttcttgcacaacctagagaggggctccccctgaggatcagaggcagtgagtggggcgctggaagggtggagtctaagacaccaggcgggacccattaggggacaccttcccctctgagccctca

SEQ ID NO: 738359 - DNA, 641 bp, Homo sapiens
cacagggatcattaaatgaaagacctactgattttttgttttttgtttttttttttttaagacggcgtttcactctgtctcccaggctggagtgcagtggcacaatctcggctcactgcaacctccacctctgtggatcaagcaattctcctgcttcagccctccaagtagctgggactataggcgcgggccactacgcctggctaatttttgtatttttagtagagacagggtttcaccatgttaaccaggctggtctcaaactcctgacctcaagtgatccacctgcctcagcctcccaaagtgctgggtttataggcacgagctacaacgcctggccaagaactrcttattttaaacagctgctctgtttacagaacatccatatggcttctacagttattactagtattccatttagaatgtaatcatgtgttaaagatataaggctacattattcaattacattccattataattataaataacagttcctatcaatttagttaaataaagaacatttataatgaggtaatattgagtacctgaaattttcttcatcttcattatcactctgcaaaagatcatcatttagctcttcatctgacaaatccgactgattctaattaaaataagaaata

SEQ ID NO: 738360 - DNA, 598 bp, Homo sapiens
tctggtcaccagtggataatcaagaaatcccacacaaggcatgtggatccctcctgggctcagcttcaggtgcccaggcaagttaaatgtaaaaacaccaagtgtaacgatcacatttattctcacacaaaagagaaaaggtaagaagtccattggtggaagcttacgaacaaataatatttccttataatacacaaaaaaagaaagatatccttaaggtactactaaatttaacatgctaatatccaaaacctaaagattttttaaacaacacaaaaagtgtaattttagaaataagatttaaataactgaatcattaaattgaaatgagactataaaactttggtttttccartacagatcacgtatgaaaataaatgttagcagctcagttccccactcctgttcttgatggtactcctacctataaggagagagagcctagctattctgtcaagagttccaggttttcttaggttatatatatttgagcatcttagattaggttgggggggtgttattcacactgtctcactacttattcacactacttcacacgttcctccctttttaaaattacttatatgtataaatggta

SEQ ID NO: 738361 - DNA, 590 bp, Homo sapiens
aattaaaagacacagactggcgaacggggtagagtcaagacccctcactgtgctatattcaggaaacccatctcacgtgcagagacacatataggctcaaaataaagggatggaggaagatccaccaagcaaatgsaaaacaaaaaaggcaggggatacaatcctactctctgataaaacagattttaaaccaaaaaagatcaaaagagacaaagaagggcattacataatggtaaagggatcaattcaacaagaagagctaactatcctacacatatgtgcacccaatacaggagcacccagattcataaagcaagtcctgagagacctacaaagagacttagactcccacacaataataacgggagactttaacaccccactgtcaacatcagacagatcaacgagacagaaagttaacaaggatatccaggaattgaactcagctctgcaccaagcggacctaatagacatctacagaagtctccaccctaaatcagcagaacatacattcttctcagcacatcacacttattccaaaattgaccacacagttggaagtaaagcactcctcagcaaatgtaaaagaa

SEQ ID NO: 738362 - DNA, 635 bp, Homo sapiens
ctcatgattttgggccatttatcatttttagctatgctgccttgcacatgtgccttccagatttattgtgggagaagagctatgtatggagatatgccagctttttactgccttaccctgaactggaagcatgtcatcactatttgcagcccattggccagccattggcagtgaattggaagggagcatgtagctatctggtgagcactgtctttgccataaggccctcattttacagatgagaaaactgcaagagaaaactatggtaaggcaccacaaacctagttcatccaaaaccacgcagttmctgggtagagagtctgaaggttgtaccagatctaagaatcactatttttggccaggtgcggtggctcatgcctgtaatcccagcactttgagaggcggaggcaggcggatcacgaggtcaagaaatcgagaccatcctggccaacatggtgaaaccccatctctactaaaaatacaaaaattagctgggtgtggtggcacatgcctgtagtcccagctactctggaggctgaggcaggagaattgcttgaacccaggaggtggaggttacggtgatgcgagatcgtgccactgcattccagcctgatgacagagcgagactccgactc

SEQ ID NO: 738363 - DNA, 539 bp, Homo sapiens
gtgtttcaaatgaaccgatttaatcagacttgccttttctgtttctcttcctccaggatctcttttaactgaacttaccccttcaatttgcttacttcaatagcttaacgaggatttggaatttcattacacagtggaggaactcaagtgcttggaaggtcatttaggtcagcagagaaatggctggaaaagtgcctattactgagcttagtgggagaaaaataacaaaatcactttccacttcctttcatgctctgatgatgttttttctctcccaraaagggattgctaagtattcacggggtgatttcaggatgccacgttttgtcattcagactttctctggtgacttgatgagagtctacaaagatgtggacgggtcagtattatctcttgtaaatggaaaaagtgatgtgcagctcccactgcctggggactgggaaaccttggaatggctcattaaagaggggctctggctggcaggccagttctcagctgcctcttcagagagtacgtgtttgccatcccagatgaggggg

SEQ ID NO: 738364 - DNA, 539 bp, Homo sapiens
tatgatcttgaaaagcagtggtgaggaggaatatccctgccttgttcctgacctcagtgagaagctcattaagtgtgatggcagctgtaggttttttggtagatattctgtaccaagtcgatgaagtccccctccctctattcctacttaagagtttcttttaaaaaatcatgagtaggtgttggattttgtaaaaatgctgtttttgtatctattattattatatatttyttcttttttagcctattgatgtgttagattatattaattgatttttgaatgttgaacaagaattgcatacctgggataaattccacttgattgtggtgtataattctttttttttgtacattgttagattaatttgctaatatttgttgagaatttttgtatccatgttcatgagatattgatctgtagttttcttgtctttgtctgatttgggtattaggataatgctgcctcatagaatgtgttagaaaatattcccttctgtttctatttcctgaaagagattgttgagaattggtataatttct

SEQ ID NO: 738365 - DNA, 523 bp, Homo sapiens
ataacttatcacaggaagaaagggtgaagctctcctagtgcatctctcactgatcatcaggaaagtctttgccagaagttcagcagtctccccaaaactggtcataactgggttagacatccatccgcaaaccagcagttggccaaaaaaagtgagattcccctgactggaaaagctgtcatgttcctctcttggggctgacacacggccacctcggagctggacaaaatcagagttgtgttggtttttaaaagaaggcaggggtggggaaggctcacccacagcaggtttytacacaagatgggcacggcttctggaggatgttaacagccccccttgaatcatgactcagaggtatgcctatcttttgtaccccaaaagtcagaggaccagggttgcactgtgatttttgtaagatggacggaaccctgcagcagcccgtctgtcccagtgattagtcacatcaccatccatttccccatccccatccctccctctgccagcccaacatgctcccagagtg

SEQ ID NO: 738366 - DNA, 642 bp, Homo sapiens
ccctcaccagacacctaatatgtgggtgctttggtattggacatcatagcctccagaactgtaagaaataaatttctgttgtttataagctacctagtttatggcatttttagataacagcctgaacagactaagacagttactttattgatgactcagatttacagaattatcttctggaatttgctaaatgttttagttataacttgtatccactctgactctgtctttaccttaagatagtstgatcctcccagcatccaataaatgtaagccatgttcactctgaagatggtaataggagttgacttggaatgtctgtttctgactgcctcttgttcttatcacttgccttctggcttctgaatctggcctcaaagtcatatttgtgatttgggggttgtccttaggatttggcatttgaacatagtctcaccagattttgattctgggctacctttcatgatctttagctcacacttatgctcctttctttttttgcattacgatgtatgttcatctctccaataaatatcctggttgggtctaactttatttgacggtaaaaagaagactgaatttagcccaggttatacagaggatacctgtagatatcctacagaataccatagaaaaaataaa

SEQ ID NO: 738367 - DNA, 626 bp, Homo sapiens
tggtgtgtgagtggtataaagacatcatctgataatttagcaatttgtaattcatttgggtcatactgagttacttcaatatttcttaaaagcatgtacaactaactgcagggcccccttttgttgccttcacttgggaagacatggcaataaggtaaaaggatacaacataccatgctcactttctgtcttccagaatttcaatgacctctctactttgttgggcctctcacttcccatctttaatgcactttaaacaccatcaatttcatggcaaatttctttcatccttatttggcaacgggagacatgttagctgggcaggatgcattggacctgtcatctttaactagaagccactaaatatctactgaaattgttcatttttcacctttaccaccactggcctagaccaagacattttcacttctgcgtcaatcttcttgcactgctttttcttctttccattctctgcytcctggaagttagttacagtttttttcttttttcttgtttttaatatatacctgaccatgttgcagcagtacttaaaacccactctgtaagatcacccaggaccacttttcaattactttgttttagtgatactgggtgattttcagttt

SEQ ID NO: 738368 - DNA, 644 bp, Homo sapiens
aagaattcatttcttaattttatctgaaatttatgtctttctctctattattaactgctcttggtatagtctaaacatttttttggctacagtttttgctgaaattttttgctatttttcttgatgtcagaataatttttattgatttcatcactcatctttattgcctttgttrtatatttcattaatgttttatcaaaattcccttccagttcttttgaaataaatttaaagatgacaagagctatccattacatggatctaattcaggactgtaatttatcatttgttttactgaaacattccaaaatatttttccaaattgcagttaaaatggcacatttaaactttttaaataaacttttttgtaccttatttgtgttttatcttctgaatctttgaaaatgtgtgtttgaatccttaaaatattgctctatttgtgatccaagattgaacagttttatatgggcaaggggtctcattttttagattatttaaagaaaactctatattggagtgacatcaccaagatggtaaaatagaaggtaacccattgatatcccccaacaacaagaattctgcacctatccacagttagtcatcctgcagaagccccaagactcaggtgggagcttgtgaaaccc

SEQ ID NO: 738369 - DNA, 613 bp, Homo sapiens
tggtgcgccgttttttaagccggtctgaaaagcgtaatattcgggttggagtgacccgattttccaggtgcgtccgtcacccctttctttgactcggaaagggaactccctgaccccttgcgcttcccaagtgaggcaatgctcgccctgcttcggctcgtgcacggtgcgcgcacccactgacctgcgcccactgtctggcactccctagtgagatgaacccggtacctcagacagaaatgcagaaatcacccgtcttctgcgtcgctcacgctgggagctgtagacckgagctgttcctattcggccatcttggctcctccaggctgaattcttcatcggagaacttcagtcatggactcaggcaagggcacagggattcttgagtaatatcttattcaacgtggaaaaccatgacagaactaatccaatgcagggtctccaacttggctttggcatttccttttccaaggaccatgcagatcctgcttgtgcatatacattttttccacctacattaataccattgagaaaagtgcagacaccgaggaaggtcttgatccgatctgaattctattcttcctgctatgccttgagaaggttcagatatttg

SEQ ID NO: 738370 - DNA, 522 bp, Homo sapiens
atcatggcggaaggcaaaggggaagaagcatgtcttaccatggtggagcaggagagagagagagagagcaagagggagagagaaggtgctaaacacctttaaacagccagatcttgtgagaactctatcataagacagcactagggtgatgatgctaaacccttagaaaccacccccgtgatccaatcacctsctaccaggtctctcccccagcactggggattacagttccacatgagattgggatggggacacagagccaaaccatatcgtagttcttttcaaaagacagaattggcgagggacgcctgaaagcagagcaacatgtcaattcaatttttaaaaaggtgagaacttcagagcctaggaaagtttcctttgagctattcacatggtcaccatttaagattttgtgagtagtgaccacattggcctctctgtcttgtgacacacactccccatgattgggaagagaaagaaagcacattcttaggaaagccatcaacctcacagagtgacctt

SEQ ID NO: 738371 - DNA, 602 bp, Homo sapiens
agtgtaaaatctagatctagatttactgttttataaacttaatgtccccacttcactgatacataagagctacatttatttacctgcaattcaaggcctcagtgctttaacctttgtcttcctgctttatgatgttgtagtactccttttacagaaatacctatattaaatagagatggacaatctagattttaccccaacaaataagttcatttaggcactgattaatcacatgtaaagtgaggcatgttaaattttctcctccaacacagtaaaattaaatatatcaatttcttcactgtcagaataacgtaatagacatggaggaggactaagattgagtaaattcrttccagtgctgtctttttactgtgtgtgtaattttggatgagttgcttgtgtgttctcaggatctattaactacatttatcaacagggtaataatagcccctgttcccctataggctaatggcaactttcaaatcttttgaaaaagtcaaaagcctttgcatttggtcctgacccattattactctgtgaattaatcctaaaagtcagtactcaataatgtggctttttaatcatgagcaacagtggctgcc

SEQ ID NO: 738372 - DNA, 609 bp, Homo sapiens
cataaaaataaactcaagagggaataaagatttaaatataagaccatgaactataaaaattgtagaagaaaacctaggaaacaccattctggacatcaccttttcaaaggaatttgtgaccaagtcctcaagagaaattgtaacaaaaagaaaaattaargaatcaggaaaaatagctagtgtatgctgggcataatacctaggtgatggattgatagatgcagcaaaccaccatggcacatgtttacctatgtaacaaacctgcacatcctgcacatgtaccctggaacttaaaatagaaataaaaaaagtgagtcctaattaaactaaatagctttggcacagcaaaagaaactatcaacagagtaaacagacaacttacaagataggagaaaatattctcaaactatatattcaacaaaggtctaatatcccgactctataaggagcttacgcaattcaacagtcgaaaaacaaccccattaaaaagtggccaaaagaaatggacatttctcaaaataagacatacaaagggccaagaaacatataaaaaaagtttatatcaataaccataagaaaaatgcaaataaaattacaacaaggtaatat

SEQ ID NO: 738373 - DNA, 609 bp, Homo sapiens
cataaaaataaactcaagagggaataaagatttaaatataagaccatgaactataaaaattgtagaagaaaacctaggaaacaccattctggacatcaccttttcaaaggaatttgtgaccaagtcctcaagagaaattgtaacaaaaagaaaaattaaggaatcargaaaaatagctagtgtatgctgggcataatacctaggtgatggattgatagatgcagcaaaccaccatggcacatgtttacctatgtaacaaacctgcacatcctgcacatgtaccctggaacttaaaatagaaataaaaaaagtgagtcctaattaaactaaatagctttggcacagcaaaagaaactatcaacagagtaaacagacaacttacaagataggagaaaatattctcaaactatatattcaacaaaggtctaatatcccgactctataaggagcttacgcaattcaacagtcgaaaaacaaccccattaaaaagtggccaaaagaaatggacatttctcaaaataagacatacaaagggccaagaaacatataaaaaaagtttatatcaataaccataagaaaaatgcaaataaaattacaacaaggtaatat

SEQ ID NO: 738374 - DNA, 609 bp, Homo sapiens
cataaaaataaactcaagagggaataaagatttaaatataagaccatgaactataaaaattgtagaagaaaacctaggaaacaccattctggacatcaccttttcaaaggaatttgtgaccaagtcctcaagagaaattgtaacaaaaagaaaaattaaggaatcaggaaaaatagctagtgtatgctgggcataatacctargtgatggattgatagatgcagcaaaccaccatggcacatgtttacctatgtaacaaacctgcacatcctgcacatgtaccctggaacttaaaatagaaataaaaaaagtgagtcctaattaaactaaatagctttggcacagcaaaagaaactatcaacagagtaaacagacaacttacaagataggagaaaatattctcaaactatatattcaacaaaggtctaatatcccgactctataaggagcttacgcaattcaacagtcgaaaaacaaccccattaaaaagtggccaaaagaaatggacatttctcaaaataagacatacaaagggccaagaaacatataaaaaaagtttatatcaataaccataagaaaaatgcaaataaaattacaacaaggtaatat

SEQ ID NO: 738375 - DNA, 609 bp, Homo sapiens
cataaaaataaactcaagagggaataaagatttaaatataagaccatgaactataaaaattgtagaagaaaacctaggaaacaccattctggacatcaccttttcaaaggaatttgtgaccaagtcctcaagagaaattgtaacaaaaagaaaaattaaggaatcaggaaaaatagctagtgtatgctgggcataatacctaggtgatggattgatagatgcagcaaaccaccatggcacatgtttacctatgtaacaaacctgcacatcctgcacatgtaccctggaacttaaaatagaaataaaaaaagtgagtcctaattaaactaaatagctttggcacagcaaaagaaactatcaacagagtaaacagacaacttacaagataggagaaaatattctcaaactatatattcaacaaargtctaatatcccgactctataaggagcttacgcaattcaacagtcgaaaaacaaccccattaaaaagtggccaaaagaaatggacatttctcaaaataagacatacaaagggccaagaaacatataaaaaaagtttatatcaataaccataagaaaaatgcaaataaaattacaacaaggtaatat

SEQ ID NO: 738376 - DNA, 537 bp, Homo sapiens
ataaggagcttacgcaattcaacagtcgaaaaacaaccccattaaaaagtggccaaaagaaatggacatttctcaaaataagacatacaaagggccaagaaacatataaaaaaagtttatatcaataaccataagaaaaatgcaaataaaattacaacaaggtaatatctcacatcagtcaaaattgctattactaaaaagtcaaaaaacaacagatgatggggaagatgaggagaaaaggaacatatatacagtgttggtgggaatgtaaattaattcagccactgtggaaagtggtttggagatttctcaaataactaaaaacagaactaccatttgacccagcaaacctgttattggatatayatacaaaagaaaatgaatcattttaccaaaaggacacatgtactcatcacagcagtattcacaatagcaaagacatggactcaacctaggtgcccatcaatagtggattggataaggaaaatgtggtatatatacaccgtggaacaccatgcagctgtaaaaaagaattaa

SEQ ID NO: 738377 - DNA, 593 bp, Homo sapiens
gcttttctagctggaaacctctgtgaccggttgtgcttttgcccaagttttgctcagccctgcctggtccactcggcctggcaggctacagtcagctcttgctaccggcctggatctcatacttctgaagagactggagtggagtggcaagaggtgtgtscgtgaacaggcatggggtccagccactgcacacagtcaagcacactggctgctgcagtgggtcaggcaactccaggtgccagcacaggtgccagctcattacaaggctgtggctggaccaggcacaccaaaagcaccttccatggctggcactggggaacatgatggtacctggaagcttgaggactccagaaacttcaggggttcaaagggagagtcacagcccttgctaggagagcttgcaggtctgggatccccaaagggccacagctcttctctccttctcccttctctccttcttgtcacccacaatgtgatgagcaaaaggctgcttcagctctgtttgtattacagctcttttaacccctccacagggtgggtcccaagttcttgtcctgtgtccaggaagaatgaggtacgtagacaagtggagg

SEQ ID NO: 738378 - DNA, 601 bp, Homo sapiens
agtatgtgtacgtgtgtatatgtgtttgtgtatttaagttactcagtttgtcataatttgtttatagtagcaataggaaactgttacagagattggttccacttgaaattattaggtatgtacatagattaagggaraaatgagtagatctgtcataatggattataggtagattcttttgggaaaaatgtgttgcacacaattaccttcatataactgtattaggttgttttgccgggtaacagtaaaaaatgctcaatcctggcacattcatttattttgagtctaaagtatactgccaattttttaacttctaacttagtctattagtacttgtcccacataaaaagaatttactttatttttttatctttttttgtatttgataggggcaggtagctattgcagaggaaataatcattctgagaataactgagaggttaaaactttatttaaaaaaaaacctctgaatcaatatttggtgaggtgagaatgtccatttcatgctgctattttatccaaataaagttaaagcattgtagaaatgtatggctatatgttaggacttgagatactaaaataattaaggtgtatagagttt

SEQ ID NO: 738379 - DNA, 483 bp, Homo sapiens
ttaaaaaagatagaaaaaccaaaacctgagagaacatgtgatgtctccaagcagtggacataaagtaacacatatggcagactatgaaagacaaaacaatgaaaagcaaagaaacgtcaatagctataacaataccaagkgctgcaaagtcaataagaagaaagcctaaagaaatggaaagattatcaaccatatggcttgaaactcaaacaaccaaagaatcagaaacaagctctttacaaccaaagagaaagcactaattatatatgaggattttaaatggtaagcaccaaattctcctagaatgcctctttttagtgctattagggtctaagagtagtagtttcaaatacgagttcaatttccaaacccttcagctactgagcaaaactgtgagaacagatgagaaagttgcacaagaattaccagtgatgatgcagaaattgattacaggaagactatatattggaatttttgtttttc

SEQ ID NO: 738380 - DNA, 539 bp, Homo sapiens
aggggtgggttcccaagtccttgggttgttctgtccctgtggctttgcagggtgcaggccctgtggctgctctcacaggttggagttgagtgcttgtggctttcccaggctcaggattaaagctcccagtagatctatcattttcaggtctggatgatggaggcctccttcccacagctccactaggcagtgccctggtgtggactttgtctkgggggctccaatcccacatttcccctcagcactaccctagtagaggttttctgtgagggttctgcccctgtagcaggtgtctgcctgagcacccaggctttctcatacatgctttaaaatctaaagggaagatgccaagcctccttcactattgcattatatgcacccacagacttaaaaccacatggaagccaccagtgcttattgtggcctatgctctccaaagcagtgacccaagtagtatctgggtccaatcaagctggagctgtaggtagagcagccaggattctaggagcagtgtcctgggcttgcccagggcagcgggc

SEQ ID NO: 738381 - DNA, 604 bp, Homo sapiens
aggggcccttcctgctctgtgcctcaacctattctccataatagggagtctaatcctattccttccctgcctgatgaggatggtgtgaggatgaggaggacggcatctcatttggggctttttggcagtgggcctcattttaatcctgcagggctgcctgccagtggatctatccagctgcttccttgtagccaagaatgagttcaatraattgtgattcactgattttattgattttgttttaaaacagggagactggtatttttgaagctgctatcattttctatttctttattaatttctttgtaatcatcttattaaagttttcttatttagtgggagagggagctttgtttaagtttggaatttgcctaaggcagaagttataaggcttcataaccttttgtatgtattgccaatatttgaaacttgggagattacgtataaaaaatacctagttttctgggtggaggatggggcatgctgtcatctcaagtctgctgcggctcacccccaccacctttaccccctcccccgcccttcccatcccccactgcacttcactcatgtaagacgtctgcccggtgctggtccaggcgggcat

SEQ ID NO: 738382 - DNA, 623 bp, Homo sapiens
gatgccatctaggactttcatagcctagagaggagaagtcaattcctggtttcacagcttcagaggacaggctgttcttgtcagaagctaatgcagtgggtgactttaagttgaagccaatgctcttgtatcattctgaaaatgctggggcccttaagaattatgctaaagctgttctacgtgttctagaaatgaaacaacaaagcctggatgrcagcatgtattagtcagggttccctagagggacagaattaataggatatatatatatatatatatgggagtttattaagtattaacttaaacaatcacaaggtcccacaataggctgtctgcaagcttaaggagcaaggagagccagtttgagtctcaaaactgaagaacttggagtccaatgtttgaaggcaggaagcatccagcacaggagaaggatgtaggctggaggctaatccagtctctccttttcacgtttttctgcctgctttatattccctgagagctgattagattatgcccactcagattaagggtggatctgccttccccagcccactgactccaatgttaatctcctttggcagcgccctcacagacatacccaggatcaatacttttcatccttc

SEQ ID NO: 738383 - DNA, 640 bp, Homo sapiens
aatgattcgtgatttggattttgaaggacatgtatcatgttcagcaagcagagaaagagaaattgattattacttaataatagttcaaccgtccttaaaccaagggtttgcttttagaccaaacagagcagaatagttgttttccttgatatctttatttgtggggcaagtcaggcagcatcatctgctggtggttctcatggtaatgggaaagcaaaaataaatgatcttcatcagttcataaggttgctaatcacccaaggtcaggactggagactgtgaacccagacgccactggttttgagtagaggagcaatatgcagagaggagaactacctggtgacagcaaggatgtgttgctgtgtgtggagggccaggcgtccaaaatggggagcgggagatggaagagacatcagcagagaggaggagagaagaaatgaaggaggatttgactgaactyggtggaggctttcaggaaagaagaagaatcaatcgttcagtagtacctgtatttggcctcctaaattaaatgtaaataaggctttgcagcctgaaagcataagaggaaatttaagccagagtttcaattatttaaaactgcaacacagtacacttggagctgggatccagactgttctga

SEQ ID NO: 738384 - DNA, 550 bp, Homo sapiens
ctgcataatgataaaataatctaactttcaagtcaaaaaataaaatatattaatctatattattttaatagcttcttatacaataaaaaagcattgaattttcataggacacttttaataagtcacagtgtgaccaactccttcctcttttcaagagtctgatgraagtccagcaatttaataacagatatcactaaggaaacatgaaagaataagatgaatgggatagctaccgggagggttgtttaaactatcaaccaatatggcccccctatactcacacacacacatggtcacacacacatgcacactagaaaggacatgaaactcctctctggcctgtgggggcagaagacagctggagaggaagcaagacctcaaattaattgaaatttcaatacccacacgaggctacggctcctgtttggacagcataaacagaggcagagtaagtttggagagctgagagcagaggagctctgttcgctctttctctccagaactctggtacctcataggagtgtctcatgcccttttgcagtggaaactg

SEQ ID NO: 738385 - DNA, 550 bp, Homo sapiens
ctgcataatgataaaataatctaactttcaagtcaaaaaataaaatatattaatctatattattttaatagcttcttatacaataaaaaagcattgaattttcataggacacttttaataagtcacagtgtgaccaactccttcctcttttcaagagtctgatggaagtccagcaatttaataacagatatcactraggaaacatgaaagaataagatgaatgggatagctaccgggagggttgtttaaactatcaaccaatatggcccccctatactcacacacacacatggtcacacacacatgcacactagaaaggacatgaaactcctctctggcctgtgggggcagaagacagctggagaggaagcaagacctcaaattaattgaaatttcaatacccacacgaggctacggctcctgtttggacagcataaacagaggcagagtaagtttggagagctgagagcagaggagctctgttcgctctttctctccagaactctggtacctcataggagtgtctcatgcccttttgcagtggaaactg

SEQ ID NO: 738386 - DNA, 576 bp, Homo sapiens
agatggggtttcaccatgttggccaggctggtctcactcaaactcctcacctcacgtgatccgcccaccttggcctcccaaagtgttgggattataggtgtgagccagagcgcccagcctatctctattatttttgctgttgagttgtttgagttccctctatatccaggatattaatcctttgttggatagataatttgcaaatattttctcctactttgtaygttgtctcttcactctgttgattggctcctttgctgcgcagaagttttaaaaattttatataatcccatttgtctgtttttgtttttgttgcctgtgctttcgaggtcttatccataaaaatctttgcccagactaacatcctaacacatttctcctgttttcttctagtagtttcattgtttctcgtctttaatttaactctttactctatcttgaattggtttttgtatatggtgagagatagtggtctagttttattcttccaagtattcttcaattgtcccagcaccatttattgaaaagactgtcctttccctaatatatgttcttggcacttttgttgaaaatcag

SEQ ID NO: 738387 - DNA, 576 bp, Homo sapiens
agatggggtttcaccatgttggccaggctggtctcactcaaactcctcacctcacgtgatccgcccaccttggcctcccaaagtgttgggattataggtgtgagccagagcgcccagcctatctctattatttttgctgttgagttgtttgagttccctctatatccaggatattaatcctttgttggatagataatttgcaaatattttctcctactttgtatgttgtctcttcactctgttgattggctcctttgctgcgcagaagttttaaaaattttatataatcccatttgtctgtttttgtttttgttgcctgtgctttcgaggtcttatccataaaaatctttgcccagacyaacatcctaacacatttctcctgttttcttctagtagtttcattgtttctcgtctttaatttaactctttactctatcttgaattggtttttgtatatggtgagagatagtggtctagttttattcttccaagtattcttcaattgtcccagcaccatttattgaaaagactgtcctttccctaatatatgttcttggcacttttgttgaaaatcag

SEQ ID NO: 738388 - DNA, 576 bp, Homo sapiens
agatggggtttcaccatgttggccaggctggtctcactcaaactcctcacctcacgtgatccgcccaccttggcctcccaaagtgttgggattataggtgtgagccagagcgcccagcctatctctattatttttgctgttgagttgtttgagttccctctatatccaggatattaatcctttgttggatagataatttgcaaatattttctcctactttgtatgttgtctcttcactctgttgattggctcctttgctgcgcagaagttttaaaaattttatataatcccatttgtctgtttttgtttttgttgcctgtgctttcgaggtcttatccataaaaatctttgcccagactaacatcctaacacatttctcctgttttcttctagtagtttcattgtttctcrtctttaatttaactctttactctatcttgaattggtttttgtatatggtgagagatagtggtctagttttattcttccaagtattcttcaattgtcccagcaccatttattgaaaagactgtcctttccctaatatatgttcttggcacttttgttgaaaatcag

SEQ ID NO: 738389 - DNA, 629 bp, Homo sapiens
acagaggcagggacaagagcccagctcttggcaggaaggagaatgctactcaccctactcaagtcaatggcaggcaaacagattttgatcttcttagtgccaagaaacagaagagtccacggtgcagatagcacataattctggagtttgcagtcctgcataccctcaagcctgttcatttatttgtccccccacaggcaggcacccagtccctgtacgtgccagcttgtactgagcaccaggtataaggaggtacagggaggcaacggtgagcaaagaagacctgattccygccctcatggagcttctggtccactgggaacacagacaagattctggcatccttggaactaagggtccagtcagggaaacagagatttataaaataatcacaaataatatagaacagaaacctgagacaagtgccatagtgctagcccacgtggtgcctttgaatgtattagaagaaaactggcctcttcaactggaagcagttctgtggccacataccacagagcttggtctgaatttcagccccattcacctgcttggccagatatcttgtgctgtgaacaacccgagcaaccatatttggcagtccagaggtgtagtaaccatgtgtttatggt

SEQ ID NO: 738390 - DNA, 597 bp, Homo sapiens
ctggttccctcattagttcataagttaagcaaaatcttcaacatgtgttcattttatattcatacaagagtcatgattccaccctctaaaaacttttttcttttaacaaaagacacaaatacagctatgaactcatgaccagttgsatgaatatggactgtatcttctatccatattttcctcctttctaagtatagattttaatattttaagtaattatattttaattctttctctccccactaaaatagtatgtgagctgcattggtgaccgttcacttaacaattcagtgttcggaatgctgaatattaaggttgggtcttgtcagaaccagaggaggagaagactttgcccagggatactgggcctggagctggactcagcaacttacggaatctggatttgacaagtgagtgagttgtatagaattcttgttggaagcttgtttttaagccgaaatgtgggtaaaggaatggatgtggatgtagtttggggtagcctaagaggcagctgtattggttattttttttccatgactactcagcatccaaagccttctaaaattgggagacatctcccaacatgagcatctttgt

SEQ ID NO: 738391 - DNA, 585 bp, Homo sapiens
cctgcctcagtctcctgagtagctgggattacaggcgtgcaccaccacgcccagctgatttttgtatttttagtggagacggggattcactatgttggccaggctggtatacactcttctgaaaaagggaagtttacagggagaaaaaccagataagtcgttgccagggttagatggggaggtgggaggttgactccaagaatgtgaaggaattttggggagggatggagctgctgcatacctgactgtagtgctgtttacacaactgtataagtttgcccaaactcagaattaaaacccacactaaaaagagtgaattttaccaatttcaccactatacacctgacctttaaaaaaaccaaagcattcagagraattcacactcacaagtgaggtgtgtcgtggctctccaaaagtggatcaagttgacctgagcatcagcctccaagctctgagacaatcagtaccttcctgatgtcagaaggtccatgtgtggcaaaacaagccttcccaaaaccataatccatctccaagacccactgatcctctagccctgaaaggactgtctcagatacgctgtgggcc

SEQ ID NO: 738392 - DNA, 612 bp, Homo sapiens
aaaaaaaaaaagtcacacctatttatccatgttctactttatggaatctagcataaggaaaagaccccaaaaaacaaatgagtagaccataccattacctatagtcacacacacaaaatcagaaacaacctaaatgtctaacaaatagaggcatggctcttacatttcctttatttatttattgtccattygtgcccaaaaggatttatgatacacttaagtaaattgtgttcaacttactagaatggatacagccattaagaatgatatttagggctgggtgcagtggctcatgcctctaatcccaatactttgggaggccaagacaggaggatcacttgagcccaaacgtttgagacccgcctgggcaagagtgagaccctgtctctacaaaaaatgtaaaaatcagctgggcgtggtggcacatgtctgtagtcccagctttgcaggaggttgaggctgccatgagccgtgatggcgccactgcactccaggtctgggctacagagcaagactccgtctcaaaaaaaaaaagacaagaaaagaaaaaaatgctatttacaaaatgtttgaaacagaagactttctattacgttaccaagagaagtgaaa

SEQ ID NO: 738393 - DNA, 572 bp, Homo sapiens
gtccctaaagtgaagagcagcaggtgatctgcaaggtttcatcctctggagcattgagggccacaatggcacaagttgaggcaggaactgagtctgtattatgcaaggcgttacagcctggactatggtttcagaccattactgaaagtaacaggatactgctaaattaggttaggttctaaattgagaagtgttggagattagcatttgaaaaggatgtacctgacttgtaagtaaagattgggttggaggaataaaatctcaggggtgtgatgctggttagaggctattgccataggcaaagtgaaaawgatggtggcactgtctaaggtggcgatggtgaatacagaaacggtataatcttgttgagagttatttggaagtcagagtcaccatgatttagtgatagattagaagtgagggttgaaggagtgggaagagttaagagtcacttttatatttctggcatgagccatgaagtgaatggtggcattatttactgaaataagtgattctgcagggaaaagaggaacagatatttggggaaagacgttagttttagacgctgagtt

SEQ ID NO: 738394 - DNA, 542 bp, Homo sapiens
gcaggaggcaaaaagagattattgaaaagaactcaaacagtgtgtactgaaacagctagtcacaatacgaacaatgtgagaatctgtgacaaatatcacagggatctttcgaaacatcacacaatttttaatcatttctacatgcctcaaggaattaaggactttgagaatatctgagatcatgcacatgatctgcctggcttcagaaagacacagtaggctagcaccacaattccccaaatcacacataatattgagttattgccatgtaacttctggggcttctctctstgtgtgtgtgtgtgtgtgtgtgtgtgtgtgtgtctgtctgtgtgtgcacatgctccaatactctacaaaatctctaaacacaagctcatttggtttgccatgtaaaaaatattaggggctgggcacagtagctcactgtgtaatcttagcactttgggaggcagaagtgggtggattacttgagcccaggagttccagatcagcctgggaaacatggcaaaaccctgtctctccagaaaacaacaacaaaa

SEQ ID NO: 738395 - DNA, 458 bp, Homo sapiens
aaaaaactgagattaaaattttattttttaaattaaagttattacatccatgtatctctctgtatgcactttaaaagtacttattacattaagttacagggttttgactcctgggtctaaaaagaacaccaagtcctgctaaatgttaaacaatgacagcaattaaaaccccrtctttaggccaagtagaagatgcctatcaaaataaactgcattcctgaaacacagggccagaaattaaagctattcaactccccaaggcccagggactagcatggaagaggtgggtgtgtgagattataagggctgattttgagagataaaataagttcagtttctctataaattaatcattaatgtcaaaggtacattcatgcaagaccagcgtagggacctgtgtcagattaacaaggttttcttgaagcattaactgacccttaaaaaaaggctataagggt

SEQ ID NO: 738396 - DNA, 637 bp, Homo sapiens
aaaaaactgagattaaaattttattttttaaattaaagttattacatccatgtatctctctgtatgcactttaaaagtacttattacattaagttacagggttttgactcctgggtctaaaaagaacaccaagtcctgctaaatgttaaacaatgacagcaattaaaaccccatctttaggccaagtagaagatgcctatcaaaataaactgcattcctgaaacacagggccagaaattaaagctattcaactccccaaggcccagggactagcatggaagaggtgggtgtgtgagattataagggctgattttgagagataaaataagttcagtttctctataaattaatcattaatgtcaaaggyacattcatgcaagaccagcgtagggacctgtgtcagattaacaaggttttcttgaagcattaactgacccttaaaaaaaggctataagggttatgaaaagcttatgaaagttatattttatggtctagataaaaatttatagaatatatacaaaattttgaaaaacaaatttaattgtctttatactgtttttattagagcttattgattggaaaattaagtcttctctcgcaaaaaaatgaaggtttttcaccttttcttctaaaatcc

SEQ ID NO: 738397 - DNA, 598 bp, Homo sapiens
ttgataatttttgttgagtttgctgaagatcagactataagtgttataattgcttgtagatgtgaggctttatttctgagttctccaatgtattccattggtttatatatctatttttgtaccagtaccatgctattttagttactgtagccttgtggtatagtttgaagtcagaaattgtgatgcctgtggattgttctttttgcttaggattgctttggctatctgggctcctttttggttccaagtaaattttagaatagtaatttatagttctgtgaaaaatgatatttgtactttggtaggaataacattgaatttgtagattgctttgggcagtatggtcattttaataatattgatttttctaatccatgaacatagaatgtttttccacttatttgtgtcatttctaatttctttcrgcaatcatttttgagttcttcttgcagagatctttcacctccttggttcgatgtattcctagatatttcacttttttgtttatggccattgtaaatggaattatcttcttgattttgctctcaactagaaccttattaatgtatataaatgctattgatttttgtatattgat

SEQ ID NO: 738398 - DNA, 538 bp, Homo sapiens
atgaatacaattcttctaaagccctcatcgccaatgatcactcttacatagattaaaaactgtcagatataatcatttatcaggtaattgtaaaatgggaaaatacaaaattgcgaagagatttctgatggcttgtcacagtcagcccctggaccaggcttgcataggattcatgagattaaatagataaaacacatattcatttgattttctagtgcaactgaattgagagaggtggttgtgcaggacagacgcttcatctctttttatgcakcagtgagtgctagagaaggcgatcctctgtcttcatctttttaacagagcacttctagagacacaaactatagcttcaaaccattccagaaaataagattgtttcctcagacaagaaagaataatggaagaatgcactcctccaccatatccaagccatgttatacacacgtttaatgctgtgtatgtaaatatgcctatgaggcaagatttgggaagtactgagaacacttttgtagctccatggatcatttccactagctta

SEQ ID NO: 738399 - DNA, 588 bp, Homo sapiens
acaattttctgaacaattgttgtgagatttcacacattgatcaaaacactgattcaaaatactctcattgtaattggtttgtggcccttttgtacctttttgctgctactggaccattgctggccactggaccaatgtcaagtcatgttttggtgtcttctctttggagaaatcaaaccactccatgaacattgacacctacatggcctttttcaacaagttagccattggttcacaaccaattctggttcttgctctaatattaattattttgtgttactgatcaagttgattaactgctcagggctctagttttcttatttataaaatgcaggggtctgatggtgttttctaaaatcctttccagctctgaaatsctatcactttataggatcaaatgaaataatattaagtactgtctgaacacagaggctaataatgtagatgaagctgataaaaggagggaaaagggttgaaagttttcacctatttagccacagaattattaattatgccaggatttcaaatattctctgctaagaggaaggagtgccagggaatgatctttaataacatggttctacaatg

SEQ ID NO: 738400 - DNA, 590 bp, Homo sapiens
agtaaaacactcctcggcaaatgcaaaagttttctttaagagatgttaagtatgtgggctattcaactaactttgtctagcagataatgcataattataatgctggaactcaccattgatgttagatttggaagcattgatttgtctatgatgagcctacagaaggtatgaaagtgaatgaactcactcaaaaacatatagcgctggaagagaacytaggcagaagcttggaaaaacactaacatttacaggttgggcagagaaggagccccaaggagacttggtatcaagaaagttattagtggtagaagtaaattttcagtgacagaatgtaaatgacttgttaaaaatgtttgactgtgaaagggaagagaaaagttagttgatatttgaggtgaatgtgggggctgaagagtaattcctttttaaaatgggagagagcttaatatatgcacacagttttggaggttatgataatccaacctggggataaagtttacctttgagcagctcatgaaaaaaggatttgctaagcaaaggaaggatgttaacacatttgtggagaggcatatttaacctactaaagagaa

SEQ ID NO: 738401 - DNA, 513 bp, Homo sapiens
aaaaccagaaaaactggtgggtaattctcagtcagtctcaaggcctgagaaagatgagcactgatctctgagggcaggagaaggtagatgccccagttcaaacagagagaaggaagtcacccttcccctgcctttttgttctatcattgccctcagtggattgaatgatgcccccccacattgataaagacagttcttctatacttagtctattgattcaaatgcgaatctcttctggaaacaccctcacagacacatccagaaataatattttacccgttgttttgggcatctcttagcccagtcaagtgaacacataaaataactatcacacttccccaagtaaacttcaygtccctgcattgcaaaactgtatcctgtcctttttgtcagtgcctggcagagaggatggcacatgccacctgcctatgtattaattgtgcaatgttagattaataacaatttgttgaacacctatgtgctaagcgcaggatatatgccatattataacaa

SEQ ID NO: 738402 - DNA, 496 bp, Homo sapiens
cagcgctttaggaggctggggtgagcggatcctttgagcccaggagtttgagaccagccttggtaacacagcaagaccccatttctacaaagaatacaaaaattagctggacgtggtggcatgagcctgcagttccagctactcgggaggctaaggcagtaggatcacttgagcccaggaggtggaggccgcagtgagccgtgatcctgccactgcactgcagcctaggcaacggagtgatttcattgtctcaaaacaaacaatcaaaaaagytatgtcccagcaaaaccacagacatgaatactcacagcaatttattcgtaataaccaaaaacaggaaacaaccaaggtgtcctacaataagtaaaaaattaaactggtacgtccataccatggaatactactcaacaataaaaatatgaacaaacaatatgagcatcagtttggacgcatctcaagggcattacattgagcgataaaagccaatctcaaaaga

SEQ ID NO: 738403 - DNA, 637 bp, Homo sapiens
gctccctcttgtggtcaacgcgaacctcacgggcacagccccggggctttcttcccaacctcatccactcctcccaaattattatgcagccacataaattaccatgagattcacaaaacagtctatccggcatcagcgttccatccagtgcagmctgcttcagtctttcaccttcagagggaggtgagactttcgcattctagcttaaaatttgcccagaataaaggtcacttaaactaagtgattacttggcatcctccaatgacacatgacctcatctgccaacttaaacacaatatatataaatatatatgcccgtatcacttcaaaaataagcattattaggccgggcacagtggctcacacctgtaatcccagcactttgggaggccgaggcgggcggatcacttgatgtcaggagttcaagaccaacctggccaacatggtgaaaccccatctctattaaaaatatgaaaaaattagccaggtgtggtggcacatgcctgtcatcccagctactcaggaggctgaggcaggagaatctcttgaacccaggaggcagaggttgcagtgagctgagattatgccactgcactccagcttgggcgacaagagtgaaactctgtctcataaataa

SEQ ID NO: 738404 - DNA, 637 bp, Homo sapiens
gctccctcttgtggtcaacgcgaacctcacgggcacagccccggggctttcttcccaacctcatccactcctcccaaattattatgcagccacataaattaccatgagattcacaaaacagtctatccggcatcagcgttccatccagtgcagcctgcttcagtctttcaccttcagagggaggtgagamtttcgcattctagcttaaaatttgcccagaataaaggtcacttaaactaagtgattacttggcatcctccaatgacacatgacctcatctgccaacttaaacacaatatatataaatatatatgcccgtatcacttcaaaaataagcattattaggccgggcacagtggctcacacctgtaatcccagcactttgggaggccgaggcgggcggatcacttgatgtcaggagttcaagaccaacctggccaacatggtgaaaccccatctctattaaaaatatgaaaaaattagccaggtgtggtggcacatgcctgtcatcccagctactcaggaggctgaggcaggagaatctcttgaacccaggaggcagaggttgcagtgagctgagattatgccactgcactccagcttgggcgacaagagtgaaactctgtctcataaataa

SEQ ID NO: 738405 - DNA, 469 bp, Homo sapiens
ctttcctttcttttttctttctttttctttgtttcttactttctctttctctctctctctttctgtcttatagaaacagtgtctaggctgggtgcggtggctcacacctgtaatcccagcactctgggaggccgaggcaggtggatctcttgagcccaggagctggagaccagcccagctaacatggcaaaaccccgactctactaaaaatacaaacattagctgggcatggtggtaggcacctgtaatcccagctactcgggaggcaggagaatcacttgaacccagaagtcagaagttgcagtgagccragatcacaccattgcactgcagcctgggtgacaaagcgagactctgtctcaaaaaaaaaagtgatctttttgaaatggttagaggagttacatatgatccagcaattctgctctaagtatacacccaagagaaataaaaaccgatgtccacacaaagc

SEQ ID NO: 738406 - DNA, 593 bp, Homo sapiens
aaatgagatcaggtatacacggcatttagcacagtcccaggcagatagaggacaccgagaaagtggtggtagctattttctttatcttttctttccttttttttttctttttctttctttcttttttttttttttttttttttttgagacagagcctggctctgttgcccaggctggagtgctgtggtgaaatctaggctcactgcaacctccacctcccaagttcaagygattctcctgcctcagcctcccaagtagctgggattacaggcgcccaccaccacgcccagctaatttttgtatttttagtagagatggggtttcaccatgttggccatgctggtattgaactcctgacctcaagtgatctgcccacctcagcctcccaaagtgctgggattacaggagtaagccaccgcgcccagcctctcctgcctcatttcttttttttttttttgagacaggatctggctctgttgcccaggttggagtgcagtggcaggtctcagctcactgtagcctcaacctcttaggctcaagcgatcctcccagcacagcctcccaagtagctgagattatggatgcacactact

SEQ ID NO: 738407 - DNA, 617 bp, Homo sapiens
gtgcagaatgaaatgtttgggttcattatctggcctcctgcagcctgctttctggagcagatcccgcatacattttcttccaagcagccatcatcttcactgactgtcttccagggataagcaaagaaactttgcatggcaagtttcaggaaacaaaattctgttttttgctgtaagtaccccactaygtatacatagttctcttacacactgcccaatgaaaaatgggtaaaaggaacagttaaaattcctgggggaaataaaaggaggattgcgttctgaaagaggtcgtttttagatagcaatggtgaaaaagatggaatgctaagttccaaaatatgaagctactgagtaaatagtcaccaagaaaaaaattggtgcttatctgatctagctatcacctgaatctaatacaacagagtcctcggaacagtgactcaagtagtctccacctggttcctcatcactctgtctgtacaaactgccaaagcaagtcaccatctgccctttaactgcccagagaggctggtcatgctctctcaccttgcctcactccttatagaagcataaagcgctatgacacatgggagaagaaatggctctcaaccccttagctc

SEQ ID NO: 738408 - DNA, 617 bp, Homo sapiens
gtgcagaatgaaatgtttgggttcattatctggcctcctgcagcctgctttctggagcagatcccgcatacattttcttccaagcagccatcatcttcactgactgtcttccagggataagcaaagaaactttgcatggcaagtttcaggaaacaaaattctgttttttgctgtaagtaccccactatgtatacatagttctcttacacactgcccaatgaaaaatgggtaaaaggaacagttaaaattcctgggggaaataaaaggaggattgcgttctgaaagaggtcgtttttagatagcaatggtgaaaaagatggaatgctaagttccaaaatatgaagctactgagtaaatagtcaccargaaaaaaattggtgcttatctgatctagctatcacctgaatctaatacaacagagtcctcggaacagtgactcaagtagtctccacctggttcctcatcactctgtctgtacaaactgccaaagcaagtcaccatctgccctttaactgcccagagaggctggtcatgctctctcaccttgcctcactccttatagaagcataaagcgctatgacacatgggagaagaaatggctctcaaccccttagctc

SEQ ID NO: 738409 - DNA, 658 bp, Homo sapiens
tgctgggggtgagagggacaatagcaatgaaattcaggatataaattagttataggctgtggagggttttggatatcacgctaaggaatttgaactttatcctgcagaaaattgtgcctgtaattgcaagtctgtaagactttttagcggacgatagtatcagttttgttccttaggaaaataactggcagctgtgtggaagataggcagcaagggggaaagacagatggcacagagaactttttggatacctgtgttaataggcatcatgctctggtagctttaatgtgtagatttcaccctctgcagtaaggtcagaagaggggagttgtaggcaggaagaaaggttggaattgaagcatgaaggtagctcgcataggcagacaggtgagagactgagctcmgaaaagtaagaaagtgcaggaatgagcctgcagatacagagttcagtccagagaggacaatggaggctggaatcagtaactctcatctaggggaaacagtgacaggggcaagatacaatggaacaggtattcaggccataggttctgagaaagaagtgaaccggctttaggcaagaggtcagaatgtgaagaatggcacagaataacaaacatgccagggcatctcaaactttagttagtatcaggatcacctt

SEQ ID NO: 738410 - DNA, 658 bp, Homo sapiens
ctgtggtcatcgatcaaggtttcatttcggtggttcttttttccatgagggactctgtataagctatgagtgttcttgaaaatcatctctgtaaaagtgaaatacacattttctggttcaattattctgtgaattgttctgataaaatcaattcccattttatatcttaaatgttttgcaggacttagaagaagagacagagaagcattgcatcatacccagcacatgagcttggtcttttcccaatattcacaaaggcctgtgcttattgtcttgtcttaactcatttcgtctccttttgttcagttaatggctgatgtcatstctcttggctcttcctgaaagataagctgggcttgcattgtttatttttttacatactagcacgtatcaagtcatattcaacagaactagcattattagtcacttactgtatatgctttatatactgagccttattcaggatacctttatatctttcctcatttaaatcttgactcaaggatacaagatgaacattcctttcactctcaataagaggttctgaaactcaggaagtgtaaataatatgttcaaggttaaatatctaatgaatggtacacacatattcaaaactaattcaattcaactcctaatttcatgtttcttcactaggcta

SEQ ID NO: 738411 - DNA, 577 bp, Homo sapiens
aaaagacttttgaaagatgtaatcttgggacaaacagcagaaggtgaaagtgagtctccaagttgactgcccttatcatcaaggaagagggcacagaattcagagagctggaaggaaggatgtgaaatcctgtggtctcccctgtcctgacacatcagatgtgctccagaagaaagtgggaagaccaggggtataaccatgatacccaayagcatttgagaaggttaaatggagatgatgaggcattgggatcattctgtcttcagaactaataatggatgtggaaaatggaaatgagtgggtagagtgactgttaaaaccataaaggtacagtttttatagctatgggcaagagtatgtcagtggagaattggtttcagttgcttccctgatggttttttagctaaatatcttagagacctacaaggcacaatctgttagcaactaacaacactgaattattagtaaattttcactagcttggtcctggtggaggtagctactagaagtcaatctaagcaaataacaggaaacaaaaaacacagaacaaaattgtaagtgatttcagatgatagct

SEQ ID NO: 738412 - DNA, 577 bp, Homo sapiens
aaaagacttttgaaagatgtaatcttgggacaaacagcagaaggtgaaagtgagtctccaagttgactgcccttatcatcaaggaagagggcacagaattcagagagctggaaggaaggatgtgaaatcctgtggtctcccctgtcctgacacatcagatgtgctccagaagaaagtgggaagaccaggggtataaccatgatacccaacagcatttgagaaggttaaatggagatgatgaggcattgggatyattctgtcttcagaactaataatggatgtggaaaatggaaatgagtgggtagagtgactgttaaaaccataaaggtacagtttttatagctatgggcaagagtatgtcagtggagaattggtttcagttgcttccctgatggttttttagctaaatatcttagagacctacaaggcacaatctgttagcaactaacaacactgaattattagtaaattttcactagcttggtcctggtggaggtagctactagaagtcaatctaagcaaataacaggaaacaaaaaacacagaacaaaattgtaagtgatttcagatgatagct

SEQ ID NO: 738413 - DNA, 577 bp, Homo sapiens
aaaagacttttgaaagatgtaatcttgggacaaacagcagaaggtgaaagtgagtctccaagttgactgcccttatcatcaaggaagagggcacagaattcagagagctggaaggaaggatgtgaaatcctgtggtctcccctgtcctgacacatcagatgtgctccagaagaaagtgggaagaccaggggtataaccatgatacccaacagcatttgagaaggttaaatggagatgatgaggcattgggatcattctgtcttcagaactaataawggatgtggaaaatggaaatgagtgggtagagtgactgttaaaaccataaaggtacagtttttatagctatgggcaagagtatgtcagtggagaattggtttcagttgcttccctgatggttttttagctaaatatcttagagacctacaaggcacaatctgttagcaactaacaacactgaattattagtaaattttcactagcttggtcctggtggaggtagctactagaagtcaatctaagcaaataacaggaaacaaaaaacacagaacaaaattgtaagtgatttcagatgatagct

SEQ ID NO: 738414 - DNA, 577 bp, Homo sapiens
aaaagacttttgaaagatgtaatcttgggacaaacagcagaaggtgaaagtgagtctccaagttgactgcccttatcatcaaggaagagggcacagaattcagagagctggaaggaaggatgtgaaatcctgtggtctcccctgtcctgacacatcagatgtgctccagaagaaagtgggaagaccaggggtataaccatgatacccaacagcatttgagaaggttaaatggagatgatgaggcattgggatcattctgtcttcagaactaataatggatgtggaaaatggaaatgagtgggtagagtgactgttaaaaccataaaggtacagtttttatagctatgggcaagartatgtcagtggagaattggtttcagttgcttccctgatggttttttagctaaatatcttagagacctacaaggcacaatctgttagcaactaacaacactgaattattagtaaattttcactagcttggtcctggtggaggtagctactagaagtcaatctaagcaaataacaggaaacaaaaaacacagaacaaaattgtaagtgatttcagatgatagct

SEQ ID NO: 738415 - DNA, 570 bp, Homo sapiens
aaataaaacccctacattaagctcatgattcttgggatgggggttaattggatgagactaaacaaattctatataattttggaaggtgctaaaagttaaaatataaataatgtatcttatgctgtctacaattataactcttcwcacaaatattgctgctgcaaactttttttcatcaaatggatactgccttgtgatgctgtgtcaacaactgggattttgtatgaaattcacattgaagttgaacttgcacctacagagacctgtcaatctctccacacttcatttcttgccattatattctgcccacattgtttttatttatttatttatttatttatttatttatttatttatttaagttgaggcagggttttctctgttgcccaggctatagtgcagcggtaggatcacagctcattgcagcctcaaccttctgggctcaaacaatcttcctacctcagcatctcaagtagctggtaccaaaagcatgtgccactatgctggctaattttaaaaaaattgtagagacagggtctcactatcattcccaggctagtcttgaactct

SEQ ID NO: 738416 - DNA, 570 bp, Homo sapiens
aaataaaacccctacattaagctcatgattcttgggatgggggttaattggatgagactaaacaaattctatataattttggaaggtgctaaaagttaaaatataaataatgtatcttatgctgtctacaattataactcttctcacaaatattgctgctgcaaactttttttcatcaaatggatactgccttgtgatgctgtgtcaacaactgggattttgtatgaaattcacattgaagttgaacttgcacctacagagacctgtcaatctctccacacttcatttcttgycattatattctgcccacattgtttttatttatttatttatttatttatttatttatttatttatttaagttgaggcagggttttctctgttgcccaggctatagtgcagcggtaggatcacagctcattgcagcctcaaccttctgggctcaaacaatcttcctacctcagcatctcaagtagctggtaccaaaagcatgtgccactatgctggctaattttaaaaaaattgtagagacagggtctcactatcattcccaggctagtcttgaactct

SEQ ID NO: 738417 - DNA, 599 bp, Homo sapiens
atcctttggttttacattcacgggaaataaaacccctacattaagctcatgattcttgggatgggggttaattggatgagactaaacaaattctatataattttggaaggtgctaaaagttaaaatataaataatgtatcttatgctgtctacaattataactcttctcacaaatattgctgctgcaaactttttttcatcaaatggatactgccttgtgatgctgtgtcaacaactgggattttgtatgaaattcacattgaagttgaacttgcacctacagagacctgtcaatctctccacacttcatttcttgccattatattctgcccacattgtttttatttatttatttatttatttatttatttatttatttatttaagttgaggcagggttttctctgttgcccaggctatagtgcagcggyaggatcacagctcattgcagcctcaaccttctgggctcaaacaatcttcctacctcagcatctcaagtagctggtaccaaaagcatgtgccactatgctggctaattttaaaaaaattgtagagacagggtctcactatcattcccaggctagtcttgaactctagggc

SEQ ID NO: 738418 - DNA, 580 bp, Homo sapiens
ccacccagatcttctctctatatgtaaccaagtcttttatttatttcattgcacagaagtacttttatttcagcttaacttgaactacaagagttggagtaattgctttgtcatcagtaattcattttcattcttatgtgcttaaagttacagctaaagtagaacagttacacacactgaagccatgctttataagattaaattcacatatcctaaaattcaccaggcgaaatcatgcacatttaattcctgcagcacttgaatgctatttaaggggaaaagaggaaaataaatcagagagccttacctttgatttcaaagacatctgaaaggctctgagcatggtgcttccttgaagccagcagatgacagaaattacctggaaaggataatggcatggagaaggtwggtctcagcctcaaactccgaggaagcacttgaagtggaatccatcttcttcaaaagatagtccaggactgataatagggctttatttccagctgaaaagactgattgtttaatttaaccatttgagataattattctccatcactcttgactcattttgctcttatcaagc

SEQ ID NO: 738419 - DNA, 630 bp, Homo sapiens
ataacttgtctgaaagcagaatatttaccttacaatataatatactttgaagcagtggctattaggatttgtggaagtttgaagttaaacattttttctttcatagaaaaccattttttagagctcccgtaattttttttyactaaaaaaagacttaacaagtctttcaactattaaatatattgaattttgtattatgaaagtaactaagagaaaatttcaaacttgtttcaacaatgaatcctattaaatctttccatgaaataatagtaatattaccttagttcttccacagaatagaagaaaagggatcatcccttcatattttgtttttagagcccaacgtaagtaagattgctattaaaaactaatgagtaatatatctgattctggccataatggagtatctgtcaccagactaaccatccatctgtcttcaacacatatgcacctgggaagattatacactgcaattcttttcagatattgagtagtgtgatccctgacaaatgggaaacaagcaagatatctaggtggcttttgcctgcaggtggactgcaggaaaagagtcagtgctaagcagagtgaaacaatcccatggggatgaggaggtggagctgagaggcctgc

SEQ ID NO: 738420 - DNA, 491 bp, Homo sapiens
ggtcagcactgacatcataatttgtagatttaaactcatttctgagtattgccttctatccattacttttcgtggcaagtcaaccatatttccatttgtcacttaatgttttaaacactggactatgaagtaatttaaaatgtaataacagatacaaagttaatgaatttttatatgacacatttttctccccaaacttggcagtaaaatgttacttctatgatactgtgccatgagwttttaagaaggttattattgggaaaataattgtagacaagttgcaaataagagagatataaaggcagaatgggagactgaaaagcaaatgagagaaaggattactggacaatcaaggaaagaatgacatgaaggagacagaacctgctagttcagtctgctagatggcacataagtttttgtgtctacttctcactgaaatcctttaaaatctcaggaagggattaaaaagggcaagcacacaacttcaaaga

SEQ ID NO: 738421 - DNA, 660 bp, Homo sapiens
gtggttttcactggtcagcactgacatcataatttgtagatttaaactcatttctgagtattgccttctatccattacttttcgtggcaagtcaaccatatttccatttgtcacttaatgttttaaacactggactatgaagtaatttaaaatgtaataacagatacaaagttaatgaatttttatatgacacatttttctccccaaacttggcagtaaaatgttacttctatgatactgtgccatgagtttttaagaaggttattattgggaaaataattgtagacaagttgcaaataagagagatataaaggcagaatgggagactgaaaagcaaatgagagaaaggattactggacaatcaaggaaagaatgacatgaaggagacagaacctgctagttcagtctgctagatggcacatawgtttttgtgtctacttctcactgaaatcctttaaaatctcaggaagggattaaaaagggcaagcacacaacttcaaagagaagacaaagggaccatcatctggcgaaagattttaacatatttttttaacttagaaagtagagccagcaggttgctgatgcttagaaataagtggtggggctgaatatgcaggtaaaaggagtctgcagaagaaagcccccctaccacaaccacaa

SEQ ID NO: 738422 - DNA, 524 bp, Homo sapiens
gaaaaaggaaataaaagaatagatagaatgtgattcaaattattgtagcatgcaaggacaggagaaaacccagataagtcgttaagggaaacacatgtaggtgataaattattttaaaaagaaaagtaagagattatcataaaattcaaaagagtagttacctatgtggtgaccagggctgtgatggggaagttacacaatgggggtgtctaaggttttgggggtaatttaatgggtactcatttcataaagtttcctaatttagtgtggttgcattttattcactttcttcttgtgcactktatttgacgttaaaacatattaggcaacagacagtaaccatgggtcgcctgcttccaaaggtgctgcgttccttcccctgggctgatgaccatggcccacatacctccaggtcatgaggacacagctcaaattccaggcaggagctcacggaaaagctgtattacttcagaactaacaacaggggcccttcagtgtgagcgaaccaaattaagcctcaaaac

SEQ ID NO: 738423 - DNA, 524 bp, Homo sapiens
tagaaatgctactaatttttgtattttgattttgtatcctgcaactttactaaatttgtttattagttctaatagttttggggtggattgtttagggttttttaaatatatataagatcatgtcatcggcaaaaagcgacaatttcacttcttcctttccaattgggakgcctttcatttcttcctgttgcctaattgcactggctaggacatccagtactaagctgaatagaactggcaagagtgggcatctctattttgttcctgatcttagataaaaaactttcagcttttactcattgagtatgatgttacctatgaatttgtcatatatgacctttactgtgtagaggtacattccttctatatataatctgttgagcctttattgtgaaaggatgttgaatcttgtcaaatgctttctctacatccattcagatgattatgtcttttgtctttcattctgttaatgtggtgtatcacatttgtaagtctgcatatgttgaaccatacttgaatctcga

SEQ ID NO: 738424 - DNA, 592 bp, Homo sapiens
aagtactgtcttcttgagatcaagcttctgaggagggaatgatagaaaagggggacctgtgcatcactgcacttagattctggatctccataagctgagagaggagcatatgttggatgtaacaggtgctagaggttaccttgtgcagaagataagccggccaacagggcctagaaatacatgtgaagtactggaagtagaaaaaaaaaatggagcctgaaagaayagctgaagggctcttcaaaaatctgatcttctaggaaaaaaaggaatcaacagcatgagagagatttctaagcaaaaattaatgaatttaaaggtttgctgaatataggtaatgtgggaatggtgtgatataaatgtgagtgccagatttcagggttttcatgacagagtttctcaggaagtagtggcctgattgactgaggagggtatgttgggcacagatgattaatttaagcaagtgattaatttcacagattaagtgggattgtgagtgtgagttgatattaggattttcagcaaaagacatgactatatgtactagagacataagtctagtatagccaaaaaaacaactattattatagtt

SEQ ID NO: 738425 - DNA, 592 bp, Homo sapiens
aagtactgtcttcttgagatcaagcttctgaggagggaatgatagaaaagggggacctgtgcatcactgcacttagattctggatctccataagctgagagaggagcatatgttggatgtaacaggtgctagaggttaccttgtgcagaagataagccggccaacagggcctagaaatacatgtgaagtactggaagtagaaaaaaaaaatggagcctgaaagaatagctgaagggctcttcaaaaatctgatcttctaggaaaaaaaggaatcaacagcatgagagagatttctaagcaaaaattaatgaatttaaaggtttgctgaatataggtaatgtgggaatggtgtgatataaatgtgagtgccagatttcagggttttcaygacagagtttctcaggaagtagtggcctgattgactgaggagggtatgttgggcacagatgattaatttaagcaagtgattaatttcacagattaagtgggattgtgagtgtgagttgatattaggattttcagcaaaagacatgactatatgtactagagacataagtctagtatagccaaaaaaacaactattattatagtt

SEQ ID NO: 738426 - DNA, 583 bp, Homo sapiens
cattccattctcatgggcaacctcagcaggctgcacctagatgcttcttaagcagtttctgggttgcaaaggctatatcattgggctgaggggctgggcctctccttcttggtgacagagacgtgagcttgtacaacacaaatgaccctgacacctgtgcccacaaarttccattcctcttgctctcagctctaggtatttatacagccaatctaaagtcattggaattagaagagacactagcgatctgttatttgcagttgagggaaatgctttctggagagcacgtgttttggcccagtgcataggtaatctgtagcacagttttgatcagaattcagacttcccaaactcccagttcagaacatttgaaactgcatcaatctcatcctcatggtcaaactgctgtgtctaaagaacttcactttggtgctgcatgtgaggatgagcccctcaatatcacgaggtatctgtaaagactgaatccaggctggggacagccccaggtagtgctgatgagagctgacacccaaaatgcaatctggggagtcaacaagagaagaaaagtctccatgaaaccaac

SEQ ID NO: 738427 - DNA, 393 bp, Homo sapiens
gttgtttcagtgatatgaagttaaaaccagatactatatttgctcacctgatatttggttcttgtgatggtgcttttctgtgtgcagatagttgttaaaatttggtgttttagttgaggggatgattgttgtaggcttctrttctgccatcgtgctttgcccccaaaagtctgtgaggcatactagtttttcactttattctctctctttctcttttgtctttgtctggttttactaatggggtagtatcagctccatgaaatgtattaagaagtttttatttctcttctttttggtgggggtgtgggtgtgggtagggaagagattgtgtaatattgatgataatttgtcagttattctttaaatatttggtaagattctccagtgataaca

SEQ ID NO: 738428 - DNA, 594 bp, Homo sapiens
ccaaggccagcaaatgagcagagtctccagatagattattttgcacaattttttggtaaaatcttaccctcacaatgcaactctttttagtatcataaacccttatggcttgctcatagttttgaaaactgtgtatgtaacaaaaaattttacatatgttatttgattctcactgcaagagattgaggtggatataaacctattatcactgacattttagagatgagacaagaggttcaggaagattaaatgtctggctgttttgagggacaaaactagagggtgctarggattggaataatatctatcttagtccatttgggctgctgtaacaaaagtaccatagactgggtggtttaaaaaacacgtttatttctcactgttatggaggcttaggaagtccaagatcaaggtgttggcagatgtggtgtctgctgaagacccacttcctggttcatggattccatcttcttactgcatccttgaaactgtccctataaatttcataaaatttatcagagaaaaagagtggatgagaaacaaaaataaaccaagcttgcagcacactcagtattcatcattaggtcagcttgc

SEQ ID NO: 738429 - DNA, 636 bp, Homo sapiens
ttaacaaaattatttaacatatgaaccttaccttactcaccttcaatcatcaaagtttctgccatagttcttaggaagtatagctagaaatgatgctatgggtcagtagtatgcattcacaaataataatttttgttttgttttgtttttttgagacggagtcttgctctgtcacccagactggagtrcagtggcgtgatcttggttcactgcagcctcctgctcccgggttcaagcaattctccagcctcagcctcctgagtagttgggactacaggcgcccaccaccacgcccagctaatttttgtatttttagtagacacggggtttcaccatattggccagactggtctggactcctgacattgtgatctgcccaccttggcctcccaaagtgctgggattataggtgtgagccactgtgcatggcccacaaataataattttttattccttgctgtattcctttctgccacatatcaacaacttgcctatggaattcagcaattgttcaatggttaaagtatgtgtatacagaaattgtgaattgggctcagtcgtgcactcttacctcccttgctctcttccttcctccctacttctctttctgcctttccttttctgctgaactctatg

SEQ ID NO: 738430 - DNA, 633 bp, Homo sapiens
atttgtcttgtgctcatgaatgttagtttggcaggatatgaaattcttgactggaattttttttctttaacgatgttgaaaataggcccctaatctgttctggcttgtaaggtttctgctgagaattatgccgttagcattattgggttcgttttgtaaatgatttkacccttttctctagctgcctttaagattttttgtgtatgtgttgaccttggaaagtctgataactatatcttgtggatggtggtcttgtataatatcttgcagaggttccttgaatttctagaatttgcacatcaacctctttagcaagattggggaaaattttcctagactatagcctcaaatatgttttccaagttgcttcctctctctcctctcccaggaatgccaatcagtcataggtttagtctgtttacataatcccatatttcttggatgttttgttcattttttaacatctttttttttctttatttatatttgactgggttgattcaaagaaccagtcttttagctcgaaaattcttttctcagcttggtctagtcttgttaaggcttccaaatatatttttgaaattcctgtcataaatttgtaaatttcagaagttcagttcagttgtttgttta

SEQ ID NO: 738431 - DNA, 633 bp, Homo sapiens
atttgtcttgtgctcatgaatgttagtttggcaggatatgaaattcttgactggaattttttttctttaacgatgttgaaaataggcccctaatctgttctggcttgtaaggtttctgctgagaattatgccgttagcattattgggttcgttttgtaaatgattttacccttttctctagctgcctttaagattttttgtgtatgtgttgaccttggaaagtctgataactatatcttgtgratggtggtcttgtataatatcttgcagaggttccttgaatttctagaatttgcacatcaacctctttagcaagattggggaaaattttcctagactatagcctcaaatatgttttccaagttgcttcctctctctcctctcccaggaatgccaatcagtcataggtttagtctgtttacataatcccatatttcttggatgttttgttcattttttaacatctttttttttctttatttatatttgactgggttgattcaaagaaccagtcttttagctcgaaaattcttttctcagcttggtctagtcttgttaaggcttccaaatatatttttgaaattcctgtcataaatttgtaaatttcagaagttcagttcagttgtttgttta

SEQ ID NO: 738432 - DNA, 597 bp, Homo sapiens
gcgggggagggctgagaaaatgagaaaaatatatttaaagaatctttcatattaacccacatctatgccgtttcctgtgctctttatttcttactgtggacttcagttaccatttctattcaacctgaaggacaacctttagtatttcttgtaaggcgggttggctagcaacaagttctctcaacctctgtttatctggggtttcctttattttaacttcattttttttgaaggataattttgytacataaaaaattcctggttgacaactttttcagcactttgaatatgtcatcccactgccttctgacttctacttttcagatgaaaagttagccattaatcatactgaccttcccttgcacatgatcaattgatttttcccttgctgatttcaagattttctcttcatctttcaccagtttaactaggatgtgtaaaggtctcaatctctttgtatttatgctactttgggtttgttgagattttcagttgtgtagactaatgttttcatcaaatttggaatgtttggacctcttatttttttaaacaaaattttgaacatttatctcacctccttctggaagttcctttaca

SEQ ID NO: 738433 - DNA, 597 bp, Homo sapiens
gcgggggagggctgagaaaatgagaaaaatatatttaaagaatctttcatattaacccacatctatgccgtttcctgtgctctttatttcttactgtggacttcagttaccatttctattcaacctgaaggacaacctttagtatttcttgtaaggcgggttggctagcaacaagttctctcaacctctgtttatctggggtttcctttattttaacttcattttttttgaaggataattttgctacataaaaaattcctggttgacaactttttcagcrctttgaatatgtcatcccactgccttctgacttctacttttcagatgaaaagttagccattaatcatactgaccttcccttgcacatgatcaattgatttttcccttgctgatttcaagattttctcttcatctttcaccagtttaactaggatgtgtaaaggtctcaatctctttgtatttatgctactttgggtttgttgagattttcagttgtgtagactaatgttttcatcaaatttggaatgtttggacctcttatttttttaaacaaaattttgaacatttatctcacctccttctggaagttcctttaca

SEQ ID NO: 738434 - DNA, 645 bp, Homo sapiens
tactatagtgaacaatcttgtatgtctatctacttcaagtttaatagagttttagctcttacatctgtttaatgattaaagttaatttttatatgtggtgtaaggataaagattctttttttctttttgcatattgctctacaattgttttagcactgttgaaaagttttcctttctagtatgtagaaatataattgaatttaaaatattgaccttgtttgtatcctgtaattctgataaactcactaattagttctagtaatgtttttataaattccatcagttttttaaatagataatcatgtaatcttcaaattaagcccattttacttcttcccttctaatctggatttttaaattttctttttcttgacttattattctggcttcaccacagtattcaatataaatgatgagagcagacatccttggcttctgatcttaaggtgaaagcattckgtttttcaccattaagtgtggtgttaacttcaggtttttcctagattcctgtatcagatgaagaagttcctttcactttctagtctgttgagagatttttgttgttgtttttaaattttgaataaatgttgaattttttgtgaatgctttttctgcatcgatcgagatgatggtttttcttttatg

SEQ ID NO: 738435 - DNA, 528 bp, Homo sapiens
tccatcacctcaagtatttatcatttctttgtattacaatctaattatacttttagttatttttaaatttacaataaattagtgttgattgtagtcatccctttgtgctatcaaatactagatcatattcattctatttttttgtacccattaaccatccctactccccatcaccactacccttsccagcctctggtaactatccttctactctgtctccatgagttcaattgttttaatatttagctttcacaagtaagtgagaacatgcaaagtttgtctttttgtgcctggcttatttcacctaacataattacctccagtttcatccatgttgttgcaaatgacaggatctcattctttttatggctgaataatattccattgtatatataaacctgattttatttttccatttatctgctgatgaacacttaggttgcttgcaaatcttggctattgtgaatagtgctacaataaacatgggagtgcagatagttcttcaatatactgataacatttcctttg

SEQ ID NO: 738436 - DNA, 601 bp, Homo sapiens
agtgtggtcagggaagatttttcaaatttcattttcttggaatgtattgaggctttactttgtggcttaatgtattccttatttttaaaattaaaatatctcattagtgcttgaaaataagttttatgttaaatatgcacttattgatgtgcatctaataggttmatctttttattgtatcatatatttcttattgtcaccttgttctgtcatagctgacaatgtcttttactattattgtgttttgtctatttcttctataagtttatgcttttatgaattttgacatattgtttttgatactgaaggatttatgacttttataagcttattattgatttaaagtctgcccattctaacagtatatagaatagtatctggtgcctagtaattgctcaattactattgttgaatgtaaaataaccctttatgttctttgatagtttttaactttactcttttctgatattaatattatgattctttttggttttgttatcatttacctggtttatctttgacttcttttttttacttttaaagtttctgagttatagactcttgaacagtttgttttagatgtggatatctatagatctgt

SEQ ID NO: 738437 - DNA, 601 bp, Homo sapiens
agtgtggtcagggaagatttttcaaatttcattttcttggaatgtattgaggctttactttgtggcttaatgtattccttatttttaaaattaaaatatctcattagtgcttgaaaataagttttatgttaaatatgcacttattgatgtgcatctaataggttaatctttttattgtatcatatatttcttattgtcaccttgttctgtcatagctgacaatgtcttttactattattgtgttttgtytatttcttctataagtttatgcttttatgaattttgacatattgtttttgatactgaaggatttatgacttttataagcttattattgatttaaagtctgcccattctaacagtatatagaatagtatctggtgcctagtaattgctcaattactattgttgaatgtaaaataaccctttatgttctttgatagtttttaactttactcttttctgatattaatattatgattctttttggttttgttatcatttacctggtttatctttgacttcttttttttacttttaaagtttctgagttatagactcttgaacagtttgttttagatgtggatatctatagatctgt

SEQ ID NO: 738438 - DNA, 625 bp, Homo sapiens
gcagattgagagataatttgtaccttccatatgtctctttcaaaggaaggctctgggcaggctgggagccatttaactgccttaacaatacaaatgttgacctttccttatctgcacaatcacacagctatcacagcctttaaaaatttctcctgattgcaatttgcatttctgattaggtctatttatatgcagatgaggctctctgatgttcatcatcataatkttatcattttatacctaatccagatgtgaacaaccaccaaccactattccaaaaatgattcccacccaagccagagttagtctttttgcctttttcgaatcacaaaaacaggtcacagcgattagaggagcagacgaagcacctggctttttaaattaatagtctggtgaacattcaaaaggatataagaatgcaggagctaaaagctgcattgtgtatagtaataagtcagaaaatgggaaatggtgtctggaatgatttgtgtgtgtgctttgatttttttttacaaatggtttacccctcaccatttatttaatgtggcaacataatttcctgaatatcaggattaaggtgtagcttctctttagcaaaataatatgtacttttgataagagatca

SEQ ID NO: 738439 - DNA, 505 bp, Homo sapiens
actgtacatagcttttttacaattgtttgtcccttcacgatttacatttactgtcttatacagtttctttgattctttactgcaactctgataggtagggttcttttttttctttatgttagagttcagaggattcaggactcagtgttgtgattggctcaaggacacacagttaataaaaacaaataagtggcagagggcaagcttgaagagatctkcattcaatcaagattgattgcaaaatgcaccatttttaggaaaatggtttttataggttgaatcgtgtttctcagaaaagatacattgaagtcctaatccccagtgtctcagaatttgaccttatttggaaatagggtctttacagaagtaatcaagctgaatgaagtcatcagggtggaccctaattcaatatgactggtgtctttatggaaaggagttaatttagacacagagacagacacatagaggtccaggaacgcctgggctaccagaagctgaaagaggc

SEQ ID NO: 738440 - DNA, 505 bp, Homo sapiens
actgtacatagcttttttacaattgtttgtcccttcacgatttacatttactgtcttatacagtttctttgattctttactgcaactctgataggtagggttcttttttttctttatgttagagttcagaggattcaggactcagtgttgtgattggctcaaggacacacagttaataaaaacaaataagtggcagagggcaagcttgaagagatctgcattcaatcaagattgattgcaaaatgcaccatttttaggaaaatggtttttataggttgaatcgtgtttctcaraaaagatacattgaagtcctaatccccagtgtctcagaatttgaccttatttggaaatagggtctttacagaagtaatcaagctgaatgaagtcatcagggtggaccctaattcaatatgactggtgtctttatggaaaggagttaatttagacacagagacagacacatagaggtccaggaacgcctgggctaccagaagctgaaagaggc

SEQ ID NO: 738441 - DNA, 634 bp, Homo sapiens
aatttaatgtcatgggatgagtagaatttacctgggcagtgggtgtgtgtaaagaagacgagagctcctgagggctactcccacatttatagataagaaagatgaagaaaaaccaggaaaggagtttgagaaggagtagccattgagataagagaagaataagggtagtattccagaggccaaggaagaaagggctaagagagtaaatgatcaactgtatcaaatgctcctgagtcaagcaaggtgaagactgagatttcaccactggatatgacaactcagagaaaactggtgatgctgtgaagagctgttctggggacggggggcgggggcgggcagtgataagacggctgattagatgtagccaggaagtgcctctcccactgagagaaaacaaaatatgcagtaaatcatcacactttgaacagatcttttgagaaaaaacactgaaagttgataagagaggtgatgcagacaccaagattgaagagggagraagctgggaagcccacatggagtcactgagcaccacgaccagctcctggtactgaaaaggttctcaggaaggggtgaatgaaggaactctgtggcactacactcccgccacaaacttctgggatcccagctagaaaag

SEQ ID NO: 738442 - DNA, 625 bp, Homo sapiens
tcccatgagcccttgccctcgacttgagttccaaatctaattctaccccttataagatacatgaccctcaataattcaatcttctttacctagccattatccatcaagtaaaatgctaggactactccctgaagtgaacatctcagtttactggtctggaaatatatttgcttaaagcttcatcatttttggaatatagaaattcacatgtgaaaatacccacatagaatctggcaaactccctcattttacattcaggaagctgaggttctaaaagtagggagggttcatcaataaatcaataaagaacatgccaaaatgtcacaggagttcccataaaattgtacctatctctttcctagggtccttgtctcaccaccttccaccagaatttctttcacccatgtttaatcactgtcttcagactcatgtaaaattctcttcttgtacaccctcctayaaggtgttgtatggagctatgcacacagtaaactgtcacaaacccagccaggatttgttgagtaagtgtacaaatcagttaatggaaacaaagcatattggtccaattccttgacatatatccttttttaaaatccacatgtgaggataatcacctttcttttct

SEQ ID NO: 738443 - DNA, 615 bp, Homo sapiens
ctgtgttacaaattacccccaaacatagcagtttaaaacaaacattatctcacagcttcagtgggttaggaatctatatgttctggctataacttcctgttcttcacaaacctacagttaaggtattggccagggctggagtcatctcaatgttcaactgggattgggaatctgctcccaagctcactcacatggctgttggtaggctcaggtcctcactggctgggaacattggtcccttgatttatgggcctctctatagagtattacaatatggcagcttatcttctgcagaatgaggggtggtggcgggggtggagggagagagagagagacagagagagagagagactaagacagaagccatgatctttttttaattatctaatcttggaagtgattttgcttctgcctatttctatttgctagaagctagtcactaaatccagcccacactcaacggggatgggatcayacaggcagtaagtaccagaaggcagggatccctggaggccaccttagtggttgcctgaaacatcccgagaggaagtcagggagagagaataccatctgctaggagtgagcagagttcacatgagttgagaggggccatag

SEQ ID NO: 738444 - DNA, 609 bp, Homo sapiens
caaaattgatttaacattagaaaatcaatgtaattaatcatattaataaagaagaaaattcatatgatgatctcataaatgcagaaaaagcatttgacaaaattcaacatctattcctgttaaacttctcaaaatactaaaaaataggaagataattcgttaaccttaaataagacacttattatagaaataactggcatcatatttattagtggaaagctcagtgcttttccactaagatcagaaacaaggtatatgaacctacatttcctttttttttttttttttttttacattgkccttgtggcatgcaaccttactaaaatcacgtatttgttttaggatttgttttatagattgttggggattttctacatagaaaccattactgtatgtaaatagatattgggtgcgaaagatacagtcacagaacaaacctataccattattattaattaattttcttaaaaaggtgcagaaaattcaatagagaaatgtattttcaatgaattgtgcagaaagcaattagagatctatatctaaaaaatgaacatagacccatgattcacaccttatataaaggttaaatcaaaatgtattataagtctg

SEQ ID NO: 738445 - DNA, 609 bp, Homo sapiens
caaaattgatttaacattagaaaatcaatgtaattaatcatattaataaagaagaaaattcatatgatgatctcataaatgcagaaaaagcatttgacaaaattcaacatctattcctgttaaacttctcaaaatactaaaaaataggaagataattcgttaaccttaaataagacacttattatagaaataactggcatcatatttattagtggaaagctcagtgcttttccactaagatcagaaacaaggtatatgaacctacatttcctttttttttttttttttttttacattgtccttgkggcatgcaaccttactaaaatcacgtatttgttttaggatttgttttatagattgttggggattttctacatagaaaccattactgtatgtaaatagatattgggtgcgaaagatacagtcacagaacaaacctataccattattattaattaattttcttaaaaaggtgcagaaaattcaatagagaaatgtattttcaatgaattgtgcagaaagcaattagagatctatatctaaaaaatgaacatagacccatgattcacaccttatataaaggttaaatcaaaatgtattataagtctg

SEQ ID NO: 738446 - DNA, 545 bp, Homo sapiens
ttattcattttgctagaaattttgaatacatttgctaaagctggaatgaaaatctcaataaatgaataaataatgatttagtgacatctgccgtgtgcttgttcactcgttgatctttaagagtgaaattttccaaaagagactgatcattaggggtttctgtagatyttaagtatgatgctttttaaaaccttttatcagaaacacgcttctttgattaacatgaatataatatagtgatgtagttaagagtatatggtctggagttaatgtgctatggtttaaatcctggctcagcctcttggaagctgggtaacaatgagtgagataatcaattaaattagagcctcattttcctcatctgtagaacaagagtaataatagttgtgttcaactcatagtactgtgatgaagattgaataagttaataaatacaacagcacctggttcatcgtaaatgctccctacatttgggctattgttatttttctaaattctattgcttgcttgtctgaacatcatcttgggttaatattgttactact

SEQ ID NO: 738447 - DNA, 557 bp, Homo sapiens
atagcacctcctttaatcgggacactttctgtctattaatgaaagccaagataagtggcatattttaacctaagtaaagtggagctttcaagtcttttcaatggaaagactgttaagcctcctaccctccctatatcttagagcagaggyccccaacctccagtccatggacccataccagtccttggcctgttaggaactgagccacacagcaggaggtgaacggcgggcaagtgagcattactgcctgagctccacctcctgtcagatcagcagcagcgttagattctcacaggagcacaaaccctattgtaaactgcacatgcttgggatctaggttgcacacttcttatgagacctctaatgcctgattatctgaagtggaacagtttcagcctgaaaccatcccctgttcctaccctcctgtccatgaaaaaattgtcttccatgaaactggccccagcgccaaaaagattgaggactgctatcttagaggaacaattgtactatataagttaaaattgattgttgttcaatttagtcttagctcacaacca

SEQ ID NO: 738448 - DNA, 634 bp, Homo sapiens
aaatactgttttatgaatgtgcaaactgttgataactgttgcattggcaagacctcattcaatcctcatgaccatcatatgataaaggtatctttattttaagataaggagaccagagatgattgagaccactcgtcttccccaggacctcatagcaagtaagtggtggaaatgagatttagtccaaatgtggcaactgagacttttcacgkagccatttacctcccacagaaggtgctaaaggtaatcaggacagaggacatgatgagttgaccagaggagcagccagagcgctgtgagaatttgcaggaagcagtgagaaatacagacaagggcagtctgttgcagcagtcttgcatgcggtctgccctctggtagcaggtcttctttgttctgttttcactaggtgtctgacaatctgtctataggctgcttcatccagcagcccatctccctttcttttggccctgcctgttaggttctggagttccggtgacataaagacttcagacagatctcagggaacatattttattgcctcaaaaattttctaaggctcccaaatccctgcaactatgtttagtgtgagggaaagataaagccagttttggccagtagaggccactagtgagca

SEQ ID NO: 738449 - DNA, 613 bp, Homo sapiens
tattcttggttttaggagactattcattacaaatttgtataagttaggtcgtatatatccaaaatattttgaaaaatatgtatgaggctaattcaaataaatttgttaagaagggctctttttctgtttttttgtcccttattaataatggggtcatcatggtctaggatacctctcttttcatttatttatctatatctatttttatataaaaaaactttgactccagactttgagaaaatgaaagttttgttcaaaatgattagatacacaactatagtagtgatatacagatatttatatactttcatatataatgaaccatgcaatgagttttaattccagcctcagtttatccttgttatttttcttaagacaccaaaagacaggatgtaagataccagcttctcaatgcatggtctttgttgytaaccttatttttgtttatgtaatttatttaaacaaggttattgagtagtgaatctttatcagtttatatctgtggaaggcccggtttacttctatgtcttcctggacaagcaacttaggcaggagtccaggaagttagggtacaagagaaattacctgccacagctatgcaggaggaaagact

SEQ ID NO: 738450 - DNA, 570 bp, Homo sapiens
cacaaaatatatgatgctgcttttttttggtggtataatattgcaaggtatatatgtaccatattttctttatccagtctgtcattgatggccatgtaagttgattccatgtctttactatcgtgaacagtgctgcaatgaacatttctgtccatgtgtatttatattagaatgctttatattcctctggatatatacccagtaatgggatttctgagttgaatggtagttctgcttttagctctttaaggaatcatcmtactgcttttcaaaattgttgaacttatttacactcccatcaacggtgtataaggttttccttttctccacaacctcaccatcatcttttactttttgactttttaatagtagccattctgactggtgtgagatactatctcattgcagttttgattcacatttctctattgatcagtgatattgagctttttttcatatgtgtatcggccgtatgtatgtcttcttttaagaagtgtctgttcaagtcctttgcccactttttgatgggattgtatgttttcctcttgtgaatttgtttaagttgcttat

SEQ ID NO: 738451 - DNA, 570 bp, Homo sapiens
cacaaaatatatgatgctgcttttttttggtggtataatattgcaaggtatatatgtaccatattttctttatccagtctgtcattgatggccatgtaagttgattccatgtctttactatcgtgaacagtgctgcaatgaacatttctgtccatgtgtatttatattagaatgctttatattcctctggatatatacccagtaatgggatttctgagttgaatggtagttctgcttttagctctttaaggaatcatcatactgcttttcaaaattgttgaacttatttacactcccatcaacggtgtataaggttttccttttctccacaacctcaccatcatcttttactttttgactttttaatagtagccattctgactggtgtgagatactatctcattgcrgttttgattcacatttctctattgatcagtgatattgagctttttttcatatgtgtatcggccgtatgtatgtcttcttttaagaagtgtctgttcaagtcctttgcccactttttgatgggattgtatgttttcctcttgtgaatttgtttaagttgcttat

SEQ ID NO: 738452 - DNA, 607 bp, Homo sapiens
attgcaaaattgccaaactgagataaaatatttagagcatctgttgatgctgaaggcattatgtaggccttaaaaaaaaaaactattttgaggactagtagaatattgtggacagtgaatttcagttttgtaaagtggccaaaactctaatgaaataactgtgtaataattcctcggatccttttatttggtcagtagaatctgaagaagtgttccaattaaaattggctatagtataagctttgggagttccaaattttgcaaagactttccacttgctttgctatgaaaataaagcggctacttttggaattttaactcaaaagttgggaatagatgacacattaataacaaatttctcagtttccttggaggtagtggcactgttgatgacaagattctgtggaagtagcakataaactttttaaaaggctcaagcccttacctgcagtcacttatatgcgcgtcccacatgctgtgacagctatcttacaagtgcaaaaaatccagaatgtgtgggtatgccaacagactagttaagaacaagcattgatcccagtattgtgcttaggagatgcaatatcctaaatcatgttactcttttacc

SEQ ID NO: 738453 - DNA, 617 bp, Homo sapiens
tttagtcttagaagtttccatccaaaaaaaacgcctctcagattaaactaagaggtccagtgagatgatatcactggttcaaatgattcagtaaagaataattttagaaagttaacagaagactttatgattccaaatacactgattmacatattttttaaaaccctatattgggctaggactgaactagactgaaatctctaagctcccagggcaaaggggtagaaacttacttgacagcagcatgaaatgccactttgctttctaaacctcagtgttactaatctaatatgacttctgcagatcataaagtacaattggccctttcaatttagattcgaacacctggctaaatccattaaccagtgattccatgaagccaaatccactgccttttagccaaatcatatttttcccctcttttatggaaactctttgaatgaggtttctgaaaaaaaagtccatcacaaattaatgtaaaaaatgcacagcaaattgtatctgtactccagacagctttttcataaatttttacgagtagagttaaactagactgtgtagatcacttatacaaattatctccataataagaggctcctgtcatttctgagtgtatg

SEQ ID NO: 738454 - DNA, 613 bp, Homo sapiens
aaagataataaaacagtaatgagaaggcaaatgctatatttagcaatgctatcccacaaagattacatttgttaatattctcaggaaataacacttcttagtaggtctccttttcacttaacagctcttatcactgaccattaaaccaatctgcaatttctcgtgtaatggattatggagctacatttttaaagatagcactctatggtaagattgcataaacaataattttgaggtaagaagtgtatttgattgcaatcatttgggtcatcactatataatttaccgtgtgacctttgtaaagtcattcgaaccctcaaaattttacttttaaaatgatatcagttcttgtcttaacaactccacaaatttagttcaaattttaatataatctgagtgagtgtcatatagatcattcatccatacacaacaaaattgatgatggggataaaayataattctttttgagagactctaaagagacctttgaagatagttgagatgcctccacaccctgatggcagattctttgaagctttcttatattttcagaaactgtatgttttgcacattttttccacagtaacactaggcaggaatttttttttttaac

SEQ ID NO: 738455 - DNA, 641 bp, Homo sapiens
ctgggtgtggtggcatgtgcctgtaatcccagctgctagggaggctgaggcaggagaatcgcttgaatctggacagagtgagattctgtctcaaacaaaaagttcaaacatcattagccatttagccatcagagaaatacaaatcaaaactacaatgagataccatctcacacccaccattagttattataaaaaaggtggataagtgtagtgaacatgtgaaggaactggcatcctcatatattgctggcaggaatgtacgacggtacagcaactttggaaaacagtttagcagtttctcaaaatgttaaacacgtagttaccatatgacccagcacttccactctttggtatataaccaagagatatgaggacatatttccacacaaaaatttgtacatagtatcackatttataatagcaaaaaaaaaaaaaaaaagtggaaatccaaaatgtctatcaactaatgaatggataaacaaaatgtgacaaatccataccatggaatattattcaaccataaaaaagaacgaaacactgattgattcatgacacaacattgatgacccttaaaaatattacgcttggccgggcgtggtggttcatgcctgtaatcccagcactttgggaggccgaggcag

SEQ ID NO: 738456 - DNA, 598 bp, Homo sapiens
gtaaaaatatggttataataaccaaataataattataattttgtggagaaatttttagcaaaatttacaatttaagttttctcctttgttcaaacgttgaatggcttggaaagataacccagtagttgatttttactttgcttatgttttattctttccttctatagactatttactccttcttaaaacaattttattagactttgtcatggactccattttgatttcctgaagggaaatactacaatattgttcataggagactgggtgcaaatatatactatgatgggtaggcataaaaccacatactctgattgaggcgtgaatgtaaaattgtcatacagatgagcaaatcaaaaattttggtaaagattactgtgaattctttgtctagtaggaggtcattattttttgaccatttttaaaaactgaaagtcaacaaaattccaackcttatctacaggtagttgaaccactggtgatttttactttatgctttcgtctgttttctgagttttccgagttttccatgagcatctatgatattcaccgtaaaggaaatacagttttgtctttcgcaggatattatctctacgta

SEQ ID NO: 738457 - DNA, 595 bp, Homo sapiens
aaggagatagagacacgaaaaacccttcaaaaaatcaatgaatccagaagctggttttttgaaaagatcaacaaaattgatagaccactagcaagactaataaagaagaaaagagagaagaatcaaatagacacaataaaaaatgataaagtggttatatcaccactgatcccacaaaaatacaaactaccatcagagaatactataaacacctctacgsaaataaactagaaaatctagaagaaatggataaattcctggacacatacaccctcccaagacgtgtttgccttctatactgtatacactcacctggtgatatgagacctgactaaaatattatgctggttttccaagttctgtcacaaactcgatgaggaactatgttattgcagaacactttgtgtcagactctaaatttctacacttttaaagtcaggcatctaaaaacctgagtgtctcaaatgaaaggccatttttccccatgatcatgtccattctcctctaaactccattatggtgaaagaccatgcaatccagtcaccagtctaagtccctgggttatcacagacattttcttttcatttttattttc

SEQ ID NO: 738458 - DNA, 618 bp, Homo sapiens
gtttgtgtcttccacccataaatgtaatgcctttttcatcttaactaagtatttattatgcactgtggccataacttttgcaatctgagatgtggcagcaaactagtacaaatttctttttccttttttgcaattttacagatagaagataggtttttacatagagcttagtaatctcagcatatgatttttttctttctcttctctttggcatatggaaattgtcagcttcactattattgcactttggggccccgattaagtaaaattagggtgacttaaacacaaacactgcaatattattgaagtggccttgttgtctggggtgatacccaagattggttgtctcatggccatggaaaactaggacgtggacacacaaagaatgaggttgagagcrgaagtttaataggcaaaaaaagagaaaagctttctctgttgcagagaaaggggtcctgaatgggtttctagttccatggtgaaatgcagggggttttatagattagcttgaggaggtgttgtctgatttacatagggtgcaaaagattggttggaccaggtgtgccatttgcataaggcatgaaaaactggttaggactatgtgtgtcatttgcatag

SEQ ID NO: 738459 - DNA, 635 bp, Homo sapiens
tcttgattgctattatatagcaaagccatttactatcatacattgaccttgtttctgagcccttgctcaacttgcttatcattccaggagttgtgttattgtgttttgtttttaagattcttatattttctgcatagacaatcatgtcatctgcaaatagagataattgtatttttctttccaaactgtacattaaaaaaattttttttcttgtcttattgaactagctaggacatagagagaaatgttgaataggagyggtgattgaggatattcttgtcttgtttcaagtttgtattctttattcttggattccaaattaagccaacatcatttcttgaagagtccattcttctctgttgatcaacaaatgtccctttttaaatcatacaccgaatgtccgtatatgagttggtctgtttctatgttatctcttctattctgtttggtttattttttacccaaccaccaattcacatattcttgattaccatagttttaatagcaactcttattatctagtaggcaatttccacatcttgttcttctccaggggaatcttgactgtccttaacacttcttttctccataaaaattttagaatcagctttccatcttttataaaaataactgtt

SEQ ID NO: 738460 - DNA, 595 bp, Homo sapiens
aaatttttaaaaagttagccaaatttctccaatttttcaggttttaaagaatattttattatctaaactgtttcaactttctattttctctttggttcatgaagatacacacacagagaaacagtaaaaactacatgtgacttacacagactgtccacaacatgcctaggctttctgttcagtcccagattttcttcttcttcctcttattttttctttaaataaccagtcattttaccccakgacaaaaaaaatttaccctacaaagtattttctcatcaaagattatctttcctttatagccttccttacaaaaaatcttcatatatataactttctttacatctctctcccgacttactggttccttactaccttgtttcataaatgcctttttcaagtttataatttgaattaacttctagataacttctgaattagataaaattattcttttccttcttccacctcagatatcaccatgagaaaagctttcaccaggtgttgtaccttcagccagggtcccaaatgagacatgtcacatggagttgagttacccaagcccagcctagattatctgacttgcaggtttgtg

SEQ ID NO: 738461 - DNA, 619 bp, Homo sapiens
aactgttgaaccaatgttattcatatatctcctagaattaagttgaaataattctgaaaagattctcattctgataagatatatattataatttgcagaacagaactattttttaaatttcaaaaaatataattagkcaactctcactttcaactccaacatgtaaagagcttggaagctgtcactcctgtacttgcaacaagaaaaggctttacaaactaaaaaatctgtgatttttccttggatctgtcacaggagtaaagctctatgtcaaattcttacccccaaatcggaagagttaggtgcatccagagaaatacatcaatagagatctgactatctgaaaagaagctactggaagtcaaaacaagtagaatcacttacttcattattaattttcatgaattcctagaggctcagtatcaactagtataagagttagaagttcctgggaggccacaattactagtagggggccaccacacattctgtttgatattgtagtggtgtatacatgtccatgcatttgtcaaaacccataaacatttatgtcataaagagtaaactttaatgtgtgcagataaaagaaacaattaattaggaagttgggaaattccac

SEQ ID NO: 738462 - DNA, 624 bp, Homo sapiens
caagatctgatggttatgtaaggggcttttcccccttttgcttggcacttctccttgccaccacatgtgaagaaggatgtgtttgcttctccttccacaatggttgcaagtttcctgaggcctccccagccaggctgaagtgtgagtcaattaaacctcttttctttacaagtgacccagtctcaggtatttctttattagcagcatgagaatgaaataacgcacatacaatccaattcgccagttttaaacgcactattaagtgagttataacaaatgtaatgcatttatgtaaccattaccacaatgaagacatagaagctttccagcatcctaaaaagttctggtacctctttgtagtcagtatccttgcttggctcctgtttcttggcaaccaattattttctgttctttcactatagttttgccttttctaaaaattggaatcrtagagaatgaagtattttgtctctgagttctttcacttagcctaatgcctttgcaatgcatccaaatttatatgtgtattattaacattttattctttttatttttgagcagtatttcattatttgagtaaaccatagtgtgtttattcagttgatggatgtttgaattgttaca

SEQ ID NO: 738463 - DNA, 525 bp, Homo sapiens
tagtagagtagaggcacttacctagtcgtgtattcaggatccaaaatatggttcttctcttgcccggaaggaggtcctgcttcaataagttagctgattcagtaaaagaaacatctgaagaaaaagaggtactttcttggtccacactatctgtttatgtatcctcagaaattagttttaaatgttgaagagaaatagactcgaaatgtcacttgaatggacattgcctcaggaagcataaatccagggttggttcatctgatggcacaattttgccagcttccattwacttttcaatccactgtaatcttgctattttctacagcatttcaacaactccattctcactgctgtactcactgatttctaattggcagatcataatggcactttttagttttaacttattttttctgctgtgtttgattgtcattgctgaaaatctcttctccttcaaactctcccattttctcatttttaaatttgttacagatttttgctcaaatctcagatctctacttctca

SEQ ID NO: 738464 - DNA, 634 bp, Homo sapiens
aaaattaaagctttcctctaagattgagaaaaagacaagtatgtctgctctcaccacctccattaaacatttaactggaggttgtaagcaagaaaaagaaattaaaggcatccagatggaaaagaaagaagtagaactgtcattatttgaagacracatgaccatctatgtaggaaatcctaaagaatctacaaaacaggtactagaactaataatgagtttagcaagcatgcaggatacaaaattaatgtattaaaaaatcaattgtatttctatttaccactaatgaacaagtgaaaataaaaaaaaattaaaacaatatcatttataataacaccaaaaactagaaaacatttagggataaatctgaccaaagatgtaagaatcctgcatactggaaacaacaaaacattactgacactgattaaagaaaatctgaataaatgaagagatatacctttttcatgcttcaggaggctcaatatggttaagatgtcaattcttcccaatttgagctgtacattcatttccatctcaagcaggccttttggcagaatttgacaggctgataataaaattcatgtggaaatgcaaaggatctacaatcgccaaaacaatttcaaaaaagaacaaa

SEQ ID NO: 738465 - DNA, 620 bp, Homo sapiens
cccaggggtagaggtgaatgttgccttaacactgagaagaacagatgaaaaaagaaaaggagagaactcctccctgaaaagttgtgccccaccaagaattacagagctggtttggatagtcagggaacatgaaaccatgaagttggataatgtggttctgactggtagaggaaaatcctcactgaaagaaggtaaccttcatcctaggcctcgaagaattcctttacataatattttagggacactaatcagtgtacagtaaaacacacatgtgcacatgcacatacacacacacaaacagaaaagatctcatgagaaaaaatatacacacgaaatttagcagatayatgaattatcagacagagcctatttacaatttaaaacatcaaaatactctaacaagtgaccacatttgaaaagaaccaatggtattgtatagaaataaatataaaaaatgaaaaaattaaaaatcagtggacaggctgggcttggtggtatgtgcctgtaatctcagctatttgggaggctgaggtgggaggattgcctgagccctagagcttgagtccagtctgggcaacgtagtgagactctgtctcctaaaaaaaaatcagtggataaat

SEQ ID NO: 738466 - DNA, 628 bp, Homo sapiens
ggtatttcttaggttttctcctagggtttttatagttttagatcttacacttaagtctttaatctatcttgagttaatttttgtatatggtgaaatgtagaggtccagttttattcttctgcatgtggctagccagtcaagtaggctcttttcctgggttacagggatcattcaacatatgmaaatcaataaatgtgattcaccacataaacatcattaaaaaccataagatcatctcaatagatgtagaaaaagcttttgataaaatcaaacatccctttatgataaaaaccctcaacaaactaggcattgaaggaatatacctcaaaatagtaagagccatctatgataaacccacagacaactttttatactgaatgggcaaaagctggaagcatttgccttaagagctagaacaagacaagtatgcccattctcaccactactattcaacatagtacttgaagtcctagcctgagcaatcaggcaggagaaagaaataaaaggcatccaaataggaaaagaagaagtcaaattgtctctctttgctgaggatatgattctttatctagaaaaccctaaaggtgttgccaaaaggctccttagagctgataaacaacttcactaa

SEQ ID NO: 738467 - DNA, 577 bp, Homo sapiens
acaatgttcctggcatggtctaactcgaaaagagaccaggtagtaaggattttataaggtctccaattttaaattcctcaccccatgtcatctccacccagtgccatgctgaattcatactggagtctgaagccaaggaactatcagtgctatggagtgaacgtttgtttcccctcaaaattcatatgatgaaatcctcacccacaaggcgatgttagcaggagatagaggctttcagtgatgattaggtcatgcagttggaactcccgtaagtgccatttatgcccttatraaagggaccccagagcgatcccccctccttcttccatgtatgaatatgaggaaaaagcagccatctctgaaacgggcaacagtccctcaccaggtgctgaatctgccagtaactttgatttggacttccccacctccaaaactgtgagaaataaatttctgccgtttataagatacccattctgtggtattctgttatagaagcccaaatgggctaagaaaatcagtaatactgatcccatgtttatgtacaattttgatattttgttcaccaaggatttttgta

SEQ ID NO: 738468 - DNA, 618 bp, Homo sapiens
atccagactatttttagcaagtcccaggaatgaacaagaagtatcccacctccccggaacatgaggccatgcagggttgcagcagaattagagacacagaaagaagtctctcttcactgtgtacctcccacacacacacacttagggaaaggagtttgcaagacctaaatctattgagccaagctgactgggcttctgccccrgtgggtacatgagtaagaaggaaatgagcaggaatcttgaaaccatgttggcttgagcctgactccagtggtgtaggctctaactcatggggccctctgggtgcacagagaccccttgatctgcattcaaaggaccagtcctcaactgcatcttccagaggatcagaggctgcatggtagagtcttcagggaggaaggcctgggtggcaggagcaggatgagtctaggaaatcaaggtccagaccaatgagcagtgaagcaagaatgtttttgaccagaatgacacatttaaactaaatgtttatcctgtggacatgagagagatgagaacagggagtcacaaatggaaatgggctgtcaactttgcaaaactctcgatcaggctggaaaatgcttaaaatttaggcataaatca

SEQ ID NO: 738469 - DNA, 634 bp, Homo sapiens
tgcaattgagtttgtgcacttagcagctaaatgaatattttccaaactgttttctgtggaacacagagctgaaagaatgttagtaaattttaggaaaataaagacaccctgtgtcaaataagttaaagaaatgctgaattaaacataatcaaagagtcgtattaatggtagagcttcccaaaacatttaatatgcaaagtagcatgtgatttttcactggaggatgaactttatgctgtctttcctttcctttttttttttttttcccaagtcatagccctatttttctgagatcatctctacttatctaaagctccaaaatctttaggaaatactgcgctaggagcgatggctcacatcttaggctacttggaraagaaaaatgtttattttttacatagctaatgtcaagagcaagtgacattggagtttaaattagattaagtggcctatgatgctacttaattcaaactgagagtttaaaaaaatctcacaaactgttatgtacttgaaatggaaaagaataagcaaaaaaagagaaggctttaaaacatgttcagtaacctcttcagcagacacccgcatgaaacttcattaatcatttaaaatgtgacaaggcaaagaaaatctgatt

SEQ ID NO: 738470 - DNA, 634 bp, Homo sapiens
tgcaattgagtttgtgcacttagcagctaaatgaatattttccaaactgttttctgtggaacacagagctgaaagaatgttagtaaattttaggaaaataaagacaccctgtgtcaaataagttaaagaaatgctgaattaaacataatcaaagagtcgtattaatggtagagcttcccaaaacatttaatatgcaaagtagcatgtgatttttcactggaggatgaactttatgctgtctttcctttcctttttttttttttttcccaagtcatagccctatttttctgagatcatctctacttatctaaagctccaaaatctttaggaaatactgcgctaggagcgatggctcacatcttaggctacttggagaaraaaaatgtttattttttacatagctaatgtcaagagcaagtgacattggagtttaaattagattaagtggcctatgatgctacttaattcaaactgagagtttaaaaaaatctcacaaactgttatgtacttgaaatggaaaagaataagcaaaaaaagagaaggctttaaaacatgttcagtaacctcttcagcagacacccgcatgaaacttcattaatcatttaaaatgtgacaaggcaaagaaaatctgatt

SEQ ID NO: 738471 - DNA, 643 bp, Homo sapiens
cttttgtatcatgtccaagcctctccagttgaagacacagatggcctttgggaagttttctagagcccctgctacagaattttatttttcctttttaaaattttttggagaagggagagaaaaattttgcttattacataggcagcacctgtttaccatgcatccctaatttctggtgtcataactaattatttgatggctccgagaggaacttcccattcattatatgtcatttagcagcaaataacttaaagcaaagcaatagttcgacaaaatatatgctgcattaagttggatgtgaagttatgaggggagagaaacagacaactctcacactgtagagttttaaaaatatatttgtttaaaataactaattgctgtgagtgccagtagagttgcaaaggtgtgggttgtcagaatctggatattcttatctcttcggtcaccctactgccaaattactargaaatatgatgagaacacgctttatagtcaagaaggtgattttcaagaaataagactaatgttgaggttaaattgatttattgaaaatctggaataaacactttcttaattttcttatggagagccctgacctctgggaataaaaggttttgggttttgttttttctgtatccaccct

SEQ ID NO: 738472 - DNA, 535 bp, Homo sapiens
gatgaagaaccgcctcttcaggccccagaagtaagcctttgaaagctctctcatacagtgctgccctgtgctctgatgatcttgggaaaaggggaacttttccaaggagagattttatttgtagttatcccagatcaccagagtagaggcttctgtatttggccctaacaaagaagaatgcataccacccagagagcttggactctgagcaagatgaagtatgcagacatacctttgcgtggtctccctttggaaagraggggagcgtgttgtagttgtctgtatcaggcaagataataactttaaaagagtataaagcaaaatggcaatacctgggtgctaggttgccttgtgatgaaatgtagtggatttggattgtttttgtctgtccaatactttttcctctttgggagaattggctcttcccataatctttatgactgagtgggaccctcacagcacagacctcttcttggtcacagcaatgggcataggatccaagatatgttccattgatcaattgatctatctttac

SEQ ID NO: 738473 - DNA, 624 bp, Homo sapiens
cattataaattataaacccagtctcaggcattatgttatagcagcatatatgtgcatgcacacacacacacacacacacaactaagggattctagtaaggcaactgttgcagcaagcaagttaatagatgacagtgtcttgagaggtattgatgcagataagaagatatatttaaaacatttttcaggaatagaaacataaaaatttggtgactgactagatatgggtaacaaggaaggcaggctcaaagctagctccagattgaaagattgtgcaatagatgcatggtgtacatcactaacttaggggacatcagaggtaggctgggtgtggggtggatgggatgtgagaagaaagtaacattggacccattgctyggaggaacaagagcaacaaccaagtggaaatctctagtggacaagagtaaggtctgggctggagacataagggatatattagcatagattggagattcctggtgaataatgcagagaatgagataaggaggctgagctggtggggaaccctggagaataccatttttttttttaaagaaagggcctcgaaagaagataatgtaggggaaaattaggtattgcagtggaaaggtaggaagaaaagcag

SEQ ID NO: 738474 - DNA, 628 bp, Homo sapiens
tgagatctgatcagtcatttgaatgaaaactttcagcagcaaaataaccccttatttatttaaaagtggaaccaatactttattgttgttcttttgctatagaatttcaaaatgaaattatttgcccgacaagaaggcatcattagttagacttgtttcctctgtagcccgattgaaattctcagtgttaagtttaggacccaaacaccagctgggacgtaagagcaggaccgaatcaaccttgaataaactgtatatagaaaacaattgttagttgattaagtagacattggatgtttgttagaaaggaatgttagttgtaagtgacatgttaagatttatacaattgtcaaaaacttttaggaaagattccagaatgcttttgataaaatttatcgattrtggattcacagtgtgataattaagtagggatgttgaagtcttgccaagttttcctggttcccttctcaaactttatcttcccatttctagccctgtctctctatcttacaggcatctacacctcagcaagtcagaaactaaacatcatctgtctctccctgtcttcagaaccccaaccctcataatctccttccagcttccttatttcccttaccaggactggcat

SEQ ID NO: 738475 - DNA, 589 bp, Homo sapiens
gtccttccgccttgcccagctgtgctcttcaggagaagtgacacctgtggctgggctccttcctctaggctctcccctccgactcctccctgtgaaataagagagtggggctacaggcagcacagggtggcctggactcagccccgctgtggtttctgtgcagtgcatgaagagtaaggtgaaccccagatgcccactctagggcagggagtggggacagaagaccctggctgtatctgctgagtcagccagcagcccacgaccgtgaatgactgtgtgggagagggtgtgcgtgtgcaagctggtgagcgcatgtgtgagtgtgtgcgagcgggtgcctgcctatgcgtgggtgagggtgtctgcgtgtgcaagtgtgcaagtgtgcacctgtgcatgagactstgtgtgagtgtgtgtggggttgtggaatggtgctgagtgtgaggttaggaagaaaaagagaccttcacagacacagccaaagagatactgagaccaaaagaaacatttggagagagactgaccctggagagaggccagaggccgggaagccagaatgagatgtgtagagcaggagagaagagaa

SEQ ID NO: 738476 - DNA, 590 bp, Homo sapiens
agagatctgcatcagaagtggcaccatgtggtctgtgccgagtgccaagggtaaaggcagagaatgctgtgggagtgcagaggagctggctctggctggagatggcaacttccaagcccttctccccgtcatattcaggccaccatccctaatccctccccatatgctttcctgacttgacctcagaatccttcacaataccgactccaagaactgctaccactcagcaggagttgaaaagagatataaagcttatttgcattggtgttccaccctaccagctctttgtgggggaaaaaccctgatctgtaacatctgcagatttttaaaatataaatattcctaccacggctgattttaaggtaccaatggtttaacatcattcacaaaattcccaaatattgaacaaccagtgagaaggtaggagctgcctccacacatcattgcctattgycatccctggctttcttaggacaagacagtgtggatttgggtgaaggctccatggaccatgcaggacttcagctgggccttagcttgaaaggtggaaaaggaagaaaagcattctgtgtagaggaagcagcttgggc

SEQ ID NO: 738477 - DNA, 532 bp, Homo sapiens
agggtgcaacctaggtctggttccaaaggccacactctttcaactgcacaattgtaccacttcctacagcacaattaaacatggccatagagaacccctgagtgtttggctccttgagcctgctgggcatgccctgcctttgaacaggattccacttccaatgtcaagttccccagaaacaaacctcataaagaccagcataattcatgagaaaatacaaattgtaaacaaacayagggaagatgttcactctccctcgtaatcagagaaatgcaaattagaacaacattgaggaaccattttctacctacataattagcaaaaattaagaaaaccttagcaaagttattctgaaataggtacattcatacacaattggtggcggtgtagatttatagaacacttgaggaaagtaatatggcaacatccatcaagagccgtaaatatattatgcccactgaccctgggaattcaccctaaggaaataattcaagggtgcggtgagggaatgctatttgtatgaagatgctca

SEQ ID NO: 738478 - DNA, 626 bp, Homo sapiens
gtcatagtttaattgccagtgtttttcattctttgcagcatatgaaacagtgatgcatcttacgatcagtggcaccttaggtttgatgaaatggggtgattttgtttctatacagtatctctggtttttgagcctttgggccagatgtacagtctctcttgtcctactgggagacatatctcctccctgactgcggattttccctcgagtagaggaagcgtcttcctgcattggactatagaatgccctgtgacaaggctattttcccttccttggaagaaggtccccttcaaggtagggtctgagtctctcccatcagcctgtgagcccctaaggaggaagcctgggaccacctttgtgtcctgtgtgtgtctgggctagtacttggagatcccaacataaggataattattcaacttcatttaacycacagccatgggtgtggctcctccgtgggcgagtgtgaccccccactgctgaccacctggtttcctgaatgtgcctcaacaccccttacccccaccctgggctctttcccagaggatgcagacttattgtcacagcaactagatccggataagtcaagggttaaacctggaggaataggggtaaaagagggggatgac

SEQ ID NO: 738479 - DNA, 619 bp, Homo sapiens
tactattttatataaatggaattgtacagtgtgtattcattatacctggcttctttcactcagcatataatgattttgagatttatccatgttgtgtgtactgtgtatcaatttattcctttttatttggagtagtgttttattgtaaaattctttgtgtggacatatatttccattctctagaagcaaaaagcctatgagtggagtgttctataaatgtcagttacatcaaggtaattgaatagtgtttagctcttctttctatgtttactgattttttggtcttagtactctatcagttgctcagaaaagagtaagattttctactatgattatggacttggctattttacccttttatctgtcaayttttctttatgtttttttgaagccatattattaggtgcatatattttcatagtagttatgttttcacgaggaattgttccttttatcattgtgaaatgtctttctttatctctggtaattttccttggactctgtttcatttatattacaatatccattcctgtcttgtcttccttcctccccagttacctttatattgttatagttacatatattacatctacatacattgaaaacctcgtgattcaat

SEQ ID NO: 738480 - DNA, 518 bp, Homo sapiens
aaatatctactaagtacccactaaaggttaggtgtgcgtgaagccctggtggcaaagaaataaacagacccgacctcttccctcaaacagctagtgaacagtgcaaaccatggcatggtttgaaaaatgagcatgaggactgcccagggtccctttgggaaatgctgaacagagtgtgcatggcacattcaacagttccttggagcatggagtacccaygggcaagagtgggagagaaagcgagaaggcaggcaaaggccagggcaggaaggccccaaaaggccatgtggacctcaccacgtgatttctgtttagaaactttcaatggtgccccattccaaacccttaagtatggcctctgtgcgtcctggtgtagcccccaagctacatttctgatccattctcaactcctagtactgtgctacacccatctacacctcactcctcaaagactcgaagtaaactcatgctcttggcctgattcaaataattcccttaggccactctggaccccaaac

SEQ ID NO: 738481 - DNA, 649 bp, Homo sapiens
aaaggccatgtggacctcaccacgtgatttctgtttagaaactttcaatggtgccccattccaaacccttaagtatggcctctgtgcgtcctggtgtagcccccaagctacatttctgatccattctcaactcctagtactgtgctacacccatctacacctcactcctcaaagactcgaagtaaactcatgctcttggcctgattcaaataattcccttaggccactctggaccccaaaccgtctcctccacatctcggcctgctgaaaccggacttaccgtttcttcagtataatactgcagccactaaccagtaggaattaagcatggtcctaccttcaaggaggttagactcttgtggaagaaaaggataagtttagttaactatygtgtaactataaaagacatggtgatgatatgtgataggtgtttccaaaaaatcacttcactgtagtaacaatacagtgggaaatgagttgtcggactttgcaaggaatgtttcaagaataaaagcatttaaactgatccttgccagttaaatagggtccaaccaatcacaacagacactaataccagctgattgttacctttccatctcttgctgtacctcattaacaatagaatctcaaaaaatgcctgctgaataaa

SEQ ID NO: 738482 - DNA, 577 bp, Homo sapiens
aactgccttggctacttcgctgtctaggagtactctgagaaggataacactccccaaccaggcaacagcagccagcccaaaaaagctgatttaaaaatttaataaagtgatacacacttacaatttttgatgtgattccatttaggaagaatgtagcactaacaattaattataaatctaattcttactcttgatccctttcacttcatttatactaatagagcctcatggataaaaaaatatgaaaaggtatggaagacgtgattccttattacacatgatcaagtgatttcactyctgaccaggacatcactcacaacacagggccctagaatgtttctgctggatgggaccatgtataggtccctatgcaggttgggctggcaagcacgttatctgaagggaatcaacacgtgtggatgaagacagtggcagcaaactgggcagagggagaagtcaacgaactacagtcaggccaatgaagcctttaccttgccagaggtctggagcagacagcccatcagaatggcccatggagggcctttgtattcttgccacattcagtcttcggatgtgg

SEQ ID NO: 738483 - DNA, 622 bp, Homo sapiens
agttttacccttccatatgaaaaactaataataataataataataataaaaagacaaatatataaaatcacaccactcaaaacagaggacaccaggtgaccaaggacacagaccccccagaggggtgagacctaaggagaacatgggagagcccaacagtctccttgatttgaggagacagagccgggagtctggacaagtcaggatagctagaattctcagggcagagtgaaggagagaagagagctgcgcgaagaactctggagatctgcagaagaaccccttcagcattcaactgaacactgatcatgtgtgttgaaaaatctacctgaggtcagggaacaaaccacacaaaaggattagagggaataaagttggagctcacacaggaccaggaatagtgycagttctcaacagccaaggggaaaacctcataattcacgggttatcggttacagagctaagacaggtctcgcataggtagtgggcaaaactatccccagacgaaactctatactggtcctgcctagtaaggcttaaaaagaagacctaaatggatcaaagtgtttctaagtaatcccagaataaagctcgcggatattaggaaggtaaaaaatatcca

SEQ ID NO: 738484 - DNA, 503 bp, Homo sapiens
tcttgaagacttttccctctttcctctaacacatacaacactttaacttccttctcatctaaagtagatgacatcatatcctccttctcagaacagtaagcttcacaaataaatgttatctttgccccactgccaatcctgcaaatccacatacatcttccatccctagtctttcaagaattgagtttgaaagaatggggatctggcaggggatgtggaattaaattgaatttttattttattgtattttatactagtgatgcataacagaaaagagaacttgaayaacactataaacaaattagatttaacagacaaatatagaacactctacccaacaagagcagaatacatatttttctcaagtacatatggaatagtccccagtgtagagcatatcttaggctacaaaacaagtgttaatcaattttaaaagactgaaattatacaacatttttttaatcactatggaatgaagctaaaaataacagaaggagaactgg

SEQ ID NO: 738485 - DNA, 627 bp, Homo sapiens
tttaaaataaagaacttataatttagaaacttacaagtttgatgttagtgctaacgaaatgtgtcctgtgcctttaatatgtaaatctattgaaatccagtccttgacattgtgagggtctccatgcttattactttatgacatttccagaatgaaggtgcaggagggggctcacattaatttgctttatgtttgactagagaggcttcccataactattagaacccacttcgggcycacttcattttagagttgttgtcagtcatttgagagtgatatgccctgtggctgggaagaataaacacatcatatattaggtaaagctttgatgtatgggggttgctgaatgccaacacctcgttctgtggataggaaaaatcagaatgtgggaatgagattaggatagaaaggaatatgacagacaggggcccagccagccttcctggaactttccagctcagaataaactgaatgggcaaaaccagtatttgttttgtttttgctttggtgtgttttatggtggttgttctgaagagcagaatgagattccagaacataatatttgttgttttttttttgccattatcaaactttgaaattaaacaaaacatttaagagctgatatta

SEQ ID NO: 738486 - DNA, 534 bp, Homo sapiens
aaataaataaataaataaaattaaaaaaatatattttatatataatatatatgtattaatgtgcttttaatactaaagctgattttaataaactttacaaacaaatctgtctaatcttgatcagctttgactagacaagataaaatttccataaaccttttatawcctcttagaatttggtttcttttttttttttttttttcttttattggtcattcttgggtgtttctcgcagagggggacttggcagggtcataggacaatagtggagggaaggttggcagataaacaagtgaacaaaggtctctggttttcctaggcagaggaccctgccgccttccgcagtgtttgtgtccctgggtacttgagattagggagtggtgatgattcttaacgagcatgctgccttcaagcatctgtttaacaaagcacatcttgcaccgcccttaatccatttaaccctgagtgggcacagcacatgtttcagagagcacagggttgggggtaaggtcaccgatcaacaggatcccaagg

SEQ ID NO: 738487 - DNA, 644 bp, Homo sapiens
ctgttgtcacatggctatatagatactactgagactggctaatttataaaggaaagaggtttaattgactcacaattccacatggctgggaaggcctcagaacacaatcatggcagaaggtgaaggggaagcaagtwccttcttcatatggtagcaggagagagaagaacaaggaacaaaggaggaagagccccttaaaaaaccatcagatctcatgacataaggggctctctcttttctctctctttcccttccacaccacccaagcagaggttctccatgagggttacaccactgcagcagatttctgcgtggacatccagacatttccatacatcctctgaaatctaggtggtttactaaacttcatttcttgaattctgtgcacccataggcccagcaccacatgttaggcaccgaggcttggagcctgcaccatgtgaagcaacaacccaagctatacctgggtcctttttgccccagcttctgggatgcaggggaccaagtctctaggctgcacacagcaactgggtccctgtgccaggcccaggaaaccaattttttctcctaggcctccgggcctgtagtgggaggggtttccatgaaggtctctgacatgctctggagacatttttcccattgtc

SEQ ID NO: 738488 - DNA, 519 bp, Homo sapiens
gcagaatgggtataataatgccattgcttgaaaggaaatgatacatctggttatgtctaggtaatacctgtgttgtgagaattttgacggtatatattatgtaatcagcactatgcctagcacattgtaaacactgactaagtggtagctcttattactgttttcataattatttggttcatagacatattgtttctgaataaacagaagcagccttgtaaattgaacctatggacttattgaacaataggaagagttcaaaatttgcatgcctttggaagcaggtatctcatagtcatctttatgtcactgctcaggattttaaarttatgtgaaataggtccatcatgcaaaatgttctaagtagaaagtcactttcttctgtgaggctaagagaactgcgctgtgcactccaggtattttttccattcatttgctcaaagataagcagcaatctattacactcttgtagggctgccttcagacactatttctgaccaccacttgtgggaatggttt

SEQ ID NO: 738489 - DNA, 519 bp, Homo sapiens
gcagaatgggtataataatgccattgcttgaaaggaaatgatacatctggttatgtctaggtaatacctgtgttgtgagaattttgacggtatatattatgtaatcagcactatgcctagcacattgtaaacactgactaagtggtagctcttattactgttttcataattatttggttcatagacatattgtttctgaataaacagaagcagccttgtaaattgaacctatggacttattgaacaataggaagagttcaaaatttgcatgcctttggaagcaggtatctcatagtcatctttatgtcactgctcaggattttaaagttatgtgaaataggtccatcatgcaaaatgttctaagtagaaagtcactttcwtctgtgaggctaagagaactgcgctgtgcactccaggtattttttccattcatttgctcaaagataagcagcaatctattacactcttgtagggctgccttcagacactatttctgaccaccacttgtgggaatggttt

SEQ ID NO: 738490 - DNA, 581 bp, Homo sapiens
tgtattattttgcattgctgctagcaatgtctgagtttcaggtgctctacattgtcactagtacttggaattttcagttgtttgtgtgtatgtgtatagttttttgtttgtttttgttcatttgttttgttttggacattctaataacagcgatatgctattccatgtttttaatttgcatttccctagttacrtgatgttgaacattttttcatgtttttatttgcttttcataaaacctgtttggtaaagtaacttaaaatatcttacctaattatatatttttaagttactttttgtcttttttatacattgtacatataagtcatttatgagatacatgtttgcaaatatctttttcatatctgtagattgctgtttcattttcttaacagtatattttgaagagcaaaatatcttaattttgattaagcccaactttttatgttttatggttcatactttagtatcccatctaggaaatatttgtctaatctaattttcttctttttttttctagaagtattattcattagctcttacatttaagtttgttaattatttttattcaaaatttataa

SEQ ID NO: 738491 - DNA, 581 bp, Homo sapiens
tgtattattttgcattgctgctagcaatgtctgagtttcaggtgctctacattgtcactagtacttggaattttcagttgtttgtgtgtatgtgtatagttttttgtttgtttttgttcatttgttttgttttggacattctaataacagcgatatgctattccatgtttttaatttgcatttccctagttacatgatgttgaacattttttcatgtttttatttgcttttcataaaacctgtttggtaaagtaacttaaaatatcttacctaattatatatttttaagttactttttgtcttttttatayattgtacatataagtcatttatgagatacatgtttgcaaatatctttttcatatctgtagattgctgtttcattttcttaacagtatattttgaagagcaaaatatcttaattttgattaagcccaactttttatgttttatggttcatactttagtatcccatctaggaaatatttgtctaatctaattttcttctttttttttctagaagtattattcattagctcttacatttaagtttgttaattatttttattcaaaatttataa

SEQ ID NO: 738492 - DNA, 581 bp, Homo sapiens
tgtattattttgcattgctgctagcaatgtctgagtttcaggtgctctacattgtcactagtacttggaattttcagttgtttgtgtgtatgtgtatagttttttgtttgtttttgttcatttgttttgttttggacattctaataacagcgatatgctattccatgtttttaatttgcatttccctagttacatgatgttgaacattttttcatgtttttatttgcttttcataaaacctgtttggtaaagtaacttaaaatatcttacctaattatatatttttaagttactttttgtcttttttatacattgtacatataagtcatttatgagatacatgtttgcaaatatctttttcatatctgtagattgctgtttcattttcttaacagtatattttgaagagcaaaatatyttaattttgattaagcccaactttttatgttttatggttcatactttagtatcccatctaggaaatatttgtctaatctaattttcttctttttttttctagaagtattattcattagctcttacatttaagtttgttaattatttttattcaaaatttataa

SEQ ID NO: 738493 - DNA, 604 bp, Homo sapiens
cttagagctggaaaatgattctgtcacatttttttgaccaaggcaagtcacaaagccaggacagattcaaagaatggaaaacagactttacctcttgataggaccatatacaaagttatagaagatgattatgggcaaaaacaacaacaacaamaaaaaaaaacagcctaagtgggatatactcatatatctaatacctagtttttacaattaatattttactatatttgctttatcacttatctatctgtctcctattcattcagcaatcatctttttttaaaaaaaatagattttgaaataagctgcagacctcattaactagatcaatatctgacttggttattttttattcttttgaaataaaatttaccatgagatgcacaattcatgagtgtactatttgaagagtctcaacaaatgcatacaactatacaacccaaactcctattaagatacaggatcatcagtcatcccccagttttttctcttgccatcttctgagataggaggtcgggttcagtcactggaccaaattgagaactagctaaaacaggttcaaggtgaaagtagattttcataagacacactcaccaatgtgcca

SEQ ID NO: 738494 - DNA, 655 bp, Homo sapiens
aagtcactcattatttctagtactttttccatagattacatagtattttctacatagaaaattatctcatctgcaaataaagaccattttacttctccttttctaatctgtatgccttttatttgcatggttaggacttctgagactgttgaattgaaatggtaagagtagaaattattatctcatttccagtcttacaaagaaactatgaagtattttatcattaagtatgatgctgtaagtttttaatagattctttccattaaatagaagaagttccattttatttctcctctactaagagttttaatcatgaatacatattgattttgtcaaatatgttgtgtcaattaagatcacacggttttagtttttcagttggttagtattattaattacattaattgattttcaagtgttaaacaaacattgaactcctggaargaattctacttgattataataccttactttctatataaatgtattgttagatttaatttccaaatctttcttgagaatagttgcctctatgtttagcagagatattggcctctagtttgcttttattatactctttttgtctagttttggtgtttgggtaatgataacttcataaaacggtatggatgtttcttctatattctccaatatc

SEQ ID NO: 738495 - DNA, 615 bp, Homo sapiens
tgactattaatatctgtttcagctctaattgactggacaataggaataaattatgttcatataagtaccaggactgaatgtaaccattttgtaatggcttggtttgtcttattgacaccagagagtagagatgtcctctcaataagtttggccataagtttaacaaacattggcatctttgttataataggtttgtatggctggactacttacrtacaagagcactctatttagacttagaaatatggttcaatacttatttatgattcccattgtttgtttgtataggaaaatattttcttgtgaaaatcccacttcacattagcaacactttattctattcatacctatgactatagcagaagtaaggagcaatgtagagaaaaaaaattcaactcttccagttcatatgtaaacatttgtaaaacatataaataacataatttataaggtagagttaatgaatgtaaaactatgttatgtataaacataaaaaacaactttatattaccaacacaaattcatccattcatgcgcatgcacacatgcacaatgctcttatatagtcacacaaaaactgcaatataaatgaaataactcaaatacaaaataagc

SEQ ID NO: 738496 - DNA, 602 bp, Homo sapiens
  misc_feature 1, 2, 3, 4, 5, 6, 7, 8, 9: n = A,T,C or G
nnnnnnnnnatttatacaactgtgtatatatacacatttacttctatattatagacacatagatagatagataattcttcttttacactgacatcagcataccaaatccaacatcacaggttaattctagttttatacctttccatatctgcaactttctttctttgacagtgagaagttaagagtccattagcctcaacttttttacctgtttgagctctactctcctatgtgtaacccgtcatcttttgctacctgtgttctacccaacctcctacccactatggagattcccttttcaccccactctgaatccagcacccatccygagtccccactgccacttccctctcacatgggtgctcttctcactctacctgggcaccaaaaacctgcactaggctgctgccattgccaccaaaagtgtggccctcctcactttgctctgtctgcctacctaagctagcactctctttaccctgctcaagctccagtgctgcaggctggagcactaacactgctgcctccattctgcttggctgtgggggtcctccgcctcccacatgcatacctacttcactcagtccacctagtggcttgta

SEQ ID NO: 738497 - DNA, 586 bp, Homo sapiens
ttgcagtcctttaagaaatgacaaatattaggccagatgcggtggctcacgcctgtaatcccagcactttgggaggccgaggtgggcggatcacgaggtcaggagttctagacttgcctggccaacatggtgaaaccctgtctctactacaaatataaaaattacccaagcatggtggcaggcacctataatcctatctaatagggaggctgaggcaggagaattacttgaacccargaggcggaggttgcagtcagccgatattctgccactacactccagcctgggtgacagagcaagactctgtctcggggaaaaaaaaaaaaaaagaaagaaatgacaaatatttcctcatgacaaaaaacactgataaaatattgttatttctgttactcatctccccatgacttgctaggcctcagtgaggtagttctagctgatttgcagaatgagagagaatcctttattttaatgacattgaggttcaggaatatttgttgtgacagtttaccctaacatagctacccagcagcaacattatatattaatttaatgttttttctttccctccatctcacttttccca

SEQ ID NO: 738498 - DNA, 571 bp, Homo sapiens
ggctaaaataatatatttcttcaccattaaaaatccaccttcacctgaggatttaacaaatgattaattttgtttctctttttattttttgagatggagttttgctctcattgcccaggctggagtgcagtggtgtgatmtcggctcactgcaacctccacctcccgggttcaagctattctcctgcctcagcctccagagtagctgggaccacagctgcctgccaccacgcccagctaatttttgtatttttagtggagacagggtttcaccatgttggccaggctggtctcaaactcctgatctcaggtgatcctccctgctcggcctcccagagtgctgggattacagacgtgagccactgcgctcggccttgtttctcagttttaaagaattatttaaaattagctatgttatcttatcaaaaaaatttcaacagcagaaagaaatattaagtagccaaacttaaaacaaaccaaagaggttatgcaggtcaacataaacactttgagataaatgcaattatcaagagaacatattttaaaatactgtgcagaatttataacagaga

SEQ ID NO: 738499 - DNA, 571 bp, Homo sapiens
ggctaaaataatatatttcttcaccattaaaaatccaccttcacctgaggatttaacaaatgattaattttgtttctctttttattttttgagatggagttttgctctcattgcccaggctggagtgcagtggtgtgatatcggctcactgcaacctccacctcccgggttcaagctattctcctgcctcagcctccagagtagctgggaccacagctgcctgscaccacgcccagctaatttttgtatttttagtggagacagggtttcaccatgttggccaggctggtctcaaactcctgatctcaggtgatcctccctgctcggcctcccagagtgctgggattacagacgtgagccactgcgctcggccttgtttctcagttttaaagaattatttaaaattagctatgttatcttatcaaaaaaatttcaacagcagaaagaaatattaagtagccaaacttaaaacaaaccaaagaggttatgcaggtcaacataaacactttgagataaatgcaattatcaagagaacatattttaaaatactgtgcagaatttataacagaga

SEQ ID NO: 738500 - DNA, 618 bp, Homo sapiens
taataggtttttacatgttttgttttaatcttcattcagtgctaaatattttcttcttttccatgtaaacttttagttcataacaaatgcagaaatgtgtttattaattttcaagtatttggatattttataaatattattgaattttatttattaggggttattaaaaaacacactctgcctgaaatttcctgagacttctattatggcccaatttgttcatcttggtcagtgttccatgtgaaattgaaaataatgtgtattctgatgttgatgggtgtagagctctgtgtatttcatgaagtgaactctttatttctgatatatttttttcaattctgaaatttccattgamgtcttttgtatcatttctctgttgaaattacctgtttatgcattagtccacctgtaacactagatgctttaatacacctaccattgttatcttacaatttttcctttctaattctaacatctggaccatctatggatcacattgtattgactattttacttttgacaagtccctttttcctacttcactgtatctctcaaaagatacatatttgccaaactttatctttacatcttgtgatggttaatactgagtgtcaactc

SEQ ID NO: 738501 - DNA, 484 bp, Homo sapiens
atctcatctattagccatttttacttcaagacttatattatcatttcacatattttgccccattctttctgctgtttctagcattccagttatgtatacgttacacctgtcaaattttcttacagttctaggatgccctgcttttttattcatttttacagtttgggaagttctattgacctaccatatgctcactgattctttcttcagctgtgtctgctgataagcccattaacaaaagacattctgttacattatttgtgatttctagctttttwaaaaaaaaaaacacctctgtgttaggtttacctctctctgcctatattacccatctgttcttgaatgttgtcctctttttcattaggttactaattagtcattttaaatctcctgagaattccagcacctgtgtcataactgagtctggtggtgatgcttgctttgtctcttcagactgtgttttttccttgccttatggcatgcc

SEQ ID NO: 738502 - DNA, 496 bp, Homo sapiens
cattattttattttcattttcttagttcaaaatatttctagtttccatttaatttcttccttcggttacataaaaatattttttctttccaagaagagatatttactttcaaacatgaatatgataaagaaaaatcttatggtatatatttcyagcttaattatattgtatttagataacatgccctatatgttttatccttgaacaattgtttcaacttggtacccaaattaaggtcaacttttataacagctatatttagatgtatgcaaaaagaatgtgttatgtagttacaggatgctatgttctgtatatttttaaggtctaatttgtaataatgttgcttaaatatgttctatacttactgatttgtggtctgcttgatctgccagttactcaaaaaatatgttcaaaattccgactttgctcgtgagattttaaaatttcccttagactcttgttgagtttttgctttacatattttaaagctatgtca

SEQ ID NO: 738503 - DNA, 628 bp, Homo sapiens
ttcccactgcatcccacatgaagggcacacctgcacacacaactccaatgagaggatgcggcctatagctgtgcagcattgcagccactggaatctagtctaacctttcttgaaattttacactaaaatttaaaagcaatcaacctaatccctgatctacttttgtccaagtattttattaaaaatcaactttaacattttttaattgaaagttaaattctatcttggatataaataattatgcttcttcatgacattctgacaaaaatgtagtcacatccaaaggataagaaccaaggctagtttcaatagtcattctcttcacaagttcgataaattcttagaattttagacttttagaacaagattacatattaatatgtctacacgagcacttgtacacgaatgtccatagcagcattattcatagttgccaaaatgtggaaacaattcaagtgtccaccaactggtgaatgcatagacaaagtrcagtatgcccatacaatgggctgctattcaacaataagaggaaacacaagtactacagatgactctcaaaaagattatactgtgaaagaagccagacacaaaagacttcatgattccatttttataaaatgcccagaaa

SEQ ID NO: 738504 - DNA, 491 bp, Homo sapiens
aatgaaagaataacataaataaaaaacataataatgcagaactggattaaccttttctctccaataacagattacacctaaaatccattcagtagctttagtcctttaactaccctttttgaggaaagcaatgagatgcaaaacacctagacagcttgtctaccaagctggcacmccatgaaaaccatcatcccagcagctcagctccttggtaaaaatgagagatgatgaactgtaattttcaaccagaatacaattaatttggctagtttaatatcttaacacctattgtgttcattggaaaatagcaaaatgtaaacattaacccatcttgaatacagctctgtaaataatatgtttatatatgtatgtatggggaaggactagagaacagaaaaataaacacagttgatctgttgggatgatagacataaatcatagatgatctgctatttttacattatattaatattatttatattcataccatt

SEQ ID NO: 738505 - DNA, 614 bp, Homo sapiens
gctatttaatgacagataacacaaattcggaaatgtatcaagcaataataatgaataaggttatcattttccaacctgctctacattcagagatggatggcttattcattcttgttattcttttggggtgtggctggaatgcaccaagatagaactcagtggctgaggatctcaatgaagccaaagggaagaaaggataagcagaagtacactaggaagcaaaccaacagtccagaatagcaaagatgtctatggtaaagtttcagtccatgcccccattcccctggttcttartaggcaactcattattgataatattgctgacttggcattatctggtgatctagaggatatttgccagaactgccataaacactttgtaatttttagcaagtcctgtatttctatcactattcaactggtccacaaattcatctcaagaaaaagctatagaaagtcacaaattgccatcttaaaaactaaaacacttagagttaccaagggagaggtgcttttaactaactcatatgtcttttttttaacctgtcatattgatagaggatttaactaaggccatcattcttactatttctcacccgagatttctgatcaga

SEQ ID NO: 738506 - DNA, 614 bp, Homo sapiens
gctatttaatgacagataacacaaattcggaaatgtatcaagcaataataatgaataaggttatcattttccaacctgctctacattcagagatggatggcttattcattcttgttattcttttggggtgtggctggaatgcaccaagatagaactcagtggctgaggatctcaatgaagccaaagggaagaaaggataagcagaagtacactaggaagcaaaccaacagtccagaatagcaaagatgtctatggtaaagtttcagtccatgcccccattcccctggttcttaataggcaactcattattgataatattgctgacttggcattatctggtgatctagaggatatttgccagaactgccataaacactttgtaatttttagcaagtcctgtatttctatcactattcaactggtccacaaattcatctcaagaaaaagctatagaaagtcacaaattgccatctkaaaaactaaaacacttagagttaccaagggagaggtgcttttaactaactcatatgtcttttttttaacctgtcatattgatagaggatttaactaaggccatcattcttactatttctcacccgagatttctgatcaga

SEQ ID NO: 738507 - DNA, 613 bp, Homo sapiens
tatttcaactatgatagcttagtagcagaatttaacattaggtccagaataccatcccatgctcatattcaattgcatgtagttgaatgggaattgcattcacaagatggggaacccctgtaccaacttatcttttttctctccaagtagataaacgaagtgtctacagctgctatgccttaaactgagttgatgggctgaatttaattaggttgtaagaatggaagctaaaccagataattgactaaatakaaatggaataaaggcatttccaccccaaaatgtgttcctagaaaacatagagtaagacaaagtgtggccaaggagggtaaacatgtgttcatatgctgctgtattcatctgcccacacctgctctgcagctgtaaaaggcatttgcatggtatggggatgatgagttgatggcatttccttagggaagagtggatgcattcaagatctttgtctcaaatatagcagggacaaaaggaataaagagtttccctggccacagaatagagactaagaaaatagattcctaagtaccacctagatttctaatatcatagtatttgccaatatcacttaaaattattggatttctctgcaaatatt

SEQ ID NO: 738508 - DNA, 576 bp, Homo sapiens
ccatcattacacgttatgcatgcaacaaaatatcacatggaccccactgatatgtaaaatattatatatcaatcttttaaaaagaaactccatccacaaacaaatcttgtcaaaattctaaacaatttctacagacattgttgcatttcagattcatatgtaagcttcaaattaataacttctattaccgattatttaaaaaccattgtattctacgtgaatgataatttggagagctcctggttatattatcagtcccatcacacatagattggctacatgcattcgttgaaggagtaagtttgtaatgttccagtctcattatcactttatgtgggcacaatgtctccttaatgctgaaattatatatatattatatatatatatatatgaaatatatatatatctcacacatacrtacacatttgcttaaaccaacatttaaaataaaaagtgatagcacactgattgtaatgacaaaagaaagaaaacttgagttattcaatttggtcattccttaggaccacttagaatttctaacttagaatttttcatctgtgtccactcactcagtaa

SEQ ID NO: 738509 - DNA, 595 bp, Homo sapiens
tttccttcagttcaatagcaaatgctgtttaaaagcaaatacacagcatttatagaatgtttttgcctcttcattatattttactacataaaaatctaaaacacacaaaaaagtaaaacacaaaaacagtctaaagtgtgacactgatttcagtacaatacatctagagggaataatttttctctaaattcccaggtggctaaaaagagggctctgtggatagatgtggaaagsgtgagacagatgcttctctgagcctcgggtttctcatcttaaaatagagataattacagtacctacctcacaaggttgtggggatttgttgggaggatctaagtaaagcccttaagacactgcctgggtataaagcagctatgtagcttctagtgtcttaacattgctaagaaaagaaacacacttgccccctttttgcagaagtaagctcctttagtgattttcatctcattttcttctatacttttttttgatatttgttgtgagcacgatcttctcttttttaataaattcatatttttcaattatttttattattaaggtaagaagtgtgcttttgttggtggaggaagaaggaagc

SEQ ID NO: 738510 - DNA, 660 bp, Homo sapiens
tattctgataattaatttagaaaagcagagagagagaaagagaatataagagtccatttattttttggactgaacctagggttcctttaccagactgatatttcagattttttcaaatgttggtaaatatggactccactgagtgtatttacatgacagtaagaagatcctaacggcacacaaaactaaaagatggaaccaaagccccagtactaaataaaatgcagaagaacctaaagktcctcatgatctgaagtgtgttgctgcctcagtaactggacacagagaaaacgtggtttcatatacagtcccaggtcagcaccacaaagttatactatgatcccagagtgttcctaagagtggaggaggagacaaaaaagtggaaagggagcagacagcccctccatactctccatcctagcagatcctaccatgcctctggtctctggatcctgccgcttttctctgggacttcctgctttccaacttcaatcttacagcatgtcataaatatgtatgtatcttagtgtgatgaataagctatctgaccactcatttatccactctccaaggagctgtcagatactatgtagccatatttatacagacaacccattccctgaatcaggcattgcagcctgagatcctttttccttaatt

SEQ ID NO: 738511 - DNA, 660 bp, Homo sapiens
tattctgataattaatttagaaaagcagagagagagaaagagaatataagagtccatttattttttggactgaacctagggttcctttaccagactgatatttcagattttttcaaatgttggtaaatatggactccactgagtgtatttacatgacagtaagaagatcctaacggcacacaaaactaaaagatggaaccaaagccccagtactaaataaaatgcagaagaacctaaagttcytcatgatctgaagtgtgttgctgcctcagtaactggacacagagaaaacgtggtttcatatacagtcccaggtcagcaccacaaagttatactatgatcccagagtgttcctaagagtggaggaggagacaaaaaagtggaaagggagcagacagcccctccatactctccatcctagcagatcctaccatgcctctggtctctggatcctgccgcttttctctgggacttcctgctttccaacttcaatcttacagcatgtcataaatatgtatgtatcttagtgtgatgaataagctatctgaccactcatttatccactctccaaggagctgtcagatactatgtagccatatttatacagacaacccattccctgaatcaggcattgcagcctgagatcctttttccttaatt

SEQ ID NO: 738512 - DNA, 660 bp, Homo sapiens
tattctgataattaatttagaaaagcagagagagagaaagagaatataagagtccatttattttttggactgaacctagggttcctttaccagactgatatttcagattttttcaaatgttggtaaatatggactccactgagtgtatttacatgacagtaagaagatcctaacggcacacaaaactaaaagatggaaccaaagccccagtactaaataaaatgcagaagaacctaaagttcctcatgatctgaagtgtgttgctgcctcagtaactggacacagagaaaacgtggtttcatatacagtcccaggtcagcaccacaaagttatactatgatccyagagtgttcctaagagtggaggaggagacaaaaaagtggaaagggagcagacagcccctccatactctccatcctagcagatcctaccatgcctctggtctctggatcctgccgcttttctctgggacttcctgctttccaacttcaatcttacagcatgtcataaatatgtatgtatcttagtgtgatgaataagctatctgaccactcatttatccactctccaaggagctgtcagatactatgtagccatatttatacagacaacccattccctgaatcaggcattgcagcctgagatcctttttccttaatt

SEQ ID NO: 738513 - DNA, 528 bp, Homo sapiens
tgtagatgacatgattctgtatgtagaaaacgccaaggactccaccaaaacggttagaactaagaaataaatttggttaagttgtaggagacaaaatcaatgtaatgaaaatcacttgcatttatatacacaaataacttagctgaaaaaattcaagaaaataatctaatttataatagcattaaaaatacttaggaataaattttaccaaagaggagatagacctatacactaaaaactataaaacattaatgcaagaaattgaagaatacacaaatcaatggaaagtaatcctgtgttcacacattgaaagaactgaggtttttaaagtggccatactacacatatgttgtatatttacagattcmacataatccctatcaaaatctcagtgatgttcttcacaaaaataggaaaaataatcctaaaatttgtatggaacaacagaagacctcgaatagccaaagcaattctcttaaaatatcctgtaaaagttgtattcataaatatattgcagtccatgcatat

SEQ ID NO: 738514 - DNA, 605 bp, Homo sapiens
gaatcgttcgataatatagattgaaatttaaatacacatttgtaacatccgcaaaactcagtgaaccaatatttcctaaataacgaattcatatattataaaatttagcatgggcaaaagagatccattcagtgtatggcttattcataaacttctatgtaacataatttgaaaactcatttttttttggtttaaattccacattacaactaatccttatggaactaccacttatccaactctgaaatgttacrtgatgcattatagcatcaagtcttccttccatttctaagatacacttcttaataatgattaattaatttattaatgtgattttaaatgttgtcacagtggaaaatatatggaactggggaagataagttagctttgaatcatagttctgctatataataaatattcttgtacagagtaggtgctcaataaatgagagtcattattacttactggcaggctgtgcagaataagacattgtttaagagcttgataggattggtgaggatttaaagtgcttcctgtaaagtgtttagcacagtccttgttgcagtgtgaacattcaataaacattagcttttattatttatatt

SEQ ID NO: 738515 - DNA, 588 bp, Homo sapiens
tttgtttgtttgtttattccttgcctccatgtggtttctctcctaacagagatattttgtttgtgtgtattgtttggctaagatattctattttatcaaataaatgtattatttttaacctatcctttaagaaacaaaactgaaaattgctttatagcatcagttaaaaccagtgctcttacatgatattaaatatgtgtataaactgaatcataactcaaaaccatatgtttatggtgagtttgaaaggagggactccaaaggataaattttatcatttatttttcagaatgcacagaatactaacaactattggccattttattctgaaatatttgtcccaggatttcacttaatttgctgaagataatgagrtaaatggctagcccaaattttgcctaaatctaacataatgtagatacttcccttaaaatcatagaatgtatataggcaaaaggaaaactcaaataacagctaaggaaaactactgatcagctgggacaatatgtttgttggagtaaaaaccagttactcattcacacgcatacgtaaacaagaaaacatatgaaccctttggtcattgcagtg

SEQ ID NO: 738516 - DNA, 675 bp, Homo sapiens
actacatacaggaataggaaatgctgtgacactacctcttcccagaattccaggtgggaagcaggcccaagtctcttctgttcttgaaatcctgatctggaactccatcgtggggattcccttgcctttgctaagttaaaaacttagagagaggcacccaggaacacattcagtcacaatctgggtttccctcctctttctcttcagcctccccatgacactgggaaggagtgagaagagtgtgctctgctttctggtttgagataaagactctttcttgatacttaaagraagtgtttaagactcaggaaaacctttcactctcaagaaccaatctcttgcaaatagaaagatatttggtctatgctcacacacttgatgattgcataaaattgccttcacattttttattgcatccattctctcctgaagtgaggatctcataagcagagaactgcagaattctagcacaccctgtctagcatgtggtctgggttatctgtgtctttcgttatctgaattatttcacaaccctgtgagctttagaaaacagatgcaatgcaaatgattcctgttaataaaaatgcaaatacattttttctggtggcgatgtccattgactagttttgcatctattagcaaattccttttagcatttgtgatggcacatatgta

SEQ ID NO: 738517 - DNA, 384 bp, Homo sapiens
actcatcattatactgtaggcctcccttgagtacatccacatacgttatgaattccattttatataaatctaacccaagcattagtcttacctgtaatcaaagcacacacctccaggatatttggggaaaaggtggttagtctcaagaccattcctgagtcatttccatgttacagctctctccagtcatatttctaccatgggtcactgtttgatcagctgtcctcagactcaatttcttttttyctttttttttttgagacggagtctcactatgtaggccaggctggagtgcagtggcacaatctcggctcactgcaagctccgcctgccgggttcacgccattctcctgtctcagcctcccgagtagctgggactacagg

SEQ ID NO: 738518 - DNA, 622 bp, Homo sapiens
taaagctccaaaatgatctcctttgactccatgtctcacattcacgtcacactgatgcaagaggtgggttcccatggtcttgggcagctccacccctgtggctttgcagggtacagccttcctcctagctgctgtcacaggctggttttgagtgtctgtggctttttcagacacacagtgcaagctgtcagtggatctatcattttggggtctggaggacggtggcccttttctcacagctccactaggtggtgccccagtagggactctgtgtggggcctccaaccccacatttcccttctgcactgccctagcagaggttctccataaggaccctgcccctgcagcaaacktctatctcggcatccaggcatttccatgcatcttctgaaatctaggtggaagttctgaaacctcaattcttgacttctgtgcacctgcaggcccaacaccatgtggaagctgccaaggcttggggcttccaccctctgaagcaacagcccaagctgtaccttggtcccttttagtcatggctggggtggctgggatgcagggcaccaagtccctaaactgcacacaacatggtgacctttgggacaggcccaagaaactattttcttct

SEQ ID NO: 738519 - DNA, 622 bp, Homo sapiens
taaagctccaaaatgatctcctttgactccatgtctcacattcacgtcacactgatgcaagaggtgggttcccatggtcttgggcagctccacccctgtggctttgcagggtacagccttcctcctagctgctgtcacaggctggttttgagtgtctgtggctttttcagacacacagtgcaagctgtcagtggatctatcattttggggtctggaggacggtggcccttttctcacagctccactaggtggtgccccagtagggactctgtgtggggcctccaaccccacatttcccttctgcactgccctagcagaggttctccataaggaccctgcccctgcagcaaacttctatctcrgcatccaggcatttccatgcatcttctgaaatctaggtggaagttctgaaacctcaattcttgacttctgtgcacctgcaggcccaacaccatgtggaagctgccaaggcttggggcttccaccctctgaagcaacagcccaagctgtaccttggtcccttttagtcatggctggggtggctgggatgcagggcaccaagtccctaaactgcacacaacatggtgacctttgggacaggcccaagaaactattttcttct

SEQ ID NO: 738520 - DNA, 579 bp, Homo sapiens
gacaagacgtggaggtggaaaacaaggatattgatgattctgatcctccgtatttgtattagtccattttcatattgctataaagaagtacccgaggtttggtaatttataaagaaaaagaggtttcatggactcacaattccacatggctggggaggcctcacaatcatggcagaaggtgaaggagaagcaaaggcacgtcttacatggtggcaggcaagagagcatgtgcaggggaactgccctttataaaaccatcagatctcataagacttattcactatcacgagaacagcatggggaaaacctgccccatgattccgttacctcccaccaggtccctcccacgayatctggggattatgggagctattattcaagatgagattggggtggggacacagccaaaccatatcagtatgcccaggctaatgtgtgtatttgtgttatttttgtttatttaacaaaaaagttttttaaaaaataatagtaaagaaataaatcattttaaaatggaaaaggcttatgaataaggatataaagaaaaaatatttttgtatagctgtactatatttctgc

SEQ ID NO: 738521 - DNA, 578 bp, Homo sapiens
gaaaaaatatttttgtatagctgtactatatttctgcatacctgtacaatgtattttaaactaagtatttttacaaaacagtcaaaaagttttaaaatattttaaaactttataaggttaaaaaaagttatagtaagctaagtttgatttattactgaagaaagaaatactttttacaaatttggtatagcctaactgtacggtgtttataaattccacagtagtgtacagtaacatcctggtccttcacattcattcatcactcactgactcacccagagcaacttctaatcctgaagcaccattcataagtgtcctatacagaggtaccattttttatgttttataccgtatgtttactayacatttcctatgtttagatgtacagataccattgtcttccaattgcttacggtattcagtatattaacatgctatataggtttgtagcctaggagtgctagactataccatattgtctacgtgtatagtaggctatgccatctaggtttatgtactatgtacactctatggtgttcacacatgacaaaatcatggaacgattaatttctcataag

SEQ ID NO: 738522 - DNA, 578 bp, Homo sapiens
gaaaaaatatttttgtatagctgtactatatttctgcatacctgtacaatgtattttaaactaagtatttttacaaaacagtcaaaaagttttaaaatattttaaaactttataaggttaaaaaaagttatagtaagctaagtttgatttattactgaagaaagaaatactttttacaaatttggtatagcctaactgtacggtgtttataaattccacagtagtgtacagtaacatcctggtccttcacattcattcatcactcactgactcacccagagcaacttctaatcctgaagcaccattcataagtgtcctatacagaggtaccattttttatgttttataccgtatgtttactacacatttcctatgtttagatgtacagataccattgtcttccaattgcttacggtattcagtataktaacatgctatataggtttgtagcctaggagtgctagactataccatattgtctacgtgtatagtaggctatgccatctaggtttatgtactatgtacactctatggtgttcacacatgacaaaatcatggaacgattaatttctcataag

SEQ ID NO: 738523 - DNA, 609 bp, Homo sapiens
ttcagcttttctctgtccttgcaaaggacataatcttgttcctttttatggctgcatagtattccatggtgtatatgtaccacattttctttatccagtctaccattgatgggcatttgggttgattccatgtctttgctattgtgaatagttctgcagtgaagatacgcatccatgtatctttataatagaatgatttatatttctttgggtatatgcccaggaatgagattgctgggtcaaatggtatttctggttctagrtctctgaggaatcgccacactgtcttccacaattgttgaactaatttacattcccaccaacagtgtaaaagactgttcctgtttctccacagcctcaccagcatctattgtttattgactttttaataatcgccattctgactggcatgagatagtatctcattgtgattttgattttgatttctctaatgatcagtgatgttgagcttttttccaagtgttttttggccacatacatgtcttctttttggaagggtctgttcatgtcctttgcccactttttgatgggttcttttttttcttgtaaatttatttaagttccttgtagatgctagatgttagacct

SEQ ID NO: 738524 - DNA, 597 bp, Homo sapiens
tggtgagtgttacagctcataaaggtggtgtggacccaaagagtgagcagcagcaagatttattgtgaagagcgaaagaacaaagcttccacagcgtagaaggggacccgagcaggttgctgctgctggcttgggtggccagcttttattcccttatttggcccacccacatcctgctaattggtccattttacagagcactgattggtgcatttttacagagtgctgattggtgcatttacaatcctttagctagacacagagcactgattgttgcatttacaatcctttagctagacacaaaagttctccaagtccccacccgacccagaagtccagctggcttcacctctcaatccccactctaaacgggacaccccagctgctcttgggaattgggcaatgactgctctagctacttccttctggataggggcaaagayggggccctgcagtggtagtgtcctccagaggggaactctttaggccagtgaaagggccagggggttggtctaggggtcctcagtagaagttgatagttgagctcatttggggttccatttgtaagaccatctgtagcttgatggcctcgatcct

SEQ ID NO: 738525 - DNA, 597 bp, Homo sapiens
tggtgagtgttacagctcataaaggtggtgtggacccaaagagtgagcagcagcaagatttattgtgaagagcgaaagaacaaagcttccacagcgtagaaggggacccgagcaggttgctgctgctggcttgggtggccagcttttattcccttatttggcccacccacatcctgctaattggtccattttacagagcactgattggtgcatttttacagagtgctgattggtgcatttacaatcctttagctagacacagagcactgattgttgcatttacaatcctttagctagacacaaaagttctccaagtccccacccgacccagaagtccagctggcttcacctctcaatccccactctaaacgggacaccccagctgctcttgggaattgggcaatgactgctctagctacttccttctggataggggcaaagatrgggccctgcagtggtagtgtcctccagaggggaactctttaggccagtgaaagggccagggggttggtctaggggtcctcagtagaagttgatagttgagctcatttggggttccatttgtaagaccatctgtagcttgatggcctcgatcct

SEQ ID NO: 738526 - DNA, 607 bp, Homo sapiens
ccacatttcaagcacatgaacagtcacatggctattggctacgacactaaacagcacagacacagaacattttaatcactgcagaaagtgcctcctgggcagcactggcttatccatttgaaaaatttaaccaaattactaccttacacacaaccatctcataactcgaacattctcctcggtttcccactcctcaatcgatgcaatctctgcagctactgcccaagttgaaagttgatcatttggagaccaggtgcggtggctcacgcctgtaatcccagcacttagccgggcagatcatttgaggtcaggagttccagaccagcctgcccaacatggtgaaaccctgtctctaccacaaatacaaaaattagccttgcatggtggtgaacgtctgtaattccasctactcaggaggctgaggcatgagaatcgcctgaacccaggaggcggaggttgtagtgagccgagatcgcgccactgtacttcagcctggggtgacagagcgagactctatctcaaaaaaaaaaaaaaagaaagttgatcatttgagtcctgtgcctaattcaatattcagaacagaacagtagtaatgttcacatgccac

SEQ ID NO: 738527 - DNA, 633 bp, Homo sapiens
aaaaaaacaaaccaaaacaaaacaaaacagacaaacaagaaccaaagttggatgcagtggctcatatctgtaatcccaacaactcggaaggctcaggcaggaggattgcttgaggccaggagtttaaggccagcctgggcaacatrctgagaccctcgcctctgaaaaaattaaatattaataaaaacaaaccctagtagcttcaacctttgaatctccatcccggaagacattttctcgttttggtgggacagaaattccttcttggttttctttttgggacgagccaccggggctcgctggaatttttttgggattgagttaccgccttccgggctcaagcgatcctcccacctcagcctcccaagtcgctaagaccataggtgcatgccaccatgcctggctaatgttttgtattttctgtagagccggcgttttgccctgttgcccaggagtttttcctttaatgttctcctgctacttactaattcactttgtcaccctgtgagctcataagagcagagagatagcaacaggagctaaaaaaactctaagctgtgaaaaaatattaaatatgaaatcatgatagctattagcttaatttgttttaggcaaattgcaaagtaatttttt

SEQ ID NO: 738528 - DNA, 649 bp, Homo sapiens
gatataaacaacatatatataaaatatatatacttatcagagatataatttgcaaatattttcccccattctgtgagttgtcttcattctacagtgtcctttgatgcatgaaagtttttaactttaacaaagtccagtttatctacctttttctttcactgcttgtgtttttgtgttatatctttaaaaatcaccatttaatccaaggtcatacagattttcacctatgtttccttcgaagaacttaacaggtttaggtctttgatccattctgagttaattttcmtatgtgatgtgaggcagggatccaaatttatttttttacatgtagatatccagttgccccagcaacatttgttgaaaagattattctttccccagttaatgatcttggcgccctggtcaaaatcaactgaccataaatgtatgggtttatttctggactctaaattgcattccattggtttacaagactctcctcatgccagtgacatgccatctggattactgtagttttgtaataagttttgaaatcaggaagtatgagtcctacaattttgttctctttttttcaagactgttgtggcaaatatggctctgcaattccatatgaattataagatcaggttgtccatttccgggaaaaagg

SEQ ID NO: 738529 - DNA, 664 bp, Homo sapiens
gcagggatccaaatttatttttttacatgtagatatccagttgccccagcaacatttgttgaaaagattattctttccccagttaatgatcttggcgccctggtcaaaatcaactgaccataaatgtatgggtttatttctggactctaaattgcattccattggtttacaagactctcctcatgccagtgacatgccatctggattactgtagttttgtaataagttttgaaatcaggaagtatgagtcctacaattttgttctctttttttcaagactgttgtggcaaatatggctctgcaattccatatgaattataagatcaggttgtccatttccgggaaaaaggcagttgarctgtgatagtgattgcattaaacctgtagataaatctgggtagcactgtcatcttaacaatattaagtcttccaagccatgaacacaggacgtctttcaatttatttagatctctaatttccttcaacatgttttctgttttttagtgtactttttagtgtacttctttggttaactttattcataagtattttattctttctgatgttattataaatggaattttttctatttcattttcagattatccatagctagcatataggaatgcaactgatttttagataataatcttgtatcctgcaa

SEQ ID NO: 738530 - DNA, 606 bp, Homo sapiens
agtttacattcattttttgatatggaacttgtaggtaaaaaagaaaaaaatgtttcctgtctttacctaagaaatcaccattagactccgtaaagcactattcctatgggaactaccaaggtctctagaagataaaggatagaacgcggggaagaactacaaggaaaaaaaaagtggatagcaaagaaaaaatatgccacagaacttttcaggtcaaaaaccctaaaagtgactatgttggtaggaagccctgactgyggaggaaacagtatttctagcatcctccataattcaagttgctcatcataattcaacttgttcatctattttttttttttttttttttttgagatggagtctcgctcttgttgcccaggctggagtgcaatggctcgatcttggctcactgcaacctccgcctcccaggttcaagtgattctcctgttctgcctcagccttccgagtagctgggattacaggcacccaccaccacgcccagctaatttttgtatttttagtagagtcggggttttaccatgttggtcaggctggttttgaactcttgacctcaggtgatctacctgcctcagcctcccaaactgatag

SEQ ID NO: 738531 - DNA, 606 bp, Homo sapiens
agtttacattcattttttgatatggaacttgtaggtaaaaaagaaaaaaatgtttcctgtctttacctaagaaatcaccattagactccgtaaagcactattcctatgggaactaccaaggtctctagaagataaaggatagaacgcggggaagaactacaaggaaaaaaaaagtggatagcaaagaaaaaatatgccacagaacttttcaggtcaaaaaccctaaaagtgactatgttggtaggaagccctgactgtggaggaaacagtatttctagcatcctccataattcaagttgctcatcataattcaasttgttcatctattttttttttttttttttttttgagatggagtctcgctcttgttgcccaggctggagtgcaatggctcgatcttggctcactgcaacctccgcctcccaggttcaagtgattctcctgttctgcctcagccttccgagtagctgggattacaggcacccaccaccacgcccagctaatttttgtatttttagtagagtcggggttttaccatgttggtcaggctggttttgaactcttgacctcaggtgatctacctgcctcagcctcccaaactgatag

SEQ ID NO: 738532 - DNA, 606 bp, Homo sapiens
agtttacattcattttttgatatggaacttgtaggtaaaaaagaaaaaaatgtttcctgtctttacctaagaaatcaccattagactccgtaaagcactattcctatgggaactaccaaggtctctagaagataaaggatagaacgcggggaagaactacaaggaaaaaaaaagtggatagcaaagaaaaaatatgccacagaacttttcaggtcaaaaaccctaaaagtgactatgttggtaggaagccctgactgtggaggaaacagtatttctagcatcctccataattcaagttgctcatcataattcaacttgttcatctattttttttttttttttttttttgagatggagtctcgctcttgttgcccaggctggagtgcaatggctcgatcttggctcactgcaacctccgcctyccaggttcaagtgattctcctgttctgcctcagccttccgagtagctgggattacaggcacccaccaccacgcccagctaatttttgtatttttagtagagtcggggttttaccatgttggtcaggctggttttgaactcttgacctcaggtgatctacctgcctcagcctcccaaactgatag

SEQ ID NO: 738533 - DNA, 573 bp, Homo sapiens
catggaagctgcacaagaagtcatctaatgaggacaagatcctcaacagggaccctgggtaaatgatggggccctcacagttcccatctaaaatgaggagggggtgagaagcttaattgctcctttcaagaatgaaaaccttggcattgttattcttatcccagggacagcgaagccccaacggaggaggaggagagtgaagccctgccataggaggagaacacagcccacctcaggcctcctgcaaaaatacatagaataaacaacaacagttactaaatgaatgaaaattgtgattccgatgaagcctgccagagaaamaaagcattttttaaaagaggaaataaggtgatatctgattagggcaaacatgatgcagacaagaaatgcaccggttcagaggagggaaggtcaggccgcctggggagagtccatgaaaaagatggaacgtgccagatgctgtacctggtgctgggaaagagttgactaggccagcatccctttcctcaaagggggggctcctagactggggggagggctggacatctgaatacatcctgaggagacagtgtg

SEQ ID NO: 738534 - DNA, 594 bp, Homo sapiens
ttaccattgagaagggacagaaaggaattaagcaaactagaatagaagggtatcagaattttcaccaccaggaagcacagtggagagagctagtaaaaatggactggaaaatggtgattggaatagcagtctgaatgctggttttagtggaatgttgggggatgtaatcttctgtttttctctttcccctgtctcagtatttattcccctagctccttccagatcccctgatatctttctctctctctctctctctctctcwcacacacacacactcacaaactcttgtacacacttgtgtatacctctttgcaccgctaacttactcctctttgcacactcagcctgactaatgtgcccgagctagcactggtgggcccatcacaatagctcgatgtgtgctgtatacttcagctccaatgtagaccttaatgaagctgtggctaggaacatgatcttattaggacctggagaaacaagagtcaaatgttagggccattgtgggttataggagtggaatcagaggagtggaccagctccatactcttactagaatgggtgatttcaagaaatgaatggagttcttctcatagt

SEQ ID NO: 738535 - DNA, 630 bp, Homo sapiens
tagaatgacttcagtttatatttaatgtattttcagatgacacatggcattaaataggatgaaaattgaatgatacaaaataaaatttagtagcctactgcatatttttaaacaaatcatggcattttggagcattctcatttatttttcaaaatttttttggttttggcagagaggagcaatcattttctttaaaaggataaattagactttagagagggaagaagagacataggctaattgtgagtttggtacactgaatacatgaataaagttccctttactaatgttttaattgtgctcagcacagattgcatgtagctctgttcacttcctttaaggggcactcagcacctgtgtttgaattatgggcaagtttcttacttatttgtgaagaattttaatatttctcataaattccatttargctattgggaatcttggtggaaacacacaaggtttgtaataggaattagaatgatcataatggcttttaacaaaatcacattcacagctagtaaactaaaggcttatttccaactggtataaacaaagtgtatattcatttaaaatgtatgaagcttttcttggtcaaaacaatggaagtgattttgtaaatagccacagcct

SEQ ID NO: 738536 - DNA, 512 bp, Homo sapiens
tgaatgtctgtatgcagattgaggactaccacccttagctctggtgacctctgtcctctttgagcagctatttctgatactgggttttgtccttgcctggcttgcttgacctttcaggtaatattgttctatccatggttccaagcttcactccctctctctccctgactgagcctatcctgatgatggaggaatttatacrtactgggagttactgtgactcttctccaaccttctctgtcttaatatttgtgattagttttctcaccttgtttctgaaacatggacctcagaattgtcctgtaaatgtaatctacagattagagtccagcttcttccatatattagggcatctgtaggactttttcctgaagtaattgacattcttactgcctgtgtacagtctaatataccactgagttcaaaacaaagctttaagatacatttttaatagtgtgaggtaagtagcatgataagaaatcaaaaggtggatgagagttggtacaggtgtt

SEQ ID NO: 738537 - DNA, 632 bp, Homo sapiens
gtgtactgaataattactgaagcaagggcagtccacgtgacctcttccatgtcacccgcttcccctccacagtgctggcagaagagcttcgggacctccatgtggccccactgaaaactgttgcttatggactactctgtgatgtcaacctttcacgggaaagacaggcagctcaggaagccacgttccatcttcgccaactactgggaagctccatggacagctggcaaatgaaatcaacttccatgttgcctctccctctccacctcctgtgcctccctgtcctcagctggggctgtcaggccaaatggtccctgaggcctcacgcaccatctattttcaacacacatcactgttttcctctgcaaagtgggacttctgttaggccctatagaatcaatayggcagccctgagcctaagacacaggcgttcactgcttccagcaaccaggtgtgcaaattagaacaagaaagattattgtgcattttaaaaaaaggtctttcctaggacttttttaaaaaccagagaacatgccttaggacatctaactatttgtgaagtatttattttagcatgatctccctgtgaggggtgcagtcagggtgcatttcacctttctaccactagacag

SEQ ID NO: 738538 - DNA, 632 bp, Homo sapiens
gtgtactgaataattactgaagcaagggcagtccacgtgacctcttccatgtcacccgcttcccctccacagtgctggcagaagagcttcgggacctccatgtggccccactgaaaactgttgcttatggactactctgtgatgtcaacctttcacgggaaagacaggcagctcaggaagccacgttccatcttcgccaactactgggaagctccatggacagctggcaaatgaaatcaacttccatgttgcctctccctctccacctcctgtgcctccctgtcctcagctggggctgtcaggccaaatggtccctgaggcctcacgcaccatctattttcaacacacatcactgttttcctctgcaaagtgggacttctgttaggccctatagaatcaatacggcagccctgagcctaagacacaggygttcactgcttccagcaaccaggtgtgcaaattagaacaagaaagattattgtgcattttaaaaaaaggtctttcctaggacttttttaaaaaccagagaacatgccttaggacatctaactatttgtgaagtatttattttagcatgatctccctgtgaggggtgcagtcagggtgcatttcacctttctaccactagacag

SEQ ID NO: 738539 - DNA, 599 bp, Homo sapiens
ggaacttaagagtgactgctaatggatgatggagggtttctctttgggataatgagcaagttctggaattggatagtggtgatagttgcacaattttgtgaatatactgaaaccatggaattgcatacatcaaaatggtgagttttgtcttatttgaaattataagttatgtaaattatatcttgatttaaaaaaaaaatgacaggagagggaagaatccagggcaggaaaggcaatgggagctctgtggtcaggcctggccatgggcacggtctaggggaggactcatgtgaagacagagatgctgccttgtccttcaagcctccttggtgagtcagcggtcctcttctgaagtacaggttaaggtcagaatatgtgtttataaggcctgcttcttcatacttgacccaccgaaagtacatgcccccacacactctctccaagcctgcaaatwtgtgtgcggatagggacctccaaaactgtaaagcacccatgaaaaaagtctaaggctgtgaagatctgtgttgtgctgcttggcatgcaaggaatggaaacttaccaagtgacttcaagaaaaggggggttttctcctgaggatc

SEQ ID NO: 738540 - DNA, 506 bp, Homo sapiens
ggaaggaattttatacttcatcgatctgaaaaatagctacttatcttttaatactcagtctaaaggtcatttccaggatgattttaactccatcccacacaatggacaatgcaacaggattgacttcactgttttagcatatctaccactttattgcactarattgttttctgctttttcctcagtgagtgtgaaaactcaatgagagaaggggaatatctccttcatttctgtacttctcagcacataaaaagagtattttttaaaataaagtattttagtcctagatgtatgtcctagagttttctacctttctctaggtttattatatcaataataaattgtgtgtgacataagacctgtatagaaatgtttacagtgacattgtttatatggctggaatggagccactgtaatttatggggaggggagcatagatacattttggtagaatcatacagcagaatgctgtgcatcactgagaaggaatgtattgaggctaaatg

SEQ ID NO: 738541 - DNA, 632 bp, Homo sapiens
tctaaaatgagaaataaaagtagtatttttcttaagcatctatgtgtatacttacatacatgtatagcctagaaccatactaaattacaacataatgtgtcagaaatactagttattatcgttaaaatttataatgtctatgtagacattataagacactatagacattataagaaggcaatataagaataaagaagaaaaatataaaggaagaagaaggcatgagggaaaaatgaaataattatttattttagtttctccactagctttgttttggtattgacacagtgactcawtttccatgtcatttcctgtagtctttctcagtttcaaagttgtattccactactggaacttttcatggaaatattattctaagctggcacccctcccttttgtttaagcagaatgtataacctgcacagaagaaaagtcagctgagaatggtaaagagaaactcaaatcgaataatgtcgtaggagacctagtgagaaggacatcgccatccactccacttgcacttctgacatcagcccttccatagccatctcccgcttgtctcgacagactccctaacgcttttctttttcaactgggaagtccctcgacatctaactctcgtcctatttaca

SEQ ID NO: 738542 - DNA, 585 bp, Homo sapiens
ccctggtggatattacttttgaaatgagaatacagtgcttaggaacagttccttctccatttttatacatacatttctaaaatgacttaggtcagcatatttccctccaccttctttggggataccttttcataaatttgtaatatagtttgatcatcttgttagaatctacattccttcctgagagcctctgacctcctaaatggttttctttaattgaatacatgatggttcattctttgygctgtgaaggtctataagttttgacaacgcctaatatcatatatctacaattacagtatcatggagaatagttatcctgctctgaaaattccctctgcttcacatagtcatccttcatcccctccctcttagaaaccatctttctatagtgtctatagttttgtcttttctagaatgagacatatttggaatcatacattatgtaaactttccagattgatttatttaactgagcaatgagcacttaagcttcctccgtgtctttttatgacttaatggctaatttcttttcattgctgaaataatatttcattgtatgaacgtaccaggtttttaaaaaat

SEQ ID NO: 738543 - DNA, 585 bp, Homo sapiens
ccctggtggatattacttttgaaatgagaatacagtgcttaggaacagttccttctccatttttatacatacatttctaaaatgacttaggtcagcatatttccctccaccttctttggggataccttttcataaatttgtaatatagtttgatcatcttgttagaatctacattccttcctgagagcctctgacctcctaaatggttttctttaattgaatacatgatggttcattctttgcgctgtgaaggtctataagttttgacaacgcctaatatcatatatctacaattacagtatcatggagaatagttatcctgctctgaaaattccctctgcttcacatagtcatccttcatcccctccctcttrgaaaccatctttctatagtgtctatagttttgtcttttctagaatgagacatatttggaatcatacattatgtaaactttccagattgatttatttaactgagcaatgagcacttaagcttcctccgtgtctttttatgacttaatggctaatttcttttcattgctgaaataatatttcattgtatgaacgtaccaggtttttaaaaaat

SEQ ID NO: 738544 - DNA, 607 bp, Homo sapiens
tctagtaatgacacagaaggatatgcataccacattggagtaaaaacggtaaaagaaagccattatgaaacaatcattcattgcaaaagtcaaagcaatgaatgcattgatgggctgaggcacgtgcactgagggagtgtagtgaagccctgggagccggatccaggaggggccaggggctcatggtgatcccagagaggccacagtcatcttacagaggtcacagcagtcccaagaggtcacaggcttcccatagaggtcacaacagtcccacagatatcatggccgtcccacagaggtcactgtgctcactctcagggtcagaaggatacagcttcccttaggtgtggggcaggaaagaaacatgaaacccagggctccagagcactgatttctgaatatatgaattgggtgtccagtaacatttaaacaaatattggggatcaccacamacttttcatctgactttgaattttaccagaagtgagtttattaaacatttaacatctccctgcaacctactgtcacatcaaaacacacaagaaattatattttacttcaagatgatcaagaatcatggtctactggtggctctgcaaactgtaca

SEQ ID NO: 738545 - DNA, 614 bp, Homo sapiens
tttacaatctttggcttgcagtgttttaggtagatggaatatgttgtgtatagagtgtgttttgtgtgtgtgtgtgtgtgtgacagagaggagagagagggaaaacgaaatgcaaactatttcataattatatttctgtcttgagcaagtgaaatgattcaaatcagactgtaggactggatgctgcttaactgtgattttcctgttcagtatatttcayatgatggctgatgtcttacctgttggatatgagcaaataaggcaggctttgtaaaaacttgccaactggcagtttgaccagacttcattaattgatttaatgggccacaaattatataaacccaggaacatatcccctggatttgctgtaaaacctgtcatattcattcggttgatacattttaatacttaaggtgaaccataaaactactcagaagtgaccaaaataccattttattctaaaaatattcagttggtgatgtcaaacacacgtgagctacttatttttcttttatgttaattaaaaatatataaataggtttctcatgcagagcttagaagttgccaatgtggaaggaaaatacatcttgcgactctcaaatcactaggctaaa

SEQ ID NO: 738546 - DNA, 614 bp, Homo sapiens
tttacaatctttggcttgcagtgttttaggtagatggaatatgttgtgtatagagtgtgttttgtgtgtgtgtgtgtgtgtgacagagaggagagagagggaaaacgaaatgcaaactatttcataattatatttctgtcttgagcaagtgaaatgattcaaatcagactgtaggactggatgctgcttaactgtgattttcctgttcagtatatttcacatgatggctgatgtcttacctgttggatatgagcaaataaggcaggctttgtaamaacttgccaactggcagtttgaccagacttcattaattgatttaatgggccacaaattatataaacccaggaacatatcccctggatttgctgtaaaacctgtcatattcattcggttgatacattttaatacttaaggtgaaccataaaactactcagaagtgaccaaaataccattttattctaaaaatattcagttggtgatgtcaaacacacgtgagctacttatttttcttttatgttaattaaaaatatataaataggtttctcatgcagagcttagaagttgccaatgtggaaggaaaatacatcttgcgactctcaaatcactaggctaaa

SEQ ID NO: 738547 - DNA, 635 bp, Homo sapiens
ggcacttctctctcttgctgccatgtgaaggacgtgtttacttccctttctgtcatgattgttgctttcctgaggccttcccagccatgcaaaactgtgagtcaattaaacctttattctttataagttacccagtctcgggtatgtccttaaagcagtgtgagaacagattaatagagaaatcaataacaaaaagatagctagaaaataccaaaaacatttggagtctaaataacacatttttgcaatatttcgaactagaggaaaatgaaaatacaacataatcataatttctggatatagtaaaagtagtacttagagggaaggctttagcattgaacttatatactaaaaaagaagaaagatctaaaataataatgcaagcttctaccttaggaaactagacaaagaaragcacattaaacccaaagcaggcagaagaaaaaaaataataaaagagcagaaattaatgaaactgaaaacaggaaatcaacagaaagaaaaaaatttaacaaaaccaaaagctggttctttgggggaaaaaaaattcaataaaatacataaacctgtagctaacctaaccaagaaaaaataacagaagatacaaatcattaatatcagaaatgaaaaaggga

SEQ ID NO: 738548 - DNA, 635 bp, Homo sapiens
ggcacttctctctcttgctgccatgtgaaggacgtgtttacttccctttctgtcatgattgttgctttcctgaggccttcccagccatgcaaaactgtgagtcaattaaacctttattctttataagttacccagtctcgggtatgtccttaaagcagtgtgagaacagattaatagagaaatcaataacaaaaagatagctagaaaataccaaaaacatttggagtctaaataacacatttttgcaatatttcgaactagaggaaaatgaaaatacaacataatcataatttctggatatagtaaaagtagtacttagagggaaggctttagcattgaacttatatactaaaaaagaagaaagatctaaaataataatgcaagcttctaccttaggaaactagacaaagaagagcacattaaacccaaagcaggcagaagaaaaaaaataataaaagarcagaaattaatgaaactgaaaacaggaaatcaacagaaagaaaaaaatttaacaaaaccaaaagctggttctttgggggaaaaaaaattcaataaaatacataaacctgtagctaacctaaccaagaaaaaataacagaagatacaaatcattaatatcagaaatgaaaaaggga

SEQ ID NO: 738549 - DNA, 632 bp, Homo sapiens
tggaaatgagaagatactcagttgtaatgaacgcatgacatatcaaattggtagaataaagttaagctgtgcttagaggtaattttgtggtcttaattgtatgtattagaatgtacatattaaaaaaataaaaacaacaatcaatcgtgtaagcaccagctctaattcctaacaagttagaaaaagtgcagcaatagaaagatatatgaaaagcagaaattaatgaaaacacatacaacagcaggaaacatctaatcttcctcaattatatttgtgttttcttctaatgcctttttttttttttttgacagagtctcgttctgtcactagtggcatgatctcggctcactgcaacctctgcctcctgggctcaagtgattctcctgcctcagcctcctgagtagctgggattgcaggtgcccgccaaaatgcccagctaatttttttgtatttttagtaragatgggcttttgccatgttggccaggctggtctcaaactcctgacctcaaatgatctgcccacctgagcttcccaaagtcaaagtgttgggattataggcgtgagccaccgtgcccagccatttgtgttttcttgatttcatgtgattagtgattatactgataactgcca

SEQ ID NO: 738550 - DNA, 441 bp, Homo sapiens
tacagtgtacagttcagtgagttttatgtattcacaaagttgtacaactattaccataatcataattataaaattttagaacattgtcatcaccccaaaagaaaccccataatcattactagtcacttctcattttcccccaatttctccagttgtaggaagccactaatttgcctccaatttttatagatttacctattctggacattttaaataagtagactcatacagtatggggcctttcrtgattggcttctttgacagcataatgttttcaaggttcctccatgttgtagaatcaatatttcattacttcttattgctgaatagtatttaattgtatatatgaactacattttacttatccattcataattggtagacgttttagatagttcccaatttttagctattatgaataattatagcattatacatgat

SEQ ID NO: 738551 - DNA, 612 bp, Homo sapiens
tcattattgaaagtggggtattggagtctccaattattattgtccaattgtctatttcctttttcatttctattagtttttatttgatgtattttgtggctcagttgttaagttcgtatatctttataaatgttatatcttcctgatggattattccttttatcattataaatatttcttactctctagtaacatttttgttgtaaagtctactttgtctgatattactatagccactttagctttctcatagttgcttttttgcatgatgtatcttttgccactcttttactttcaatctaattgtgtctgaatctaaagtttatctcctgcagaaagaacatagctggaatttattttttaaatccagcctgacggtctgctttttgattggattgtttaatttattcatatttaatgctatcattatagttggacttatgtctrccatttctcatctattttctgtatttcttatgcatttttcttttgttctttcttttcagctgtcttttatatcaaatgaataatttctagtatgattttttaatttctgtaatctttttcactgtattataaacatttattctactagtggttgctctaggactt

SEQ ID NO: 738552 - DNA, 566 bp, Homo sapiens
ctacaaattcaacacaatccccatcagaataccaccatcactcttcacagaattagaaaaaaacaattctaaaattcataaaaactaaaaaatggcccacatagccaaagcaaggctaagaaaaagaacaaatctggaagcatcacactacctgatttcaaactatactataaggccatagtcaccaaaacagcatggtactggtataaaaataggcatatggaccaatgtaacagaatagagaacccagaaataaacccaaatacttaaagccaactgaccttcgacaaatcaaacaaaaacataaagtggggaaaggacgcccttttcaacaaatggtgctgggakagctggctagccacatgtaggagaatgaaactggatgctcatctctcactttatacaaaaatcaactcaagatagattaaggacttaaacctaagacctgaaactataaaaattctagaagataacactggaaaaacccttctagacattggcttaggaaagcatttcatgaccaagaacccaaaagtaaatgcaataaaaacaaagaaaaatagctg

SEQ ID NO: 738553 - DNA, 600 bp, Homo sapiens
gttcttaatagagaatccagaatggtcctgtcaaaatatgttttctgcttaaaaccatgtaatagtttctcaccacctcagtcagaaaaaaaagtccacctccttaccatgactttcaaagcttaacatgatctggccacctayagtctctctaacctgtatctcctacttccctctctcatttattccactccagcaacaccagtctcgttgctattcttcctacacatcagacatatttccatctttgggcctttaaatctctgttccctatgactactgcgctcttcactcaaatacacagaaattcactcttccactaactacaagtccttacataaagtccttacactttttcaacagaattggcctgtgcattccaagccaccaacccacctgtcactcaaaattgccactaccctgccatagggtaactttctgatacactgtattattttttaatttgcttatcatttttataatttattgtttccctccctacccaaatgaaagttccatgcaggtaggtgtttttatttgttttgttcactaacagatagatgaattaatcatagaccaaagtaatttgttttatatgaa

SEQ ID NO: 738554 - DNA, 597 bp, Homo sapiens
cttacatatattaaatatataagttatgtttttataaaattttatacattaagttaaatatatatattacacattttcaaatacactaaaaaatttggaaagacactaccaacactgttaacctggcaaataggattagggttggaagtgacatgaaagggagatttactttttcattttatactcacctatgcttcatattcttgttttatactcttctgtctatattgtttaaattttatacatatacatttattaagattacaaatggcatgttctaaaaaataatactggtgtaaataacaagaaaggtaamgatatatgaacaatacatacaaagaagtaaaaactaattcaactaatttttccaatcatgaccattcacttataagacaaagattatttgtaacaactaggcattcttcaaggtcctgtcttggtctcctactttacaaccactctacattctcaggaatcttttttctttttttggatgattcctagatttttctttccctctccagccagtcacagaattcatagaaagcctcaaaccctctgtaccatcaaattaacacagcgaacaaagaatactgt

SEQ ID NO: 738555 - DNA, 607 bp, Homo sapiens
gttccaacagaattagcagaagtacacaaggcctcttgaggcatagtcttggaactgaccatcatcatttctaccatattctgtggcccttatgagtcataaggccagtttgcacccatctcttgatgggaggagctacagagtaacattgtgaagggtttcagtatatggartagtaaataactggatgcctttatgcaatctactatagaagacttttagaatttttgcttacactctcttaaaatgctataacagagatatctttctctgaaatgttctgttcatttcatgactactgtttttagaccactagcaaatttacattttaacccaaatatctcctagaattctaggttcatgtatccaacctacttttccacttggatatctagtaaacatctgaaacttaggtgaaggtctaatacccgtctccacctttacctttagctaacactaaccctcccatagtcttcctctttttagtaaatgtcactttcatcctccagttgcttgcattagaccttggagtaatattgagtcctttactttccctcactccttactgtccatttctaaattctgttggctatatttcagaatatat

SEQ ID NO: 738556 - DNA, 616 bp, Homo sapiens
agcctgcagaattaaccacacctctaattctatctagtggtcaaaacctagaaggtggaactaagacagaaaagtgctaccagcaaaactcaagggatcttgaggacttctgcttctgtccttgacaaaataaatggcatcaaactagaaatacatacaaattggaataaaaatgaaactacaatctctacagctttttatctaaaggcactttctagactgtggcatagaggggtaacccaagcagaacatgaaaatctcactgagcaaaggaaacggaatttgaactttgtgaaggctgaaacaraagtacagatgggaagttacacagagaaagggtgccagaaatctacttaaaggacccctggagtctttaaagaaagaccaagctgaacatgctgaggatgagagtccacaaggtcaggcaaagaaaaattaccatggagaaaacaattaccaaagagctgtaagcagaacaatccccagagctcacaaagggctggaagacattctagttcctcccaaccagaataaagaaacctcgctgaacatccatgacaatcagcagagaacccacaagggtcatgccttagtagaaaggctaaaccagtcctag

SEQ ID NO: 738557 - DNA, 613 bp, Homo sapiens
agtaagctagacacagcaaaagaaaaggccagtcggccaggcgcagtggctcacacctgtaatcccagcactttgggaggctgaggcaggcagatcacgaggtcaggagatccagaccatcctggccaacatggtgaaaccccatctccactaaaaatacaaacaattagctggacgtggtgatgagcacctgtaatcccaactactcaggaggctgagggacgagaatcacttcaacccaggaggcggaggttgcagtgagctgagatcacgccactgcactcccgcctggcaacagagcgagactccgtcmcaaaaaaaaaaaaaaaaaaaaaaaggccagtaaacctgaagctcacgacatagcaataaaatatacccaacccaaggcatagaaaggaaaaaggctagaaagtaagtgaacacaggctcatcaacctgtgagacattattttaaggagactaccaaaatgagagggaacagaaaaaaaaaatacttcgaaaaaagcctgaaagtttcatatttgatggaaactgtaaactcacaaatcaaagcagcacaatgaacctaaggcagatgctacactctgaatgtttgtgccccccaccaaat

SEQ ID NO: 738558 - DNA, 494 bp, Homo sapiens
aaaaaaataaaataaaataaatacataaagcttaaaatgcataaatttttaggcctataagcttgctatagtgggccagaaatttgaagctgtcttctactagccaaactcaaataacaaaatttgagtcataatgtccaaaatattacaatatcttacctctgccaaagagatgaaactattcagcaatgccaactatgtgatattcattttgtaacttatgaaaacattctataaaattattcatccaatattaacttgaatamgtgcaaaaaaggacagatatccttacatcacgtaaacctgttagtattcacctgtgagaactgttcaattctctcattcacatcaggtagcatccatgtatcctcaccccgaagtcgcttaagttctttacgcctttcttctttttcaaaattggctttagcctacaaccaaagaaaaaaaaaagacaaactggcaattgacccaactgggtttcacaaaaaaaggaa

SEQ ID NO: 738559 - DNA, 530 bp, Homo sapiens
tctttagagctggcaggcagggatggacgtttaagtctgctgaagctgctcccacagccgccccttcccccaggtgctctgtcccagggagatggaaattttatctataagcccctgccaggggctgctgtctttttttcagagatgccttgcccagagaggaggagtctagagaggcagtctggctacagcrgctttgctgagctttggaggtctccactcagttggaacctccctgtgctttgtttaaactgcgaggggaaaactgcctactcaagcctcaataatggtagtcgtccctcccccgactaagctaaagtgtcccacgtcgacttcagactgctgggctggcagcgagaatttcaagccagtgaatcttagcttgctgggttccatgggggtggtttctgctgagctagaccacttggcaccctgcctttagtcccctttccagggaagtgaatggttctgtcttgctggcattccaggcaccactggggtatgaaaaaaaactcctgcagctagctcag

SEQ ID NO: 738560 - DNA, 530 bp, Homo sapiens
tctttagagctggcaggcagggatggacgtttaagtctgctgaagctgctcccacagccgccccttcccccaggtgctctgtcccagggagatggaaattttatctataagcccctgccaggggctgctgtctttttttcagagatgccttgcccagagaggaggagtctagagaggcagtctggctacagcagctttgctgagctttggaggtctccactcagttggaacctccctgtgctttgtttaaactgcgaggggaaaactgcctactcaagcctcaataatggtrgtcgtccctcccccgactaagctaaagtgtcccacgtcgacttcagactgctgggctggcagcgagaatttcaagccagtgaatcttagcttgctgggttccatgggggtggtttctgctgagctagaccacttggcaccctgcctttagtcccctttccagggaagtgaatggttctgtcttgctggcattccaggcaccactggggtatgaaaaaaaactcctgcagctagctcag

SEQ ID NO: 738561 - DNA, 521 bp, Homo sapiens
aaagcggcagtggaggatttcttcatttttgatactctctagctgaacagtaattctgccctgccttgcctcacaactctcctggcctgggagaagagacatgtgtccctagaagaaattgaatatgactgactgatgggaacacaggtgactccttcttataaaccatgaaacaaatttgcgctttttattttcttatagttaagagaaaaccttatataaattggcatgtgaattacaagaacatggcagggcatgaaatttcttgaagaaaaattctttcttttgtcttgtaacacattatgaatttttttaaagaaagtaaaggtggatatattttaaactctgattattatatattcggtaktgctatttactgagacactaatatctattttgtctatttgttgaaatttgggtattctattggcagtggaaaaacatgcaccaagaacttataaactaaaaatgccaaattgccaattattaaagaagaactctctgttggagtgataggagca

SEQ ID NO: 738562 - DNA, 618 bp, Homo sapiens
gcatgcgatgagaacttagaatggaataggaaaacctagattgtagtgtgtgcaagaaagagtaaactgggcaggtctagatgctcaaaccctaaacacttttaagaaagccctgttttctgaactggattttggttggctccaagggaccaagctgttggaaaatcctgtctgataagagtgttttggcatgcctgaaaccttgagccacactcttcccatttgtccagataaattatggtaaaactgtgatttaggatgaacatctgctttttctatgggggtttgaagctcgagtaactgaagtcaatcacacaggaactatagccctgtaaagctaactctcaatgaaaaccctaaacactaaggctcacctgagcctccctggtgggcagaattttgcatgtgttgtctcacatcattgttggaagacttaagcacatcccatgcttctctccttggaaggagcacytgaaagcttagacctgatttcctccagactccaccccatgcccaccatatgccttttccctttgctaattttgccctccatcattttcctgtcataaactacaaccatgaatataacaatttcgaagtcttattagtccgtctgat

SEQ ID NO: 738563 - DNA, 590 bp, Homo sapiens
atgtgggatcttttcagactttcccctgtgtgtttcctcatgtttctgattctgatacgtatcctttaaaataaaactgtaattataattccagcactttccaaacttctatcagccattctaggaaattatcaaacatgacaggattgtggaagtgcccacgtttgtagccagccagttgatcagaagtgtgggtggcccagagaccccagaacttatggctggtgtctaagtggtggcagtgatattggggactgtgcatttaacccrtggagtctgtattaactccagctacttagcattggcagtgcattgcagtcttgcaaaggcactttcaagtctttactgaaggaatgaataaatatatgaatatattaaaaatagagtctctaaactttcagaaggaattggagtcttcaagcaaactatatatattttcttgtatgtagacagatttctaacatgaccactgagattctagtcactggtgtatgcatccttcccttggaatgtgggcaagaccttgaatatgaagagatagtcactctcttgattacgttataagacaaaagtgatgagagggtcactcc

SEQ ID NO: 738564 - DNA, 548 bp, Homo sapiens
tcggaccatattcctctaagccagttacatctaaattccgctcagagcagctctacctcctccctatgtttccaaatatctacataagttccgggactctgctcttctttagcaaccaggagacaagagttgctcctgcaaacagattgtgagaataacaaagagcaaattgtgacaacattagcgtatggtgaaacctgatgttatatgaagtctccaaaaaataaaaataaataaaaatgaaaacctctttttcaaacacacacccttgacagataaaataaaacttgaaaaagtaacagaattcataacagtgagcacttatacagtatttattcagttstttaaatgattttacttggagttactcattctgttctccccataaccccatgagataggtcttgtgaatatccctaattgtacaaagaaggaaacggagatctatcagtgcacagctgagattagagctcagggctctgactacagacgccacaatgttccattttccctacctaactaggcagaggtgcacaataaacataaca

SEQ ID NO: 738565 - DNA, 557 bp, Homo sapiens
caaactatatatattttcttgtatgtagacagatttctaacatgaccactgagattctagtcactggtgtatgcatccttcccttggaatgtgggcaagaccttgaatatgaagagatagtcactctcttgattacgttataagacaaaagtgatgagagggtcactcccgttatataaaactccktttcagaagactgaaaggagattcctgctagttttcaagaatagctcccatattgcgagaatgccaagtatctagaacctaagatagcctatgcggtttgagagagatccctagccagcaaccaacaagaaaacagtgatcttatcaccacgactgcaagaagctgggtttttcaataacctgaataagcctggaagcagactccaagctccagatgagaacaaggtagacatcttggtttcaagatttgaaacactgaggggaaaatcccaacacactgtgcctggatttctgacccacagaaactctcagataatgcatgggcattttgcctcactgactttgcactaatttgttataaaacactagaa

SEQ ID NO: 738566 - DNA, 665 bp, Homo sapiens
gaacatcagccctcacacatgagaatcaacacaagaactctgggaactcaaaaagccagggttcccgcttacctacaaacaaacacactacttccccagaaatggctcttagccacactgagatgtctgaaatgacagatataaaattcagaatctgcatggcaaagaaactcatgggaatcaaagagaaagttgaaacccaatccaagtatccagggttgaaacctaatccaaggaatctgaggaatccagcaaaacaatccaggaactgaaagactaaacggttattttaaaaaagaatcaaactgagcttctggaacttgagaatccacttcaagaatttctcggcccggcacagtggctcatacctgtaattccagcactttgggaggccgaggtgggtggatcacgaagtcaggggttcsagaccagcctggctgacatagtgaaaccctatctctactaaaaatacaaaaattagctgggcatggtggcgtgcacctgtagtcccagctacttgggaggctgaggtaggagaatcgctttaacccaggaggtggaggttgcagtgagctgagattgcaccactgcactccagcctgggcaacagagagagactccatctcaaaaaaaaaaaaaaagaaaaaaaagaaagaaaagaattt

SEQ ID NO: 738567 - DNA, 646 bp, Homo sapiens
ctggagtgaagttttcattttactgagcttggagggcagagagagggtacatacgttcttgcatccaatatcatagatcttgctcttctatgaaactttaaaagatttcttgaatagatgtttcttcatttgctgtatcacctacggaccatttccagaggcttaacattaaaaaawaataataattttcactagtttcactggtgatcaggtaaacaaaaatctttaagccatcatactgaaaatcaaaataataatgctttttgtttttccctacatatatgtcacatggataacatttttttatttctttgcacgtattgctattttgtgttgagaatcattttacatattgcaaatagatattagcaatttggttttttatgattatcaagtagatttttattttcctttttttattttactttttttgtgttgaatagttttgggggaacagatgtttggttacatcaataagttatttagcggtgatttctgagattttctgatgcacctatcactcggtcagtgtacactgtacccattgtgttgtcttttatccttctcctcctcccagtcttccccctgagtccccagagtccattatgtcattcttatgcctttgcatcctcatagcttagctccc

SEQ ID NO: 738568 - DNA, 646 bp, Homo sapiens
ctggagtgaagttttcattttactgagcttggagggcagagagagggtacatacgttcttgcatccaatatcatagatcttgctcttctatgaaactttaaaagatttcttgaatagatgtttcttcatttgctgtatcacctacggaccatttccagaggcttaacattaaaaaaaaataataattttcactagtttcactggtgatcaggtaaacaaaaatctttaagccatcatactgaaaatcaaaataataatgmtttttgtttttccctacatatatgtcacatggataacatttttttatttctttgcacgtattgctattttgtgttgagaatcattttacatattgcaaatagatattagcaatttggttttttatgattatcaagtagatttttattttcctttttttattttactttttttgtgttgaatagttttgggggaacagatgtttggttacatcaataagttatttagcggtgatttctgagattttctgatgcacctatcactcggtcagtgtacactgtacccattgtgttgtcttttatccttctcctcctcccagtcttccccctgagtccccagagtccattatgtcattcttatgcctttgcatcctcatagcttagctccc

SEQ ID NO: 738569 - DNA, 646 bp, Homo sapiens
ctggagtgaagttttcattttactgagcttggagggcagagagagggtacatacgttcttgcatccaatatcatagatcttgctcttctatgaaactttaaaagatttcttgaatagatgtttcttcatttgctgtatcacctacggaccatttccagaggcttaacattaaaaaaaaataataattttcactagtttcactggtgatcaggtaaacaaaaatctttaagccatcatactgaaaatcaaaataataatgcttttkgtttttccctacatatatgtcacatggataacatttttttatttctttgcacgtattgctattttgtgttgagaatcattttacatattgcaaatagatattagcaatttggttttttatgattatcaagtagatttttattttcctttttttattttactttttttgtgttgaatagttttgggggaacagatgtttggttacatcaataagttatttagcggtgatttctgagattttctgatgcacctatcactcggtcagtgtacactgtacccattgtgttgtcttttatccttctcctcctcccagtcttccccctgagtccccagagtccattatgtcattcttatgcctttgcatcctcatagcttagctccc

SEQ ID NO: 738570 - DNA, 609 bp, Homo sapiens
caagaaaagcttttttttttttttaaagtctattaccaatcttatttctgttcctcccattaaggtttcacctttagcaatgtgatacacttttgttctctttcttgaaatgctaaattctggcatctccaatgtgattggaacactttcgcagaaaattgcctgggttcccccaggagatcaactatctgtttcaaaaaagtggtttccaaacgtttacatgcatgaggttcttacatgtgagagggctctaagcatctgtcttgctggaccttacatctagaatttctgatccacgaggcatgcaaaggggcccatgaatctatgaatctgcatttcttttcttttcttttttttttttttggagatggagtctcgctctgtcacccaggttggagtgcagtggcacaatcttggctcactgcaacctccgcctcctgggttcaagcrattctcctgcctcaggctcctgagtagctgggactacaggtgcacgctgccacgcctggccacatttttgtattttagtagagacggggtttcaccgttgttgcccaggctggtgttgaactcctgagctcaggcaatccacctgcctcggcctcccag

SEQ ID NO: 738571 - DNA, 547 bp, Homo sapiens
tgggtctactttaagattttcaggtaggctcagtctggcattgaggtcagggctaatttttccccattacagagacgagagccttctgaatgctccacgcagtgcactgtgttggaatcccaatgaggtttccaggtracaatactttaatatagcaagagaagactgttcagtgctcatgccacggagctctgtgtgcactcctgggaagattaggaggctgctcccaagcggcctcacataacaacattcattatgttttaaaaattttgaaattcagacttctaaggacaaaggttttatgttgtcagcagtttgagtgtggatcacgaaagaattgtgtgggctgctatactgatttattaatttacaatgaaaaatttactgataaaagagccaggatattcacattgtcaagatcaggccattctctccctgtagccaaggtttggggtaggttaaatgacagtttactcattttcaataagaaatagctgtgaagcttttatgaccagtgaattatctcctcccgtgggaaggcgagtga

SEQ ID NO: 738572 - DNA, 648 bp, Homo sapiens
tggcctaattaaagtacagatacgttgcttccccatggtggccttaagcaaaataagctacgtgcttgtaatttcatagtcagatccctttttgctttaaatatgaaactaatacaatgatatctttagtctctgtatatcctgtgaacttatctttgtgtctgaaacataatagacactttagttttgttggccaaatgaagaaaaatrtagtaaaataaacatataatgcagagaaaatagaatgtgttgacttggggtgatttgactacttatgaggtatagacaatgatggttaattactcaaatatttagaactaatttcctccatgtctttccatctttaactcattagatttccccacaccctctctcatgttcattctaaaatgaaaaatggagagcagtattaatagccctgggtctgcggatctcctgccttctgacaacgtttatttcctttagaacgttttgtccatatttgctaaatacatagtgacaaagtaaatcaatgacacaattaactggcatcaatcttgagcttttttagttcatcctccaggactccttctacttcttatgaaaagggccgtttcaaagggaaagacatctgtcatgtgggcttatgttctcgcttcagtattgctg

SEQ ID NO: 738573 - DNA, 648 bp, Homo sapiens
tggcctaattaaagtacagatacgttgcttccccatggtggccttaagcaaaataagctacgtgcttgtaatttcatagtcagatccctttttgctttaaatatgaaactaatacaatgatatctttagtctctgtatatcctgtgaacttatctttgtgtctgaaacataatagacactttagttttgttggccaaatgaagaaaaatgtagtaaaataaacatataatgcagagaaaatagaatgtgttgacttggggtgatttgactacttatgargtatagacaatgatggttaattactcaaatatttagaactaatttcctccatgtctttccatctttaactcattagatttccccacaccctctctcatgttcattctaaaatgaaaaatggagagcagtattaatagccctgggtctgcggatctcctgccttctgacaacgtttatttcctttagaacgttttgtccatatttgctaaatacatagtgacaaagtaaatcaatgacacaattaactggcatcaatcttgagcttttttagttcatcctccaggactccttctacttcttatgaaaagggccgtttcaaagggaaagacatctgtcatgtgggcttatgttctcgcttcagtattgctg

SEQ ID NO: 738574 - DNA, 577 bp, Homo sapiens
cctagaaattgggcagaggtgagcaggggccaaggaagggaagcaagatagggccaggctgagctcaggaacactccccagctgtcatcatcatcaacccaagcccattctttctccaaaaaaaagcttaatgccttttgcagctgcaactgggcgggccaggggtccggaaatggagttcacccccgacccagagcaaccccagcctccctgggtgggaactgcgttgggtggagaatacagcttggcaggccttgagggctgacccctgctaatgaggaatgtcaggggcrccggaaaacaggagaccccagagagggcagaggcctgggacagagagggattgtggccaggagccctacccttgcacgggttcaaagctctcagcttatatggcatgcaggaagagtggacatggttctcccctacccactaccaacaagggactgaattaaagctgcatcaagaggaatgccagttagattttggggggacctagagggcataagacacaataatttgaagcagttatttggggatcctactttaaaatgtagatgccatatctatgggtgta

SEQ ID NO: 738575 - DNA, 658 bp, Homo sapiens
acagtccttatgaaggccaatctggccctgtctataaaaattatctcttcatatattcttctacccagcaattccacttccagaaatttgtcctatagatagacttacccaaatgaaaatggtatatgtgcaacgccattcactgcagcatttttttggaaacagcaaaagattggaaacagcttaaatgtttctatgatttaaaggcagtttttaaaaacctagttattaaaacatagtgcacacatacagtggaatagtatgcagctgaacaaaatgagaagactctttacctgccattacagaaagatctttacaatgtatcattctataaagaggctgaggccaaagccaaatccttactatggctaccagaccccaggtgatctactccctgttaccttatctcccaacacaacctccattcagtcacactstcctcttcccggcttcccaaacatctcaggtgggcccctgcctcagggcctttgcacctgctgttacctctgcctggaatgctcttctccagatatttgtctggccagcttctgtgcctctttcaagtcttggctcaagtgttcctcctcagagggccgggactgaccaactcccctttttaaaaatgtcaactcttcaatgcccccattcccaatcaccc

SEQ ID NO: 738576 - DNA, 593 bp, Homo sapiens
tcagggtggggaggaagctggagagagcactgagccagcatctcatgactcagccacttccacccagtcagcccggtggcatctccgctcccctgctctaaattccgattcggtgagactgctggaggctgagtcagtcccggcacggcacgagagctgtgtcccaaggggctccctgccagacaccctggcccccaatcaaggccagggccaggcacggggctggagaggtggcggggtgcaggagccaggctccgaggctacagcaagtcccrgcagagtggggcggcccagtgagatcacgtaagtgaacatgctttgtgagttatgaaaagctccctgttttcctcagtgggctcagggacctcattgcccgaggaagggactgggatgcaagtcctagctctgcccacctcatcgcatgacactgagaaaactcctttcccctcttggcttcaatttccttgaccacagaatggggccaacatctcccaaaggggttgggagaattaaatttaatgcatatgaaagcgctttgcaaactgtctagtgggccctatgatggtcagggtggtaggagaggagagtatgaa

SEQ ID NO: 738577 - DNA, 556 bp, Homo sapiens
ctcccaatatatttttgtggctcctcctcataaaaatttacttggaacccggagaatattattaaaaaaaagaaaaagaaaataaaagactctctcctgaggaaaaagttattccacccaccaaagttacaaaacaggaaataatggctcagtatgatcctggggacactcgggtgctcttttgaagctgtttwcaaatagggcggttgttcaaatccagaaacctgggtcacaaaatctaagtatgcaggagaagctgcctcctacaagagaaggagcctccatcctggcctgttggagcggtcttacaggagagtcatgaacatagaaatcaagtcttttctaatgtcaaaatcatagaccttagggaagaaggagctgaagagctctcctcactagtggctgcccacgaacgaaaccagctgcccagggtggcaatctgtaagagaacagaattaataaggaaaaaaatggcaccaattaatgtggattccatattccactttttacctatgaggccaaatataagctggtctttttcttgctggagtgaaca

SEQ ID NO: 738578 - DNA, 611 bp, Homo sapiens
atcttgaccaaaaagaaatgtcatttttatatggcaatttctatgagctccgggattgaattgagtcacatttggccgtggtaacattgaatgaggcaacatctgtgacttcacaacactgtagtgtcagtcctcagagatgcayaacagaatcacagcagtgggaaggctgacagaagtgtacctaagtcctggaaggaatttccctaagtatggacaattgtgtatcatcttagaaaagatcagatcatcatccatattatcaataccattaccgctttcagccgtagcatcaaagaccattcacacagtgcctaattttgataatactgataatactaggatagccctcttaatcaaaatacaaattcactcctacacattcaaagagcccagtctaagacattttagctgacatttgtaattttatttttacaatttttttatcatgggtctatttcttctctgatagctcttggatttctttgggatagttatctcattccctttgtcagtagtcttagtggaatagtaaagcatcccacttgagagctgaagaagtctttggataatctttcctcctttattctcctggattttgataatggtca

SEQ ID NO: 738579 - DNA, 591 bp, Homo sapiens
tgagattagtgcccttataaaagagaccccaagagctgcctagccccttctgccatctgaggttacagtgagtaaatagccactgatgaaccaggaagtgggccctcatcacacagctaatgtgcgggtgccttgctcttggacttcccagcctccagaactgtaagaaataaattcctattatttataagctatccagtttatggtactttgttagagcagcctgaactaagacagtcacagtactagcttatcaatcactattacaattcatgggaatttcaagatcttacaatggacatattagccaaattatcttatccctgtgtcaagtaacaggacttggtaaaataattatttctaatctataagaatgtaaaaagcatgtaaacatgtgcaatcatgtgtaacaggcccttgcatgagctgatattgttgctagtccyatcacatcatcttccacgtcaatccatgcagcaaaaacctcaacactatgaaaactggtaacagtcctaactgccagttttactgtgtgtctccattacccctgaagtgaatattgctttaatttcaaagatattgaactcttaa

SEQ ID NO: 738580 - DNA, 629 bp, Homo sapiens
actgtgtttgtgtaggttagatttggctgcaaagaagagaaaaactcaaagaaacagaagctcaagacaaggtaggcattcatttgttttgtaaaaagcctggagacagtgatccagggcaggtatcatagtaccatgatgtcatcagggacctgggttcttcctgtcagaggcgtgtgaaccagagtaactccatcttaaataggagctgggtaaaatgasgctgaaacctactgggctgcactctcagacggttaaggcattctaagtcacaggatgagataggaggtcagcacaaaatacaggtcataaagacgttgctgataaaacagtttgcagtaaaggagctggccaaaacccaccaaagccaaaatggtgatgagagtgacctctgggcatcctcactgctacactcccaccagcaccatgacagtttacaaatgccatggcaacatcaggaagttaccctatatggtctaaaaagggaaccacgaataatccaccccttgtttagcctatcaccaaaaagtaaccataaaaatgggcaagcagcagcccttggggctgctctgtctatggagtagccattcttttattcccttacattcttaataaacttgctttcactt

SEQ ID NO: 738581 - DNA, 380 bp, Homo sapiens
gcaccaatcaacactctgtattagctgctctggtgaggacatggagagtctttatatctagctcagggattataaatacaccaatcagcaccctgtgtttagctcaaggtttgtgactgcaccaatcggtgaggtatctagctgctctggtgaggacgtggagaacctttatgtctagctcaaggattgtaaatacaccaatcggcactctgtakctagctcaaggtttgtaaacacaccaatcagcaccctgtgtttagctcaaggtttgtgactgcaccaatcgacactctgtatctagctgctctggtgaggccttggagaacctgtgtgtggaaactctgtatctaactaatctgatggggaggtggagaaccttt

SEQ ID NO: 738582 - DNA, 638 bp, Homo sapiens
gtctttctcccattggctttattttgctcagcaaaataaaaacatcaacatcaagtactagatagggctttttcttgaaagctggttgcattaaagtgctctgcactgcacaggtaatctttatcaactcttgaaatatttttttgtccccaaatatagttaacttctttcttttataacataagactgcactaattatagggtagtggcaaaacctggctgaaatcagttgctctctttatgttattcccagaacacaggacaaattcccattcttaacagtgatttccttgtttataactatgagcttcagtgaatatcctccttcaaaatcagagcactgacctcatcacagagaaaaacaaacaaacaaacaaatacactctgcaacctacaaggttaaccctcaactagctcacacccattgaagaaatcttggctgtgtgcacaaraaatgaaatctatttcaaagcaatttaatacaaaaccattcaaaaaagttctccaataaccatcttctttaatttgaactgctaattgaacatgaagagtgaaaattaaacacctagttcgtccggtttaaatggtcactaagactgtataggcaatttcaaaatgggcactgtaactaaaagaaa

SEQ ID NO: 738583 - DNA, 624 bp, Homo sapiens
aataggagttgtatatatttaacttgtacatatgatgttttgatgtatgtacacatgtacctatatcaatgtatcagtgttcaccacaatcaggctaattaacaggtccatcacctcacatagtgttattttctaaagtgtagtttggtttatgagaaaggtgcctatactttatggaaataataaaaatcttctatgatttttttcactattgtgtgagtttgcaattggtgatatattgaccttacaggtattagggaaaaaattgagcagctttctaataaaacttattttcagatatttaacaacttaattaatattttctttaataaaccacttttgaatttttgattcatttaaataaagtgcagatacaataaagcacagtaagaataatcraaattgtaaatttaaaactacagcatacaatggcatgttatatgaaaagagatttttttctattgcatgaatgctagttgagacacattaaccagtccaaaataaaccttgaagaataaaatattattaaaaagcatggcagaagttcctgtgaaaataaaaactagctatgtctttcaaatttgtaaaatgtatgtaaagaaaaataattgttttttcttttaa

SEQ ID NO: 738584 - DNA, 653 bp, Homo sapiens
aaaggctacttattactagatcagtttttcttatttcacattaagatataatatttttacagtaaaaatttatttgtatcatgtaagctagaacaatgtaaattaaactatactggaattattttaggttaagtatacagttttaaaaatagctttctatgggaataagtgaagtcaaaggcagagttgatgtgatgacctatttttacagctaattttttacatggcatagaagaaacagggattgagaaaccatgcatgagaattttataaaagttatagcagaaaatacaaagtagaacaaatttccacttactcattttcaaatarccttttcatatttgtccagaagccttgacaactaaggctaatataatcttcaagtatgggaaaagaaaaataaaatctttggagaccaggaacaagccttttgttagttgcgtcctcgtgttattttagtattatgtgtagtgatcaccgaaattcactgcttctatttgcaataattaattaatcatttagcttgtgctttttatagtagatatcttaagtaacaatttaaaaattaaagtcatatacagtatttaaatagtcaaaaagttgtcttctatggttagaagttatggttaactttatgtgtcaacttggctagg

SEQ ID NO: 738585 - DNA, 540 bp, Homo sapiens
gtggcgcagtcttggctcactgcaagctccgcctcccgagttcacgccattctcctgcctcagcctcccgagtagctgggactacaggctcccgccaccacgcctggctaagttttgtatttttagtagagacagggtttcactgtgttagacaggatggtctcgatctcctgacctcgtgatccgcccacctcggcctcccaaagtgctgggattacaggtggaagccattgcgccyggccaagagtttgatttctaaggtcatgttggctgggttcaaatcccctgatccaacaagtattaggtttgtgacttgggttaagtttttcaaactttcaaccctagtttctcatctgtgaaatgaacataagaatgataatacctaaatcatattgtgtttcctagaatagtaacattaaaggatctaagaatggctagcacatattaggcacagaaaagtttaccattataaattgaattatttttaaatttacttacagtaaaataaactcctttaggttgtacggtactataattttt

SEQ ID NO: 738586 - DNA, 466 bp, Homo sapiens
ctgtgaagcatggaagagagcaaacagtatatttccagttgtaaattttaatcttgcaaattaaatactaaatttgtctgtggtttgtttttttgaagttttcacctctaacataaatatttattttttctctataaagacatgcagtaaaaaagagtaggccgggccgggcgtggtggctcatgcctgtaatctcagcactttgggaggccgacgcgggtggattacgaggtcaggagatsgagaccatcctggctaacacggtgaaaccccgtctctactaaaaatacaaaaaattagccaggcgtggtggtgggcgcctatagtcccagttactcaggaaactgaggtgggagaatagcttgaacctgggcggtggaagttgcagtgagctgagatcatgccactgcactccagcctggggacagagcaagactccttctcaaaaaaaaaaaaaagttatatg

SEQ ID NO: 738587 - DNA, 466 bp, Homo sapiens
ctgtgaagcatggaagagagcaaacagtatatttccagttgtaaattttaatcttgcaaattaaatactaaatttgtctgtggtttgtttttttgaagttttcacctctaacataaatatttattttttctctataaagacatgcagtaaaaaagagtaggccgggccgggcgtggtggctcatgcctgtaatctcagcactttgggaggccgacgcgggtggattacgaggtcaggagatcgagaccatcctggctaacacggtgaaaccccgtctctactaaaaatacaaaaaattagccaggcgtggtggygggcgcctatagtcccagttactcaggaaactgaggtgggagaatagcttgaacctgggcggtggaagttgcagtgagctgagatcatgccactgcactccagcctggggacagagcaagactccttctcaaaaaaaaaaaaaagttatatg

SEQ ID NO: 738588 - DNA, 429 bp, Homo sapiens
cggctagcgcatgcccaggatctggctgctttttagttgataatttttctcaatatctgacagggcttgagcccgcagctgggcagcatgaagcatgaagcaaggaccttcaggtccttgcacttggacttagatgtgagctgactctcagaattctcactcctcatgacattctctttactttccccactgaaatgamctttcttcttaattactgaggatggaagactaagaagttctggactacttgccagagacaggaacttctttagcaagctgtaattcttcaacagattttctgctctagccagtctgtcctctgctagtctctcacggacacaaaactcctgttctttctgctccaatctttcttctcttgctttgagagctcgctctcgctcctctaactgaatttcctttagtttcagc

SEQ ID NO: 738589 - DNA, 429 bp, Homo sapiens
cggctagcgcatgcccaggatctggctgctttttagttgataatttttctcaatatctgacagggcttgagcccgcagctgggcagcatgaagcatgaagcaaggaccttcaggtccttgcacttggacttagatgtgagctgactctcagaattctcactcctcatgacattctctttactttccccactgaaatgacctttcttcttaattactgaggatggaagaytaagaagttctggactacttgccagagacaggaacttctttagcaagctgtaattcttcaacagattttctgctctagccagtctgtcctctgctagtctctcacggacacaaaactcctgttctttctgctccaatctttcttctcttgctttgagagctcgctctcgctcctctaactgaatttcctttagtttcagc

SEQ ID NO: 738590 - DNA, 597 bp, Homo sapiens
tcaacacaatctctaacatcatgtaataaatggggaaaataagaaccataaagggaaagaaacctgcccaaggttacatggttagttaacagtagcactgtggtttgaagccaagtttcctgacttccagtttagtattcaaaaatggggtgtagtagctcaaataaagtggaaaaatgcagaaaatcctcaacactttgaaaatgttatttttaaagtagaaagcatacaaactgtttttgtatagaactgagttcttaccatgctttattctttccttccaargtccttctcagaaaagcctcattttcttagccaaattcccacttaggcaattacatcctgctcacataaactgtctttatatctcaattggactttgcccacttccgtctaatttgtcttgttcccctaattggctttgcagaattgctatgtgagcttcaaattgctgagcttcctctctgcactccagcgtatccttagagggtcattgaataaattacttttttttccagtgttctaaatagtgccctagtgccctgaaagagttaattcacctcagagaggtgagctgttattcacccaagaaccagg

SEQ ID NO: 738591 - DNA, 511 bp, Homo sapiens
cacggcttgattgcatgcccttgtaggggaagatacccgattccaaatccctgctgtaccttaactacctccatctgaaaacaggttaatccaccttcagatgatcaggaattaattgcatgcatccctgtaagtgcattttaatacataatcagaaamcaaagaagcagttttttatattgaagccctagaaattgtttagaatataacagaaatatgtcttagcctcattttttaatccaaatgtaaaaatacaaatagtattgaagagcatctctacccattgttcaatatacacccaaagttgggaccatttaagtcttctaaagctgtttgatttttaaatgaacatgaatttacttttcaatggatatctatcattgtcattaattgactcaaataataacattgagcacatattatacatcaaaccaaaaagcaaccaccattaaaaatatataatgagttatggctttgtaatagaaacttatattcttaataccaaacattt

SEQ ID NO: 738592 - DNA, 641 bp, Homo sapiens
caaaacaaaagcatgtactgggcatgtaggacttagaataaaaacactacaagatcatgagtcaaaggtttatttcctaaaacaaagaatatgttgtaaaatcagattgtacaataaagggcaatttgaccattgtatcaaaatttcagctttatcgagagagagcatttctatttgtgataaaactgaacaagttagaagaattgggcaatgcttttcagttttctttacagcctgcctgaaccttctctccttctcttatctgactaaagatatcccccttgggatgtcttaatctagaacatgagttggcaaactagggcgtaaggaccataaccatgcctcaaactaagaatggcttttgcatttttgaaagattacaacaaaaaaacagaagaaagattaccaaaaaacaccagactatacatggcccacaaagtctaaaatactagctgcccactgtaggaaaaaaatccctgaacccagtgtasaatattcttagactcctccctcttattttctcatcaaatccaaattactgtctgcctcttaatacctctgccacaagtcccttcttcttcatccttcttgctaactgttggttattactacattgcctcctgcttaatgttgttgtctgc

SEQ ID NO: 738593 - DNA, 622 bp, Homo sapiens
ccttcgggggatgtgattatattatgaggactccagtctcatgcatggaattagtgttcttatgaaagggcttaggttgaatgggacaccctgttggtcttctgtcccttctgccacctaaggacacagtgttcctcaactccagagaatgcaacaacaaggtgtcaacttgaaagcagagagaaarcgagaaagcagagagaaaaagagaaagcagagggcagccctcaacagacaccaatcctaccagcaccttgatcttggacttctcagccttcagaaccatgagaaataaatttctgcactttataaattacccactctcaggtattctgttatagcagcacaaatggactaagacagaaacagtaccagagaataggggtgttgctataacaaatacctaaaaatgtgcaagcagctttgaaactggctaaccggtagagactggaagggcttggtggtgcatgctagaaaaagtctagattgccatgaacagagcattaagggcaattctagtgaaggctcaggagaggagatctgtagagaacatgtcagtcttagagaatatctcagtggctatgaactgaatgttggtagaaatacggacagtaaaggccat

SEQ ID NO: 738594 - DNA, 622 bp, Homo sapiens
ccttcgggggatgtgattatattatgaggactccagtctcatgcatggaattagtgttcttatgaaagggcttaggttgaatgggacaccctgttggtcttctgtcccttctgccacctaaggacacagtgttcctcaactccagagaatgcaacaacaaggtgtcaacttgaaagcagagagaaagmgagaaagcagagagaaaaagagaaagcagagggcagccctcaacagacaccaatcctaccagcaccttgatcttggacttctcagccttcagaaccatgagaaataaatttctgcactttataaattacccactctcaggtattctgttatagcagcacaaatggactaagacagaaacagtaccagagaataggggtgttgctataacaaatacctaaaaatgtgcaagcagctttgaaactggctaaccggtagagactggaagggcttggtggtgcatgctagaaaaagtctagattgccatgaacagagcattaagggcaattctagtgaaggctcaggagaggagatctgtagagaacatgtcagtcttagagaatatctcagtggctatgaactgaatgttggtagaaatacggacagtaaaggccat

SEQ ID NO: 738595 - DNA, 609 bp, Homo sapiens
tgcaaaggtatatagaagacaaggacacaagtaaacaaacattgctccacatggcttccctggctcttcacagaggtacattacaagttatgtggtcaagatggcccacatggactaaggagtaatctggtgagatgagctcagaagtatagcctcattgatgctgcaatattgggctaagatagagccatatgagcactcaagagtccataattagtaatttaaaccatatgaaggaagtcttgctatgggccagscatggtggttcacgcctgtaatcccagcactttgcagggccgaggtgggtggatcaccagaggttaggagttcgagaccaatctggccaaaatggcgaaatctgatctctactaaaataacagaaattagccaggcatgatggcgtatgcctgggatcccatgtacttagcaggctgaggcaagagaatcacttgaacctgggaggcagaggttgcaatgagctgggagcatgccattgcactccagcttgggccacaagagcgaaactctgtctcaaaaaaacaaacaaaacatcttactatgtcataatcctacaattatctattctgtttcctgttcctcactaggcta

SEQ ID NO: 738596 - DNA, 609 bp, Homo sapiens
tgcaaaggtatatagaagacaaggacacaagtaaacaaacattgctccacatggcttccctggctcttcacagaggtacattacaagttatgtggtcaagatggcccacatggactaaggagtaatctggtgagatgagctcagaagtatagcctcattgatgctgcaatattgggctaagatagagccatatgagcactcaagagtccataattagtaatttaaaccatatgaaggaagtcttgctatgggccagccatggtggttcaygcctgtaatcccagcactttgcagggccgaggtgggtggatcaccagaggttaggagttcgagaccaatctggccaaaatggcgaaatctgatctctactaaaataacagaaattagccaggcatgatggcgtatgcctgggatcccatgtacttagcaggctgaggcaagagaatcacttgaacctgggaggcagaggttgcaatgagctgggagcatgccattgcactccagcttgggccacaagagcgaaactctgtctcaaaaaaacaaacaaaacatcttactatgtcataatcctacaattatctattctgtttcctgttcctcactaggcta

SEQ ID NO: 738597 - DNA, 620 bp, Homo sapiens
aactgactcagtaaactatggtacattcccacaataaaatataatgcagttatagaaaaggaataaggaagatctttgtatatcaagtgatctcttagatatactgttaaatggcaaaagtcaaaatatacaattgtgactaataaatgcagagcaaataactgaactactaaatcgctactttgtaattcctaaagaaatttttaaatcaagttaaaatcatcatcacatgaaactgttagaaaaaggttttaaatggaattttaaagtagagacattaggttgtcatcccctgaatccaaattttagtcataacatctactgagaataggaggaccaaacattatccagacctgatgttcttctggaggtctgacaggaaatcttaagtcatcatcttacattcgattttttttaactcttcttatttatcttaacaaatgccyataattggtacattctactccataacatatgcacttattgcacttattttgatacaacactatcaatgttttaattatatgccactgagcaaaattgatgctctagaaatatgtaccttatatcttctgtagtttcatgtagtttcctcctttcttgcttaaagattttcacca

SEQ ID NO: 738598 - DNA, 561 bp, Homo sapiens
cacatgaaccaaagagacatgcagaaattagatcttacagcagcagaatacacattattctctagtgcacatggaatagtctccatagtagaccatatgtaatgccacaagacaagtcttaacaaatataagataactgaagtcatatgaagtatcttttctcatcacaatggtattaaattttrtatcaataacaggaggaatattggaaactttataaatatttgaaaatccaaaaacattttccttaacaaacaatgggtcaaagaagatcaaaagaaaaatttaaaactatattgaaacaaattaaaatgaaaatacaatataccaaaatttacgggattcataaaaagtagttcaaagagaaattgtagtacaaaatatttacatcaagaaggaagagtgatctcaagtaaacaacttaatgttacacttcaaggaagtagaaaaagaagagtgaactaagcccaatgttagtagaagaaaagaaataataaataatagagcagaaataagaaatagaggctagaaaaacaatagataagatgaaaatagtcaagc

SEQ ID NO: 738599 - DNA, 561 bp, Homo sapiens
cacatgaaccaaagagacatgcagaaattagatcttacagcagcagaatacacattattctctagtgcacatggaatagtctccatagtagaccatatgtaatgccacaagacaagtcttaacaaatataagataactgaagtcatatgaagtatcttttctcatcacaatggtattaaattttatatcaataacaggaggaatattggaaactttataaatatttgaaaatccaaaaacattttccttaacaaacaatgggtcaaagaagatcaaaagaaaaatttaaaamtatattgaaacaaattaaaatgaaaatacaatataccaaaatttacgggattcataaaaagtagttcaaagagaaattgtagtacaaaatatttacatcaagaaggaagagtgatctcaagtaaacaacttaatgttacacttcaaggaagtagaaaaagaagagtgaactaagcccaatgttagtagaagaaaagaaataataaataatagagcagaaataagaaatagaggctagaaaaacaatagataagatgaaaatagtcaagc

SEQ ID NO: 738600 - DNA, 561 bp, Homo sapiens
cacatgaaccaaagagacatgcagaaattagatcttacagcagcagaatacacattattctctagtgcacatggaatagtctccatagtagaccatatgtaatgccacaagacaagtcttaacaaatataagataactgaagtcatatgaagtatcttttctcatcacaatggtattaaattttatatcaataacaggaggaatattggaaactttataaatatttgaaaatccaaaaacattttccttaacaaacaatgggtcaaagaagatcaaaagaaaaatttaaaactatattgaaacaaattaaaatgaaaatacaatataccaaaatttaygggattcataaaaagtagttcaaagagaaattgtagtacaaaatatttacatcaagaaggaagagtgatctcaagtaaacaacttaatgttacacttcaaggaagtagaaaaagaagagtgaactaagcccaatgttagtagaagaaaagaaataataaataatagagcagaaataagaaatagaggctagaaaaacaatagataagatgaaaatagtcaagc

SEQ ID NO: 738601 - DNA, 414 bp, Homo sapiens
taattagatctctgggtggcagggatcacatgacagcactcagctactaaaggcagtggggttatgtttctcataatggatagcagagtcaaagcagtaatcaaaagaatctgactcatagacctatggtgttggctagttgatcatggtgttgccagaagtgaaatagacaggaagtctgctacattcttatttaatctgcataagcagaaaatactactcaagtgagaaaaagtctaacttgaattaaraaaaaaacagagtcaacccctttaattaatccccagacttgatccaattcacagactcagaacccttgaataaaagggagactgtgacttctccaggaaggactcgcgtacactgtcaaaaatttatactgtttatctccccaccggcatttttgaaaggatc

SEQ ID NO: 738602 - DNA, 563 bp, Homo sapiens
tttctctcttcttctaatgcctcaaagacagttagtgctttctttaggcatcactcagctcactggtgccactcaggagttttaaaagtttactgtgtactagaaagaacctcagcaacagaaacattgcaaggtgttatgtaggaaaaacatgcaatttcttcttctaaatgaaaccatctttataaaatggctttagaattcctgtttaaacagtaagataaaacaaaagacttcttgtgactcatttcaaactcagactttttttttttttttttttttttttttttgtctacaagttgcttgtccttcccacattcaaaacatgaaagaacgtttctgtttagcaragtgacgggtcaaggaggtcagatataaatcttataggaaggatgggctctcaagtgtgattctcagtggaggggacacaagaacctctagagagtttttattaaaaactacaccctccctccctcattcttcaagtgatcacctctatccgagaaattctactgatcagagcagactgcttatatgaatgtggagacaagagaaaaaaagct

SEQ ID NO: 738603 - DNA, 600 bp, Homo sapiens
aaattctttttgcctacagccacaaaatgtgtagagtatctacaaatgcccgggttttaagattaaaatagttccatgcagttctctggccctaactcataagatgaattacatcaaaacaggtacaagtaaatacaagttttaactaggctgtgcaaaacagatttctaacattagatgttcttctttgcggggrgaagggataatggtgactgcagctagaggccaatacttgcaacagaatttataggctagttttttaaatgcacaaaaaaacaaaatcgggcataaatttagaagaataagagataaaaggtaaattctcaaaatcagaacagagcttctaaaaaaattaaggaaacaaacatgcacacaatagttcctactagttcctgcaaaaaccaacctaaaagtgtcaattacactgaaaagacactacctacattaagggtttgtttagtgctttattttacttaggaagatgcaggccctctttttaataaaacatcaatctgtcacagaaagagtaaaaatggatcacttctgcttgctatgaagataatgtgaaatcatctttgaggaaccagcaatgttaagagt

SEQ ID NO: 738604 - DNA, 597 bp, Homo sapiens
tgctttaatctatcatggtggctacggcaatatacaacaggtatcactgaaaaggacaaacccagcgcatgccactttcagagtcttagtctaaatcattcccttacatacactgctttgaatgagtagtcatgtatttcgtttgttattaactcccctgttttctcagtcacttctaaccctctggctttaatgcttgataccattttgttggccatgacattggctcccctgggcctactctctaactgtcctcgggccttggaaaacttgtccatactgagctgtctcaccaccagggagcaactcaccaggcctgacagagaaaacataaaatattcctccctctctatttacctggtgaactcctaatcatccatccttcaagatcacctcaagtgtccctgtaggaaaaattacctgaccccmctccaaaagctgcttctgctatcccaagggactctaacatagattccatgtgctgcataaatgctagtttactaatcattctcctcccactaggctatgaatcccctagggtaaagattgtgtcttattcatctcttctcccagttgtgacatatacttaacatttac

SEQ ID NO: 738605 - DNA, 572 bp, Homo sapiens
agcaaggtaactctggacatctcctacacttagtcaaaaagtgaagatgagatgggattacttcaacaggaagggtatgtagagcaaaattccattaaggattaaactctgagaaacagcaacacaaaaaggatgggcagaatgaatactgaggtagcaaggggctacagaattgggagtgtaacaggacaagagaactttgagaagaaacaggcagacaatagcgtcaaacttatagaaaagtcaattcataatcaaatmtaataagaatgctttagattaggctactaaaaaatccttaatctttgagagaattatgtcacttactttaggttaacagttggttaaagagggaacaaaaggtacggatgtggagccacatacagaggaatcatttgaagaaactggacggtgagaggaaaaaggaagactttcatattaatttattcaacagtatttattgagcactggacactaggactgtggtaataaacacgagggccacaatccctatcctcgtggtggttttattttagcagcaataaattcagaaagaaacaaggccaagaact

SEQ ID NO: 738606 - DNA, 566 bp, Homo sapiens
tgggctattgctggggccaatctaggagggcttcttagggagttagcatcattgctgactgggagctggatagcaaacctatggtcagagctcttcaaatgcagttaaccatcaagtctggagaataagttggaaattgaaatatatgcaaaaaatatagtgtgtgcctatacctgggggaagaaaacagggatactggatgggaggatgtatagaattggtcagtacacagtgtttaagatcataagacctggtcttagctggggctgggtttgaattctgactccaccacttacaagcaatgtgcccttgggcaagttyctgaccctcactaagactcaattgccttatctgtgagtagaactagtaatagagcctcccccataaagaggttgtatgccagaaacaaatatgcatatcaaagcaagcactgaaaattggcacaaggaaagtcctcagtaaatgggagcccttgtttttcactgagatgggtcaagaaggctctcctgggggtatgttaaggctgcaagagtctggacaatgatctcggagttggagtggagaac

SEQ ID NO: 738607 - DNA, 628 bp, Homo sapiens
actatattttatgtaagggaagataagttcaatgaacaaaaagaagacaaaatgttaaggaggccttctaaaaatacttaacaagaacaattctattgtgttggctttctatgacttctataattatacttgctacctcaatgcaagagataggaaagaaagaaaaagtagctctgactatgacagtagcccttagttgactaaaatgtggcagcagtcattcctgagaacttaagaatagcagtaacatcattatctgagatttgaattcacttcaggcacaatagaaaatatatttttttaattttctggacatcttaggaggatattttagatcagaaatcatgttgaggaattagacattaagccccaggacaaagccattcacatgtcaatctttgttgtcatctgtcctattgccaacacagrcctcaacattatcaagcggacagagggaaagaatgataatgtggaaatgatgactatattttctggaagtgttaaagattgcagagatctttcctggaattgctgaatggtttctatctccttaatgagcaacacctttttaggaaggcagtagttgatgtcatctggactgtcgagtcctattaaagatgagatcagt

SEQ ID NO: 738608 - DNA, 628 bp, Homo sapiens
actatattttatgtaagggaagataagttcaatgaacaaaaagaagacaaaatgttaaggaggccttctaaaaatacttaacaagaacaattctattgtgttggctttctatgacttctataattatacttgctacctcaatgcaagagataggaaagaaagaaaaagtagctctgactatgacagtagcccttagttgactaaaatgtggcagcagtcattcctgagaacttaagaatagcagtaacatcattatctgagatttgaattcacttcaggcacaatagaaaatatatttttttaattttctggacatcttaggaggatattttagatcagaaatcatgttgaggaattagacattaagccccaggacaaagccattcacatgtcaatctttgttgtcatctgtcctattgccaacacaggcctcaacattatcaagcggacagagggaaagaatgataatgtggaaatgatgactatatyttctggaagtgttaaagattgcagagatctttcctggaattgctgaatggtttctatctccttaatgagcaacacctttttaggaaggcagtagttgatgtcatctggactgtcgagtcctattaaagatgagatcagt

SEQ ID NO: 738609 - DNA, 415 bp, Homo sapiens
gggactgaatgttcagtaaaaagctctggaatgattgggtgaccggttacccaggtgggtggtgactacccatctctgatgagggttatcctgaaggtaccttagattgctggacttgaataggtaaaaacaagagtgaggtgacccytcactccatcaccgccacagtcagcccagaagggtgcaagatctgggcggaggagactgccccttcagcagagtcctcctccctgcctgttcttgcctgccaggctgcaatgcttctgctataggccatctccaagaaactcgaaatgaactgaaaatcatactgcttgaatgaggagctgggggtgaggtggcaaagatgtcagctcaggaaattcatacttggtcattttgagttggaagcctggcacactactgtcttactggt

SEQ ID NO: 738610 - DNA, 530 bp, Homo sapiens
ctgtcgaagagaagcttcttactggaaactccacgttgcctttttaatgaaggaagatccttagggaatgatctcatacacagtctttggagaggctggagtgggaggtgggtgagagagaagtgatgagggctcattttgtctgtgcacagcaagagartgctactgggaaaatgttgactgagttaactgctcaattcagcatagaatgatcatcttttcctagttttaaaaaatattgggatggattttttaagaagggtcaatcatattatttatatcttggtgtagtgtttttgagaggaaaagtagaaaacagctagttgttgaaggtgggaaaaatgtgagaaaggggagcagtgttgagatgatatctatagtatacagtaaggtgtgagacagtggtttctggttacagcaaaggggcctgaggaagcaggaagacactatttcggtatgacctaaagtagaaaggtgattagaagagcttattaagtgccagttgggcatcatttgttagcataatatag

SEQ ID NO: 738611 - DNA, 603 bp, Homo sapiens
gtgataaaataaatataaaagggaaattgtctagtgagcccctccaaatacttacttacaaacgataggtgttcacagcttcagcatgttataatcctcccaaggtacaaagtacaatgacccatcagataaattgctggagacataagtgacccggatggcaagggctaaaagactgtgtttggagcagtagcttagagtctgtccctctggtggctcatggctccccaccagaatgtacaatttattctggcatttcagtaatacaccttatggttagcacatgacttaggttttccatcatttctgatgccctttcttttgcctctttacgtaggtgaatgatgtctcatttcatggccaattctttttgaatctcagagattcttagaatgtaagactttgtaacagatctggcagagagcctgcttacaakctagggatagagcccacccagaataatgggctaagggtgataatagggatgcagttctggacgatttctgagactgcctaaatgcagaccaggaagcaagtgggtagcaaaagaggttcttagcagtcaaaagtatgaaccatagcgtattaattctggaaaggctt

SEQ ID NO: 738612 - DNA, 633 bp, Homo sapiens
ttggaatacattctagaaacatttattacaattaaaaatatatatactcttgactcagtaattctactcttgggaatttgttccataaaaataaaagtttcactacataaagatatatttttaatgatatttgatgcaacattgtttgaagtggggggraaaaagataaaaaaacactgaacaaaaaacattcaccaattgaggaaaggctggcaaaattgtaaccattcacaccataaaatagtatgctaccatgataagtaatcaattagaacttcaacaagatttcactgacgaaaacgagatccagaaaagtctgcatatcagtcgagaatgtgtttgactgtaaagaaaagaaaactcactgatcatggtttaagcaaattggggtttattttggaaatcccaaggtcagcagttgctggtattaattcagccactgaaaatgctatcaggcactcagcctgatatttccatcatgccaccattaacattacagcttttatcctcacatgtgtcccatcatggtccaaagatgatattgtcatttcaggttttatttccactttccaagatggatcaagagaaaacaacaacaacagccaaatttatcccatttattaagaaagaaaa

SEQ ID NO: 738613 - DNA, 443 bp, Homo sapiens
tcttatatgactttctaatgtcccactaaacacttatttagataaaacgccagctaatagttatccgatcctaaaatctaacttcattttaaatcagagcattttttaaactaaagatatattagtccccaactcttccaaaaacacaaataccttataaactgagggaagagtaaacatagttttgttctgaacatyaccaaaaacattttaggatataatgtcaccatagcaatgctgcttgaggtgtctgagttactaatcaaaacacaaacacacctgtatcaatctgcatttgttgctcacatgttcctcatgactttacctatagatgcaagtatttatctactcacgacttctagtgtaattatgcctatatatgtacatgctgaatatatattgcattattataaatcactttccttctattctgcattatacaa

SEQ ID NO: 738614 - DNA, 599 bp, Homo sapiens
tgaataaatgctgttggtatgatttattagaaggtagcaaggatttcaatacaactacaaagagtgagagacaagtagggcaagataaagctgatgccaaattggacatccttactttgcctcctaccttttccttacatttcatgatcctaatggtgatggtgatgaggagaagaaagatattgctttctatttacactaagatttgcacttcatagcatatttccatggtaattatttaattcacccttccaagcaaatatattcacagaataatgttttggtcaacaattaaccacayacaggatggtggtcttttaagcttataatgccataattttacagtaccttttttatgtttagatacacaaatacttgccattgtgttataattgcctgcagtgttcagtactgtaacatgctgtacaggtttgcagcctaggggcaataggccatactatatagcctaagtgtacaacaggctatcccatctaagtgtttgtaagtacattttatcatgttcgcacaacaatgaaatcatcaagtaacatatgacagtatatgacaaatatacaatatgtgtgtcttgtccccatttt

SEQ ID NO: 738615 - DNA, 567 bp, Homo sapiens
aaccactgaattttacactttaaatgagtggattttacacatgtaatttatatcccaataatcatgttaattaaaaaaattaattggccatcaagtgtgagtctacttttggactttctgctctagacaaattatatatttcattttatatatcattttatatattcaaattatatatattcatctgtatattcaaatgatatatatactatgtctctctatrtatagatatatatatatcaattaactgcacatttatttagttcctactgtatgtagacattctacataaagggaactaaaacatgagagaagagcaagatccttcatcagaagtttacaaagtagtaagggagagagctacctatacagatcttttcagtgcaatgtgataaatattagtggacatgggaataaataagaggtagttacatgggaatagataagaggcgtatttacttcagcctgatggcaatgaatggggtagcgagattatccttgttcaagccaccaccatctttcacttggaccacagcaacagcctcctaatttagatacacatttcta

SEQ ID NO: 738616 - DNA, 626 bp, Homo sapiens
tgcttttgcacctttgtaaaaaaaaataataataattggctagggtagaggagaatagagaatggactgctaatggatgggaactttctttctggggtgataaaactcttcaaaaattagattatgataacagttgcactaccctgtaaacattccaaaaccactgaattttacactttaaatgagtggattttacacatgtaatttatatcccaataatcatgttaattaaaaaaattaattggccatcaagtgtgagtctacttttggactttctgctctagacaaattatatatttcattttatatatcattttatatattcaaattatatatattcatctgtatattcaaatgatatatatactatgtctctctatgtatagatatatatatatcaattaactgcacatttatttagttcctactgtatgtagacattctacataaagggaamtaaaacatgagagaagagcaagatccttcatcagaagtttacaaagtagtaagggagagagctacctatacagatcttttcagtgcaatgtgataaatattagtggacatgggaataaataagaggtagttacatgggaatagataagaggcgtatttacttcagcctg

SEQ ID NO: 738617 - DNA, 568 bp, Homo sapiens
taaaataactggaaatatgctctaggctagtgtttttgtgtagaacatctgattttttaagaacaggttagtaatatgacattaagcaggagatgcttatatttataagaatatcaggggcactaaatactataaaacgttttcaattttccaaatgtatccataaaacaagtacaagatgttaataggtatcctaaacatctcacttttcttgaaaaagtctaaaactgaggtactacagagtgcagcccatatacagcacagatacacattgatacagttatatatgcacaagtacatgtgtgccatatattactcagcttggcatatgagtatcagaatatcctcaagatttttagmcctgatagcagtttatctaataaaagtttcaattattaaacagaatgtttagcctctttgtcagaaacatttgcctttgtgttacttgcatatgggctgcattcaggctgcagacaggctttgtaaggcctgcaccatggtttaaaagtgcccttccagtttcctctgtatcaacctggctgactgtatttatcctatctgcctggat

SEQ ID NO: 738618 - DNA, 670 bp, Homo sapiens
acctctgaattctattttgacacctgcatcccacatccaaatatgagacctattctggactatgcagcaagtggtaagaagaaaggagaaactgactgcccatagccaagcacttgctcattcctgctgatgcagatggaattcttgctataataattataattgtatttaacagcaataaatagtcacatgtttaagtgacagtggaattgtgactattaacatttggttttcaacaaatccacattgttggaggtggtagtagagagaaatctaaagagttacaagattgtattctcaattccttagtgtctataaattaaatcttatgcaaagaccacaattactctgaatttccaaataggaaagatgaattattgcagcggcttattcagacgcagagtgcaggcatctgcaggtgaacttcctggcaagtctgggagagtcctcatgttgcatcagygatctaatagcttattgagtaggaatggacttgacagatgggggaacacccatgcctgctaaatgacataatggctccctaatgcaacgatctgccataagttagatttccagagtcatacttaggagtaaagacaaaaagagttttgttttgtttttgttttagaataacctacttgttattgcctcattttgcatagtactggag

SEQ ID NO: 738619 - DNA, 638 bp, Homo sapiens
gagaaggaatcaatatgtaaagattggaggaaaagcgttccagggacagggcatagcatgtgcagaggcgcagcatgtgcaaaggaaaactggctggtgtgactggagagtagaaagcagggggagagagtaggataaatgacattagacaagcragcaatggcttggttatgtaggacctggcaggttattgtaagaaactgagatttcattttaagtgtggaacaaagcccctggagggatttaaagccagacaatgatgtgatatgatttataagctttctgccactccagtccaattgcatgtacttattgcaaatttaaagttctggaagaaaaattagctccaagtgagagctgcctgtgtacaaactgtattaaactctacagatttttttctctgggagaatggggaaattcttttctaacagccacatcttgacaaggcaagtgctttttgaaagggttttgcagtattgaaattgccaaagactcctggaaattttacccttgatgttatggttaagcagagagtttctgaatgacttgctgagcttcagtgaaaagcaacagccaggaaaggcaggtgacctttctttgcgaatggagataaaccaatgcatctgccaagggctgtg

SEQ ID NO: 738620 - DNA, 622 bp, Homo sapiens
accaaaaatcaataccaacaagatatgtaggaaacaaaatatttggaaactgacaacacagttctaaagaacccatgggccaaagaagaaatcataggggaaatacacagtattttgaactgaatgataatgaaaatgtaacatatcaaaatttgtagaaaacaaagcagtgcttagaggaaatttatagctttaaatgtttayagtagaaaggaagaaaggtataaaagcgatgacccaagtttccatctttagaagctagaaaaaaaaagaacaaattaaacccaaagtaaagagaaggaacgaaggaatttttttaagtcagaaatcaatgaaatagaaaacagaaagtcaacaaaaacattaaaaataaacaaaagttggttctttgcagtgtatctgcaaatcctgatacactgaaaagatgataactataataaacaactctatgtcaatacatttgaatgcttagataaaacagacaaattccttcaagaatacaatttaccaaaattgacacaagatgaaattaaaaatctttaatagtgccatatctattaaagcaattgaatgtgttatcaaaatcctcataaagaaaactctagtacaaatggtttcatgg

SEQ ID NO: 738621 - DNA, 638 bp, Homo sapiens
ccccaccggccaatgttgttaggaggattaaataagacaatgtatataagatggctacttagcataatgacaagcccatagcaagcattagtcatatagctatttttatgtttataattgcctcaaaagcccatagttaggattcagcaaaatgtatacacacacacacccaacatggttcttgacatacacagtaataaatggtaatgctcatgttctgtaagaacacaatttaaaatgcaatatgagccattctccttacatacctcagggagctttctcacatgactgtgctcctggccacatttctatgtgccattatagcacatacytaggtctatctcagacatatatcaaacacttcacaaatctctcactctgaataaactctaacaatgtttctcaattgccagaaatcacaaaaatagaaataatcatcagaattcagatctgcaatgagaattctggtaaacatgagtactttgatgtggcactttgggttgttgaaagcactaaatgactagtgttgaggatgctagccacgagctatttccagccctcgttgtatttcctggctttacctggatgggatgtgtgctgaaagcagatttgttacacatgccttacaaataattatg

SEQ ID NO: 738622 - DNA, 643 bp, Homo sapiens
acttgtattatacatacagctccaataaatttagttacctggattcgaaatccaaaggattaaaagcaatatattatgtttgtgcaagggaagaagataggatggaaacctaaagggcaagcaaggagtgacagcttctcagtagtagggaagagacaaataaaacaaaagcaaacagaactttaaaaacagcactgggggcatctggtattaaaacagataatccacatacttcaaaatcataaatcacagargtacacaggatgctaatttatgttcaatatactgagccttaatcatcaaataaaagaaaaatgatactcagtatgctttagaaaagcagtcacattaaatattctaccagagttactaaataatggcaagtttagaggattaattgggataaacttgtatgaaattaacttctctatgatgctggattactgaagactcactgaaaatagctacactgtttggctttcagccatttgtttattgctgcaaatccacaaattaatcttgtgttccaaaacagagcacattccaatcaactccaagatctcagcaggttttcagaactctgggtaaattgaggttcttacaatttcaaaaccatgtatagaaaattctcagttggccaaaa

SEQ ID NO: 738623 - DNA, 606 bp, Homo sapiens
aaatgcctggtgacatatttggagtgacgtgtatatgtgattgtgattagaagaaaaaaaatgtcaaaaataatattaaaatgcatattaatttactactaagaaatatattgaagtattaaactattgacatcagttaaatgaaagtgatgaaaataagggtgttaactgtatcattctctccactttctgtatgtttgaaatttttcataataaaaagtaaaaaatgtcttggggaaatcaggcctagactagaccaagggtgagatagtgaaggttcacagccagttgactcatctctgccctaaaatccaaagagatgaggcccaaggccaggtggctgcagagggaactgaaaggaagacygtgaacatgcaaaggaagggcgctgggcccgggcaagcaggggtgatggcgagagaaaggaggagtccaaaatggctgaggtttggagcccagcacaagaggagaacaatggaattgtcagaaaccggcctctccagaggaggggctggttttgcgggaatcagaatgtgttcccttatcaacattttgagcttgagaggccagcaggacaaccaggtagaaaaagaacctgaggtcacc

SEQ ID NO: 738624 - DNA, 632 bp, Homo sapiens
taatagtgtataaagaaagataagcctacagagactaaggaataggagagcactaaaaagctgcaagaaaataatatttcaagaagggaaaggaatccacaatgtcaaatgctatagaaaaattaaggactgaggctctctttcacattcagaacaagcaggcaggggatgactttaggtagccagctttctgtggagtggctgggttagaattttaatcaccgtggattgaggagtgtcygggaagggaagaaatggatacaacaaatagacaattccatgacaaagattggctataaaaggggagatagagtagataaaggggtgcaaggggaagatgaaggttttgttttgtcttgttctcttttaaattggaatggtagaagcccatgtacactcagatgagaaggatccactggggatgaaaaggtgaaagatataagaaatggaagaaattatgcataaagtaagcatcccaagaggatgagagtgaatggggtccaggacacagatgaaggggtcacgggaggaaaaacctcttctatcttaacctgagggactagaaatggatttgtacaaatggactatatatatgtatgtgtatatgtatacacacatataaaaatatatat

SEQ ID NO: 738625 - DNA, 632 bp, Homo sapiens
taatagtgtataaagaaagataagcctacagagactaaggaataggagagcactaaaaagctgcaagaaaataatatttcaagaagggaaaggaatccacaatgtcaaatgctatagaaaaattaaggactgaggctctctttcacattcagaacaagcaggcaggggatgactttaggtagccagctttctgtggagtggctgggttagaattttaatcaccgtggattgaggagtgtctgggaagggaagaaatggatacaacaaatagacaattccatgacaaagattggctataaaaggggagatagagtagataaaggggtgcaaggggaagatgaaggttttgttttgtcttgttctcttttaaattggaatggtagaagcccatgtacactcagatgagaaggatccactggggatgaaaaggtgaaagatataagaaatggaagaaattatgcayaaagtaagcatcccaagaggatgagagtgaatggggtccaggacacagatgaaggggtcacgggaggaaaaacctcttctatcttaacctgagggactagaaatggatttgtacaaatggactatatatatgtatgtgtatatgtatacacacatataaaaatatatat

SEQ ID NO: 738626 - DNA, 623 bp, Homo sapiens
gagaaaatgaaggagaaaagcccatatctgaagctcatggtcagtctcctggcatgggggatagaggcagcaggatagaatctcttcctaaggaactggggcaatgcggtagcttgagccctagagcaagtgtgatgtccgtttgctagaacagaagtgtgtgaatagagtgggcaggctgccaggcagaactggcaccgagagatccagctatggactgatggacacagagtaaccgcccygagctagggctgaggattaggtaactccaggtgtgtagaagctgcacagaggtggggatggtgccgaggagtgtggtggccattgagctgcacccccagggtcaaccttcaataaagaactggtggttgtgctgcaaagcatttccaggatctaccccacctttcagggcaaggctgtgctcttcctgagaagccttcaaacaatgtctgagcagggcaaggggactagaatctggacatttcttcccagcacaggactcctctgatagatgatccttctcggacactcattgttgggttggctgaaaagatcagatctgcgttgctctctgagtctctccctgcccaggcctggtcactgccttcctcccttcttttcac

SEQ ID NO: 738627 - DNA, 562 bp, Homo sapiens
atatgctttcatttttcttgggaaaatacctaggagtaaaatggctgggacatatggtgagtgaatgtttatttcagaaagagtcagtgggagtcctagagtatacaaaccactttacattctcacaggcagtatatgaaagttctagttgttccacagctttgccagtacttggtatagtcagtcattttaatttttagacattcttatgaatgcatagtagtagcttgtgattttaatttgcatttccttaataactaaagatgttgagcatttttgagatgcttatttgccatccaaatatgttgaacatacataaatgatcaaactcttaccattttaaattgggttgtctttttgttatcgagtttygagatatatacaggtgtttgtgtgtgtgtgttattgtatatcactctcagatatgtgatttgcaaatattatctcccagtctatagttttttattatgttaatactgtctttcatttgtgtgtgcaatttattaggttttgtgcaattcatttgttttgtgcaagtacactctgatgttcacacaaggat

SEQ ID NO: 738628 - DNA, 553 bp, Homo sapiens
tgtcactttctagttactttactacatcttaccattatttacattgttaaggttgaggttgtaacttcatgttggaaatatcataaaatggtgtgctattaacagtttcttcccaactcagcattcagcgcagtcatgttggtagatcgaaatcagccattgagtttatatttataccatgaaaatttgcaaatactacaatatagggcttgatttattgttttgctgattatctaggyttaataaaattgtggaaaagatgttcgtgtagattaaacttaaatgtgtgacatgtctatatctgaaacactacaaataagcattgtgagtactatgagtaaatatttttccagcatttgagaacaataattcaattcggcaaaaaaagttgctcacattattgacaaatgggtgaagtccagacatgcatctttgttgttttactttgatatttcttgttaagataaacaaaagtatcaactaacattcttgttggaactatatttgtctgtcaattgaatccatattttgtctagggatacaggagtttggc

SEQ ID NO: 738629 - DNA, 553 bp, Homo sapiens
tgtcactttctagttactttactacatcttaccattatttacattgttaaggttgaggttgtaacttcatgttggaaatatcataaaatggtgtgctattaacagtttcttcccaactcagcattcagcgcagtcatgttggtagatcgaaatcagccattgagtttatatttataccatgaaaatttgcaaatactacaatatagggcttgatttattgttttgctgattatctaggtttaataaaattrtggaaaagatgttcgtgtagattaaacttaaatgtgtgacatgtctatatctgaaacactacaaataagcattgtgagtactatgagtaaatatttttccagcatttgagaacaataattcaattcggcaaaaaaagttgctcacattattgacaaatgggtgaagtccagacatgcatctttgttgttttactttgatatttcttgttaagataaacaaaagtatcaactaacattcttgttggaactatatttgtctgtcaattgaatccatattttgtctagggatacaggagtttggc

SEQ ID NO: 738630 - DNA, 553 bp, Homo sapiens
tgtcactttctagttactttactacatcttaccattatttacattgttaaggttgaggttgtaacttcatgttggaaatatcataaaatggtgtgctattaacagtttcttcccaactcagcattcagcgcagtcatgttggtagatcgaaatcagccattgagtttatatttataccatgaaaatttgcaaatactacaatatagggcttgatttattgttttgctgattatctaggtttaataaaattgtggaaaagatgttcrtgtagattaaacttaaatgtgtgacatgtctatatctgaaacactacaaataagcattgtgagtactatgagtaaatatttttccagcatttgagaacaataattcaattcggcaaaaaaagttgctcacattattgacaaatgggtgaagtccagacatgcatctttgttgttttactttgatatttcttgttaagataaacaaaagtatcaactaacattcttgttggaactatatttgtctgtcaattgaatccatattttgtctagggatacaggagtttggc

SEQ ID NO: 738631 - DNA, 553 bp, Homo sapiens
tgtcactttctagttactttactacatcttaccattatttacattgttaaggttgaggttgtaacttcatgttggaaatatcataaaatggtgtgctattaacagtttcttcccaactcagcattcagcgcagtcatgttggtagatcgaaatcagccattgagtttatatttataccatgaaaatttgcaaatactacaatatagggcttgatttattgttttgctgattatctaggtttaataaaattgtggaaaagatgttcgtgtagattaaacttaaatgtgtgacatgtctatatctgaaacactayaaataagcattgtgagtactatgagtaaatatttttccagcatttgagaacaataattcaattcggcaaaaaaagttgctcacattattgacaaatgggtgaagtccagacatgcatctttgttgttttactttgatatttcttgttaagataaacaaaagtatcaactaacattcttgttggaactatatttgtctgtcaattgaatccatattttgtctagggatacaggagtttggc

SEQ ID NO: 738632 - DNA, 569 bp, Homo sapiens
aacatgtcttgtagaaaacttttcctgggttccatggtcctcttctttgttctgtgggaaggatcagatgaaacagaggtgaaaagactccaggagagttcctaggtctgctgtttactgactgccaactaactagcattgtgtaaggactggtctgtttggcttaaatgtactgggtaggactggaatacatsctggtcctactaccacaaagtacatttcctaaaagatcagagttttatgctttatttttcagttatactaaatggatggtcaacgctaagccacagccatgtgaatgccagtaacaagctccacttagctgctcatgtggtcatcacaaatagcataatctgaaaacgtccctacagccagagctagacaattcttgttgacatcggttatccttacaaactatagactgtgcctgatttatctgtccagtctgtacttaactacttcttcatgctctgcttacacatttgcagctacatgattgaaatgacagtgtgaataaaaagccaggggttcagtctaggtcccggtgctcactgcacagaaagcccatc

SEQ ID NO: 738633 - DNA, 673 bp, Homo sapiens
gaacgtgtgtgtgtgtgtgtgtgtgtgtgtgtgtgtgtctttatggtagaatgacttatattcctttgggtatatacccagtaatggtattactgggtcaaatggtgtttctgttttcagctttttaagaaatcaccacagtgctttcccacaatggttgaactaatgtacactcccgccaaccatgtataagcgtccccttttctccacaactttgccggaatctgttatttttctactttttgatagcatccattctgactgatktgagagggtgtatctttgggggttttatttgcatttctctaatgatcagtgatgctaagctttttattgtatgctcgttggtcacatgtatggcttctttagaaaagcgtctgttaatgtcctttgtccactttttaatggggttgttttttccttgtaaatttattttaagttttttataggtgctggatattagcccttcgtcagatgcatagttttcaaatattttctcccattcagtaggttgatacagatagttgatagtttcttttccagtgcagaagcttaaagagtttaattagatcccatttgtcaatttttacttttgttgtgattgcttttggcattttcatcatgaaatctttgacagttcctatgtccagaatgatgtttcctaggttatctt

SEQ ID NO: 738634 - DNA, 545 bp, Homo sapiens
tgaacaccacaagaagtatatactgtaatgattcttaagtctctttccaaatggaactaaagccattcatctgggtgactatcactgaggaaacagcaatattgaaacatttcaaggacctctgaacacagggcaggattaacactgatactcagaaacccaaagtgcgatcatggctccttattaaagtggagacattggagccaaagaatcatgagttcttgccaatgcccagctcaaattggagccaccagctctgcaggcatattcgatggtcatttctccattaccaaagtgtataattggatttgacatattaarcagttgtaataataatccccacactggctccttggcctgtggccagcacagtagagatggccaaataaagggcgctgaaattggttacccatccctcctccctgagtcaagaaagcaaataaaaaataacattgcattttcaggcagatgatggtaaccaatgctacccccaagtgtctaaagaatgaaggagtgatggtctctgttatatttccatttgatag

SEQ ID NO: 738635 - DNA, 661 bp, Homo sapiens
tgagaagttcaacaatttacggagaaaggggtgatttgctgcttgttatttcttacaataggaaaagctgtaactccaggattactcaaaacaactgtcacaatctgtacaagaaaaagtaaacttattagccgggcatggtccccgcgcggggtcccagctcctcaggaggctgaggaaagattgctcgagcccaggaggtcaaggctgcagtgagccatgaccgtgccactgcactccagcctgggcaatacagtaagaccctatctctaaaaaaaagagccacgtgcagtggctcacgcctgtaatcccagcactttgggaggccaaggcaggtggatcaccttaggtcaggagttccagaccagcctgaccaacatggagaaaccccgcstctactaaaaatacaaaattagccaggtgtggtggcatatgcctgtaatcccagctacctgggaggctgaggcgggagaatcacttgaacccgggaggcagaggttgtggtgagccgagatcgcacctttgcactccagcctgggcaacaagagtgaaacgccgtctccaaaaataaaataaaataaaatacaaaagaaaagaaaaagaaaactccagtagctgttggtggatgctatgcgcaagtaccgacaatgcaccgtgtgat

SEQ ID NO: 738636 - DNA, 661 bp, Homo sapiens
tgagaagttcaacaatttacggagaaaggggtgatttgctgcttgttatttcttacaataggaaaagctgtaactccaggattactcaaaacaactgtcacaatctgtacaagaaaaagtaaacttattagccgggcatggtccccgcgcggggtcccagctcctcaggaggctgaggaaagattgctcgagcccaggaggtcaaggctgcagtgagccatgaccgtgccactgcactccagcctgggcaatacagtaagaccctatctctaaaaaaaagagccacgtgcagtggctcacgcctgtaatcccagcactttgggaggccaaggcaggtggatcaccttaggtcaggagttccagaccagcctgaccaacatggagaaaccccgcctctactaaaaatacaaaattagccmggtgtggtggcatatgcctgtaatcccagctacctgggaggctgaggcgggagaatcacttgaacccgggaggcagaggttgtggtgagccgagatcgcacctttgcactccagcctgggcaacaagagtgaaacgccgtctccaaaaataaaataaaataaaatacaaaagaaaagaaaaagaaaactccagtagctgttggtggatgctatgcgcaagtaccgacaatgcaccgtgtgat

SEQ ID NO: 738637 - DNA, 661 bp, Homo sapiens
tgagaagttcaacaatttacggagaaaggggtgatttgctgcttgttatttcttacaataggaaaagctgtaactccaggattactcaaaacaactgtcacaatctgtacaagaaaaagtaaacttattagccgggcatggtccccgcgcggggtcccagctcctcaggaggctgaggaaagattgctcgagcccaggaggtcaaggctgcagtgagccatgaccgtgccactgcactccagcctgggcaatacagtaagaccctatctctaaaaaaaagagccacgtgcagtggctcacgcctgtaatcccagcactttgggaggccaaggcaggtggatcaccttaggtcaggagttccagaccagcctgaccaacatggagaaaccccgcctctactaaaaatacaaaattagccaggtgtggtggcatatgcctgtaatcccagctacctgggaggctgaggcgggagaatcacttgaacccrggaggcagaggttgtggtgagccgagatcgcacctttgcactccagcctgggcaacaagagtgaaacgccgtctccaaaaataaaataaaataaaatacaaaagaaaagaaaaagaaaactccagtagctgttggtggatgctatgcgcaagtaccgacaatgcaccgtgtgat

SEQ ID NO: 738638 - DNA, 629 bp, Homo sapiens
cctttcaaactctgctgctgctttgccaactgagtttatgtaatattctaaattttttgttgtcatttcagcaatgttctcagcatcttcaccaggagcggattccatctcaagaaactagtttctttactaatccataagtagcaatttgtcatttgttaaagttttataataatattacagcaattcagtcacaacaccaggctctatttctaattctagttctcttgctgttacatactcagttacttcctccactgaagtctttaacccatcaaagtcatccatgaggattggaatcagtttcttccaaactcttgttaatgttgctgttttgacctcctcmcataaatcacgaatgttcttaatggcatctggaatggtgaatcctttcagaaggtttttaatttactttgcccagattcatcagaggagtcactacgtatagcaactatagctctatgaaatgtatttcttaaataataaaacttgaaagtcaaaattattccttgatccacgggctgcagaatggatgtcatgttagcaggcatgaaaacaacattaatctccaccagagcttttgggtaagtattcatgggagcattgtcaatgtgcagtaacattttgaa

SEQ ID NO: 738639 - DNA, 580 bp, Homo sapiens
accaatgaaaaaagaaaaatcctagaaacaaacacatacacacatgaactcttcattgataccaaaagtgacattgtggagacatgggaaagggtggtcttttcaatacatgatactgggataagtggatatccctgtgagaagaaaatgtaactktactcctccattctaccatacaaaaaaaaaaaaccaatgtcaggtggatttgagaccaaaatgataaagcttttagaagagtacaggatattattaagtttacagggaaaggaaacatttctgttttgatttttaacagaaagcaagaagcacttgctattaaaggtgaagacagatatttttggctatgtgaacattaaattattttcctcaaaatgtatcaagggagttgaataacaagtcatagaatagaaatggtatttgcaattcatagagttaattttaaaagtgcaaaggcagaatatagacaccacatagtagaatatatcgaaattgccaacagtcaaattaaaaattgattgtcctcattattcatcagagaaatgcaaattaaaactgtaattacacatcactatacacccac

SEQ ID NO: 738640 - DNA, 620 bp, Homo sapiens
gaggtaaatcacactgggaaaattgaatcagctcagtagctctcaaaatatggaactctttaacacccagcttattattctgattcccatgaaaatttcttggccgtgaggaggaaatttgtgtcactaaggcagaaaggtacaccatccaacatatttagggctctcctccatcattgtgtaccatgagggcaagcratgataatcaagacatggccattaactgaaatcaatctgaaaggggatctgaaatgaaaactcttgaaatatattatttccgttgtcttagtctgtttgtgctgctataaagaataccatagactgggtaatttataaagaatagaagtttatttttcacagttctggagggtgggaggtccaagatcaaaatgccaacatctgctgtctggtgagggccttcttgctgcatcctcacatagcagaaggtagaaaggcaagaggggacaactgttgtgtcctcacatggcagaagagcaaaagacaacaaaccctgtcttgcaaatgtttttataataacattaatccattcatgagggcataggcctcatgacctaaacaccttctgtcaggctccacctgccaacactattgcattgaat

SEQ ID NO: 738641 - DNA, 620 bp, Homo sapiens
gaggtaaatcacactgggaaaattgaatcagctcagtagctctcaaaatatggaactctttaacacccagcttattattctgattcccatgaaaatttcttggccgtgaggaggaaatttgtgtcactaaggcagaaaggtacaccatccaacatatttagggctctcctccatcattgtgtaccatgagggcaagcaatgataatcaagacatggccattaactgaaatcaatctgaaaggggatctgaaatgaaaactcttgaaatatattatttccgttgtcttagtctgtttgtgctgctataaagaataccatagackgggtaatttataaagaatagaagtttatttttcacagttctggagggtgggaggtccaagatcaaaatgccaacatctgctgtctggtgagggccttcttgctgcatcctcacatagcagaaggtagaaaggcaagaggggacaactgttgtgtcctcacatggcagaagagcaaaagacaacaaaccctgtcttgcaaatgtttttataataacattaatccattcatgagggcataggcctcatgacctaaacaccttctgtcaggctccacctgccaacactattgcattgaat

SEQ ID NO: 738642 - DNA, 591 bp, Homo sapiens
ttgtgtttagcctttttactgtgcttaaaggcaggcttttgaggagagaacacttttcactcaaatttttacatcggaaactaataaaggccttagcacattgtagatacccaaatgtctactgaataaatgaattaatgaatgcgaaactacttactgattaaaccatctcagtaaaaacaagacaaaacttactatgttctagacaccaaataggtggcctgacattgttctcttttttgctattttgtgtgtgtatatgtgtgtgtgtgtacatacacatatataaaaaatatatacatatatgtgtatatatataacacatatatacacatcagagcttattaaaaataaatggaaatttatccaacttgcaatcaagtaaattttgccagtttttcttagttctccaaattcaacctgtaaggcactttttwaagcacctttctatttaacttttcaaaagaaggatatcccttttaatgggaaatctgtatttatcataaagtaaaacacaatgtgctcaacttaatttgccttctaagaggtccattttgtcatcaatattggccagtagacaagatagactcc

SEQ ID NO: 738643 - DNA, 616 bp, Homo sapiens
atgggaatgctaagctgtaaggcacatgtacaattagtcatactaccatgctctattacactgcagtactatactcaatatatgtgagaagtgctaaggcaaaagagaggaaagcaatattaattccacatgacatttgagccaggtttagaagggttactacaaaatcatccggaggcagggcaagaaccttytaaagagaaggaacgtaagtttgggatgaaagaagcccagtgagagggagtattattattaatatttagttcaatttgccaaggtagcatatgacatcatgtactagatggcagtaaagaaatgctgctgtctacaatggagacacacccccaagttaaacctgagtaaacctggctccctctgtgaactgtcacccttgaataaacgaatactgcctgggtcctgtggcatcttttctgggcacaaaattttattttaaaggacattgggaagctaatcatgaagcagcagaaacaaaagctgtctacattcccctgctgcaaaaaaaaaaaaagaaagaaaaaaaaagaaaaaggggctccgttagaggagatgttgagtctaagaaaacaaataaaagttgttctgaaaggagaggcaa

SEQ ID NO: 738644 - DNA, 638 bp, Homo sapiens
tggcaaccatggcaggcagaatggggagtatgcctccagacagtaattcctttcaaactggtttataggaactcactgagcttgctgatcgacctctgagaggcaaagtttctgaattatgaagtactgattatataaacttagacagagacatgcttcattatttaataggactgtgtcaaaagcctactattaggatgatgtgttgggtgtggaacagggtctcttcctgccaggaacactggtgatttcactccgtgttcaggctgatctttgaagttgaagacaagcagaagaatccttctaaaatttagccatgcccataggctgggagggacactgctccattcagaggcagcaaagcacattactgtatctcctatagagctttgagcagtccagtgtacatggagaaacttagtaaatgttgttgaattartgaatgaacaaatcaatggaccaagtcaggggtaagtcttacatttgtcatctaggtgattaagaaaggaaaaagtatctgtttcaagaggattacaatctaactgtactccaatagtaaaatttactcttttggaatctgaagacattcatgagtctttgcatcttatttcctgaattctaacttcccttgcctttat

SEQ ID NO: 738645 - DNA, 613 bp, Homo sapiens
cagagtcggcctcctacagcctctgcttgctcactctattcccaagtgcaatctccatgtggccctgcaaggcatttggcatcctcctcctgtgagctgtgagtaaatgtgactactaaactgctgttaatctcatctgtccattgttgggtatcatgttcagccatctcattctgtgtagggtggggaatctctccctcacaaatggggtgaacaagaagtgatcaaaatggggtgtcaccctgggtttttgaagcagtgactatttaccaaccagtaaagaagtagttcrgtcttttaacaatcagcacatctgtatttgaaccagtatggttgtgatgtgattagatcattcatcagggtggatcccttctgaatggcctagtaccatccctttggtgataactgagttgtggctctgagttcatgcaagatctggttgttgtttaaaagagcatggaacacttgccctctgactccacccctgcttttgccatgtgatgcacctgcacccccttcaccttccaccatgattttaaacttctgggggccctcaccagaaaaagatgctggcaccatgcttcctatacagcctgtggaaccatgagccaat

SEQ ID NO: 738646 - DNA, 546 bp, Homo sapiens
ggaacccattcttggagtccagcttcttagaaacttgtctatttccctgaaacttttggctatatttccacaaaaaataatctctcaaaaattttcaaatatttggcactggcaattcagaaaaagtccagcgacgggcaaagctggacaggcatgactaaactttctcagaactcctggatttcaactaagcagtccaagaagtcagcaaaagctaggcttctgtcctccccatcatcttctgtgytctttttgttttctttgcacctctccactcacttccttctttagtatgattgtggcactaataaaaactgctaagttgccattgttgagatatgctaggactatctggtatctctggttcctcaggttttaattaactctccctgaggtgttaacagactgtattcaagtccttctcccactcacttcagcttatggatcctgatgcagaaatttctactctcactttcccactcacagtttggagcaggcaatgatgccagtaggttgagttggaggggagtgatagggttggagagt

SEQ ID NO: 738647 - DNA, 565 bp, Homo sapiens
gactttggtgcctttcctagaacaggccctcagtcagtaaatgttttctgagcataagagtgaggaattgagtgggtgcaggaatgacagagaggggtgtgaatgatcacaagcaaaggcaagtttcagttgcagggggaatgagtttcagggggcacagcaaagggtgtgggcatgtgcrtgtgtacatgtgtgtccaaggacctgtgccagtggtgggtgggtgcaagcccctttaaaagctacactctgttattatcttccctgtggagtgatgtgactactcacgtttccatccatcctatatttctcatggctgccacaacatagtaccttcaaaagaaataatcgaatagacattcttttgaagaaagtgttataggcttagccaactcccataactcctttctaataccagtaacctaggttgagagggtgttggtttcaattcaatgggaattgatttgagagcgaatcatcccgtggtcagagcccccggaatcaatctgtcctctcatctcacttttgctttctctttcttctcattatctgttaggatgaaagt

SEQ ID NO: 738648 - DNA, 634 bp, Homo sapiens
tggaagagttagaaagaatttctgtgaagaagctggttctgagaagtctcacaatccaaatgggtgtgtaatccctgcaactcgggaaaaccagacagaaagggtggatagcagcatggaagaatcatgattgctgagcggctgtatccccctcataaggatgggacagatgggatgggagatgaccgtaaggagagaccacacaaaaagattcctctgagattaattaaactgggggttttaaccagaaaaacagtcatgaaatcattgacttgatgagatgattttaaaaagtaattagaaatcaaacctggttttaaaggctatgaagaaaacaactcagctcaaattggaagggtaaggcaaaaacaaagtaragacctatatgtgaaggtggtggcaaatgcttcacctgccaagtatctcactccagttgtccacactctggacaggagcagctccctgtgctccacattttcaggagaaagtaaggggaaagacttgaatgagtcagaatccaggactagactgtttctggagaacctgactttggaggtttctggcaggagtagtctaagcagagatcaggaattttatttatttgggggtcatctttagatgaccaagtttgtcc

SEQ ID NO: 738649 - DNA, 643 bp, Homo sapiens
gcgcgttgtgtgtgtgttgtgtgggtgcgtgttgtgttgtgtgtgtgtatatgtgttgtatgtgtgttcaccctgttattatcttcaacacacagtggtatagctgtgtgttgtgtgtgtgtgttgtgtgtgcgtgttgtatgttatgtgtgtggtgtgtgttgtgtggtgtgtgtgagttttgtgtgttgtgtgttttttgtgtgttgtgtgtgtgtttgtgtgttgtgtgtatttttttgtgtttgttgtgtgtgtttttttgtgtgtggtgtggtgtgtggtgtgtgtgtgtgttggggaaagggggttaggaataccytacacccagggcatttccactgcccgtcactggttgctggtgatcagatggacattgacttacatcgggttttcagaatcccaaagagcataacatctcatgcatctctattcaccaaattcaagttttcaggtttatcagacaaggtcttgttcttttcttttaatggttcagggataaccttaacctcaaatagctaacttgtcaatccaccccaaaatgcaaatccttaagaagttagcctgggcgcttgtctcaagaaaccacagtactttttccccggcattttaatgatacaagaattctttgatctggagcttt

SEQ ID NO: 738650 - DNA, 570 bp, Homo sapiens
ctcacttcatgtctctgtgtcacactttggtaattctcacagtatttcaaactttattgtcattatatctgttacggtgatctgcgatcagtgatctttgatgttactattgtaattgttttgagccaccactaattgtgcccatttaagaaggtgaacttaatcaataaacgttgcatatgttctgttaataatcaataaacttaatcaataaatatttgcatatgcaataagcatttgyatatgcaaatgttgcatattgctccactgactggccgatcccccacctctctccctctcccagggcctcctgtttcttgagacaccatgatattgaaatcaggacagtcaataacccaacaatggcctctaagtgttcaaatgcaaggaatagtcaaggtctctcactttaaatcaaaagctacaagtgataacgtttagtgaggaaggcaatgtccaaagcccagataggctaaaagctaggcttcttatgccaaacagttaagatacacatgcaaaagaaaagttcttgaaggaaattaaaagtgctacttcactgagcacacgaat

SEQ ID NO: 738651 - DNA, 570 bp, Homo sapiens
ctcacttcatgtctctgtgtcacactttggtaattctcacagtatttcaaactttattgtcattatatctgttacggtgatctgcgatcagtgatctttgatgttactattgtaattgttttgagccaccactaattgtgcccatttaagaaggtgaacttaatcaataaacgttgcatatgttctgttaataatcaataaacttaatcaataaatatttgcatatgcaataagcatttgcatatgcaaatgttgcatattgctccactgactggccgatcccccacctctctccctctcccagggcctcctgtttcttgagacaccatgatattgaaatcaggacagtsaataacccaacaatggcctctaagtgttcaaatgcaaggaatagtcaaggtctctcactttaaatcaaaagctacaagtgataacgtttagtgaggaaggcaatgtccaaagcccagataggctaaaagctaggcttcttatgccaaacagttaagatacacatgcaaaagaaaagttcttgaaggaaattaaaagtgctacttcactgagcacacgaat

SEQ ID NO: 738652 - DNA, 509 bp, Homo sapiens
ttttactcttatagttcatagatttttgttttgatttttatcatttcttttttgtttactttggatttaatttactcttctttttgcactttcttgatgattatggtatctcccctggtaagcatctttttttttcattttctttaggcagaagctgaagtaattgatttgagaygtgtatctttttctaatctaagcatttggcaatatatttttcccaaagtactacttcagtgccataccacaaatttttattttcatttagttcaaaatattttctaatttcccttttgagttcctctttgataatcagataattattaaaatttgataatgtgttaattgctattatgtaaacaaacagagtaatgggatagaatctcatagggaattgtctttgctttagatgcggccataagagaaggcctgttggaggagatgatatttaatctatgaccagaagggtgaagggaaatcagccaggtaaagagctgatacaagagcatttt

SEQ ID NO: 738653 - DNA, 649 bp, Homo sapiens
tattagttctccataaattgttttaccaagtagcatagttaagtaaaactaaataggaagacatctacagaaatattaaaggagggatttgaggcaagatggccaactagactcagctaagtggaacagctgccaccgaggtacctggatgactggcatgctcctaacagatcttcagaggaaaggcactgagagtggacagagggaagacacagaagctgggctgaaggagaaagaagctggaaatcccacatggggctgctgtrcaccagaacttgttcttggcccccagtgactgggagaacatgtgagttgatctggcaaggagcaacctgctctcgccatggatctcctgaatcctggcagagggagacccctctacaaccagagacacttgagttggcagggagagctgccagagaaatggtagggacagtactctagtccctgtagagcccagagggtttggtgcaggagcatctgtagcagaggttggctgtagatgcccatccccttaggcttgccttcttcccatagaagattttagccctaggggaactgtcagacctgaactgtgaggggaggttttgcccatcagacagggctcttgtgcaccccttggtctgctggcctctcccagagccccagc

SEQ ID NO: 738654 - DNA, 649 bp, Homo sapiens
tattagttctccataaattgttttaccaagtagcatagttaagtaaaactaaataggaagacatctacagaaatattaaaggagggatttgaggcaagatggccaactagactcagctaagtggaacagctgccaccgaggtacctggatgactggcatgctcctaacagatcttcagaggaaaggcactgagagtggacagagggaagacacagaagctgggctgaaggagaaagaagctggaaatcccacatggggctgctgtacaccagaacttgttcttggcccccagtgactgggagaacatgtgagttgatctggcaaggagcaacctgctctcgccatggatctcctgaatcctggcagagggagacccctctacaaccrgagacacttgagttggcagggagagctgccagagaaatggtagggacagtactctagtccctgtagagcccagagggtttggtgcaggagcatctgtagcagaggttggctgtagatgcccatccccttaggcttgccttcttcccatagaagattttagccctaggggaactgtcagacctgaactgtgaggggaggttttgcccatcagacagggctcttgtgcaccccttggtctgctggcctctcccagagccccagc

SEQ ID NO: 738655 - DNA, 649 bp, Homo sapiens
tattagttctccataaattgttttaccaagtagcatagttaagtaaaactaaataggaagacatctacagaaatattaaaggagggatttgaggcaagatggccaactagactcagctaagtggaacagctgccaccgaggtacctggatgactggcatgctcctaacagatcttcagaggaaaggcactgagagtggacagagggaagacacagaagctgggctgaaggagaaagaagctggaaatcccacatggggctgctgtacaccagaacttgttcttggcccccagtgactgggagaacatgtgagttgatctggcaaggagcaacctgctctcgccatggatctcctgaatcctggcagagggagacccctctacaaccagagacacttgagttggcagggagagctgccagagaaatggtagggacastactctagtccctgtagagcccagagggtttggtgcaggagcatctgtagcagaggttggctgtagatgcccatccccttaggcttgccttcttcccatagaagattttagccctaggggaactgtcagacctgaactgtgaggggaggttttgcccatcagacagggctcttgtgcaccccttggtctgctggcctctcccagagccccagc

SEQ ID NO: 738656 - DNA, 614 bp, Homo sapiens
gaggcaggatcatgaagctcaaaaaaaaaaaaaaaattaaggggctctgtgggaaacaaggacatttcaagtgaggtctggtgagtgtaatgtcatcagtttaatttctaattatattcattggtggatggttcccctatggatgggaaaaatcacctaccaatgggatatttytcctaattgttatggattgttggcgttgggcaaccatcacagactgacctgtatggtggtaaagctggaactggaattttctttgaatcatttagaagtgtgtttacctacacatcacagaaatcacagaaatctttttttttttttttttgagatggagtttcactcttgttgcccaggctggagtgcaatggcccgatcttggctcactgcaacctctgcctcccaggtacaagtgattctcctgtctcagcctcccaagtagctcagattacaggcatgtgccaccaagcccggctaatttttttgtatttagtagagacagggtttcactatgttagtcaggctggtcgagaacttctgacctcaggtgatccacccacctcagcctcccaaagtgctgggattacaggtgtgcaccactgcgcccagcctcattt

SEQ ID NO: 738657 - DNA, 614 bp, Homo sapiens
gaggcaggatcatgaagctcaaaaaaaaaaaaaaaattaaggggctctgtgggaaacaaggacatttcaagtgaggtctggtgagtgtaatgtcatcagtttaatttctaattatattcattggtggatggttcccctatggatgggaaaaatcacctaccaatgggatatttctcctaattgttatggattgttggcgttgggcaaccatcacagactgacctgtatggtggtaaagctggaactggaattttctttgaatcatttagaagtgtgtttacctacacatcacagaaatcacagaaatctttttttttttttttttgagatggagtttcactcttgttgcccaggctggagtgcaatggcccgatcttggctcactgcaacctctgcctcccaggtacaagtgattctcctgtctcagcctcccaagtagctcagattacaggcatgtgccaccaagcccrgctaatttttttgtatttagtagagacagggtttcactatgttagtcaggctggtcgagaacttctgacctcaggtgatccacccacctcagcctcccaaagtgctgggattacaggtgtgcaccactgcgcccagcctcattt

SEQ ID NO: 738658 - DNA, 641 bp, Homo sapiens
tatgtatatatatatacacacacttttataattagatggatatatatagagagatagatgatatataaatacagctctgtcggcctggtagtaatgagtatactaagcacccagatctggatttataaatgcctctaccaaaaggaaccagactgcagagaaaaatagttgattctaaggttgagacatggaaagtacaaaattagcccaaaagtatggaaatattctaagaatgatggaaacatgcaaaataaacccacggaacttagcttgaagaggctctcatggccaaatctgagacacatgaagtatcagaataaatgttgatagtaaccagattataacccattgaataaagtaggaatctatcagaccataatgaatgaataaatgaataaaaggaaamaattcttgcagtataatgccaacaaactaatgtggaaagaatgatgacacatatcagagaggaagttgaatcaggtaggagtcatcagtggatgccaaagccagtgggtagaaatttgatgaataattatatatttgcatagtcttgagtatctccccatgaaacacttccactcacaaaggggaaaatggtggacctatggtccaggaacctggcagacaccaacttgaacagg

SEQ ID NO: 738659 - DNA, 622 bp, Homo sapiens
catcttctcagaaaacttttcctatcaagaatttttgttgttgctcttcatcagtctaagaaaaaactgtcttttttgtccttttttatttttgcccatattttcctcttcatcctccattcctatgctcatagcccatcctcactggcaccaattctgtgtttaatgtaaacgtccttgaaaaatagtgttgtttcatttcgaggatatactgaagttacctaaatttgaacatgatatggatttcattatttcttatcttgcttttgtgaagatgacattttatggagacaaaagataagttcacacataaaatttcaggtagtggtaaatgtaacaaggaaataaacacggtgattcagtagtgattgggttactttataaaagatggtctcttctcagaatgttttatttgagctgagaatagaaacrtataaaagatactgttactaggggcatccagaccaagaaaatgttggctctaaagcaagaatcagtttgatacacgagacaaatccaggaggcaactactctgtctgaagcacactcagcacagaaaaggtggtcctagatgaggcaggagaaattggcaaggagtgggtcatatagggtcttgcaggct

SEQ ID NO: 738660 - DNA, 617 bp, Homo sapiens
tttcatacatttctgcatttgaaaatatttgaatatgtccatccttggattctaatttcattcaccatacccactatccaaactattatattcaagctctgagatggcatacagagagtaccacataaccaagtagactgtagataccacaatayggatttgggaaacaatctaatttgcatgtgctttcttaccatctacactagcatcatccaccaaaatgatttccttcagcagtattgcaggtgaagaatagagcacactgtggacagttctaagcaacgtggaccacgcttcattatgaaaaactattatgacactggtggtgggcaggggagggcagcgcttaaatttttgttcaatacatctagaagaagtcagagaagtagaaaaacaattacaaattttattattttatttcacagctataccattgctaacattatcattattgaatctttatcactgaaaaaggatagttttcttgtatgtgatataatctcaatgctatataaaatgtaaataaatcaaaacaatttttttacaagcaaatcactcacccagagatgatgtctaccaacagagatgacaacatatcaaggattacaacatgttat

SEQ ID NO: 738661 - DNA, 549 bp, Homo sapiens
atttttttacaagcaaatcactcacccagagatgatgtctaccaacagagatgacaacatatcaaggattacaacatgttattatagctttctcaacaatgtaattttaaatgcaaataacattttaaataatgaaaataacctacaatgaggcagcatgtaaaaatgacaaacccttataattgctcaaataaaaaccaaatttttcttatttcatgcagaaatcattcatttttcatatttgcaactttaaaaattgtaccactttattaatttttttttttttatggagtctctctctgtcgcccaggctggagtgcagtggcacgatctcggctcactgcaagcttcacctcccaggttcacgcatttctyctgcctcagctcccgagtagctgggactacaggcgcccaccaccacacccggctaatttttggtatttttagtagagacggggttttaccatgttagccaggatggtctcgatcacctgaccttgtgatccacccgcctaggcctcccaaagtgctgggattacacacgtgtgc

SEQ ID NO: 738662 - DNA, 596 bp, Homo sapiens
aaactaaatatatattgttgcctattccacgcacatgcaaacaatttctgatcctctttttctaattggaatagaaagaaagacatttgccattcacatgacctcatccatgttactgaggttggttaacccactctagcaaagatactacatctggcacagcaactgcagttgaggctaccaattaattgaatttgcaataatctactctcatttcccaggatctctgtgttctgcaagagcaagtcactgcattaagacaacttaagtggggatatgayagcaaccaccacccttatatcttttaggttcctaaaggtactaataatttccactattccccgtgcgatacaacttgtattttatttactaccttgatttgggtgggggatatgaacagtttcagaaacatccacttggctctccccacttctatagcctctgtcccactcactaaaggttcagtgttgggattgcatgtattccaaacatgagaacttcaattacgtacttggaaccagggaaaatgaccactgtgtgggtcctcagacctagtggacttactgcaagccagatctctgccaggagtctgtttt

SEQ ID NO: 738663 - DNA, 596 bp, Homo sapiens
aaactaaatatatattgttgcctattccacgcacatgcaaacaatttctgatcctctttttctaattggaatagaaagaaagacatttgccattcacatgacctcatccatgttactgaggttggttaacccactctagcaaagatactacatctggcacagcaactgcagttgaggctaccaattaattgaatttgcaataatctactctcatttcccaggatctctgtgttctgcaagagcaagtcactgcattaagacaacttaagtggggatatgacagcaacyaccacccttatatcttttaggttcctaaaggtactaataatttccactattccccgtgcgatacaacttgtattttatttactaccttgatttgggtgggggatatgaacagtttcagaaacatccacttggctctccccacttctatagcctctgtcccactcactaaaggttcagtgttgggattgcatgtattccaaacatgagaacttcaattacgtacttggaaccagggaaaatgaccactgtgtgggtcctcagacctagtggacttactgcaagccagatctctgccaggagtctgtttt

SEQ ID NO: 738664 - DNA, 565 bp, Homo sapiens
ccataaacatgtataatttttatgtatcaattaaaaaatgagtttttattgtattatgctctgtgagttcctgtatgtttaaaattttttttttataaaagatcaaaaaagagagaggaattcggaatccatttgtgctaccctgctctgacatggctgcgaactttgctactcaaagaatggtccttacactagcaccttcggcatcccctgggaacttgttagaaatgcagattctaaggccccatgccaraactactgtgtaaaaatgtgtgttttaaaagattcccaggtgatttgcacatacacttgttacagactgaatgtttgtgtcaccctaaaatgtatgctggaacactaacacctaatgttgtagtatttgaggcagggccactgggaggtaattaggtttagatgagattatgagggtgaacccccatgatgagattagtgtccttgtaagaaggcacggagacaccagagctctcttcaccatgtgaggtcacagccaggaggcagctggccatctacaagccagaaataaggccctcaccagggaaggaaa

SEQ ID NO: 738665 - DNA, 631 bp, Homo sapiens
tcttggcatgccatgcatctgtgtccatgctgcgaaatttagtccctctaaccctgtaacggagtgtgattccttgagcatttcatggggtcaagctccccctgtttggccatggtgaggcgtacacagtgggaagtgcatgcgtgtggaaggaggaccctcatgttctggtatgaggggcaatatagagtggttatcagatcagagtccctgagttccgacttccctattyaaatgagggctctctcatgttctagtctcataattcaggacaagttattaggcctgtctctgcctcagtttttcatttctaaaacaaggaaaacagtaacgtatggttctgcagtttgttgtgaggtgatgcatataaaagttgtaaaagaaaataaaaattcaggaccctctaaatttattatgccaaacaggaagttaagccctgaagactgagtcacgtagcctgtttgcaacgttgcttctcagattatagcttaactctcctcctcagtgctcctgttctataaaggactgggagagaccagagaccagacctcaccacttccaatcttccaacctttattatgattaactgcctcctttattgtcctctacctaactcagaccagatgatacc

SEQ ID NO: 738666 - DNA, 634 bp, Homo sapiens
tttattaatattttcaaataactttcttgggatttgatttttttctgttttcctcttttctatttcattgatacctgctctttattattttattggtgctacttaggattcttcttactcatcttttttagcatcttaagatcattgaaatcaggtcttctaacataagcactcaaaatctcacttatcattctaatcactgctttagttacgtcacacaacttttgatatgttgtatttttattataatttagatgatgaatattcatatttttcttgtgatttcttcttttgtccattggttatatyaacatttactgtttaatttctaaatgttgtgttttttctagatagtttattattattgagttctaatttaagctctttgcggtcagagaacatactctataaaatttcaatcttttgaagtatagtgagaccctttataagcctagcctatggtcgattctagtgaatgtcccatgtttcctggaaataaatcttcattctatcattgttgtggtagtgttctacaaatgtaatgaagtcaagattgttagctgtggtctaatcttctatatccttgctaatttttttgactggttgttcaataaatcactgagaaaagagtgtt

SEQ ID NO: 738667 - DNA, 613 bp, Homo sapiens
ttcttgtaaatttaagttctttgtagattctggatattagccctttgtcagatgggtagattacaaagattttctcccattctgtaggttgcctgttcactctgatgatagtttttttttgctgtgcagaagctctttcgtttaattagaccctttttgtctattttggcttctgttgccattgcttttgttgttttagtcatgaagtctttgcccatgccaattaaacatcttttataaattattcagccttaggtatttcttcatagcaatacaagaatggtctaatacagaaaattggtactgaggagtggggtgttcctctaaagatacctgaaaatgtggaagtgaccttggaaatgggtaagagkaaaaggttggaagagtttggagggctcagaagaagacaggaagatgagggaaagtttggaacttcttagagactggttaaatgattgtgaccaaaatactgatagaaatacagatagtaaaagcctggttgaccaggtctcaggtagaaatgaagacgtcattgagaactggaataagggtcactcatgttatgctctagcaaagaacttggctgcattgtgttcacgccctagggatcaga

SEQ ID NO: 738668 - DNA, 613 bp, Homo sapiens
cacttagattgaagtagcttccaatctacatacttaaatgagaaacatacaaattaaccatgcccagatgatcccaagtatgttcaggattcaggaggttgaagccaactcaccttggtaggtaattaccgtctttctggtaggcagaatcgtaaggtagatctcaagattcccacccccattgcacatgctctgtataatcttmtctccctgaatatgagtaggtccgtgaatatgagggatcttactcccatgattaggttaaattagctgacaaagctgaagggattttgcagatttaagtaaagtgccaagtaaatcaacattgagttaatcaaaagggagattatcctaggtaaacctgacctaaccaggtgatcccataaaagggactggacccttctggaagaaagagctttgaacccacagagattctcctgacagccttaggaaagcaaatagtcatgttatggagaggaccagatggcaggtaaattcttttcacaaccatttctggcagtatccttcctgtccgtgggtttaatgcattctcatcaacacacatgatgtatccatcagggcccaggcaagagacagaaaccacatcagttat

SEQ ID NO: 738669 - DNA, 683 bp, Homo sapiens
agaaagattcttctgccttgggatcctgttgatctgtgaccttgcccccaactctgtgctctctgaaacatgtgctgtgtccactcagggttaaatggattaagggcggtgcaagatgtgctttgttaaacagatgcttgaaggcagcatgctcgttaagagtcatcaccactccctaatctcaagtacccagggacacaaaagctgcggaaggccgcagggtcctctgcctaggaaaaccagagacctttgttcacttgttaatctgctgaccttccctccactattgtcatatgaccctgccaaatccccctctgtgagaaacacccaagaatgatcaataaaaaaaaaaaaaaaaagaaatgatcaaactcttccagagaggctgtaycttcttacagtcacaccagtgatttttcccattttctaattggaattattattgagttttagaatttatttatatattctatattctcatccttcatttgttacgtaattttcaaatattttcctccagtcagtatcttgcatattcctaacaggacatttagcagagcaaaagttgtgaatcaataatgttttaatttgtcaaattttccttttacagaatatgctcttggtgtcaaggatgagaactctttgcctgattctagatccaagtgattttctcagatattttt

SEQ ID NO: 738670 - DNA, 592 bp, Homo sapiens
aaaatgtagaaaaaagttaacatcttaagtgcaataagagcaaaaattcattgtgttacagaaacatttggagagaacttaactgagacatgtgagtttacgggaaaaatagtaaaagcagtgttcaattgtagttttgaagattaaatagaagttattcacacaagaggtaggggaatttgaaagaaaaagacacattttkgtaatagaaaaaagttcactaaatattattgaagaaagaaaatctgttctttaaagaaaaatatgccaaaagaatagtattggatgaggttagagagaaaagatgagaacagcaacgcataagaagcctgtaagttctgttaaaaggcctaagttctgtcctaatatgaaaccaattcatttaggagtataagtgtgtgcaacattattataacttttgcattttgaaataatcattctggtttcattgttaagaatatataagaagatgtaagattaaaggtggaagaccaggaagaagcataaaaaagtggcccaggtgagtgcagagggtggattaaagtatttattttacacaaaatatcttaaaaactcattataaagcatttga

SEQ ID NO: 738671 - DNA, 592 bp, Homo sapiens
aaaatgtagaaaaaagttaacatcttaagtgcaataagagcaaaaattcattgtgttacagaaacatttggagagaacttaactgagacatgtgagtttacgggaaaaatagtaaaagcagtgttcaattgtagttttgaagattaaatagaagttattcacacaagaggtaggggaatttgaaagaaaaagacacattttggtaatagaaaaaagttcactaaatattattgaagaaagaaaatctgttctttaaagaaaaatatgccaaaagaatagtattggatgaggttagagagaaaagatgagaacagcaacgcataagaagcctgkaagttctgttaaaaggcctaagttctgtcctaatatgaaaccaattcatttaggagtataagtgtgtgcaacattattataacttttgcattttgaaataatcattctggtttcattgttaagaatatataagaagatgtaagattaaaggtggaagaccaggaagaagcataaaaaagtggcccaggtgagtgcagagggtggattaaagtatttattttacacaaaatatcttaaaaactcattataaagcatttga

SEQ ID NO: 738672 - DNA, 418 bp, Homo sapiens
tatgtttggatttaggactaccattttattgttttctgtttgtctctgttttcttctgtttcccatttcctgcctttttgacaatttgaatactatttagtatttgatttaaatttatctattgtgctattactatatatctttgtatcttttttagtggtagctttagggattacaataaaaactactcagtcttcttagaatcacaatttaacaattaaagtagactacagaaacattaccatcatataggtccttttgctytcccctttgtgttatagttatctatatatctatacacattgaaaaccccattagacagtgttattttttatttcaactgtaaaacatttactaaagaactaaaaaaaaaactgtttatgatatttaccattccagttgttcacacaaatgaaca

SEQ ID NO: 738673 - DNA, 462 bp, Homo sapiens
agagctagttgcacacaacttggggaaattctcctgatatttcctacattttcaaagaatatgaacatctgaacacccaacaagagggaaagaagcatcatgatgaaaagtctgctaagagtaagtagagccagagagatcarggttaaaatctctgcttccccacttactagctgtgtgaccttcagtgagcttccttaatggtaacatgggaataatcgttttacttacattttagagtcatctgcagattatatttaaagcctctagtaagttgtaaatatataatatattcgctttaaaaaatggaaaaagaggaagcacctatagttgtttttttaaaagcagaagaatacaaatttatttacatttctgtagtatatcgggaaaaatggccacaatgttttgcaacttctctcatcaagtggcaaaatccgtttatccaatcctcaaatacgggct

SEQ ID NO: 738674 - DNA, 673 bp, Homo sapiens
aaagtccttggtgttagctcccagactggtctgcctgctccgtgttccctccgctctcgtttactccctttgtcctgcatacatttgtgttgccctctgtctgcatggctcactggctccctgcagcaccatcccccctactccttgccagggcacagtcttcccaacaggctcaactctcacatttcccaagtcctaaaaaattcagccacccagcaagctagcctccctcttcggaagtcttccaataaccgtcaggtgccccactctttctctgaacatgtttccagtcttgcgcaattagttaacccataggctgttcaygggtagctaagcttactgtagctaagatattcaagtgcctaacatgggctcagctctgcacacacacccccctatgctccagttacactgagtttcttctcaccctccaagaacacactaagtatcattataaaaattatataattataataagaataatttctctttgtgtcaaagaagactttttgcgtaaagtataacattccaagcaaaacaagtttatgccaaaaaatataaaaggaaatgtattgactcaagtaactgaaacgttccctgaaaagccgtggggtgaaccggtacagctgaatccgaatgccccgttaggatccatctccttcctgccagccct

SEQ ID NO: 738675 - DNA, 657 bp, Homo sapiens
ataaaaccctaaagactccaccaaaaaacaatttaaataaatgaattcagtaaacttgcaaagtataaaaccaacgtactaaaaccagttgcatttcaatacattaaaaacaaacaatccaaaaaagaaattaaggaaatagtctcacttataatagcrtcaaaaaattaaattcctgggaaaaaaaatttaaacaagcacgtgacagatctgtacatgaaaactataaagaaaaacattgaggaaagaaattgaagaagacacaaagaaatggaaaggtattctatgtttgtagattggaagaatcaatattgtcaaaaagtccatactacccaaagcaatctacagatcaaaatttctgcggtgttttgcacagaaacagaaaaccaatcatgaagttcatttggaactaacaaaagacacttaatagctaaagcaatttgaggcatcatacttccttattttaaattatattacaaatctatagtaatcaaaacaatatgatactaacataaaccaatgggacagaaataaacccattcacacccagtgttctaatctttgacaaaggtaccatgaatacacaacagggaaaggatagtctcttcaataaatagtgttgggaaactgaatattcacatgccaaaaaaagggaaa

SEQ ID NO: 738676 - DNA, 618 bp, Homo sapiens
cagtagcagatgagcagatgaggagacgaggagacaagcagatgaacagcagaatgacactgcaggaaagagagaagaggaggaacatatgaacaccaagaggagttcagctgggggcgattggagagcaattcagctgctggatggcccaattccagaggaagatcatctcccactccatacctttccagctcccatccatcccactgagcaccacccccaccactcagtaaaaccctgcattcatccttcaagtctgtgtgtgacccaatccttccaggatgctgaacaagaactcggggtacagaaagctgtcacaccagccctctgcccttgcagaaaggcagagggtccactgagmtggttaacactcaagccatccgcagacggcaaggctaaaagggcacactgtcacacatgcccacttgggctcctgcacctgcccgtctgtgtgctccccctcctgtcaggggtttgagcagtggtggtgactgaacaagcaacccacacccctgtcacatgtcctgcgagggggatcagggaactctcctgtttcaacagcatctgccactgagagacaatgatgatgcaatgtcataagcaccaaaatggaagaat

SEQ ID NO: 738677 - DNA, 612 bp, Homo sapiens
agtaagtgtgaagttatcctattcccaaaaatgtaacaacatgtttaaatttctttttttctttctctttttttttgagatgatgtcttgccctgtcacccaggctggagtgcagtggcacgatctttgcttactgcaacctccgcctcccaggttcaagcgattctcctgcctcagcctctcggagtacctgggataacaggtgcccgccactgtgactggctaatttggtattttcagcagagacagggtttcatcatgttggccatgctggtctcgagctcctggcctcaagtgagctgcccgcctcagcctcccaaagtgctgggattataggtgtaaaccaccacgctcggcctaaatttctaacaaaaaaagagagcaaacctgttaacctagaattytttgcatggcaaaaaaaatctttcaaaactggagtcaaaaatgaggttttttttttttttttttttttttcagaatagcaaaaagtgaggaaatatgttgtcagcagactttcactataggacatgtaaaagaaattcctttaggtggaagaaaaatgatgccagatgagacttatatctgcataaaggagtgaagaatacctgaaat

SEQ ID NO: 738678 - DNA, 633 bp, Homo sapiens
cacactcacaccatacacacaccacaaaacaaagaacaggtaaaaagggcacacacacacttttacagtttataccaaaccagaatcaaaaccaaagtcagaatatcaagaaatcctagccagatcaaaaccaaaaccaaagtatcaagcaatccaagtcaagtcaaaaacaaaaaccaaaaaccaaagtgccagtacaggcatgttgtgggtgatcaggccacacttccactcaaatggagtgggcaagttccaaagacgagtcttactgagtttcagatgtctggactccaaatgccagttccttcccggtgttcagccactgcattgatcttctgcaggggcctgccrtgcaccactctggtgaggcgttccaccggggcaaatgcatacccgggagcactcccaggatccacattgcccaaactggccagagtctcctgcagggatgctccgcggggcaggcctaagctgcctaaggggctgtctcaaccatccatccattaatcacctcgcttctcagtcagggaaccaagaaatgtagcaggacaagccacagacaaaacccctcagacaccaagttaaagaaggaagggctttgtttagccaggagggtcggaaagactcatgtct

SEQ ID NO: 738679 - DNA, 611 bp, Homo sapiens
gaattacagctgactggaaattaaagctgtaagcgcagcctcaaaccacagggaatggggctgagggcctcccagccacctggcacagctctggaatgcttacagcacttgataacgcttgctaggggcaagacaagggcaataaaatgtgaattagatggagatgaacatgccatccggggcaggaagaaatcctcaagcagatgtgtgtggaaattaatggtacggtgataacaaatgttgaagcactgcacagtgaccatactggggaatcggccccctgacaactgtttgttttacaaagggcggggcctcctgtggatggaaggaaaacgtaagaggtaatagcttttgaatttggtgcagttgatgcatattaaggagatcttccagtctgtttcaggaatgcatttcaatctgtgctkccaaaatctttgttggccagggtcaatattcaacttattaaaagaaaagtctcattctctttccccttttttccatttgctccttctccagataaagaacgagggtaactaatgcagagaaaaaataaccaccctcaaccaggaggccacgctgcagaaggatccatctctctgagttgtctcttt

SEQ ID NO: 738680 - DNA, 621 bp, Homo sapiens
cacctaggcctcctaaagtgctgggactgcaggtgtaaattaccttgccagcctttttttttttaacagctttatggagatataattcatatatcatacaatttgtccatttaaagtatacaattcagtttttagtgtattcacagagttgtgcaaccatcaccacaatcagttaaaacatttcataatcccccaaasagacccaatatccattagcagtcactcttcattttcccccaacctacccatagttctatattttctgtctctacagagtatccttttctggatgtttcatttaaatggaatcatgtaacccatggtcatttgtgactggcttcttttacttagctcggtgttttcaaggttcttccatgttgcttcatgtatcactttattcctttttattgttgaataatatttcattgtatggatataccacatttattcattcatcagttgatagccatttgggttatttgctttggggctattatgaacaatagctatgaacattcaggtaccagtttttgtatagacatatattttcatttctttaggttatatgtccaagaataggagtagaattctacctaagagttgaattgctgggtcatacag

SEQ ID NO: 738681 - DNA, 578 bp, Homo sapiens
gtcagatataaaaaattataattgtaatataattaccacaacgtatagattatcaataaattaatagtaaatagcaatgggttcttaggtttaacgtgaaattttaaagttaaagctgatgttgtaaaataattagtgtaaaaacaataatctacttctaagcacatataaaatgactgacttgtacattcagattctgagtatgaaatctgccttactcatacttaaagtttctgagttagcaatgtaaaggtgacttttgccaaaaatttggcataagtagacatgtaaagaaaaaagtcatttatttaagccaataaagttgaaaagattagctttaagtaagcatttaggcagcaagcaggtcacagctgacaagccttctaataagagaggaaactgaaaaacttgaaagcagtctggctggcrccatttagcatagggacaaagtcctagtcattgaatgaaggcatcactatattacagttataaaactaacacataggaaatacctaactgattttattaaataattctgggtatcagaaatagacaattaaggagaaagtagaagtctg

SEQ ID NO: 738682 - DNA, 591 bp, Homo sapiens
gccatatttttttatgtgtctgttgagggccagacaatatttaatctgtgaagatggatcccctaattgtaaatcattgtattttttgcaactatatccctaaaatagaagtttcctatcacattctttgaagtggagcaagccactttactcttacagccaattgtcttcttgtcttcttgacttctctacctgcacactgacgargcatcttaaatttaacatgttcagtgtcaaaagtttgactttaccactccaagtctatccctgtaacagtcttccccatcttagtgacaactcattcttactgcacataccaagaaaacgctattttattagtctgctcttgcactgttttaaagaaatacttgagactgggtaatttataagaaaagaggtttaagtggcttatggttctgcaggctgtacaggaagtatagtggcatctgcttctggggaggtttcaggaagctcccaatcatgacagcaggcaaagggggagaaggcacatcacatagtgaaaagcaggagcaagcgagagagggccaggtgctatacacttttaaatgactagatctcccaagaactcac

SEQ ID NO: 738683 - DNA, 627 bp, Homo sapiens
tctgcactgatgaacaggaaactaaaagccatgtatttataggttccccccagtaacaaaggttacagggtcttgttgaatgaatttttttctttttttctttgagcctgttgcccaggctggagtgcagtggtgtgatctcggctcactacaacctctgcttcccgggttcaagcgattctcctgcgtcagcctcctgagtagctgggactacgggtgcacaccaccatgcctggctaatttttgtatttttagtagaaacaaggtctcatcatgttggccaggatggtctgaaactcctgacctcaggtgatcactcgcctcagcttcccaaagtgctgggattataggtgtgagccaccacgcccggcccctgaatgcatttttaattccacccttatytttaacctcatcttatttttctttctccgtttccttagtttgcatttaacctgtatattatgtaccttagtatataacctctcacatcttattttagaacagtaaaggatataaaattacaaaaggtttaaaaggatcttataattagagcgggaaaagttaaaaatgcaaatgtgtgtttgagtaacttatctagattaatttacacaaatacgtaattagtag

SEQ ID NO: 738684 - DNA, 655 bp, Homo sapiens
tgtggccagtggctattgtattagacagtgcacatttatttgatgactcttaatttattactccagattatatatctatataccttcttgatattttcaattagagatatcaaatagacatctcaaattctgcatgcctaaaactgaatcgatctcttcccactccatctgaaagggatacaaatccatcctgccagttgcccaagacacaaggcacagagttatcctttcctcttscctttgttttctacttcaaagtatatctgtgctctaaccaattcactcaccatgttccagccatgctgtctttctgctgtttcttccacattataggacacactattcttattaccttacctatagtggctccctccacctgaaaagattctacctctgatatagtttggatatttgtccctgcccaaatcttattttgaaatgtaatttccagtgttggaggtggggcctggtgggaggtgtctggatcatggaggtggatcccttatgaatggtttgggccatccccttggtggtaagtgagctctgagttcacatgagatctggtcatttaagtatgtggcacctccccctaacacttgctcctgctttttcccatgtaaagtgcctgttcctgctttacctcctgccatgactg

SEQ ID NO: 738685 - DNA, 622 bp, Homo sapiens
agggaaactttttaaaaatttgacatgaggtaagtcaatccaaagatgcaaagtaggcagtgggatgtagtggggacctcctaagactggagcacaaagattcgtgttgatgtccagctctgaagcccttgggcaaggcacttcacctctctagaccttggcctccacatctatgaaccaaatgagtaggactggattatgagttccttctcataaaaatgctatgtgtgtggtattattttataactagaagrttctgccagaaaagctcaagaaacttagtttgtctaatttcaacccttaattattttcttttgagaagagatcattgaaaagaaaatgaatttacgtaacacatgacatatggaacatttaagctaaaaattaaggagaccactttcggaggccaaaatggaaggatctcttaaggccaggagtttgagactggttagactgggcaacatagcaagaccacttttctacaaaaagaaacacatgaataaataaataaattggagagataatattttgggagaatttatagatacttacatcttcaaatgcataagcttggtaaagaccagcaataacatgggtttctattgacctcttctaagaccaa

SEQ ID NO: 738686 - DNA, 622 bp, Homo sapiens
agggaaactttttaaaaatttgacatgaggtaagtcaatccaaagatgcaaagtaggcagtgggatgtagtggggacctcctaagactggagcacaaagattcgtgttgatgtccagctctgaagcccttgggcaaggcacttcacctctctagaccttggcctccacatctatgaaccaaatgagtaggactggattatgagttccttctcataaaaatgctatgtgtgtggtattattttataactagaagattctgccagaaaagctcaagaaacttagtttgtctaatttcaacccttaattattttcttttgagaagagatcattgaaaagaaaatgaatttacgtaacacatgacatatggaacatttaagctaaaaattaaggagaccactttcggaggccaaartggaaggatctcttaaggccaggagtttgagactggttagactgggcaacatagcaagaccacttttctacaaaaagaaacacatgaataaataaataaattggagagataatattttgggagaatttatagatacttacatcttcaaatgcataagcttggtaaagaccagcaataacatgggtttctattgacctcttctaagaccaa

SEQ ID NO: 738687 - DNA, 609 bp, Homo sapiens
acttatttttcatctgaagtgtagctgaaaattatgcatcattattgttcaataactactaaaagaacagagcagcaataattcttttgaatttcaaagcttcaaagtaacatatcttcctaacatcaacagagatacttacttactcatcaccagactgtgtcctcattctaaaatattgcctttgtaagcccaagaggtccccaaggagagtatcaatkgttattgacttcaaaccactgacacaacaaatgtcattcatctgttaagaaggacaggttgagagactggcacaaggtcagtttatcttcaaaacttacatatgtaccttttgctgtcaattcacttccttttaccccaagatactgatgattagcagccttgctcataaattctcaataataattgggaagctaaattattttccaatttgtgtcattttaagaagtcttgttgatgatgctgacttttcagaaaataatatgtattttctgccaaaaatagaaaagtactgttcctagatatttaaacttagctgtattattcaagtttaaataacccttatcattctttgaaggacagaaatggctaataaatagggatatgcta

SEQ ID NO: 738688 - DNA, 631 bp, Homo sapiens
ctccataagctttgatgaaaggaagatacttcagttttgcttgttaaaaaacaggaataggccaggcatggtggctcacgcctgtaatcccagcactttgggaggctgagatgggcggatcactagaggtcaggagtttgagacaaatgtggccaatatggtgaaacctcatctctactaaaaatacaaaaattagctgggtgtggtggcacacgkctgtaatcccagctactcgggaggttgaggcaagaaaatcacttgaacctgggcagcagaggttgcagtgagacgagattgcaccactgcaccccagcctgggagacacagcaaggctctgtctcaaaaaaaccaaaaaacaaaacaaaaaaaaaaccccagaaataaagttgttttaggaatattgaggaactgaaaaaacaaagagaaataatttttaaatagtagtgaagtaatagcatagctttagtaaattcaagacatttggaaagcagtcaatatttcacctttaattaattatttatttattttttgagagtttccatttcatttgctgataaaattaataaaaattattttttaaaaaatggtacctgaaaaacttaaatgttttttctttaaaaatgtttttgct

SEQ ID NO: 738689 - DNA, 638 bp, Homo sapiens
aaaccaacagaaattacctacaagacaaactgttgagtttataagattatttataaaaacttattcctccacaaaactgtttccttgcccacagtttttaccactcttcccaatcgattttatgtgctcacaagttcttgcagctttttaatgcagtgagtttttgaccatgtgacaaactgaaactttaacacaaaatatatagcttttattgttgtaattaaagcagaccygaaattagactcattttgctgatatgatccattgtgattagacatataagcagtccaactacgtgactgcaactgatgtgaatttgacgcaaccagaaatggtttttgtgtcacctcttctgaacttagcagcccatccttattgtcggtgctaacagttttccacttgccgtttaattgtcttcatcattttatatgtgtggaaagagaacagacctggaccatcctccccatttgttggggttttcttgctccctgtgttgcacctttttacagctgtggtccagggctgcagtttccaatcagagtgtgatgtaacctactcccaagacacctggccagtttgcccccccagagcagtgctgctcaaaccatctcttgggaaagaccattttgtttttccat

SEQ ID NO: 738690 - DNA, 638 bp, Homo sapiens
aaaccaacagaaattacctacaagacaaactgttgagtttataagattatttataaaaacttattcctccacaaaactgtttccttgcccacagtttttaccactcttcccaatcgattttatgtgctcacaagttcttgcagctttttaatgcagtgagtttttgaccatgtgacaaactgaaactttaacacaaaatatatagcttttattgttgtaattaaagcagacctgaaattagactcattttgctgatatgatccattgtgattagacatataagcagtccaactacgtgactgcaactgatgtgaatttgacgcaaccagaaatggtttttgtgtcacctcttctgaacttagcagcccatccttattgtcggtgctaacagttttccacttgcygtttaattgtcttcatcattttatatgtgtggaaagagaacagacctggaccatcctccccatttgttggggttttcttgctccctgtgttgcacctttttacagctgtggtccagggctgcagtttccaatcagagtgtgatgtaacctactcccaagacacctggccagtttgcccccccagagcagtgctgctcaaaccatctcttgggaaagaccattttgtttttccat

SEQ ID NO: 738691 - DNA, 638 bp, Homo sapiens
aaaccaacagaaattacctacaagacaaactgttgagtttataagattatttataaaaacttattcctccacaaaactgtttccttgcccacagtttttaccactcttcccaatcgattttatgtgctcacaagttcttgcagctttttaatgcagtgagtttttgaccatgtgacaaactgaaactttaacacaaaatatatagcttttattgttgtaattaaagcagacctgaaattagactcattttgctgatatgatccattgtgattagacatataagcagtccaactacgtgactgcaactgatgtgaatttgacgcaaccagaaatggtttttgtgtcacctcttctgaacttagcagcccatccttattgtcggtgctaacagttttccacttgccgtttaattgtcttcatcattttatatgtgtggaaagagaacagacctggaccatsctccccatttgttggggttttcttgctccctgtgttgcacctttttacagctgtggtccagggctgcagtttccaatcagagtgtgatgtaacctactcccaagacacctggccagtttgcccccccagagcagtgctgctcaaaccatctcttgggaaagaccattttgtttttccat

SEQ ID NO: 738692 - DNA, 568 bp, Homo sapiens
ttggattattcatgatccttgattcatgacatattatcatcatagtcttagatgcagaggtccatgcatgtccaacttcattcattatttagttcttttttaaagtggaatttttatttctaatttctaacaaccaacttctctttcctaatttttcaaataccaaagttttatttggaaagtgatcctaggaaagacttagagaaataaagaagagaactgataaatcatgcattatcaaacaagttaccactctgagtagatcttaattgtctggataattytgggaaccaatgtagattacatgaatcagaatttgctctttctagggggaaagtgtgctggagtatttaaagctgataactttaaatattaaagggacattaattctctagcattttcagaccaccacatccaatggcagagggctccctgaaatcttggacagttaaaagttgggctggcatgcatggaattacagagggcaccaattacatctgcctcagttagaagctaaacggtattattaattcatctgtttcaaaggcattcccaattaaattagttc

SEQ ID NO: 738693 - DNA, 594 bp, Homo sapiens
tgaggaaacagcacagagaagttaagtaacttccccaggatccacagcaaataagtggtggactgggaattgaagccaggaagtcaaacttaagaacctgggtttttaacctgggatggaagaataggattcggagagtctttgaactttttaaattatttgccaagtggtcagtatatatgaatatgtgcattagtttaagagaggatctatggctttaatcatgtaagagatgcatgcttaaaaatgttaataaagactatatagggcaggcatggcagctcaggcttgtaatcccagcccttgggaggccaaggtgggcagatcacttgaggccaggaattcacaaccaatctggccaacatggtgaaaccctgtctctgctaaaaatattagagttarcctgtgtggttgtgtacgcctatagtcccagctacttgggacactgaggcatgagaatcacttgaacccaggaggcagaggttgcagtgagcagagatcatgccactgcaccccagcctgggcgaaaaagtgagactctgtctcaagaaaaaaaaaagcctataagagcaccctctttcaccctcagaagtc

SEQ ID NO: 738694 - DNA, 532 bp, Homo sapiens
tgaaattagataaagtaagggacttagaaactgttctgcccttttgagagaagagaaaaatggttctgtatctttggaaaaattagtaaaaaatttataccagggattgagccctccaccttttagaaaaataggctaattctgtttttggaaaaaatgcatgaatttgtccaaacttttttcataacagcagaggtttgttctgagtattatatggaccataatttctaacaaagcagattgtgcatgatagaaaatagcccgaatgaaatacatttttaaaattatatttggaaatataatgtgcataatatctgacaacactaggttaaatttaacctttctttgttattacgaaygatgactgtggccctatgagataccaaagcaatttctgagtcattcaaaacagtacaaattccagttagcgtagctttgttacatttttatccattttatgaacattagtaacattgtctgtccaatgagggacttgagttagattatctctaaagtccttcttggctctaga

SEQ ID NO: 738695 - DNA, 532 bp, Homo sapiens
tgaaattagataaagtaagggacttagaaactgttctgcccttttgagagaagagaaaaatggttctgtatctttggaaaaattagtaaaaaatttataccagggattgagccctccaccttttagaaaaataggctaattctgtttttggaaaaaatgcatgaatttgtccaaacttttttcataacagcagaggtttgttctgagtattatatggaccataatttctaacaaagcagattgtgcatgatagaaaatagcccgaatgaaatacatttttaaaattatatttggaaatataatgtgcataatatctgacaacactaggttaaatttaacctttctttgttattacgaatgatgactgtggccctaygagataccaaagcaatttctgagtcattcaaaacagtacaaattccagttagcgtagctttgttacatttttatccattttatgaacattagtaacattgtctgtccaatgagggacttgagttagattatctctaaagtccttcttggctctaga

SEQ ID NO: 738696 - DNA, 601 bp, Homo sapiens
aaataatctgctactttataataattcgacttcacattttataaccttttattgtgttaaaggatgagaccaccactgaataacataaacaaaaatcacaaagctgaatgtattgcttacttaagtaagtgagtgttcccggtccagtacattctcttctagctgatcatatgtagggtttttgagatggttggagctcaagggttggtggactttctgaggcaagtgagagtcgacatccactgtagatgtgtggttactaaggtgagactgttgctgactggttggcrtgtagaagggtgttcactggtgtgagtctttatcaggcagctttcagaggtgaagaactgtcactggttgactggcaggagttcattgtggcaaactttgttcatttttttttttactgaaatatttttcatttattcatttatgatgtggcctgcaatctaactgctctacagttgtaaaaaattattgaaaactgaagtattaaaattatttcacagactccttccttaggatgcacaaagcatttgtttgagaaaatgtattatgcattttatatgttgctgtaatattattattatcattaagcaaa

SEQ ID NO: 738697 - DNA, 581 bp, Homo sapiens
gtttgaactcaggctgtttcaagatccctgcttttaatagctcacgattatgactagaacacattcagtaaatatttgcctccctctctaagtgtgagtatgttccccctgagaatgtgaacaaattcaagcttaaaatcacaagaagcatctgtgaaatggctataaaagagtaaatgaccctggaaaatttgaccccagaaatcctaagtcacaaaatatgtgttttaatgtggattagatcctggaacagaagaaggaccttactggacaaactggtgaaatgtgaataaagtctgcaatttagtcaattgtacattaatttcttagtcttgaygaatgtaatcatgattatgtcagatgttaacattagaggaggctgagtgaaaggtatacagaattctattctatctttggcaactcctccacaaatttaaaattattttaaaataaaaagttttaaaaaaattgggaagaaaatcactcagaaagtctgttttgatataaaataaaactttctttttaaaatccttcgaagtataaagaatttcaaaaataattaacattttaatcacactgta

SEQ ID NO: 738698 - DNA, 512 bp, Homo sapiens
atgacttctgcagtattcttgcccaaaatgcataacccaaatacaatcatgagtaaataaccagacagccacaaactaagcaacattttatagaattgctggctctgtgctcataaaaagtctcaatgccataaagaggaagaaagactgataaactcttccaaattaaacgagactaagagacatgatcagtgaagttaacacatgatctgggatgtcttttgctataaaggacattattaaaacaacggacacagtctgaattgatctgtagtactgttgcagtgttaactgactgattttgataattgtcctggagttgtcaaaaagaatgtcctygtgtactaattagctaggactgtcactacaaaatactactgactaggtggtttaaacaacacaaatttattttctcacagttctggagggagcagtagggttggtgcctggtgagggatctcttcttggcttgcagacaactacctcctcgctgtgtcctcccattgtttttc

SEQ ID NO: 738699 - DNA, 512 bp, Homo sapiens
atgacttctgcagtattcttgcccaaaatgcataacccaaatacaatcatgagtaaataaccagacagccacaaactaagcaacattttatagaattgctggctctgtgctcataaaaagtctcaatgccataaagaggaagaaagactgataaactcttccaaattaaacgagactaagagacatgatcagtgaagttaacacatgatctgggatgtcttttgctataaaggacattattaaaacaacggacacagtctgaattgatctgtagtactgttgcagtgttaactgactgattttgataattgtcctggagttgtcaaaaagaatgtccttgtgtactaattagctrggactgtcactacaaaatactactgactaggtggtttaaacaacacaaatttattttctcacagttctggagggagcagtagggttggtgcctggtgagggatctcttcttggcttgcagacaactacctcctcgctgtgtcctcccattgtttttc

SEQ ID NO: 738700 - DNA, 624 bp, Homo sapiens
atttatttttatctgtctagtcatacctgaatagggactctcttgacagccaaatttcattctgtttcacagttttccaagagaaaagcaacagcagcaacacagtggacacaatcagggtggtggccccacatcgattcagccaagtgcagagcttgctcagtccrtgcacaaaaaggatgcagtagcccatgctggaaaacagggtggaaggaacgggattactttgggggtgcaatagcttccccccagaattatctcctacaaaactaactttcaaatgaagcttgtcctgtgctagagaaacaaatagaaactcccctgccttggacaatattaacatgttagttctctaaagtgctgcactagcaggtttgctatttcttgtagaaatatttcttgctatttcttcagtgtagggaatgagagagtcatcttgtaggcttaaagtgccctggatttcagcagctgaggcatcatgagaagtcccacatataagctcttgggtcctgaatggctcctctgacccaagctccctcatgtcactgtcattgtatgactctattggcactatgcgcctaaattcggagtttatgctgcagcaggtcacaccacagctttgta

SEQ ID NO: 738701 - DNA, 624 bp, Homo sapiens
atttatttttatctgtctagtcatacctgaatagggactctcttgacagccaaatttcattctgtttcacagttttccaagagaaaagcaacagcagcaacacagtggacacaatcagggtggtggccccacatcgattcagccaagtgcagagcttgctcagtccatgcacaaaaaggatgcagtagcccatgctggaaaacagggtggaaggaacgggattactttgggggtgcaatrgcttccccccagaattatctcctacaaaactaactttcaaatgaagcttgtcctgtgctagagaaacaaatagaaactcccctgccttggacaatattaacatgttagttctctaaagtgctgcactagcaggtttgctatttcttgtagaaatatttcttgctatttcttcagtgtagggaatgagagagtcatcttgtaggcttaaagtgccctggatttcagcagctgaggcatcatgagaagtcccacatataagctcttgggtcctgaatggctcctctgacccaagctccctcatgtcactgtcattgtatgactctattggcactatgcgcctaaattcggagtttatgctgcagcaggtcacaccacagctttgta

SEQ ID NO: 738702 - DNA, 605 bp, Homo sapiens
cctacccatcctggtagcaaaagacaaagggcatatactcttgggagttctagggccctgcccaccatcggtccctccctatactagcacagatgaagctctctggaaagcaccacctcctggtaggaggccaaccagcacaaaaatagagcattaaaccaccaaagctaagaaccctcatggagtccattgcacaccccagccacctccactggaasagacactagtatccatggctgagagacccatagacggttcatatcacaggactctgtagacaacccctggtactagcccagagcccagtagattcaatgggtggctagatccagaagagagacaataatcactgcagtttggctcacaggaagccacatccataggaaatgggggagagtacttcatcaagggaacacaccgtgggacaaaagaatctgaacaacagccttcagccctagaccttccctctgacagcacctacccaaatgagaaggaaccagaaaaccgaccctgataatatgacaaaacaaggctcttcaatacccccccaaaaaaatcacactagttcaccagcaatggatccaaaccaagaagaaatccctgat

SEQ ID NO: 738703 - DNA, 521 bp, Homo sapiens
accatcagagtaaaaattagaacaaaatgccaagatcctttcaaaagtcctttctcaaccactcagaacacgactgcttaagtctgtgggccatccaggtccttttgtctcctctttccccttcatctacttgccttctgccatgtccctacgcattaacttcccctagggactaggaaggggagaaggggaaaggttagaaaatagaggtagtcattgttgcwacctatgcccagctctaagaaactccaaaagcaaagatgcaaaaagcaatttaaactgttggccaaaattaaatggggagttgggggggagtgtgaatagacgtacagttttctttcttgcactattcccaggctctactacaacatcaaccacagaaatgctccaaaaatggtaaacattggctgagaggagaagggacagctcagcaaacgctaaggctgacaactgcaattccatctctgccaggagacacttgtttattaaagtctctctctcagccttgctgtattcacaca

SEQ ID NO: 738704 - DNA, 589 bp, Homo sapiens
ggtttgagaagcaaatccaggaaaactcagaattcaaggtacctgttaggaatgaggccaaggcactgaaaagaaaaggcctgtctgaaagtctacataaggaaagtctatctcagaccctaggcccacccccatgctacactgtcaggaactctccatcttccaccccaccacaagatacaagggttttctcyctagcaacatttccccagagaaactacagtcatgaagcacagggaagtgtgggggtgaggttctgcagaataaacagataatgccttcagatctttcccttccctgaaggtggaggtgaggggaagggaagtaagaaaatgtccaggactttaactgtgcaggcaaatgtattcataagctttgtaagaagctgttgaaaggtataggaagacttcatcatataatcctagaaaaacagatgaagagttgaagtcactataataatattacctccaggaagaagaaaaagttgtataacaggaaaaataatccctccttggcttagtgggaaaaaattaacatagtcataacgatggaaagactgaatactgtagttgagcagaaagtgaggact

SEQ ID NO: 738705 - DNA, 589 bp, Homo sapiens
ggtttgagaagcaaatccaggaaaactcagaattcaaggtacctgttaggaatgaggccaaggcactgaaaagaaaaggcctgtctgaaagtctacataaggaaagtctatctcagaccctaggcccacccccatgctacactgtcaggaactctccatcttccaccccaccacaagatacaagggttttctccctagcaacatttccccagagaaactacagtcatgaagcacagggaagkgtgggggtgaggttctgcagaataaacagataatgccttcagatctttcccttccctgaaggtggaggtgaggggaagggaagtaagaaaatgtccaggactttaactgtgcaggcaaatgtattcataagctttgtaagaagctgttgaaaggtataggaagacttcatcatataatcctagaaaaacagatgaagagttgaagtcactataataatattacctccaggaagaagaaaaagttgtataacaggaaaaataatccctccttggcttagtgggaaaaaattaacatagtcataacgatggaaagactgaatactgtagttgagcagaaagtgaggact

SEQ ID NO: 738706 - DNA, 453 bp, Homo sapiens
tgtaggctctttagagggtctttacaactcaacatccaaggtcataaattcactaataccacagcaaggactagtgtatggaaaataataaccattatctcttagatgagttgagtcttttacaacagaaagcacttttccatttattatattatatgagccttatagcaatcctttgaagcaggtattattatagactttgtaaggatgataaaattgaacctgggacattaaatgacttgcccaaggttatacatgggaatagtamatgggggagccaagctccgtatcctagtcttgtgaatattttgctttccagtacaatacagctgcttcagagaaaaacaccttatctatccttgaatgagctatctgagatatcttataaatgatggtaacaaattcctctaaggcagtttcctgttttccaagcatgatactgcataattggcc

SEQ ID NO: 738707 - DNA, 553 bp, Homo sapiens
attgttaagaatttgaaaaggcaaaccacagactgaaagaaaatatccataatatatatatctgatttgtatccagaataaataaagaatttttagttctcaataaggagaatacatacaccaatgaaagttttaaaatccaacaaagatatgcacagatayttcactaaggaggatacaaatagccaacaggcaaaatacgtttaatatctttagtcattagataaatacaagttaaaatcacgacaaagtaagatgacacagtaaaatggctatcattgaaaagactgacaaggtcaagtgttagtgatgaactagtgctcctgaagcttttaccaattggtgggaatgcaaaatggcacagccattatggaaaactgtttggcaatttcttataaagttaaacctattcttttcacacgaacttgaaatcttacacctaaacattttttccaagtgaaatacatcatgtgtccccacaacaacttgtacaaaaacattcgtagccgctttaataatagtaactccaaagtggggaaacaaaaacaaaccc

SEQ ID NO: 738708 - DNA, 607 bp, Homo sapiens
aaatactttgcaacactgtggaaagaaaagaccaggatgatccctttagtttttcctccattggatctatgggcacttaaaagggtgaccatcatcatggacccttgcttgagttggggcttataggaacaagtaaaaactggtgccctggataaagtctgggtcacagattgcatctgcagacccacccagaggtcattttctgagtcccacagtagagagttaaaatggatatccttagcagttggagtaatccctacattgaattcttgggctcaagtaaacactatcwtaggaaacctctgaaattgccctccaaccaccatcaatacagctgatcaaaaccagagttatattctcaaagagaatcataaagagtattgccaccattgtaatcctgaaggacgtggtggtggttcctgcctctctttattttgacagtctgccccactccctgctgcaaaataaaaggactttgaacaattttgtagaagactgcaagaagtccaaattgaagctgcagtgccatacctagggtcattgtagagcagatgaatgaggccacatgtacactgcaggcagccattgatttgacaaaagtgttctt

SEQ ID NO: 738709 - DNA, 607 bp, Homo sapiens
aaatactttgcaacactgtggaaagaaaagaccaggatgatccctttagtttttcctccattggatctatgggcacttaaaagggtgaccatcatcatggacccttgcttgagttggggcttataggaacaagtaaaaactggtgccctggataaagtctgggtcacagattgcatctgcagacccacccagaggtcattttctgagtcccacagtagagagttaaaatggatatccttagcagttggagtaatccctacattgaattcttgggctcaagtaaacactatcataggaaacctctgaaattgccctccaaccaccatcaatacagctgatcaaaaccagagttatattctcaaagagaatcataaagagtattgccaccrttgtaatcctgaaggacgtggtggtggttcctgcctctctttattttgacagtctgccccactccctgctgcaaaataaaaggactttgaacaattttgtagaagactgcaagaagtccaaattgaagctgcagtgccatacctagggtcattgtagagcagatgaatgaggccacatgtacactgcaggcagccattgatttgacaaaagtgttctt

SEQ ID NO: 738710 - DNA, 603 bp, Homo sapiens
tataagtaaaattgtacagtttactcatttgaagtgtataattcaatatcgtgggtttctttaaaaaaaatattcagaaggttgtgaaattgctaatacaacacattttagaacattttcacctgccaggagcggtggctgatgcttgtaatcctagcactttgggaggccaaggcaggtagatcacctgaggtcaggagttcgagagcagcctggccaacatagcgaaagcacgtttctactaaaaatacaaatattagccaggcctggtggtgggcgcttataatcccagctactcaggaggtttaggcaggagaatcgcttgaacccgggggcagaggttgcagtgagacaagatcatgccacttcactccagcctaggtgacagagtgagactctgtctcaaaaaaaccaacaaacaaataamaaaaagaaaccccattttcatcaccccaaaataatgaaaccacatacctattagcagtcattcctcaattaccccaaatatccctcccctccccaccacgaataatcactaatctaatttgttatctgtagatttgcctagtcaagatattttatataaatggaatcctataatgt

SEQ ID NO: 738711 - DNA, 509 bp, Homo sapiens
ctttacgattttttttttttttttgacagagactcgctctgtcgcccaggctggagtgcagtggcgtgatctcggctcactgcaacctctgcctcccgagttcaagcgattctcctgccttagcctctcgagtagctgggactacaggcacgtgccaccatgcccagctaatttctgtatttttagtagagacgggtttccccatgttggccgggatggtcttgatctcttgacctcatgatccacctgcctcaacatcccaaagtgctgagattacaggcgtgagccaccgtgcctactcaacctttacaatttttttaaatgagaccacagcactgctcaaactacttttccttraaaagaaaagtaccttcatgtgtgctacacaatggcttataaatactaatttttcagcctgtctggaaggaacaagcactattctctgccctgtatgaacactgaacactctcacctcttatgcttttaagtgctttacagtggttctttcc

SEQ ID NO: 738712 - DNA, 654 bp, Homo sapiens
acccccaggacctcggaatgtgaccttatttgaaaataggggctgggcgtggtggcttatgcctgaaatcccagcactttgggagaccgaggcaggcggatcacctgaggtcagaagttcaagaccagcctgaccaatacggtgaaatctcgtctctactaaatatgcaaaaattagctaggcatggtggtgcacgcctgtagtcccagctactcgggaggctgagacattacaagcttgaacccaggaggcagaggttgcagtgaaccgagatcacgccactgcactccagccygggtgacagagcaagactctgtctcgaaaaataaataaataaataaataaataaataaataaataaataaacaaacaaacaaataaaagaaaatagggccattgcagatgtaatgggttaagatgaggtcatactggagtaggatagactcttactccaacacaactggtgtccttataagaaaagaagagacacacagaaaacggcattggatgagaaaggcagagattggggagatgcaatctctgcctccctggggattggggtgatgtctacaagccaagaaacacagaggattgccagcaaaccccagaagctggggaagaggcaaagaaggatcctcccctactggtttcaga

SEQ ID NO: 738713 - DNA, 582 bp, Homo sapiens
tcccaccgggttcatgattctcatctcccctgatatatttggccagtttacttacatctctgggcctctataacctcatttgtaaaataattttaacaaacctaaccctgatcctaatccagtctctaaccctaaccttaatgggatgatgaactgctagcaggactatgggatgattaagctggataaagcatgtcctacatcctggacataagaagtgtccatcaytattggttcctttgcccttccctgctctgaccacagaccttaagtttggggacccaggcttatcttggagctcagtgttattgttagttgaatttgtcctgagagcagttagcagtttctcagctaaacagatacttaaatatatggaggtctacgtctaatttacctgatgagaaaactcttcagcggactataatgcctaagaatctccagaaaggaaataaagtttaatgtacacctgcagaagtgtcagggacttgatgtaaatatgtctaatcctcctaagaatcaaagtggttattgcccctatttaacagataagaaaactgcagtttctagaggtcaagtgtctca

SEQ ID NO: 738714 - DNA, 627 bp, Homo sapiens
gcaaaagagatgcccagaagctcactaacaaggtgggataagggagatgaatggagacagccagaaagtccggagagaagattgagagtaagcacacactggggcaaagagggaatggagaacactgatcaaaggtaaaaccagtgtgtaggtctaaattgcaatgytttcccctctctggcaccttctcactccctcttttctcatctctctcccagttactatcaaaggaaaatttatgaagggctcgaggcattggatattccctgtatttcaatctaagtttttgcaatctccagtgaacagctcggctgcctctgcctgtcagggaatttaaattgcagatgggatggtgaacccatgcccagagcaggagcagcccctctagtgagcaccagcattgcttagcaactaggttgggaagaactttaggaagcagcagaaagttccactctggaaagtgcccttgagccagggcatctcctgggaacagggaaggagtgtcccggaaagaagcagcagccaggttagagatctgctcaatccagggtcaggggtatggccagggggtacagtcagcaccactctgctcagtcaccattgagtgtgtccttcaccgagggacaa

SEQ ID NO: 738715 - DNA, 637 bp, Homo sapiens
aaatctaccatcttattatttgttttctttctttcttttttttttttttttgagatggcgtctcgcactgtcgcccaggctagagtgcagtggtgcgatctcggctcactgcaagctccgcctcccgggttcacgctattctcctgcctcagcctcccgagtagctgggactacaggctcccgccaccatgcccggctaattttttgtatttttagtagagacgcggtttcaccgtgttagccaggatggtctcgatctcctgacctcgtgatccatccaccttggcctcccaaagtgctgggattacaggcttgagccaccacacccagccttatttkttttctatttatctcatattttcatttttccttgtttttccattttttcttactgtatttttaggacaccattttatctccaatattagctacactctgtttcatttttttagtgattactttggggtctgttaagttatcccaatctgccttccaacaatataatatcttctcacatatagtgtaagaatcttacagtagtatatttctatttcttcctagtatcttttttgctgttgtcatacatttatttcacccaataaaccgtaagttacattgctattatttttatgtaaaa

SEQ ID NO: 738716 - DNA, 545 bp, Homo sapiens
tggagcccaggaggagcacttcgcaactacaggccccccagggagatgctgtgttcaccatctcctacagtcacctccaggtagctccattctgtccctgggagaagaggagtactgcgtaggctccagcctgcacaatctggagtggccaccacttaccccttctgcaaggaagaaccttgctggtcagcatcacaccagcctgcagccctcctcctgctcccaggctgaggatcagagaagtgatgggacaagggcacagccacccttcagggatcaaccaggtggtgccaaacttgccctgagtcttgctgcagtgggagaaagagagaaatccatagtcatagtaaggacaatatacaagcaatcatgatgattctyccacctgcacagagctttatatttagcaaggtcccttcctttctgttgtccccatccatggcccggggtggagacattaggaaggcaggaagaaccccctgctccatccttcatctgggggatcaccccctctggcagaaggaaataggcagcacagagcctgg

SEQ ID NO: 738717 - DNA, 651 bp, Homo sapiens
gggatcagaaaaacacaaccttgaatctacctgatcattaagccaggcccttctctaactgagaactcgtaattttggtttgaaaattttctcatattcactgtgtcctctctccttacagccaatactttggttcaaacactctttatttttgcctggattaacataacaactctttaactcttctttcacctttgttcattttcctttcctcattctagttcctcttctgtgcttcacctctgctcttgagggatctttctaaacttcaaatgtgacccctaaggaattccaattttccaaagactaaagtccarttcctcagtatgatactgaaagttcttcccaaaataatttaagcttacctttctcactcctacaccacaccctgcacacttggtatgttgactgtgtttttcctctttcacaggttggtgctttactcgtggtttcccatcagcccagattgcaaatgtacctctttcttgctgttgctaaatctttctatgcttgtaaaatcaaaccacagcctgcctaaagccatctttgggtctgtatcggttacattttcttctccataatccccaagcacttcagactagtctcatggtccttgttacacgttaatttatattgcatatgtgtctttct

SEQ ID NO: 738718 - DNA, 544 bp, Homo sapiens
ctaagaagaatcggtggcatctagaatagtgtgtgtcctatggggttcaatttggtaaaagtggcaatagagtactttacatagcagtatggcttgggtggttcaaattctcaggggtaatactgcttgatattcttgaattatttccagcttatcagtctgtacacaaaatactggctgtttaagcacattgaagtagtgattgaacaactagaatttttttaagtagctacagtgtatatctccttaatattttttctmaacgaccatttttaatatttctgatgagctataattgacaaaaattatgttctgattttctaaatacagacagccttgaaaaatgataggtaaatttaggaaacagaattgcccacgggattgccctaggaatcagtgaggaatcctgtgaggtgaagtttcttggcgtaatgtgttcttgtcacaatatttacagatatgtgttcctaagttgtttctctttcaaattttggaataaatgccttaagctaaacatattacccatgatatcacaaagaaaaat

SEQ ID NO: 738719 - DNA, 625 bp, Homo sapiens
atgtacctaggggaaagcttgatggtaatggatgtccatctctagttgtgagcagagtttgcccctgccgaagtgaatctgagcagtatcaaacctgtgactttagtgttctgtgtaaagtctgatgtagctttgaaatgaaaagtgacagtgctgaagattaacttttytctttgccctgtttttgtagtttgcaccaacagtccaagtctcattgttacttatttctggcttttaggagttacttcaggcttgatgtgaaagctcctgattgagcatctggctgcaaatgtcagggtcctatatagaattattcttagagccacaggtccagtcttccagagagcctgtcatttaaaacaattgtaataaaatataatagggggcagaagtagaaaacataccaaaaagaacaacaaatgatgagtagatgttttaggttacaagtttatatataatgtctgtgtctgtgttaagattagggaattgtgaggtgagtctcggaactcaattctttctgttattttggctagaccctttggaagtagtgtgctatagaaaggccaagaatcagatgggtccctagggcctgtatctttatcttccttctagaaatgagtctgtc

SEQ ID NO: 738720 - DNA, 625 bp, Homo sapiens
atgtacctaggggaaagcttgatggtaatggatgtccatctctagttgtgagcagagtttgcccctgccgaagtgaatctgagcagtatcaaacctgtgactttagtgttctgtgtaaagtctgatgtagctttgaaatgaaaagtgacagtgctgaagattaacttttctytttgccctgtttttgtagtttgcaccaacagtccaagtctcattgttacttatttctggcttttaggagttacttcaggcttgatgtgaaagctcctgattgagcatctggctgcaaatgtcagggtcctatatagaattattcttagagccacaggtccagtcttccagagagcctgtcatttaaaacaattgtaataaaatataatagggggcagaagtagaaaacataccaaaaagaacaacaaatgatgagtagatgttttaggttacaagtttatatataatgtctgtgtctgtgttaagattagggaattgtgaggtgagtctcggaactcaattctttctgttattttggctagaccctttggaagtagtgtgctatagaaaggccaagaatcagatgggtccctagggcctgtatctttatcttccttctagaaatgagtctgtc

SEQ ID NO: 738721 - DNA, 585 bp, Homo sapiens
ttttattcttctgctaatatattaattgacttatagttgttaaatcaaccttgcattccaagtataaaatccagtcgttctataaaatcctttttatatgtactgaattcatttagctaaggctacagtttgaataatgtcacccaaagtttatgtgttggaaacttaatccccattctaacggtgttgagaggtgggacctttaagaagtaattaggtcatggaggcatcattctcatgaaaggattcaggccattatcactygagtgggttagttataaaaaggatgagttcggcctgatttcttctctgtctctggcttgcttctgccttctgatgtggggtggtctcctccagctgccggtgtcatgctcttagacttcccagcctccagaactgtgagctaaataaatatctgttctttataaattacccagtcttgggtattctgttatagcagcacaaaatacactaagacagctaatattttgttgggaaattgtttgtagttttcttgttttgtgtgatgtctttggttttggtaacaggaaaatactggactcatagaatgagttaggaagtttc

SEQ ID NO: 738722 - DNA, 593 bp, Homo sapiens
tttcatttgaaggtcaccttaatgctcttaaattcaaaaatatgctaatttaaataccaaatcctattaatctaaaacacacattgcaaacatacaaatatctcttctcttcacatgtcagtgcccattcatgtcatggtttggaaatggggacaktagattccccttgagctgcaagtcagcatatgtttctttatagttaactttagcaaaatttatacaaaatagtaattaacaacaatcttctttatttgttaactcaaaagaaaataccttcaaaactgcattttaagtttctgtactaaaatacagaaaaactacacaaatattgaaaagttgaaagttctttaatttttttattcctgttatcactaccacaatttacagggcaatatacttgatgtaatgaaaaagaaacagacaaagctacaacagataaaagagctcaggaatgtacgtctaatcgacactatattgcattcattaatagctgcacttttgcaaactgtggctatgatagtcctgcacaagaagggttttctgtttaagctgcaataacttttctgaccatggatcaccattccttctgtggc

SEQ ID NO: 738723 - DNA, 577 bp, Homo sapiens
tagactcaaggcccagcaggaccctaaaggtgaggctgaaagtgttacccataatgaggtatactacactctaaaagaatgacttgagttttgttaatttatacagacagaaatctgggaacttgtgtgagaatggatattgagagtgtaggataacggtggaaaaagcataaagctgaatcaggctgaatttattaatatggtckcactaaaagaaattctgtatttaacattgtagcttagggagttagggatggctctaaaggtttggttagtaggttggctgaaacacagaccaaaaggcagcccacagagagtgaactggaaagccaaatctgccttggtttaatgcagcggaggagattcaaaggcttagggaaggctgggtgtggtggctcatgcctgtaatcccagcactttgggagaagaccaacctggtcgacacagcaagaccctatctcaaaaaaaaaaaaaagcttagggagactggaatgtgagagatgtgagagtaggtgtttcatataacagctacttttccacactgaatggatccagaagacatacctttcaccacaac

SEQ ID NO: 738724 - DNA, 570 bp, Homo sapiens
ttcatgtgtaaaatgtaagggaaaaaaaccaaatattattttgttcaatattacagaagaccaatagttataagtggccgttccttttaaaactcatttcccatggtaagagactgttgcatctgaaatgaagttaacatgtctgtcagwcaaaggaaattagtaaatcttactctgaaatcaaggaatctatgaaagtatatataacaacatataattactctacatgcaacaatctaatagctcaaataatgtcctttatcccggggccatattccatagttcgacagagaacacatagcagtaaggggataaaacacctttcatctcagagtttttggctaattttagtttaataaagacttatctacagctcaatagccaatgctttacattgtctatagagaaattgcaagtgttgaatgaaaccttaaatgcagatagaagggcagtaatattttgcggtttgtaagtaagactatatgtaataatatccacatcttaattcattacttgggagctaaatcccttttctcatgttacatcaaaaaaggaggctgtgcctaaaga

SEQ ID NO: 738725 - DNA, 626 bp, Homo sapiens
atttaaaaaaaaaaaaagaataaatgcatgaatgaatgaatctgtacatgaatttacaagcaagcagcaagggacatcaataacaaacaatctgaacagtctgccactgaatcgccaagtcacctgtatacaattttatgaggcgtttccatttttggcgtaggagatggcctatctaktatcaaaaataaactttggagtctttctacaaatttgacagattttcatgggaattcaaattaaatgcatgattggacatttatttgtttaatctactcagtaggtttcttttattttcctgtgtcaagcatgaaagttaaaactatttctaggcctttcatcttagcttggctttccccttaatttctttgctccagaatgttgaacaaaacaggtccctttttgtggttggaaagtttggctttacatagaacctttcaacacacaactgtcagcacctgattatgggccattttttagcctatgactttcacttccttccttaaataggtctttcagatgaatcatctttagccactctgtgattatgcagggatcagatacgcagtatagaaatgaacaggatacactgaagtcccttctatcttgtatcattttgtgctctg

SEQ ID NO: 738726 - DNA, 626 bp, Homo sapiens
atttaaaaaaaaaaaaagaataaatgcatgaatgaatgaatctgtacatgaatttacaagcaagcagcaagggacatcaataacaaacaatctgaacagtctgccactgaatcgccaagtcacctgtatacaattttatgaggcgtttccatttttggcgtaggagatggcctatctagtwtcaaaaataaactttggagtctttctacaaatttgacagattttcatgggaattcaaattaaatgcatgattggacatttatttgtttaatctactcagtaggtttcttttattttcctgtgtcaagcatgaaagttaaaactatttctaggcctttcatcttagcttggctttccccttaatttctttgctccagaatgttgaacaaaacaggtccctttttgtggttggaaagtttggctttacatagaacctttcaacacacaactgtcagcacctgattatgggccattttttagcctatgactttcacttccttccttaaataggtctttcagatgaatcatctttagccactctgtgattatgcagggatcagatacgcagtatagaaatgaacaggatacactgaagtcccttctatcttgtatcattttgtgctctg

SEQ ID NO: 738727 - DNA, 552 bp, Homo sapiens
gctggcatgttttttccaatgttgactcacatgataatcttgctaaggtggctcagattccacggtgtggagcaggcagtctgggtctagctcatgtactttggcaagatgatgcttgtactgcctgtaggaaggtgacaggaatagggctataagtggtagccgtaaatgtcattattatcattattatttctagcaagtagcaatgatgtgaaaawggactggggccattactatgaaaggaacacataagcaaagtaaaaatgacaaatacaaatgatggggccttatttaagcctctctaccagtcacagagagaaaaacactggtagctggtgagcccactgtgtaaatacaattgcaggacagcagttccattcctccatggctgaagcttggacactcttctttctggtttttatttttcttgagaaacctgaaccctggggagacaggcataggtagaaatgcctttccattccgcttggaagaaagaataagcggtcttcagattaggttcccaagattagtatttatcttcctgttctgctt

SEQ ID NO: 738728 - DNA, 603 bp, Homo sapiens
tgtatttcccattccaacatttttcttttatttgtcgtcatctgggattttatctcagtgtccacctcttccatacacctcacatgtgtggtgagggaaatgtccccactcttggctctaggagcggggacacctctgcctcaggcctacactaatcgacrtaatagcatccactcatcccagcaatggatgcagttatggttacatggtctaatgtgggccaatgagaagggagaagatatgggctaagggtttccttacttctgtgagagaacttccagaaccgtcattctttttctttctgaatgcaggagaggaaacgtgctccttgcctctctccctctatctgactcagttccttatcatcctcatatatgtactgatcggtggaaactaaatgcacccagaaccctagaagctgggaaatgcagtctttgactttccagcctgttcgggattggaaggtgctagaaggggctgaaatgagcattgaatgagccagtttgcagcatctgctgtatcaccttctttgttactttaagagtagtgactattgatcatgtttttgaaatctacaagaacttcgaatagtgagcaaaagag

SEQ ID NO: 738729 - DNA, 603 bp, Homo sapiens
tgtatttcccattccaacatttttcttttatttgtcgtcatctgggattttatctcagtgtccacctcttccatacacctcacatgtgtggtgagggaaatgtccccactcttggctctaggagcggggacacctctgcctcaggcctacactaatcgacataatagcatccactcatcccagcaatggatgcagttatggttacatggtctaatgtgggccaatgagaagggagaagatatgggctaagggtttccttacttctstgagagaacttccagaaccgtcattctttttctttctgaatgcaggagaggaaacgtgctccttgcctctctccctctatctgactcagttccttatcatcctcatatatgtactgatcggtggaaactaaatgcacccagaaccctagaagctgggaaatgcagtctttgactttccagcctgttcgggattggaaggtgctagaaggggctgaaatgagcattgaatgagccagtttgcagcatctgctgtatcaccttctttgttactttaagagtagtgactattgatcatgtttttgaaatctacaagaacttcgaatagtgagcaaaagag

SEQ ID NO: 738730 - DNA, 622 bp, Homo sapiens
ctgttcattctgagcaaaaagcccttttgtatatttagttagagctaggggctatgtgtgtgtgctttttagagatttacattttactagtgtgaggggaactgagcagagctcatggaaaaactgttcctgtttattgaaataaaaattccagaattttttttcagtctcagtatgattttctctaaaactaaagtacaaaaatgtttatgcagtttccccttttcaattccctcagcagccgaggtcctctcttgggtcctgattttccttgcaaactgaccaaaggaagcttccagaagcaactgtccactacaagaggaaggtgtggccatgagggaagacggaggctccagaggtcctggctctgcagagaccgcggtgctgcctcccagcctgcctgamaactgacttggtttgcaccagcgggtgcccaggcctccacagagtcttcggttctccaggtttcccatgccgccattcttgatcagttttcatctcacctctgtggtttctacctcctgtagatgcttcaactccgccactgaagccaatgctgcctgcttcctccggtgacagcagcaaagcaggcagcagtggccttggaggctctggctggacc

SEQ ID NO: 738731 - DNA, 622 bp, Homo sapiens
ctgttcattctgagcaaaaagcccttttgtatatttagttagagctaggggctatgtgtgtgtgctttttagagatttacattttactagtgtgaggggaactgagcagagctcatggaaaaactgttcctgtttattgaaataaaaattccagaattttttttcagtctcagtatgattttctctaaaactaaagtacaaaaatgtttatgcagtttccccttttcaattccctcagcagccgaggtcctctcttgggtcctgattttccttgcaaactgaccaaaggaagcttccagaagcaactgtccactacaagaggaaggtgtggccatgagggaagacggaggctccagaggtcctggctctgcagagaccgcggtgctgcctcccagcctgcctgacamctgacttggtttgcaccagcgggtgcccaggcctccacagagtcttcggttctccaggtttcccatgccgccattcttgatcagttttcatctcacctctgtggtttctacctcctgtagatgcttcaactccgccactgaagccaatgctgcctgcttcctccggtgacagcagcaaagcaggcagcagtggccttggaggctctggctggacc

SEQ ID NO: 738732 - DNA, 542 bp, Homo sapiens; identical to SEQ ID NO: 732321

SEQ ID NO: 738733 - DNA, 593 bp, Homo sapiens
taaacttctctttcatggtctaaaacattacatagagctaataatcactattctctaggcttgttttaagtattaaatgagagaaagcaataataatgacggtgaaagtggtggtggtgggtgcgtgctgtgagactgtatccccagatccctgtcttgtagcctggagggcaaacagggactgccttggtagagaggagatccagcagcaaaagcagccagtgctcttacaacaggataaaaggactctctgggccgggcacggtggctcacgcctgtaatcccagcactttgggaggccgaggcatggcctcggtggatcacaaggtcaggagatcgagaccatcttggctaacacagtgaaaccccgtctctactaaaaatacaaaagcaaaattagccgggcatggtggcgggcrcctgtagtcccagctactcgggaagctgaggcgggagaatggcgtgaacccaggaggcggagcttacagtgagcctgatcgtgccactgcactcctccagcctgggcgacagagtgagactccgtctcaaaaaaaaaaaaaaaaaaaaaaaggactctctggggacttgaaaga

SEQ ID NO: 738734 - DNA, 626 bp, Homo sapiens
acctccaaccatgtatggtgccctatgcgtctcctgtctccatagctcatgaggaagacatagcttcccactggcacagaacccatgggcttcagtggtgggtttgcccagccaaactgctagtgttagacactcagcataggacaagtgaacagagtatgtytggggtaatattgaccctgggggagaaaaacccacaagggtttctctttgaaagcgtgcctttctcacccaccactgtgctctatccttggaatttatgggcatgaactccttcattggtttcgtaaacatttactgagtacctctctagatcaagccatgtgcctggcactgcaaaaaatcattccaacgccctgtgaaatgagtgtcaccctctctcttttacagatgagaggctgaagctccgcggtcacatggagaacaaatacaatcttagccctacggaatgttttgtgggttaagaacccagtcaggagaccctgcaccacattttttccctgtcagttttgtcacactttcacataaacaggaaggatgactgaggagtgaggggaaatggtactggcgtgagctgccttaggattcagtggagcttcccagctttttcctgttttgtgtaacca

SEQ ID NO: 738735 - DNA, 553 bp, Homo sapiens
ccaggtttatcgcttttgataaacatatactatttgttagggcgctatgacatttatctttgactttgacatttggctaaaatcttttagttacagtcagctttgccctcagtttatgtcagtgtcatttctgggatccttgaaattrtgaatgatcaataatcttacgattgttgtaagcaatgttataaaaccactgtcatcatgctgtaatataatcaaggcataacttatgagttgattttaatatacattttctctttcagttataatatgtattttagatgtatcttggagtgaaaaacgccttgcttgtctcttacaaaaagataaatcaaaatattaatatttgcacaaattctcttttgcacaaactctcttaatcaaggcatcataagcccattgtaggtatcatatacccatctgtcttaaaacaatttctggtataagaaaaacatgatgttagaaattgattcttttggcctgttctgaaattttcagtactcatacatattgtagaggtgacagaaatgattacaattcacatttaaaa

SEQ ID NO: 738736 - DNA, 553 bp, Homo sapiens
ccaggtttatcgcttttgataaacatatactatttgttagggcgctatgacatttatctttgactttgacatttggctaaaatcttttagttacagtcagctttgccctcagtttatgtcagtgtcatttctgggatccttgaaattatgaatgatcaataatcttacgattgttgtaagcaatgttataaaaccactgtcatcwtgctgtaatataatcaaggcataacttatgagttgattttaatatacattttctctttcagttataatatgtattttagatgtatcttggagtgaaaaacgccttgcttgtctcttacaaaaagataaatcaaaatattaatatttgcacaaattctcttttgcacaaactctcttaatcaaggcatcataagcccattgtaggtatcatatacccatctgtcttaaaacaatttctggtataagaaaaacatgatgttagaaattgattcttttggcctgttctgaaattttcagtactcatacatattgtagaggtgacagaaatgattacaattcacatttaaaa

SEQ ID NO: 738737 - DNA, 594 bp, Homo sapiens
gtctcaaagtgtggcgttcctctattacccacttggttacaacagctttatattaataattgtagtaataaagttgatcgcacataggatggaggaggcacctgcctggtgagatgagacaatggtcggattcactgaggctcctgcgtgtcccggatttcccgctgggggagggtgttcygctcagcggttcccacacctgcttccatgggagaagcaagaagaagtcagaagggtgggcgaaggagtcagaagcttctattattggttcggggagatgctgtgtcgggggcatcaattatatggggaaccaaccagttgccaactcctgacccttggagttgaccccacaccgcttaaacctctgcgctggttccccgggggcccacagtgaggtctgtaactcagggagaggcgctggagcggggtgtgggagaatggtgtgcaggacgggctccatgcactttgaaactataaactgccttatgagacaggggtacggtgtgtgtgcattttcctgggagagtccatagtttttaccacattgtgtaaagcaatgctgtgcagtagaaatattacgccatacacaataca

SEQ ID NO: 738738 - DNA, 594 bp, Homo sapiens
gtctcaaagtgtggcgttcctctattacccacttggttacaacagctttatattaataattgtagtaataaagttgatcgcacataggatggaggaggcacctgcctggtgagatgagacaatggtcggattcactgaggctcctgcgtgtcccggatttcccgctgggggagggtgttccgctcagcggttcccacacctgcttccatgggagaagcaagaagaagtcagaagggtgggcgaaggagtcagaagcttctattattggttcggggagatgctgtgtygggggcatcaattatatggggaaccaaccagttgccaactcctgacccttggagttgaccccacaccgcttaaacctctgcgctggttccccgggggcccacagtgaggtctgtaactcagggagaggcgctggagcggggtgtgggagaatggtgtgcaggacgggctccatgcactttgaaactataaactgccttatgagacaggggtacggtgtgtgtgcattttcctgggagagtccatagtttttaccacattgtgtaaagcaatgctgtgcagtagaaatattacgccatacacaataca

SEQ ID NO: 738739 - DNA, 594 bp, Homo sapiens
gtctcaaagtgtggcgttcctctattacccacttggttacaacagctttatattaataattgtagtaataaagttgatcgcacataggatggaggaggcacctgcctggtgagatgagacaatggtcggattcactgaggctcctgcgtgtcccggatttcccgctgggggagggtgttccgctcagcggttcccacacctgcttccatgggagaagcaagaagaagtcagaagggtgggcgaaggagtcagaagcttctattattggttcggggagatgctgtgtcgggggcatcaattatatggggaaccaaccagttgccaactcctgacccttggagttgaccccacaccgcttaaacctctgcgctggttccccgggggcccmcagtgaggtctgtaactcagggagaggcgctggagcggggtgtgggagaatggtgtgcaggacgggctccatgcactttgaaactataaactgccttatgagacaggggtacggtgtgtgtgcattttcctgggagagtccatagtttttaccacattgtgtaaagcaatgctgtgcagtagaaatattacgccatacacaataca

SEQ ID NO: 738740 - DNA, 612 bp, Homo sapiens
acatctgcgttggcaagcctgcagagcaggggaactctcacacggtgctgacggacatacaagatggcacagctgctgtggaaaacagttcagcagttccttataaagtcaaacataagacccagcgatccttccccttaagtgtttatccaggacaaataaaagcagatttccacacaacaatctgtacaagaatgttccagcagcttccctctgctccccacaaaccgagagcagcccaagtggccttcagctgataaatggataaacaaactgtggtacatccatagagcggaatatattcagtaataaaacagggcaacttaccgatacacatctaacacrgatacctctcaagagctttacactaagtgaaagcagccagacacaaaagatacctactgtaggattcttttacctgaaattctagaaaaggcaaaatgacaatgcgagaaagcaggtctatggatactgaaggccaggaggcaggctgctggggaggagccttaaagggcacacgggaactctgaaggatgctggaaatggtccatgtcttcactgtgatgaccacgtggctgcatgcatttatcagaactcactgagctgcacacc

SEQ ID NO: 738741 - DNA, 612 bp, Homo sapiens
acatctgcgttggcaagcctgcagagcaggggaactctcacacggtgctgacggacatacaagatggcacagctgctgtggaaaacagttcagcagttccttataaagtcaaacataagacccagcgatccttccccttaagtgtttatccaggacaaataaaagcagatttccacacaacaatctgtacaagaatgttccagcagcttccctctgctccccacaaaccgagagcagcccaagtggccttcagctgataaatggataaacaaactgtggtacatccatagagcggaatatattcagtaataaaacagggcaacttaccgatacacatctaacacggatacctctcaagagctttacactaagtgaaagcagccagacacaaaagatacctactgtaggattcttttacctgaaattctagaaaaggcaaaatgacaatgcgagaaagcaggtctrtggatactgaaggccaggaggcaggctgctggggaggagccttaaagggcacacgggaactctgaaggatgctggaaatggtccatgtcttcactgtgatgaccacgtggctgcatgcatttatcagaactcactgagctgcacacc

SEQ ID NO: 738742 - DNA, 597 bp, Homo sapiens
aaaaatacctttatgtgagtgaaaagacatgccacagagcagaagattattacaatatatgtctttcaaagcaaatcttatctagaatatatcaagaaatcccacagatttcttgtgggaatttcttgtgctcacgcctgtaatcccagcactttgggaggccgaggtgggcagatcaggaggtcaggagatcgacaccatcctggctaacayggtgaaaccccgtctactaaaaatacaaaaaattagccaggcgtggtggcgggtgcctgtagtcccagctactcgggaggcttaggcaggagaatggcgcgaacccgggaggcggagcttgcagcgagccaagattgagccactgcactccagcctgggctacagagtgagattccgtctcaaaaaaaaaaaaaagaaaagaaaaagaaaccccacagattaataacaaatgacaataaaaatctttataaatgggtcaaataagtatttcacaaaagaggccattcacacagccaataagtatatgaaaacctgttcaacttcattaactatcaagaaaatacaaattaagctgaccatggtgtgcatgcctgtggtcccagc

SEQ ID NO: 738743 - DNA, 597 bp, Homo sapiens
aaaaatacctttatgtgagtgaaaagacatgccacagagcagaagattattacaatatatgtctttcaaagcaaatcttatctagaatatatcaagaaatcccacagatttcttgtgggaatttcttgtgctcacgcctgtaatcccagcactttgggaggccgaggtgggcagatcaggaggtcaggagatcgacaccatcctggctaacacggtgaaaccccgtctactaaaaatacaaaaaattagccaggcgtggtggcgggtgcctgtagtcccagctactcgggaggcttaggcaggagaatggcgcgaacccrggaggcggagcttgcagcgagccaagattgagccactgcactccagcctgggctacagagtgagattccgtctcaaaaaaaaaaaaaagaaaagaaaaagaaaccccacagattaataacaaatgacaataaaaatctttataaatgggtcaaataagtatttcacaaaagaggccattcacacagccaataagtatatgaaaacctgttcaacttcattaactatcaagaaaatacaaattaagctgaccatggtgtgcatgcctgtggtcccagc

SEQ ID NO: 738744 - DNA, 597 bp, Homo sapiens
aaaaatacctttatgtgagtgaaaagacatgccacagagcagaagattattacaatatatgtctttcaaagcaaatcttatctagaatatatcaagaaatcccacagatttcttgtgggaatttcttgtgctcacgcctgtaatcccagcactttgggaggccgaggtgggcagatcaggaggtcaggagatcgacaccatcctggctaacacggtgaaaccccgtctactaaaaatacaaaaaattagccaggcgtggtggcgggtgcctgtagtcccagctactcgggaggcttaggcaggagaatggcgcgaacccgggaggcggagcttgcagcgagccaagattgagccactgcactccagcctgggctacagagtgagattccgtctcaaaaaaaaaaaaaaraaaagaaaaagaaaccccacagattaataacaaatgacaataaaaatctttataaatgggtcaaataagtatttcacaaaagaggccattcacacagccaataagtatatgaaaacctgttcaacttcattaactatcaagaaaatacaaattaagctgaccatggtgtgcatgcctgtggtcccagc

SEQ ID NO: 738745 - DNA, 624 bp, Homo sapiens
atcttataaaggtaatttacattaaaactaaatttagtgtcctatttttatttttgctaaatttcattttctttgcttcagcccatcttttagtctatcattttgaatcctgattgtggcatatcatattatctctttctggttctcatcatctatacattagataatgatctcatctatctttaagctactactgaaaatgaggaatcagatattgtgaataatggagctttgtggaattttactaacatttcctttcaggttgacacagtccattacacatcacccttataatattaagtacagagcttaaagggatctgtgagagacatggccaatttctttgctgaaactaagataaactggaacataagttatttctcttacgtcccaagttaytgatgttatcatctacatctaattttagggcaaaatgctcagcaaacatatgttcgcccttagtggcaaaaattctcttttctaaattatttcacatgccatatttttattatagctttaagaattctgacataaataaaaaactgcaaattgggttcagtgtaaactgcttgggtgatgggtgcaccaaagtctcacaaataaccactaaagaacttacccatg

SEQ ID NO: 738746 - DNA, 624 bp, Homo sapiens
aaaattctcttttctaaattatttcacatgccatatttttattatagctttaagaattctgacataaataaaaaactgcaaattgggttcagtgtaaactgcttgggtgatgggtgcaccaaagtctcacaaataaccactaaagaacttacccatgtaaccacctgttccccaaagtcctatggaaataaaaaaataaagaaaaataaaaataaacrtaactgaaaaaaagaattctgacagaaatatacagtcttaaaattctaatgtattagtttatcttctataacagcgaggccctgaaatctcagtggtctaaggcaatagaagtgcattcattactcaaactgtggtgaggaggaaggactctggggtggaaagactatctttagtatatagacaggttaccctgtgtattgatatacttccaataaagcaagggaaaagagaggagaaggttatataggaagtgtttatgagttaggttgggaaaatgacataaatcacttctgtccacattttactagctagaactcaacttcaaggaagccttgaaaatatgatttgactgtctgacttgaaataagggaaataggtttggataaactaatagcagtctctctc

SEQ ID NO: 738747 - DNA, 553 bp, Homo sapiens
atgctacccttgctccagagcagggtggtgccgggcacagccccaggccagcccatgcacagatgccatggccctaggtgtttcaggttgagctgggaagtagacggttaagcctccctaaagatctcaagtgaccttcactctctcacagtgtgccacctacagctgcaccccacccacaggccacccctccacctgcccactttgggtgaggatgctggggtctgtccctaagcctgtggtgatctctctgccaacaatcctgagtgtgctgactttcttctcggtccttcagataagccaacctggaacatggctgactttcagagcctgctccaggccaytacttcctctccccagatgatacaattgagtttagcaagggtcatgcttcatggtgggataaacacaggggcacaactctccaaaatgggcaagctaagctggcagtgcccactaacagagtggtgctgagctctagtctggcatgttggttctcccattaatctgagcccactgcggacatttatcaatatggcacttgtgcatctat

SEQ ID NO: 738748 - DNA, 538 bp, Homo sapiens
ggtcctaaaaccaaccccctgcagataccaagtgacaattggagtggttttatctgagaggtgagactatgaaggacttcttgttttttactttctttttattgttgaagtttttacaaggtgcacgtatttttgtaagtaggaaaatagccaatatctttgagacttgcttctgcaraatggtgacaataggccgggcgcggtggctcacgcctgtaatcccagcactttgggaggcggaggcaggcggatcacaaggtcaggagatcgagaccatcctggctaacacggtgaaatcccgtctctactaaaaatacaaaaaattagccgggcgtggtggcgggcgcctgtagtcccagctactcgggggggctgaggcaggagaatggcgtaagcccgggaggcggagcttgcagtgagccgagatcgcgccacttcactccagcctggtcgacagagcgagactccgtctcaaaaaaaaaaaaatggtgacaataacacccaccttgcacagtagtaatgaagatttaataagaca

SEQ ID NO: 738749 - DNA, 605 bp, Homo sapiens
tagaatctgatgttcttcccactaacttcacattgcttccttccaaacactttctaattttggcattgtctaattctccagctttgcaaaagcactattatgtcaaagactattgcattctagagacttggctccagagatgccatcatggctacctgtctaagagtaaagcagaaatggatttcagtgctataagttctactctagcctacatttcacaaaatctaagagcaaggaacacgttcacaaacatttgcaagaaataaaacgtgaaggaaagatttagactcttacagcagctttaaaacaattcctactcagggtggagacttaacttagtgaatacccatgctgagtattaaaggtttttcagagttggttttgcctgtgagctcctaaagaccattttctgatcctgaaattcagcttacaggaacctttaaacaaatgtattctgcattattytcattattcaattatgacagtctttcccccagcattttaattagcactcatttactgagaattaaactgtcgttttagttgaactcaaagaagtaccccagggacatgcattccacaagataataaaagcaccatataat

SEQ ID NO: 738750 - DNA, 648 bp, Homo sapiens
tttccacattttggaatgacacaaaagtgtttgttagatcagatgaggcctacaacagcccagaatctgaatttatttgctccaataataaaaagtacataaaaatattaactaatgtagaaattgccaaaaatgtgccatagtccatagtaataatctgcaatccatacctattactaagctagaatgttaaatatagttacaatacacatttctttttttaaggagaaatgcatgtatattagttcattctcatattgctatcaggaaataccaagactgggtaatatataaagaaaatagctttaattgaatcacggttccgcatggctggggsgggggtgcgactcaggaaccttacaatcatgcctcttcacagggtgacaggagagagaatgagtgccaggaggggaaatgccagatgcttataaaatcatcaaaactcaagagaactcataaatattgagctatatataatgaataaattccggtaatgtaaagtacagcatgaggactataattcacaatacaatattacatatatatatatatatatatatatatatatatatataattccatactggatacatattttctttacacgttcatctttgatagacttttttttcatatcttgactactgt

SEQ ID NO: 738751 - DNA, 605 bp, Homo sapiens
tgtactgtgagctcctagaatccaggaataactcgctcaaagaaccagacacattgtgagtgctcactaaatgtttattaaattttattaaaccaaatttcaaagctcagagagcaagtatgtggaaataaatgtattaaaatcttgccagccatgaaagtccaatgaaagcaaagttttatttgaaaagaaactacacacacacacacacatatacacacacacacacactgaattttcatytattacaacgtaggtcattagaggaaaaaaacaggtaatacaaatcaaagtcggggggcaatgcagagacattttccccacttttcgcatttgtttaagactgatcatggctaattacagattaatttggaatgtcaaaaataaagactccaggcaaaatcatggtgtagtagaaataattctatactaaaaatctgaaaatattagttgattttgagcttagtcatctcaggaaaatcacatcccaccttataattccttactggaaatgtaatgatccttccagataaatgagtttctggattcttatcattgacacctgtatcctagacaacatgatgacatttttgctggtagaccat

SEQ ID NO: 738752 - DNA, 632 bp, Homo sapiens
ttcaggtttctaagggcaagtcaaggatcccaaggacaggatttagatgctcccacctcaattaagaagtcatcctgtcatgatatctgattgaagttcaggatctcaacttctatatccagactgagtgtggatggggcttcttgggtgcaggtcttattttgcacgttttaaattatggcttttcctatttacagatgtttgaggcagggcatttcttccacatgctcagcacacaatggagacagggaggaataggtaataaaatagatgctcctgttcaaaagggaaagctgtggtgcttccttctgcacaatttatttaaagactttrtgaaatatacaagcaccgtattcacaaatatctttaaaactggcccttctcagacttgagctgaaattgtatatgcagtcatataatactcttaagtatcttagaattatgttttctagtttaaggtacttacgagacacaccatcaaatttttctgtagtctttacaagtgtcttaacatccataattttgaaatagcatttattttgatgacctttcttacttttagagtacttagctctttgcagagactggaaaggggaaccagttttatgtttgaaagcaacaatttctggttc

SEQ ID NO: 738753 - DNA, 496 bp, Homo sapiens
gcagtattgttgcccacatgtcccacctccagccctaaggcagttttcccatatctcagtagatggaacatacaatcgggttttataccgagacattccattgcccagggacgggcaggagacagatgccttcctcttgtctcaactgcaaagaagcattccttcatcttatactaatcctcagcacagaccctttacgggtgttgggctggggtatggtcaggtctttcccttcccatgaggycatatttcaggctatcacatggggagaaaccttggacaattcctggctttcctaggcagaagtccctgcggccttccacagtgtttgtgtccctgggtacttgagattagggagtggtgatgattcttaaggagaatgctgctttcaagcatctgtttaacaaagcacatcttgcaccgcccttaatccatttaaccctgagttgacacagcacatgtttcagagagcacggggttgggggtaaggttatag

SEQ ID NO: 738754 - DNA, 631 bp, Homo sapiens
atagtcaccacaatgagcaggttccccactgttgtcaccaattatgtgagtaaaacatgacaaataatgcatttgcacatcaggatcctgagagaagcccaagaggacaaattctgtattatttttattctgtctcatttaatcttctttcaggcttgtatcagagatgagagctcaggagaacagaacctgtaatgaaaacatgagcaggaatatgattacatccattgtgtcacagaagacatcttcattgttgtagcctcaatagtgatttacatgcaaaaaaaaaaaaaaaattagtaagtctctattgagttcttcacccaaagagcctatcttcccttgacaattctatttctcctcaaaggtttttagtttcagcacaggtaaatgcctctacctctaggttttaatgaataytctatatacaagaagagttaaaatgccaacagccattcatacatttcataacttcttatttaaaatatttttcttggtacggaagtcagctatgctgaataggcaacaagttcttgttctcaagaaaataactctctggtggtggtaataaactcttttttggtctcaattttttttcctttttttttattatactttaagttttagggtt

SEQ ID NO: 738755 - DNA, 615 bp, Homo sapiens
gaatcagttggaagtggtaatgtgaatgagacatgtggaatgtgcatcacagctggcttctagaaacagctcaaattctctctgcgcacgtcctcttccactgccagatttatttaaatagaataatcctgtttaaatttgaggtttagtaattctgcagttttcctcagcagtgcttaatcagaaagtctgggtttgtatctctacttgtcccactcttctctctgatttaagtttgtccttaaccatcatatctagagactttgagaaacaatgtgttctttttttcttttgaattttcgtttcttttttttttttwaaactaggattatctgtgttttttaaggctacctccaaaagcctccagagtcaccccagggacccacaggaagttgcactttcagtatttcctcacgaaaaggaaactttctgaagaagattttaaaggaataccagcctcagttaagtatattattaatcttcttattgcttgcaaaaactcatttattaactacaatttctccttttgccattttatcctccttttcatttcctgagctctttctgatggtgggtccaaccttttcactataattctgcttgcttctcatcaag

SEQ ID NO: 738756 - DNA, 554 bp, Homo sapiens
actttggtgagtctgacaattatgtgtcttggagttgctcttctcaaggagtatgtttgtggtgttctctgtattttctgaatttgaatgttggcctgccttgctaggttggtgaagttctccagggtaatatcctgcagagtgttttccaacttgtttccattctccccatcactttcaggtccctcaatcagamgtagatttggtcttttcacatagtcccatatttcttggaggctttgttcatttctttttactctttattcctctaaacttctcttctagcttcatttcattatttgatcttcaatcactgataccctttctttcagctgattgaatcagctactgaagcttgtgcacacatgacgtagttcttgtgccatggttttcagctccatcagatcatttaaggtcttatctacactgtttattctagttagccattcatctgttcttttttcaaggcttttagcttctttgcaatgggttcaaacaccctctttagccgggagaagtttgttattaccggtcatccgaagccttcttctctc

SEQ ID NO: 738757 - DNA, 588 bp, Homo sapiens
ctcactatcgttatcacaaagacagcacaaagctgtgaggaatgtgttcccacgatccaaacccctcctaccaggccccatctctactgttagggattgtaatttagcatgagatttgggcagtgacaaatatccaagctatatcagatagactatggcaaaaaaaaaccccgggctgacgtgaaatagtctaccccgtgtttctcagttgtaaggagagagttgctgttgacattttggattagacaatttttcctttagaggagtattgcaattggttagcatcactaatgcctaaatactaaatgcttttatcacatatcacctatccctgctagatcctaatactatcccaattattaaaacaaacaaaaccaaaaaactctggtgggtgataakactgcacttttttgttaaccactagaccagctgatgcctaaaaattgtaaattgagaatgggtgaatggtaagtgtatcacttaaacatacagccctagagtgcaggaaataatcctgtgtttttttgtatctcctccagttcttaacaaatactgtcgtatgagcaatactcataaaaaattaaatga

SEQ ID NO: 738758 - DNA, 602 bp, Homo sapiens
ggatttgacaaaaatctgaagagccaggactggatgtttagacaccttggccttcttttcaaacttcaaggcaattttcagtggacctgtaaaaaccattttctttccctgaaggggttcatccaggaaattgaaagaattaaaatgagtgctctggacaaataaatcaatcttattaacgaattccatgggcttttctcatcctagtgaattgccaacaaataaatagttacccaaggatttctgttggcagccattatttcagggggtataataatcaatagttctttaatgagtaagatcttaggtaatttctctagtaattctttaaacgtataccttaataaacattattccatgcmcataaaatgctctatttttttagctcctgccctggtactgatttatctgacgaattattatttaaaaataaaatgatttactcattatctcttctgcaaagcttctctgacaccttccgttttctcaatagacattcttctctcctacctatttcctcttcacattgttttatttactacattgccttgtgatttcatctggtcatttagttattcattccataaatacgtattgagtac

SEQ ID NO: 738759 - DNA, 572 bp, Homo sapiens
gttgagatctgaggctacatttcagaacaagaggtcagcaccaaatgaatcactgatatgaccagtttatataataaaagcaaagatacaactgtaaaagtctatacttatttgaaatggtaaacatatattctaagtgttaaaaattaggtatgtgtattttctgcacaagaggacctgaccaaaaaaagaagaagcacatacaaaatagaactgtgctttatcttacatgtaacctgaatgttacacaaactacatattaattaaataattgatattcatttgctttacttcttagatttcttgaaatayagtaattttgatttttcattagaaggacaattgtataatgtttaataagaatcataattttgactcaaaaatatcacatgtaggtactatttttcttatgcaaaataatatatgttttggcatataaattgccaaattttgtatagaagtaaattactggaaacaacctaaatctctatcaatataggattaggttaatggataataatatatccatataagggaaaagtatgtagtttttaagaagataagatagttca

SEQ ID NO: 738760 - DNA, 618 bp, Homo sapiens
ttattattatatgttaagctctgaatatacaacggtgagcaaggtagccatggttcccactcttgtggactttatagctttcacaaaaagagaattaaattattgatagcacaaagtgtggtaaatgctatgattcactcatctaaaaactactgttaggcagaatctactaatgtataaaggcactgttctagtccctgaggatataraaatgaatgacagacaaggatcctgtccaggaataaatacataattttaaaaatatgatagtttcaagtaatggcgagtgctatttaaaacataataaatagtaatatgatagagcacaagtggaagatgtaaggatagctaagtagtcttggtggtaaaggaaggattttctgacttaagctaagaccagaatgatgagaagaaaaccagccatgaagagatccagaggaaagtatcccatacagaagaaaaaatcaatgtaaaagctgttagggacaagctgagacacaatgagcaaggaaataagtggcaggagatgaagtcggaaagctccatagagaatatattatgtatatctttacagaacatgtcaaaagatttggatttttatcctaagtgtagtagaat

SEQ ID NO: 738761 - DNA, 661 bp, Homo sapiens
atcctgcagtttgaccttttctgtaagatggaatgcaaatggagtgaaataccttacgtccatgctttcttttcattgaaggagaatacataactatgcaaagcttgcaatttacatcccacaggaggatctttcagcttaccctcatatcctagcctccctacagctccccttcccattaaggataagcctcctctaatctccccggcccagaaggaaataagcaaagaaatctccaaaggaccacaaaaccccccaggctgtcagttttgtccccttcaagctgtagggggtggggaatttggccccacccaggtacatgaccctttctccctctctgatttaaagcagatcaaggcagacctggtgaagttttcagatggtcctgataggtacatagatgtcctacagggtctagggcaaaccttcaatctcttttggagagatgtcatgctattgttasctcaaaccctggcctttaatgaaaagaatgtggctttagctgcagcatgagagtttggagatacctggtatctcagtcaagtaaatgatagaatgacagctgaggaaagggacaaattccctactgaccagcaagccatccccagtatggatccccactgggaccctgactcagatcatggggactggagtcataaac

SEQ ID NO: 738762 - DNA, 558 bp, Homo sapiens
ggcagagacagagtcagaatagggtcccaggctcctcttggccctttccctttgagaattcatttctatacacaaatgccacacaggaattcaggatccttattgagtcggcattgctgctctcatttgtggagcattagctatatactatacactgtgctaagtgctttttatgtatgcttcatctgattcccaccaggtactctataagatgaaatccattttgcagatgaagacactgaggcaatggtatgmtgaggctggctggtactatctcttgagagccagttgtgtgcatctcttcccaatttcacattcagtgacatcatgttgctagctaaaaatagactatagcaagagtatttacaccatggaaattggcaaatgctacaaatcagagcatttctttatcccctttcctcccaaagaagatccagtttcccagcgcaccacttagcttacatattagctaagcagcttacccaagggcacacagcagggaggtgacagagctgggacttttatccagggctctgacttcggagtctgagctcttaa

SEQ ID NO: 738763 - DNA, 567 bp, Homo sapiens
caggggagcggggttcaggcttggggccctgtggagccctctgctattttgctgcagtgcagtcaactgacctgggggattgtgggttccctccacgccagctcgggctggttgtggtgctggtgcatgggggattgatgaagctggcaatcgccttgtgactagacccagctggctgccagaaagggagccaaaacctcaccagggaggcagagcaactgcttctgcccttttccacaacccccaggaggtcattgatcttaattaattatccccyctgaggattgtggaggaaccctcctgtctacagagaattactggtggatattctaaagaaccgaataagatccccaccaccaacttctgtcttgagagaaagaaggtgcttctgtgcaattgatcagaatgaaatcatagaactttggatctgaaagacacttttttttttttttttttttttttttgagatggaatcttgctctgtcagtggcacaatctcagctcactgcaagctccgcctcccgggtccacgccattctcctgtctcagcctccccagcagctggga

SEQ ID NO: 738764 - DNA, 575 bp, Homo sapiens
acttggcttggatcagggaatgtactcccagtattccaggccaagggacacactggcatcagaacacctgattaggggatcacctcccactgctgcctctttgctcactcccctggccaggtgcagtcagttacctgctcttatctggcaacccaaggtggccttcagggagttgagtcggcactctccggtccaaaacatgacatagtgggaaagatacagactttggagtctgcaatccaagttcaaaacccagttcagccacttaataatggaagtggttatttaacttctttgtacttcagttttctcatccgtaaacagggaatgacaatacctggcacagagtggactttgaggaatatttgctcccagccttttttttttctagattttgccttacctggcattgttwtctgtcacatgacctatcctgacttcaggtcattctatgcattttaatacagcctagctgtcctgggattgattggctgcagggtgcaagctggaaaatgtgttccttattgtcataaagagttttgtcccttctggtttaccatttgagttctgtctaa

SEQ ID NO: 738765 - DNA, 571 bp, Homo sapiens
atggttttgaggtgttgatcctatacacaattatatatatacatgccacaggatggatgtatttgctcttcttttttaaaatttttttattatactttaagttttagggtacatgtgcacaacgtgcacgtttgttacatatgtatacatgtgccatgttggtgtgctgcacccattactcgtcatttaacattagacatatctcctaatgctatccctcccccctccccccaccccacgacaggccccrgtgtgtgatgttccccttcctgtgtccatgtgttctcattgttcaattcccacctatgagtgagaacatgcggtgtttggtttttcgtccttgcgatagtttgctgagaatgatagtttccagcttcatccgtgtccccacaaaggacatgaactcatccttttttatggctgcatagtattccatggtgtatatgtgccacattttcttaatccagtctatcattgttggacattagggttggttccaagtctttgtaattgtgaatagtgccacaataaacatacgtgtgcatgtgtctttatagcagcacgttttata

SEQ ID NO: 738766 - DNA, 665 bp, Homo sapiens
aatcaactcaagatggtttaaaagcttaaacataagacccaaaactataaacctactagaaaataacataggaaaaactcttcaggacataggtctagacaaagattttatggctaagatctcaaaatcacaggcaagaaaaccaaaaatagacaagtgggactatattaaattaaaaagctctccacagcaaaagaaacaatcagtagaatgaagagacagcctgttgaataagagagaatatttgcmtactaatttcacaggggactcatatccagaatatacaagaaactcaaacaactcaacaggaaaaagaaaagaaaacccaaataatcccattaaaaatggggtaaggacatgaatagacagatctcaaaagtagacatacaggtggcctacagttgtgtgaaaaaatgctcaacatcaccaatcatcagggaaatgcaaatcgaaaccacaatgagatatcctcttatcccagttagaatagctattactaaaaagacaaaaataacaaatgttggtgaggatgttgagaaatgggaaatcttatacactgtaggtgggaatgtagattagtacagcctctatggaaaacagtatgaagatttctcaaaaaactaaaaatagaactaccatgtacccagcaattccactacttggta

SEQ ID NO: 738767 - DNA, 665 bp, Homo sapiens
aatcaactcaagatggtttaaaagcttaaacataagacccaaaactataaacctactagaaaataacataggaaaaactcttcaggacataggtctagacaaagattttatggctaagatctcaaaatcacaggcaagaaaaccaaaaatagacaagtgggactatattaaattaaaaagctctccacagcaaaagaaacaatcagtagaatgaagagacagcctgttgaataagagagaatatttgcctactaatttcacaggggactcatatccagaatatacaagaaactcaaacaactcaacaggaaaaagaaaagaaaacccaaataatcccattaaaaatggggtaaggacatgaatagacagatctcaaaagtagacatacaggtggcctacagttgtgtgaaaaaatgctcaacatcaccaatcatcagggaaatgcaaatcgaaaccacaatgagatatcctcttaycccagttagaatagctattactaaaaagacaaaaataacaaatgttggtgaggatgttgagaaatgggaaatcttatacactgtaggtgggaatgtagattagtacagcctctatggaaaacagtatgaagatttctcaaaaaactaaaaatagaactaccatgtacccagcaattccactacttggta

SEQ ID NO: 738768 - DNA, 585 bp, Homo sapiens
gcctttgcaaataatttatgactacgttttcaaaagcaattgcaacaaaaacaaaaattaataaatgggacctaattaagtgaaagactttttgcacagtaaaagaaactatcaacacagtaaactgacaacctaagagggagaaaatatttgcaaactatgtatctgacaaaggtctaatatccagactctataaggaactagaataaatcaacaagcctaaaataaatagycccattaaaaagtggacaaaggacatgaacagacacttctcaaaagaagacacacaagcagccaacaaacatatgaaaaaatgtttattatcactaaccatcagagaaatgcaaatcaaaaccacaatgagatatcatctcataccagtcagaatggctattattaaaaagacaaaaaaataaaatgctggaaaattcgcagagaaaatggaaccctcatacactattatggaaatataaattatttctgccactttggaaaacagtttggagatttctcaaagaacttaaaacagaactaccatttgactcagcaatcccattactagatatatacccaaagaaaaataaa

SEQ ID NO: 738769 - DNA, 585 bp, Homo sapiens
gcctttgcaaataatttatgactacgttttcaaaagcaattgcaacaaaaacaaaaattaataaatgggacctaattaagtgaaagactttttgcacagtaaaagaaactatcaacacagtaaactgacaacctaagagggagaaaatatttgcaaactatgtatctgacaaaggtctaatatccagactctataaggaactagaataaatcaacaagcctaaaataaatagtyccattaaaaagtggacaaaggacatgaacagacacttctcaaaagaagacacacaagcagccaacaaacatatgaaaaaatgtttattatcactaaccatcagagaaatgcaaatcaaaaccacaatgagatatcatctcataccagtcagaatggctattattaaaaagacaaaaaaataaaatgctggaaaattcgcagagaaaatggaaccctcatacactattatggaaatataaattatttctgccactttggaaaacagtttggagatttctcaaagaacttaaaacagaactaccatttgactcagcaatcccattactagatatatacccaaagaaaaataaa

SEQ ID NO: 738770 - DNA, 484 bp, Homo sapiens
cccagcctactgcctggagagagtttcagggcatggcacaaggagggggaaccccagcagagcccagaacactctctgaataaaggagatgggagtccaaggagattaaggcagttagaattcagtagaacagaataccagaagagagagttgcacaggaaacaaaaaacccagatatctkcagaagatttctctaaattattcaactgagtatggtcaacacatgtatgtgaggaaggcatgtaagaccaaaaacaaaacaacagaatagatcagtaagaaaagaacatgtggttcacataagactgggactaatgcctgtttctacccagaatagtgaaacatttcataattcacagtgcactgagtagagtactcagaaaggttttacctaagtggtggttaaaaaaaaaaaaagtctcagattaaacgtttctttggtcctgcttaacagagcttaaaagtaagacctgaggagatcaaa

SEQ ID NO: 738771 - DNA, 562 bp, Homo sapiens
acacccgtgcaacttcaggtttcctgggaaaaggaatcatctgggaaaggtagttaggacatgcagattcccaggccccgccccagatattctgattgggtgggtcaagtagacggtgccataggagggcaagaatctgcattcagaacaggctctgcccaggtgattccgatagagaggatcagcaggggacagcctggggaaccccagctgggacacagaggctcctgctgcctcactggtctgccatccaggagaccgcaggggcccccgaacctcctcttcccaactccttgaccaatagccaggcccactgatggcttcgcagggcagcatagccccctactcctgacttactatgcatttttctttctctagtttccaaggtaaaaagcraggcaaaccattatcagagagacaaagagttctctccaagacgaagagctttaaaaccaagctgcacttcagagtggattttaccactgggttccgtaatggaaatgctgacataatcttaattatgagggagactttccttcagatggaaatgcggtgacctaga

SEQ ID NO: 738772 - DNA, 596 bp, Homo sapiens
caaaagagacatgaagaatttatgaacataaacaatctgaatacaacccactttaaaactaagtttgccgtctactttggacatatcatcataggcctctccttctgtggcatctggataaagagtcagttggaacctaaagacttcatctcccaaaatagagacagcctaaaagtattagattaactggttattatatcaaaagagctgaatagcccttatcaatgtattataaataagttctcgtattacagaatccttgataagtagaaatatatgaattcaacattaaaaattattagctaaaaacattttacrtgacaataacttcttcctatttctataaaaagcattttatcagtgaaaatatcaaccacttagctgttcagaaataacttttacaaatcactgtgtatcaagaggcctagtctatacacaatgtgaaagcagactattaccgttttcatctccaattcctaataaagtgcctggtacatgacagataataaatgtatactgtgcaaataaataatagcatctcaaatccaaaaggcaaaataaattccaatataaaaatctattttttaatcaccttt

SEQ ID NO: 738773 - DNA, 596 bp, Homo sapiens
caaaagagacatgaagaatttatgaacataaacaatctgaatacaacccactttaaaactaagtttgccgtctactttggacatatcatcataggcctctccttctgtggcatctggataaagagtcagttggaacctaaagacttcatctcccaaaatagagacagcctaaaagtattagattaactggttattatatcaaaagagctgaatagcccttatcaatgtattataaataagttctcgtattacagaatccttgataagtagaaatatatgaattcaacattaaaaattattagctaaaaacattttacgtgacaataacttcttcctatttctataaaaagcattttatcagtgaaaatatcaaccacttagctgttcagaaataacttttacaaatcactgtgtatcaagaggcctagtctatayacaatgtgaaagcagactattaccgttttcatctccaattcctaataaagtgcctggtacatgacagataataaatgtatactgtgcaaataaataatagcatctcaaatccaaaaggcaaaataaattccaatataaaaatctattttttaatcaccttt

SEQ ID NO: 738774 - DNA, 590 bp, Homo sapiens
taagacacattaatggcatcaactttcatgtatgagatacctaagaaaggtaataatacctttaaataataactttaagggacacaggcatctcctccaaaaaagttgtagaaattttaaaaccaaaaaaaaaaacccaccaagtttcaaasaaattcaaattaatttagaaaattaatcacatttctccaaacttaaatatcctctgcattggcaagatcagcagtggtcatttaggaagacaatatttgttaaacagtgatcttacaaacatttactatattattaaaaactgttgctccaataactaaaaataaatgaacattacttgatgaatagtcttacttctataataaactgtattaggaaacagtcttctaagatttccctccaaaaaaaatttgtcattctcagtttctaaaggcataatgatttctgcaactgcataaaaatgtagataatgcataatgcataaggaatgtctcaagtcagcaatgaatcacaacaaatttacttgtaacattttaaagcacatctttgaaaagtttgcaaagtcttcaatataagtaaaccaaaagaaaactcatgag

SEQ ID NO: 738775 - DNA, 633 bp, Homo sapiens
tccaacaatgattagtatagaaaaatttatctgatttacagtttaatgcaaataaaaataattaggaaagagctgtcaattcatcaattaatctaactaataaattttttcttttttttttttttttgagatggagtttcgctctgtcgcccaggctggagtgcagtggcgcgatctcggctcactgcatcctccacctcctgcgtttaagcaattctccgcctcagcctcccgagtagctgggattacaggcgcccaccaccatgcccggctaattttttttttgtatttttagtagagatggggtttcaccatcttggccaagctgatcttgaactcctgacctcatgatccgcccacctcggcctcccaaagtgctgggattacaggcataagccactgcgccccgcctctaataataaatayttaatgagctcttccattaaaaaacagtgataagatttatgaggtttacaagaaagagtaaggcatggtagatgatgtgaatgagcatataccctaattccttgagaaaacaaaatagaaatacactaaaaggaacatcacaagaagatgctattagttgtaaatgattaaatattttgtgacatacagtattttattcattcatat

SEQ ID NO: 738776 - DNA, 614 bp, Homo sapiens
atccatcttaccccctactacagaaagaaatgcatatacatatatgatatcttataacttctcattgtttattaactagaattttttacacatccttttcatgaatcagtaagtattctcttccaatctggttttaaaggctgtatagagcctagcccaatggattatgaataaattatgtaaactaattatttgctgtaggcattaagattgccttcaatcttctaatattaatatatgtatagagtggttctttatgcacatttctttgtatagatatattattacataaagttgcattccatgcattctccactatgaagaacagtttggaggttcctcacaaaactaaaaatagagctaccatatgatccagcaatacaaccattggttgtatacccaaaagaaaggaaatcagtgtatagaagwgatacctgcactcccatatttcatgcatcactgttcacaataactaagatttggaagcaacctaagtgtccatcaacagatgaatggataaagaaagtgtggtacaatacacaatgaagtactattcagtcataaaaaaagagatccagttatttgcaacaacatggatgtaatgtgagatcatt

SEQ ID NO: 738777 - DNA, 554 bp, Homo sapiens
gctcagcttgagaattattggtgtatagacatgctgctggtatttgtaagttgattttgtatcctgaaactttactgaagcaatttatcagttcaaggagccttttggtaatctttagggttttytaagtatagaatcatcttcagcaaagagtggtagtttgtctttttttttttttttttttttcctgtttggatgccttttctttctttctcttgcctgattgctctaagacttccagtactatactctatacgagtggtgacagtgggcatccttgttttattccagttctccagaggaatactttcagcttttgcccattcagtatggtgttggttgtgggtttgtcatagatgactcattattttgaggtatattcctttattgcctagtttgttgagggctttttttgtgaagggacgttggattttattgtaagatttttctctgtctgttgagatgatcattatgttttttgcctttaattctatttatgtagtgaatcacataaattattgatttgtgtatgttgaaccttccttggatcccag

SEQ ID NO: 738778 - DNA, 540 bp, Homo sapiens
ggctgtatcagtttcagaataagtcaatgttggagcaaagaaaactatcagggatgaagaaggacattgcatagtgataaaaagggtgatccacccagaatatttagcaattttaaattcaccatacaacaaagctttaaaatatgtgaagcaaatgcctayataactgaaaggagaagtagacaaattcccagtgataattgcgggacttcaacatatctcccctaaaagttaatagaatagctagacagaaagtcagcaaggatatagaactgaacatatcaaccaacaggatctaatcaacacttatggagcataccacccaacaataacacagatttttttccaaacacccagggaacatattagtaaaccacagccagggccattaaaaattattaaatcattgaaataattaccgagtgtgttattcaactacagtggaatccaagtaaaaatcagtcatgcacaaacacaagaaaatctccaaacaattggaaactaacacacttctaatagtccctgggtcaaatgactaga

SEQ ID NO: 738779 - DNA, 602 bp, Homo sapiens
tctttaagacagacattgataaaacaacagcaataacaaataagtatacatgtgcaaacacagtaagcacaataaaggacatacctatagtactatggcaacacttaggttgagaatttggcaaaattagatctcaaggtatttttttgtcctgaggaaataaaagctaattaaaggaagaatttttttctgccagaatgaacagaacctggaccatctatgtcaatagggagaaaggttggtgtaaaacytgagagaagaatattttcactagagcaagagaagagtacagtagaaaataaaggagttggtaggccatatttaggattttttcagaactttaaaaaataaagcatattatatcataagcatttgtagacaattatctatttattttcaagaaaagctacagactatttaattttaaatatatcccataatctaattaactcaaccattactggacaattaacttgtatttttaaatttataaacaatgcctcatttaatatcattatatttttattatattatgtattacacctgtaagataaatatagaatagtaaatatagaatagtaaaattactcatcaaaatatat

SEQ ID NO: 738780 - DNA, 602 bp, Homo sapiens
tctttaagacagacattgataaaacaacagcaataacaaataagtatacatgtgcaaacacagtaagcacaataaaggacatacctatagtactatggcaacacttaggttgagaatttggcaaaattagatctcaaggtatttttttgtcctgaggaaataaaagctaattaaaggaagaatttttttctgccagaatgaacagaacctggaccatctatgtcaatagggagaaaggttggtgtaaaacctgagagaagaatattttcactagagcaagagaagagtacagtagaaaataaaggagttggtaggccatatttaggattttttcagaactttaaaaaataaagcatattatatcataagcatttgtagacaattatctatttattttcaagaaaagctacagactatttaattttaaatatatcccataatctaattaactcaaccattaytggacaattaacttgtatttttaaatttataaacaatgcctcatttaatatcattatatttttattatattatgtattacacctgtaagataaatatagaatagtaaatatagaatagtaaaattactcatcaaaatatat

SEQ ID NO: 738781 - DNA, 591 bp, Homo sapiens
ctagtaaatgcagcctgaactgctctgtggtatttttattccagaaagcctcaagattcaggagtcaggctgcctgcacttgaatcttggctctgaccttttaaaatgtgcaaccttatacgagttacagaatttctatatgcctcagtttccttatctgtaaaatgcgaaaagtaacactacttacttagaaagttgttgtaaggattaaatgcgttgatttaggtagggatagggaacactgccttgccaatcatgactgatgacatataaggattagatattgctgttaccatcatttcagtaattttgttaaaaattaaatacaatagyggttttcaaaaccaagtgacctggattccaatggaattttttgaaaaaataggaaaatctattctaaaatttatttgaaatttcaagggacctcaaatagccaaaacaatcttgaaaaagaataaagctggaagtcttacacctcctaattttaaaactaattacaaagctacagtaatcaaaacagtatagtactggcataaacactgatatagctgagcactgtggctcactcctgtaatcccaagtactatagga

SEQ ID NO: 738782 - DNA, 642 bp, Homo sapiens
agcatttctctctacattatcacatttaaccctcaacacaatctggataggtggataagaaggctgaaaccacaggaaatttttgtgatgggtccaggaaaaaaaaaattacgggtagcaaatggctgtgaatttaaagtcaaagcttctgatccttttctattccatgatcacccttgaccaggggaactggtccaggcaacgtagtctaggaggggctcagggggttcagacaggagcagatcagaaggtggcaaatagggacaagaacctaaggtctgctctgctccagtgcaaagcaggtgtttgctggagaagcagacttcatactggaagaaacaagccccttttagctggtggccactgagctgactgagttacagtcccctcgaggtagagtgttcagccacagaagccttgcctgctcacctccccgtctgggtctccctccctggagaccaccatttgaggtgtaatggaaayagtgcatttgatgcctgcctctgtcacagagtttttgtgtgactgtgaactcatacttacctctgatacaaacaggaagcagggagatactgggtagaagagggcagttcccttaccccaccctcaatcctggaaacccgtatccctaaatgggaataa

SEQ ID NO: 738783 - DNA, 618 bp, Homo sapiens
tacaaaggcagttaaaaaaattttttttaaataagaattactgcttaactgcagtaaatagcattctattatgttgaaaaaaagggcacgtagatgtcaaattctccagtggagttttagttattctctgagagcctaattaatacttttaaattattatttaataaatggaagtttaaaaaataaatataaaaaggtctttgaagattacatattatcaacagctgcttgagttgatggtataatagatgactaattaaataaaaccatgtwcctctctaataaaaaaagttattattattattatttgagatggtctcactcgttcacctgggctgaagtgcagtggtacaatctcagcccactgcgatctccatctcccaggttcaagcaattctcctgcctcagcctcccaagtagctgggattacaggtgtgtgccaccacgcctggctaatttttttgtatttttagaagagatgggatttcaccatgttggtcaggctggtctcgaactcctcacctcacgtgatctgcccactcagccttgcaaagtgctgggattacaggcataagccagcgcacccagccaggagaagttatttcaaggtgaagagat

SEQ ID NO: 738784 - DNA, 586 bp, Homo sapiens
accactcgagttggtcccacacaccacagatggggagcagcccactgacatggcacaagcactcacagatccaccatgggagcaaatatttactcaggtatcaaaaaagcccagtaggtcacaagacagtctgaggagtcaggcatgggttctggctmagtctgtctcaaaatatctcctgttacactttatgtgcctttcaacgagataacgggagaacaggaatgaaaacatcaacctatagatgcagctcaagagaaatgcttgtttgggcagctgtgtttcattgacaagcactgggctagacagagaagacttaaatttaggtcctaacctcaccactttctcatttctggatgacatgaagcagttcatgtgttaagtcagtttgctcatctggctgggaaatggggagaggaacacttgccctgtctatctcaagtgtcatttgggtggaccaaagaaaataatctatttgtcagtctgcaagcacttactatggaaagtctgctctgggtagggctggccagaaatgtagaagtgggtggagggcatgacagagagagaaagcaagagagaagaagga

SEQ ID NO: 738785 - DNA, 586 bp, Homo sapiens
accactcgagttggtcccacacaccacagatggggagcagcccactgacatggcacaagcactcacagatccaccatgggagcaaatatttactcaggtatcaaaaaagcccagtaggtcacaagacagtctgaggagtcaggcatgggttctggctaagtctgtctcaaaatatctcctgttacactttatgtgcctttcaacgagataacgggagaacaggaatgaaaacatcaacctatagawgcagctcaagagaaatgcttgtttgggcagctgtgtttcattgacaagcactgggctagacagagaagacttaaatttaggtcctaacctcaccactttctcatttctggatgacatgaagcagttcatgtgttaagtcagtttgctcatctggctgggaaatggggagaggaacacttgccctgtctatctcaagtgtcatttgggtggaccaaagaaaataatctatttgtcagtctgcaagcacttactatggaaagtctgctctgggtagggctggccagaaatgtagaagtgggtggagggcatgacagagagagaaagcaagagagaagaagga

SEQ ID NO: 738786 - DNA, 586 bp, Homo sapiens
accactcgagttggtcccacacaccacagatggggagcagcccactgacatggcacaagcactcacagatccaccatgggagcaaatatttactcaggtatcaaaaaagcccagtaggtcacaagacagtctgaggagtcaggcatgggttctggctaagtctgtctcaaaatatctcctgttacactttatgtgcctttcaacgagataacgggagaacaggaatgaaaacatcaacctatagatgcagctcaagagaaatgcttgtttgggcagctgtgtttcattgacaascactgggctagacagagaagacttaaatttaggtcctaacctcaccactttctcatttctggatgacatgaagcagttcatgtgttaagtcagtttgctcatctggctgggaaatggggagaggaacacttgccctgtctatctcaagtgtcatttgggtggaccaaagaaaataatctatttgtcagtctgcaagcacttactatggaaagtctgctctgggtagggctggccagaaatgtagaagtgggtggagggcatgacagagagagaaagcaagagagaagaagga

SEQ ID NO: 738787 - DNA, 650 bp, Homo sapiens
aagcatttgagattcatcccgtgttgttgagtacaataatttgctctgttttattgttgagtaatattccattccacagtttgtttattcattcctcaattgaaggacagttgggttgtttccattttatggcaatcaaaaataaagctggtataaatattcatggtacaggctgtggtgtgaacctaaatttacatttatattggtaaatacctaggaatgggactgttagatcatatgggatggatatatacatttaattataagaaatgcttgatggtttccagagtagctgtgccattttgcattcctatcagcaatgtatgagagttccagttgctccatatcctctccagcacatggtgttgttgartatttatccattcattgctgattttagttcttcaaagtagttaagttctataaagttcccaggaacactgaattttaaaagacaaaattattcgtcctagaggaaatagagggttaagtttctgtgagtctgtgctcataacttttttgtcaactgatcaatacctaactttgttttatgtgtgtttctgtttaaagacatcttatttagtatgtattgttgattcaataacattgcactggcagccaacagcagtataactcatggctagagacag

SEQ ID NO: 738788 - DNA, 593 bp, Homo sapiens
ttctaaagaaaaaatatcactttgtgctggccttatgtccccctcctcctcaatcctgagttgtcccaggagactgctccattctacacatagtcaaaaagaaaatctatgcacgaggcggatccggaacacagcccgagtagggcctcgccaaacaaaatgatgttacaaaacaatgtccttgtctaggacaaaagaactattaatgataatcagtacatattactgaaagtgctccaagtaatctttggaytttgtttcaaaaattcttaatggacactaatgcttagagttcactcaaaagagaaataaattatgtgccagggttgcagggaccaaggacaacacgtggaaggcatcaaagcattagcaatgttacgacaatcaaacattttgtaattgcataaaaagcctttaaaaatcatttagatatactaattatgaacattaataatactataatgggaggtttcttttatgttcgatttgagcctaggttgagctgtttcggcaataatatttcagctcttttaccaaccaaggtgctttggacgccatgaaaaatattccattttagtttgaaaaatggttat

SEQ ID NO: 738789 - DNA, 614 bp, Homo sapiens
caccttaccccctagcaaatgtgtgtaatctgcacagaaacctgtggggagaaggaggtggctggctgatttttgccagcacacagacaccaccccagggtagcctcagttctgccgtctgttagacagctgggtggtctgatggttccctaggcatgctgggagccaggcagccagggtgggcaccaggtctcctcctcccctccccgcagtcctgggcaacctgcagatgccctgcacagcacacacggcaagagtgcaacccacccgtgtccctccaagctgcagtggaagagtggaagagtgacctcgcaggtctgagagtggctggttcatgtgagatgccgtgaccaacctttctaaagtggaaaacactcaagtarcctaatagccaatgtcccagatctacgtggaagggaactgagggctggggaggccaggcaagaagcaaaatccgtgaatggccagagggagactctattggctttagggtgggggcaggcaggagaaggtggctttcaggacccctgagagtttaccctggtctctgaggagccaccggtagctactgctgcaagaaaacaacatcctggcttagctgaggggggcgggtg

SEQ ID NO: 738790 - DNA, 492 bp, Homo sapiens
aaaaacatgagttgagggcctactgtgtatatatacataacatatatacatatatagtgtatatacattcactgtatatatgtgtgtatacatacacacgtacacatgtatatctctctcaatatatatcaggtactcaatatatactgtctcccttcttccataccatatytcaactgtagggtgactaattacgtttgttttttattccttctgatttattattaatgagtctattttgacagcaatataaaagaaaatagcctcgtttttttgtaagagcttacttcactttcccaggacataagagaacatcaatttttgatgcaataggaattcagtagcaaaatagatgtctcaaaatatttacttcttgatggctggaaacatattttcagcattctttagtacagggacatggatttgatgttctatgagactacatccacttcagaatgtatatatatatggccaaaaaaaaaaaaaaaaaaa

SEQ ID NO: 738791 - DNA, 543 bp, Homo sapiens
ggctcaatagcaaaacagggattacagaggagagagtaaacttgaagatattacaacagaaaattactcaatttgaacaagagagtaaatgggctaaagaaaaagcccaaagcctcagagaagtgtggggcaataacaaaaggtataacatttgtattataagagtcccagaagagaaagagcatgatgcagagaaactacttgaagaaatcactgaaaacctcccaagtttgatcaaagacgtaaacccacagattaaataaatgtagagaatgctaaayaggactaactcaaatgaatccatatcaaatgaagggccacaaactaaagacagagggaaaaaaattgacagcaaagaaaaaaattgaccagagaaaaatgatacattacttactggagaacagtgatttgaatgatggcagatttctcatcagaaaccttggaggtcagaaggaagtagcactatgtttttaattttaaattttatttattttttgagccgaggtctcctgtgttgcccagactgaactcaaacacctgggc

SEQ ID NO: 738792 - DNA, 557 bp, Homo sapiens
caaaactgtatttacaaaaacaagtgacagcctccaggacgtagttcaattgatagtctagcatcaaaataataaatttaattaaaagtttagaaaactttcagcttcacaatccattattagtaatatcatgtacatttttaagactcaaatttgggaccttttcttttcttttttgagacagagtctcactctgtcacccaggctggagtgcagtggcactatctcagctcactgcaagctccaccttctgggtttacgccattctcctgcctcagcctcccaagtagctgggactacaggygcctgccaccacgcccagctaattttttgtatttttagtagagacggggtttcaccgtgttagcccggatggtctcaatctcctgaccttgtgatccgccctcctcggcctccctaagtgctgggattacaggtgtgagccactgcacctggctgggaccttttctaatatgtttttttctctatatgagctgtaaggtttccaggcattttcaggttttcttgtacagagattcatcttaattaaacacact

SEQ ID NO: 738793 - DNA, 563 bp, Homo sapiens
attgctgaacaggatgactcagggcccctctgtgggtggcatcattccccccaaagcaggaacgtttggtgttttggacaaccgacaggctcattgcagcgaatgtgctgttgtagtttgaaatgctgacactacccagtcaagcctttacccgtccctcctgggatcagggccctgggtgggactgaagcaaggacaagaaccatcccttcccctggggaagggtgatgccaagctcgtgatctctgtgaccttccacatacccagttcagcagctctatcttccgggggtcagtttcttyctccacttcctctttcactttccctttcttcttgcctttcccttttcctcttcctcccttggtggtggccatgggtggcttcttctccttctccgtggctttgctgtccgtcgggggtgccaggcttcccaggggctgcagtccacagcaatcagagttgggaaatggtactaaggctctttcttgtccccagaccagctcattgaccctcccacctctgtatgtgcacacatgcacaccacacatgcacacaatgtacat

SEQ ID NO: 738794 - DNA, 607 bp, Homo sapiens
atgggagttttattattactcaaatcagtctccctgaacattcggagactagggtcttttaaggataatttggcaggtagcgggcccgggagtgcggagcattgattggttggactggagatgaaatcatagaggggcaaagctgtcctcccacactgcagttcctgggtgggggccacaagaccagatgaacctgattaccaccagtctgggtggcatcagctggtgcatcaraatgcagggtctacaaaatatctcaagcactcatcttaggttttacaacagtggtgttatttccagaagcaatttgaggaggtttggaatcttgcagcctctggcttcatgactcctgaaccttatttctaatcttgtagctaatttgttagtcctacgaaggcagattggtccctagggaagaagaggatttgttttcgaaaagggctgttatcatctttgtttcaaagttaaactataaactaagttcctcccaaagttagttcagcctacacccaggaatgaacaaggacagtttggaggttagaagcaagatggagtcggttaggtcaggtctctttcactgtcatcacttcctcagttacaaattttg

SEQ ID NO: 738795 - DNA, 613 bp, Homo sapiens
attatcaggatttcatgattttttttttttgagatggaatctatctctgtcgcccaagctggagtgccgtggcgcagtcttggctcactacaacctctgcctccccggttcaagtgattctcctacctcagcctcccgagtcactgggattacaggtgcccgccaccacacccggctaatttttgtatttttagtagagaaagtgctgggattacaggtgtgagccactgcacctggccttggatttcgtgatttgactgacatcttttacaccaattattgccatttttttattgggtactaattattagtattgctttctttattygttaaataagaagtaaaagaacttttaaaaaataaaataactttttttcctagtacaaagcttattttcaattttttttattgcttaaattttgcaggttaattaaggctgtacttctttttcctacttcctgtttaaatatttggcattttttgagggttttctttctatggatttttgtgggggatcccatctcgttggacacttggttcctggagattgccaaattattgaaaagtttcctcatacccaaacattggcaatagactgaataaataacatctc

SEQ ID NO: 738796 - DNA, 563 bp, Homo sapiens
aagtggaagcttatcattaatttttatttatttatttttttttccagttttggaattcttattactttgaacccaagaaccactgataactagcacaatccagtgaaacagaggaagcagcagcttaatcaaaggaaaaatacatttaagattataagtctggttataagcttaaaaagtgacccagaaagggatatcattgctaaaaaaaaaaatccccttgtgacctgggtacattttgcaaagccacaggtttgcagtgttacacaagggccaaaggaggccatgagttgtctttggttgtggggccggagggtaaytgttcatgaaaatagtgagtgtctgaagattaagaaaatcatgctgcagcagaggagaagggagaggaaggcaggaagggaaaggagatgcctgagggtcaaaagctgagcccaagcctaagcccaagctcaagttcaagccccagcatggcacaattttgtgaattaactcaggctgagttgcctccagtctttggaatgtcatcttatactggtactgctgaggcagagggcagtaattgg

SEQ ID NO: 738797 - DNA, 618 bp, Homo sapiens
cacactcctttgtaaaccctcaccagactaattgttaatctggtgccttgcattccccaaagtatttgtatctgtcgtttataagtttttatcaaggtttcagctaaaacaaataaatttgtttctggttttagctttaatttgaactgaaacagtcaaaactgagttttggggacttcacacaattcatttggatatttgattctccataatgttttaaattttcatgcacttaaatatatcattatttttgataggctttcttcctttagtcttttctttagaaggtagaaaggaagaattaaataagataaaaccaaacgggtctgaagcatgtataaagtatatatgtttgctcttttgttcttctttttctttagttcccactgggaatttgaaggtccaacaatcatctactgtccttctagaaaaatgacacaacaagttacaggtgaacttaggaaactkaatctatcctgtggaacataccatgcgggcatgagttttagcacaaggaaagacattcatcataggtttgtaagagatgaaattcaggtatgaggatcaatcatcattgctctccgttgctcatagtggaagtggatatttctcaaatgt

SEQ ID NO: 738798 - DNA, 420 bp, Homo sapiens
tccaaattcttcagtgtttatatttttgttctgttatttcagtgtcttgaatattgtcaaatgacatttattagctactactggtactactgaatcttaataatcaatcttcaagccattaactgaccaatggtttcttctatcttaatgtattagtaattattcatttagagtaaaacatctcccagaacatgaaagaatacaaactttattcatgttacgttgtgacaggaractttgttggatgcgcctgattttcctgccaattcacagcttcattaaaacagtaatgctttgaaatatggcttaggaaacttcacaatgatcattaattacacctaatttctggaagagtatatgcatgtatgtgttgcggtattctcccttgctgtggcaggatgtcacaaatttttatccaca

SEQ ID NO: 738799 - DNA, 420 bp, Homo sapiens
tccaaattcttcagtgtttatatttttgttctgttatttcagtgtcttgaatattgtcaaatgacatttattagctactactggtactactgaatcttaataatcaatcttcaagccattaactgaccaatggtttcttctatcttaatgtattagtaattattcatttagagtaaaacatctcccagaacatgaaagaatacaaactttattcatgttacgttgtgacaggagactttgttggatgcrcctgattttcctgccaattcacagcttcattaaaacagtaatgctttgaaatatggcttaggaaacttcacaatgatcattaattacacctaatttctggaagagtatatgcatgtatgtgttgcggtattctcccttgctgtggcaggatgtcacaaatttttatccaca

SEQ ID NO: 738800 - DNA, 420 bp, Homo sapiens
tccaaattcttcagtgtttatatttttgttctgttatttcagtgtcttgaatattgtcaaatgacatttattagctactactggtactactgaatcttaataatcaatcttcaagccattaactgaccaatggtttcttctatcttaatgtattagtaattattcatttagagtaaaacatctcccagaacatgaaagaatacaaactttattcatgttacgttgtgacaggagactttgttggatgcgcctgattttcctgccaatwcacagcttcattaaaacagtaatgctttgaaatatggcttaggaaacttcacaatgatcattaattacacctaatttctggaagagtatatgcatgtatgtgttgcggtattctcccttgctgtggcaggatgtcacaaatttttatccaca

SEQ ID NO: 738801 - DNA, 420 bp, Homo sapiens
tccaaattcttcagtgtttatatttttgttctgttatttcagtgtcttgaatattgtcaaatgacatttattagctactactggtactactgaatcttaataatcaatcttcaagccattaactgaccaatggtttcttctatcttaatgtattagtaattattcatttagagtaaaacatctcccagaacatgaaagaatacaaactttattcatgttacgttgtgacaggagactttgttggatgcgcctgattttcctgccaattcacarcttcattaaaacagtaatgctttgaaatatggcttaggaaacttcacaatgatcattaattacacctaatttctggaagagtatatgcatgtatgtgttgcggtattctcccttgctgtggcaggatgtcacaaatttttatccaca

SEQ ID NO: 738802 - DNA, 619 bp, Homo sapiens
ctctctgggcactgccactggacagctccttctgcgcttgagaccctgctcatgattcaaattacagagagagataaacctgacttggctgagctcaggtcatgggcctgcccacttcctaggccattgggggtaggattctgaattgccagctccaccaaaactagagacttagatttcagcagttccccaaaggaagggggttatggcagaaacaatgctttaggttcaccaaattctgttgctattgttcttttcctcttcctgagcacaaaggaagacttatttcctaccctccttttaagttaggttacagccaatggcatttgggtagaaacgatgttctccgtcaagactgttgatgtaaaatsttggtaaacttggaggctacctgtataagaagtcaggatcatcagggggaaggagcctggagcctaatcaccactcaaaggagagatactgtagagaccttgcaacttacatcagactgtgagggaatcgagatataaaactttattttttaagactcttgagatttggggtgttgtctgttatagcagccagcataattactctaatacagggatattattttagaagaaaggggatgagggaagct

SEQ ID NO: 738803 - DNA, 638 bp, Homo sapiens
cattcaggctagttccatttcttcttgctattacaaatcaggctggaataaacttgtacatatcattttgcacataagtaaatctgatagatggtgccaaattgcccttcctagaagttgtaccaatgcacacatgctgcaaagtaccaaagacttctgacttttctaaaatgcacatacaaaggaactaragcacataaacaggaagtgtgttcatctgttgtatctcgtactgtcacccaggctggagtgcagtggcgcgatcgtagctcattgcagccttaaactcctggactcaagtgatctggccaccttggcctcccgaaatgctgggattacaggtgtgagccactgtgctggccttgaaagataatgtaattatatgttaatataaataacactttaataaaaaataactattttccaaaaaaattagtgagaagagtggcattgctttttatttttgcaaacctggcttgatagataatagctgtattctcctatctgcttctgcattcaagctgttgcaatttcatgtctaatagcctctggaaagctccactgtatacttatgaaagaatgattgtgaaacagactaataacattcttagtattattattaaaatagttttgacatc

SEQ ID NO: 738804 - DNA, 538 bp, Homo sapiens
aatttaaattgagttaaaccaattcctgacctcttctccaactattttctcttcacatttgttgcagtgaaaaatgccccctctattgctacacttactttgcattaactgtatatcaggcacttttctcaggcttaaaatacatttaattcttaaacaactatctcaggatggcattataattaaccccactttatagaaaaggaaagcaagtcacagtgaggttaaatcacttgctgaaagtcacatggctctttgattgtggccatggtaggawttgaactctgacaacctgactccagagtttgggctctgaaccattattctataatgctctcaatcccactgccatcaaatgcagaaccttttatcatccttgtaaaattttatgtctttagatttacttcaacctctcatatctgtcagaattcttttgtgttcctggcagtatcgtccaatgtattcaatatctcaaaaaagttcatgccttccataaatataaaaacaatctattaagttacactctacaatctatcta

SEQ ID NO: 738805 - DNA, 484 bp, Homo sapiens
ataaataaataaataaataaaatatatagaaatgattaaaatacatttcctaccttcatgtgcattaccttagggttgtaatatcaaacaggaaaaagcctatgctcaaaatgactataatcaatcaacataataaatataatcagtatagtaatagacatatttgtataatttggggaatatcatagttggaatatttgcctctgccttgaagttcaggaaatgcttcaaagtaaaaccaactttgagctgcaactataataaaaacacatttaaatctcttagtataaaaattaaaatatagytaaaaataaaaactcttacttaaccctaagaatgtatgacttgaaatacagtgttatctttattgccaagaataatactttcccataaaaatttattgtctgattcctttgccaaatgtaaaggaaatgtgaggaattgtgatacacatagaatgaaaataaaagtataactagggaaa

SEQ ID NO: 738806 - DNA, 468 bp, Homo sapiens
gtggccctgctgtatggctctttccaagcaatgactcgggacccaggctccttcaatcttgtatctccgccatcacctagggcatcagagtcctctgacttccagcttcgcagataacaagaaaacaagagtggaggatttgggaggaagatagtcaacagaccacatacccrggagcaagactgggaaattgagtctggttctacatcctggaagaaaaggaaacaggatagtaattactgccatgccagcatctctctcccaacacaatacaaagcaactaattttcaaagtaactccatttatatccatttctgtaggaaagtgcaatggttaattttgcatcaacttgactgagataagggatgcccagataactggtgaaacattatttctgtgtgtatctggaagagattagcatttgaattggtaactgagaaaagaagatcaccctcaccaaagtgggta

SEQ ID NO: 738807 - DNA, 651 bp, Homo sapiens
catttagttgtcatgtgtctttgggatccttttggctatgacttaccttctttttgatgaccttgacagttttaggagtacctatcaagtatcttgtggaatgtacctcaggtgggatttgtctgatgtttttgcatgattagactggagttatgggtatgggtgaggaaaattacaaagataaagtgacattctcatcacattatatgaaaggtatctacgtcagcatgactcgttactgttgaagttgaccctgattgcttgtttgacaggtttctccactgtaaagtgattgttagaccccctttccatactgtcctctttgagagaaagtcatgatgtgcagtccacacttaggaatggggagctaggttccacctacttgagagtggagtacctgtataaattattctgattttacgcaggagatttatttattctccaccatttttctatttattcaatcatttatttatttattyaatcatttatttatgtcagtataaactcagatatttatttcatactttgggttataatccaaattatgattattgatcaaatttctccagctttggctcttgggcactctttcatttggctcttgtgtccatttgactgtgaacaccccctaattgtgtgtgtgtgttt

SEQ ID NO: 738808 - DNA, 593 bp, Homo sapiens
tgtataaattattctgattttacgcaggagatttatttattctccaccatttttctatttattcaatcatttatttatttattcaatcatttatttatgtcagtataaactcagatatttatttcatactttgggttataatccaaattatgattattgatcaaatttctccagctttggctcttgggcactctttcatttggctcttgtgtccatttgactgtgaacacmccctaattgtgtgtgtgtgtttaacactttcttagtctctggcactacaagatgctccaggatcaatctgtatatttcctgcccctgtcctggaatcagccatttttccaaggagccctgagttctttgctggagaatgatattagaaaccacaatctggttactagctgtgctcatggctactatggtgtcattacttctaggccctttcagatgacagataaaggatatatgtatattaacctgtatatacacacacatatataaatattcctatatataaccatctgctataatttgaatgtttgtcccctccaaaactcacattgaaatttaattgccattgtaacagtattaagagg

SEQ ID NO: 738809 - DNA, 521 bp, Homo sapiens
aactgaggatcccccatcctcttaaatgattctttaaaaatttgcatgcagaatgtttactctttgtgctgtaaagttctatgtgttttgacaaatgcatatggtcatgtatctaccataacagtattatacagaataatttcactgccctagaaaaccytgtgcttcatttcttcaaccctctactcccaactcttagaaaccactgctctttttttcatagctatagctttgcctttcaagttacacatctggccagaaggtacaaggagagatgtgtcaaaatgctaaatgtggcctcaagatggatagagagagacacagtaagtgccactggaagctcagggatagatggatcactgctgtagtaatcgtgtttgtgtgcaaaaccagagttgaacccacttattcttggatagtaattttattcctcattgactcaaaaaaattttatattaaatacctgccacgtgctaggtactaagaagacaatgaagaaaaagccagggttcttgttattt

SEQ ID NO: 738810 - DNA, 516 bp, Homo sapiens
cctccagcctgggcgacagagtgagactccgtctcaaaacaaacgagagaaggaacatctgctctgctggctcttcacatcttctacagactgtggacacccagtgctacctccagcttctttctcctaaggactgcttgccccttcaggccgcctcatagataagcccttccacgcttgcaccacaggaaacattctttgctccaaaaatctctggaatgggcttcagaaaggagatgaccctgagggaggaaagcatgtgggttggcgtggtaggcagcatagtggccccaaagatgcccatgtcctagtctctggaacctgtgaatatatcagcctgggtgaaagagcgagaytctgtctcaaaaaaaaaaaaaaaaaaaaagagggaggcagaacagtaaagtcagtcaaaggagcatgtgaatatgaaagaaagacacagagatgtgatgctgctgacttcaaagatggagggaagggaccatgagtccaggaagatagaaggtctctgca

SEQ ID NO: 738811 - DNA, 621 bp, Homo sapiens
catctctcagtctcctatagaagcagctattgtgagggaaatgaacattagaatacagaagtcatagaacacttagacaccacaaaattagaaaatttgcatctggcaacccctgaatctcctaccagttgcccaccagccccactgacttttccctgctgtattagtctattctcgcattgctgggtaatttataaagaaaagargtttaatggctcataatgccacacgtcgtacaggaagcataatgctggcatttacttggtttctggggaggtctcaggaaacttaccatcatggcagaaggtgaaggggatgcagtccaccttacatggccggagcaggagggagagagagaggaggcaggtgctacacactttcaaacaaccagatctcacgattattcactcactcactattgccacaacagcaaggggaatggtgttaaaccatgagaaactgccctcatgatccaatcacctcccaccaggcctcaccttcaacattggggattataattcagcatgagatttgggtggggacaccgattcaaaccatatcatctgctgtgccagtcctaatggtgcttcaacatcaggcagtggctggacccactgtaac

SEQ ID NO: 738812 - DNA, 564 bp, Homo sapiens
atacctgccttaagacatgcctgaatttcagacctaattctggtttttctctcccatcatcattcctttcttcagaatctctcttccacccccaaaagaaggggaaacacacacacacacacacacacacacacacacacacatttctttactcatcagaatttgtaatggtaccccaggcttgggatgttaaaaacctttgcataccgaacaaagggacagttagaaatatcagttctcagttgagaaagtgaatggctctactgactgcattacaaatctttaaatcttttttgttgttatgatatttagataactatgtttttcactttcaatagaattaaaggaggaccgaatgtcagctgatagatcatcaaaatacattttttatattagagcaataatccaaaaggaattcaaaaaaatragacactaataaaacaaaacttctttcattcccttttagttatttaggtaaaaaagtttctcagcatctaaatcttgttgcaggaagtcagggaccccgaacagagggaccggctgaagccatggcagaagaacata

SEQ ID NO: 738813 - DNA, 624 bp, Homo sapiens
gatgctgcttaaaatgatcatatcaaatgtggcagattgcgaattgaacccaccaagtctgtccttccctcttccatgcacatggctgcccagttagggggtacaattccaagcccttccttgcagctgcctgtggccatgtgacttagtttgagaagatgggaagtgaaagaaaggaaaggtcacaacttccagatcatctccttttcatagacaagcttcctttccaggagtctggctcttttctctttcatgaaaattgaaagacagacctgccaacaacccagttgtgaacatgcaggtgaagatcatgacctaggagggggcagagcagctgtcagacatttttctatttttttttaagagatagggcctcactctgtcaccaaggtgcaatcatagttcactgcagcctcagattcttgggctcaagcgatcctcccaccttggcctgccaaartgctggtattacaggcatgagccaccacacccagactactttacttatttttaatttgcctcctccattccattagcatagtcacattttaggaaagatgttttatcatcagccagtaaaataagagttaaagaattaattgtaaaatttcttattgcaatatt

SEQ ID NO: 738814 - DNA, 657 bp, Homo sapiens
agatttcacaggatgtatgaaaaaggctggtatacaggcagaagtctgctaaaggagttgagccctcacagagagcctctactagggcagtggaagggaaatgtgggtttggaggccccacacagagtgtgcactgtctatgaagctgtggaaggaggtcactgycctccggaaccccagaatggtggtagatccactggcagcttgcgcccttcacatggaaaagccacaggcactgaactccaacctgtgagagcagccagagaggctgaaccctgcaaagccacaggggtggaactgcccaaggtgttgggagcccatcccttgcatcagtgtgtcttgaatgtgggagtcagaaaagattattttggaactttaaaatttaataactaccctgatggatttcagagttgtgtggggtctgtacccaattttttgggccaattccttccttttggaatgagaatgtcttcccaatgtctatatgccattgtatcttaaaagtaaataacttgttttttattttacagggtaataggtgggaggaactcatctccagatgagactttggacttgatacttttgatttaatgctggaattagttaagagtttgggggactattgggaagttgggaaggcatgattgtatttttcaa

SEQ ID NO: 738815 - DNA, 600 bp, Homo sapiens
actcagtcttgcaacgcctttgaggtatattccctttcctccgttattaggcccagagcttcccagctggattctgctgagacttgactctaggtctgtctaggcctcaaggccaggaggagacataggggaagatcctgggtgggtcgaggagtgggggtggggaacacactgactttgaggagaggggcctttgcattgtctccaggcatgtagaggggttaattcaggggaatctgggtgctcaagatttggagatggagggaatcccctgatatgtcaccagtctatatgtcagggttccattctatctcaaccagggggctcttacctttgtatagcccacctgcytaggttagtagtttaaacctttctggagctgagttgctctgacaattaagtcctgggcgggtccacagctttatctgatctccctcttcaaaagatgagagcctctttgtaagatacacaggccctctggctttcacatttgattttcaattgcctattaaatgctttcagcttctcataatttttagagcatccatcaaattcacctacagccatcaaattccattgttcttaaagtttacatttcct

SEQ ID NO: 738816 - DNA, 597 bp, Homo sapiens
tctcaaaaaaaaaattatatatatatatatatataaaatataacatttaaaaagaaaaatttaaacaaagtttgcaataatttatcccccatgttttacaggttattatacttttccaaattaaattcaggattcaactgctaatcttggcttgagcaagacaaatctattagcatgccccaggcaggtttatcaaaaacatctttttactattaaagcctcaacctacttcagctacaaatccctgcagacttacttagcataaggcactatcatttctatcttcattacracacagtttaattatctgccttagaaataaggttcttcctcttaatgaaagtggttagtctggtggctccaaagggcacaaggcagtttcaaggcttaattctgattatatatgcaattacaagttagaaaatatgcttgaaagtcaatgaaagttctttcatctatttctccagttagaaaacataaacattggttggaacgaagattttgttgttgatgttttacttgtctagagcattgcttttcaaatttgaagatggcgcttccaggtgtcacttagtgtcatctgatgtcagttccatc

SEQ ID NO: 738817 - DNA, 589 bp, Homo sapiens
caaggcccacagtaaccactgcctggctacctgcctgtgttcactcatttctttagggcgccaccatcagcctgtggcaaatccagccaggcttatttccttcccttcagggcggcaagttccactggtcccagacaggtccagagatgacatccaggagccagggcctggagtcagaaacttcaggaatctacctggtgttctattctactgtgactgagctggcactcaagccacaaaacaaagcccttcctactcttctctgtcctttccacaaacagaggagtctcttccctaggccccaggccaatggtgagtaccacctggctaccccagrtgttcactcaaggccccaggctacttcagtcaccttgtggtaaatgctgctgggccatgactctccattcagggcagtgggctctagcccagtgcatgttcagaaatgaaaaaactgcatttcttgagagcaaagtatctttgccttctttggtatttaagttatcacaagtatatactaggcttcctcagtcttgcaaaagcaaaaaataaacctaacatctgaataatttcaataagtgctaagtctgtg

SEQ ID NO: 738818 - DNA, 575 bp, Homo sapiens
aacaaatattcatactggcattttaaaatatgtcagcagagaggatcaaagagtctccattctttactttatatcaagatgaacctatttggtacctgtcatggagtgaagcttatctagacgcgacaggaagcaaaggttatctttaacacaatggaaaagggcaaatgaatgttaacatttaattaaagccacaggatgagaatgccaaagtgcaggtcagtggtagaaagaatgtgtgttagtgccttacagaggcaggctggctgagcacagaggcagaacctgaatgcagatggttggattagcagctctctcgatgtcacggatgttatatttgtttctgttcaggtgatarcacaaagaggccatttgtacagtgattaaccatagggctttgaagcccaatctagcgggatttgagaagctgccctcagagtggttaggagcatggactgggagacagaccgcctggcttcaaacaccagctgtgtaccacttattaaccgtgtgacctcaggcaagttgctgagtctctgttccttaatttcttcaactataaaatggagataaga

SEQ ID NO: 738819 - DNA, 625 bp, Homo sapiens
attgagtgctgtgtcactgtgttagacatgatgtttagtactttatagactttttgtcttctcccatttattcctcacagcacatttatgagacaggcactgtattgtgccccagaggaaggcagtctcctgtatgcaagtctttagacctcttgcttatctgtaaaagtaggccttgggtctggaacacttccttaccaagagatagagtcctcatgacctgcgctggacttaccaccttgtgtggaataactttccctgttttgttctgctggagcctgtgcatcatgtggcacctggtcaaccccactgttatatctatcctcttccaggaggggatgaggtgcttctkctgcagcacagaaagggcacctataggccaattgttctgcatcagcctccaggagggaccttctggctttgggggactgacatgcagtactgacactgacctggcgctgtcctttctctatctgaggagtaaagtactgacactgatctggcgctgtcctttctctgtgtgaggagtaaagtactgacactgatctggcgctgtcctttctctatgtgaggagtaaagtactgacactgatctggtgctgtcctttctctttgtgaggagtaa

SEQ ID NO: 738820 - DNA, 507 bp, Homo sapiens
tcaatttatcacttatcgagtgctttttatgtgctaaccctggtgttctgctgattcctgagacaacaatgaagaacactttgcatgtgattcctaataagaatatctgctacactagtaagtacagtagagcagtggtcccaacctttttggtaccagagactggttttgtagaagagaatttttccatggacccagtggccaggggtggttkggggatgattcaaaaacattacatttattgtgcactttattatatggtgatagataacaaaataattatacaactcgccataatgtagaatcagtgggagccctaagcttgttttcctgcaactagatggtcccatctgggggtgatgggaaacagtgacagatcatcaggcattagattctcataaggaacgcacaacctagatccctcacatgcacagttcacaataggattcatgctcctatgagaatctaatgccattgctgatttgacaggaggtggcgctcaggcag

SEQ ID NO: 738821 - DNA, 620 bp, Homo sapiens
ggcccttgagggtaggaaaagaggtacatggggaaacataacaaacaccgactttggaggctttaatatatactaccacgtgacctttggcaaatgacttaacctctctgagcctcagtttccacatctgtaacctagagcaaagaataattacctcatatgcaagttgtagaaagtaattaaaagaatgcaggtttttctgtaaatattacttccactccctttctctcaaatgtgtagctttgtgccttatacatggtaaatatccaataaatacattagcatattttctgcaacaaaggcctttaacaatacatcgggaccaaaattagtattttctgaatagcctgatagcaataaaaaagacmcagatatctgtgtatccaacatgcttccaatgagtgcttatgaggatagagttcaactagaaattgtgccttttggggtgactacaatttctcatgtgtcgactcatgacactaagtcaggagagttaatagaagaaagaataaaaactttgcacagtctcctggagaggaaatgaacagtattcaatgaaatgtttttctcatatctcaaacacaggcatacatttttggctcctgtttccctcctccctg

SEQ ID NO: 738822 - DNA, 564 bp, Homo sapiens
ataactgcccagtatgaaggcacaagccagtaatggccattgcaagagagttagaactttcactgttgcgggaagtcagggaccccaaacagagggactggctggagcagcggcagaggaacataaattgtgaagatttcatggacayttatcacttccctaataatactctaataatttcttatgcctgtcttactttaatctcttaatcctgttatctttgtaagctgaggatgtacgtcacctcaggatcctgtgatgactgcattaaccgtacaaattgattgtaaaacatgtgtttgaacaatatgaaatcagtgcaccttgaaaatgaacagaataatagtgattttaaggaataagggaagacaaccataaggtctgactgcctgtggggtcgggcaaaaagagccatatttttcttcttgcagagagcctataaatggatgtgcaagtagaagagatatcaccaaattcttttcctagcaaggaatataatattaagaccctaggaaaagaattgcattcctgggggcaggtctataaaccaccgctctgggagtg

SEQ ID NO: 738823 - DNA, 620 bp, Homo sapiens
tacagaaggaaataagagacaaaatgagaaagtaaaagttgacactcagcttggagcctgggtaacttggagaatactggcattatttataagatttagagagacagaaaaaggcacttgttttggaaagataatgactttttgaaaaaagaagcatggcgaatctttgacgtttcaggagggagtcatctgaattgaagtgttctatcagcagtataggacatggagatagtataaaagacaccagagctacagttaagaattacaggtgatctaaaattttgtgatcaagatgtcaattttccastgataagtaaagaactggggataaagtactaaatctttggaaatatccatacatatgggggcaaagcaggagaatcaattaaatggtccggagatgatgcagtcagtgctgcttctgtgtgtacaagatctgtgctggaatacagtacacatgcttttaagggccttaacccctaggtcacggttagggttaggacaccagttctcagattcaaaaacctaatttatcccaagtggaagaagtaaagaagccaaacagttaaacattaataaaacattaataaaaaacatttatgacctcactagtaacaggt

SEQ ID NO: 738824 - DNA, 627 bp, Homo sapiens
attccactcctaactgctgtttgcaattgggtaaataaagtcatcagttgctcatctgcatggaatcgtagctgatcattttcaattaattgtgtggaatgaaccacatgtgaagaatcagaaatcacattaataggcatatcaaaagcagtcaatacctcaattacagctacaagctccactttttgagctgaagtatagggtgtctggaaaactttrtctttcgagccagaacaagaagctttaccattactagccccatctgtgaagacattttcagtaccttaaattggtttaaatttagttattttagggagaatccaattagttaatttcaaaaattgaaacagttttgtttttggaaaatggttattgagaatacccacaaagtcagctaaatggttttgccaagaaagactatttataaaagcctgttgtatttgtgcccttttaagggggacaataatttttccaggatcatatccatgtaatttaacaatctgaattctcccatttcatagcatagtagtgatttgatccaaataaggagtcaaagtccgtgaattagtatgtggaagaaaaagacactctacaagatcttgctcttgaacaacaacatgaataggt

SEQ ID NO: 738825 - DNA, 626 bp, Homo sapiens
tcttggatttcctctgcaaaacttttttctcaaaatgatacactacttacgttctgactactaaaaatttgtgtgcttttctttttctttttttttttctttttgctagatatgaggatctcactgtgttgcccaggctagtttcgaactctggaawcaagcaattccgccacttcagcctccacagtgctggggttacaggcataagccaccatgaccagtttggttgcttttttttttcttaactctaagataaaatgttctttcttgctgtagtttacgttgttttcctattgtctttataagtgactatcccatgccttccttttaatactctcagatacgtaacagtaattagttgttggttttttacttgtgcatatatgccttgagagagaaagcaatatatcagggcttaaagtgaattgataagccaaagtcctattccttgtcattctttctagctaagaatgcttcatagcaaacattgtttaagctgctttaaaaatctaaatatgacatctgtagcatgtctgaatcttgtagccacttgaatacttctaaaattctaaattctagagaaatgaatcatcatttaatcatccaataagaagtacagtgaattg

SEQ ID NO: 738826 - DNA, 657 bp, Homo sapiens
acagagcagttaatcatgtgcaactcccatctgttaataaacagtgtaaatgggacagaattcatcattggcttttggagacatgaaggttaagtgctttgtcccaccctacgaatcaagacactgtcagagcccagaatggaatagagagaactgacagggcctttgcaatctaccaacatctttctccacagaagtattagttggctgaaatacctccatggaagtcagaaaatggcagttaaagaaaartgtaaagcacccagagcaattaattgatgcttgaagtaaaactacaagagaaagtccaagtagaaatattcagttaacagactccaatcttctccacattgaaaggcaagtttaatttgctgaatttcatcccatcgatgccttaaaacaaataagtgccatttaaagaaaggatttcaaaattctccaatgatatcgatgcatttactcctcatttccaggcttgttaaggcagattgtcacctcatcgtatctgaaagtagtttgggcaagatctaaagaaaaatatttcctggacattattctttatatgactttttcttaaagtaccaagaggcagatataaatatatcttaaaaataaaccagaatgtattagttgaatgcctctcccatcccaagcttt

SEQ ID NO: 738827 - DNA, 577 bp, Homo sapiens
tgaatagtagtttcccctgtgatgttggggaatcatttgtaaaatcagttttcacggtgttattgaattttcaacttctgtatactactttttgtaattaaaaatataactaggttgggcacggtggctcatgcctataatcccagcactttgggaggctgaggcaggcagatcacctgaggttaggtgtttgagaccagcctggtcaacatggtgaaaccccgtctctagtaaaaatacaaaaattagctgggcgtggtggcaggcacctgtaatccaagctacttgggaggctgaggcaggagaatcacttatacccaggaggcagaagttgcagtgagctgagattgtgccactgcactccaatctaggcaacagagcgagactccgtctcaaaaaaaaaaaaaaaaaaaaaaaaaawatatatatatatatatatatatatatatataatttaaaaatataaaaacatatatatatatatatatataaaactaaaacactctctttaggagtccatcacaacccatttgtaatatagcttttattaatgctatcttgacccagttttgaggca

SEQ ID NO: 738828 - DNA, 623 bp, Homo sapiens
acctaggtgtccattaatggtgaattggataaagagctggtacatatacaccatggaaactatgcaaccataaaaagaacaaaatcatgtcctacatgaatcctagcagaaaacctaggaaacccaatggatgcaatggaaggccatcaacccaagcgaattaactcgggaacagaaaaccaaataccgcgtgttctcacttataagtaggagctaaayattgggtactcatggacataaagatggcaataatagatactgggaactaatagaggtgggagggagggaggggagaaagggttggaaaacaaactattgggtactatattcactacctgcgtgatgggctcaatcatatcacaaacctcagcatcacgcaatatacccatgtaacaaatgtgcacatgtaccccctgaatctaaaataaaagtcaaaattattttttaaagggtaagtaaaaatgaaaaactatggaaggtgaaattattttctcccctatgatcttgttcattggtttgttttcaaccaagctagaaagctttggagcaaagaacgatctcagaaaacgtattctatgtctttatgctctagcagagataggatcccccataccagaaacact

SEQ ID NO: 738829 - DNA, 630 bp, Homo sapiens
aagttatatatatgtacacacacacatatataatgtaatatatatgtggttttgtaatatatacatttatgaaggaaatgtgatatatatacacacacatacatataaattccttcataaataagaaagtaacaggccaccctgcaacagccatttggctgctttcaagtactgaagactcaaaggagtatttgatttgcttcaagctgaaatataactacatgagctctctgctctctctctcttcctctctcctctaataaataaggaaaaaagaaagtattttctcaccaattctaacaactggccttacagatgggattcatgccccacaatgaataaattccagggtgrcaacatgcagattaattaggcaggaaatcatctccctgcagcagcccgctcctcattctctaacaagactaaaaatgatttgtgccacctgtttatggctccaggcatttgccttggtcctccaatgactctattaaaaactttttgattaacttggtccaacggtcagctttttgtttgtttgtttctttggagtaaataaatagagattctgcatccttgtgcctagagagccatctgggcgaatcagcagcaagtagttaagcttgaaatacc

SEQ ID NO: 738830 - DNA, 647 bp, Homo sapiens
tttaaaattgagataaaatttacatacagtgaaatgcacatatcttgaatgtgcaattcaatgagtctagagaaatatatatacccaaataagaccacccaaatcaggatattaattattcccctctttcccaaaagtgttcttgtgcccccatccagtcaatctgtatcccacataggtaaaacctgttctgattctgatcaccatagaatagatttaccaggctgggttgggaattccatataaatggaatctaaatatatacataaatctatgatgttgtatgcactagtagttttttatattgctgagtaacatactattgtatgactatgccataacttgtatattatgaataaagctgctatagcatctttattgacaaattttggggacaaatattcatttctcttgcacaaatacttattagtggaattgctgtgtcttaggcagatacatgttyaccttcacaagaagttgccaaataattgtacaaagtgattttaccctcttatatatcctccagggttagagttccagttactccacatcctcgcaaacatttggtgttgttttaaattgtgtctattctacaggaaataaaatgtcatatcattttgatatctcactgtggttttatttacatt

SEQ ID NO: 738831 - DNA, 628 bp, Homo sapiens
gaatttttaaataatttcagcaccaagattactttttcaacaacattgtatgtggattctagtatatacaaattagacctgtgcaggcccatctcttcccttgatacataaacttctgagggaagacagcagaacacaggtcaaaaaatacttcccctgcatcatttctcatgaacacatggtattacaggttccctgctgttcaattaaagatattctygtacatttttttaaccttgctaggtaaattattcaaacagccagaagggaaatagtcttagaattctgtattgggcaaaatcattaatgactagctggtaagggtcatgaatgatgcaaaaacacttgctctgccaatctgtttcattctggactctgtgttaaactaatttttacaatttgagattctggactttgtcagagaactcacatatgccaaattgttatgtaatcattgaaattacaaggcttttgaagcactaaagagataaatagaacagtttgaggggtttttggcctgatcaaggcaatccatcttttgaattacttctacagccatgcaaagcatgatttcccaatgaaactgttactcagaatattatctccaatggcagcctggccttcatcc

SEQ ID NO: 738832 - DNA, 437 bp, Homo sapiens
ctgcctcagcctcctgagtagctgggactagaggcgcacgccaccatgcccagctaattttttgcattttagtagagacggggtttcaccatgttggccaggatcgtctcgatctcttaacctcgtgatccgcccacatcagcctcccaaagtgctgagattacaggcatgagtcaccrtgcctggccaagataacactttttttgcagagacttggccttatccacacatatactcacacacacatgcacacctggcttagatcctgagttcactttattgacaacaaattagcacactgtttttcaccatatcctataatgccatgagtatctatttataaaatcttaaggaaaaaaagctcctttgagaccagggccttcacctttcatctttgtatctccaggacttgtcacacagtaggcttcatataatgg

SEQ ID NO: 738833 - DNA, 600 bp, Homo sapiens
taacactcaaatgatcaattagtgaaaaaataaataactacaagcaagcaagccattctgctcaggaactaaagtagttctggtaattgaagacgagcaaggtgatgtcagttttcatccccacaggcagatggtttaggatacawtctagagctctcaggcctcgacactacatcttggaaactgacaaagataccttgcagatatttttatatctagaaatttcaatttcatcaatatataccatgatgtgtctgaccaatatcattctcatgaagaagtggtgtgtggggtggggagagaagtaacatttataatttcttaagtgtcaggcaccaagctaggaactttatatatatatatatacatatcgattcatttagccttcacaacaaacctatgaggtaggttctattttgacaattttcatgaagaggaaactgaggcccagagatattaagtgaattggtgacagctagtaagtaagtggccagaccaagatttgggtccagatctgtctgactccaaagtcatgcagttttctcaaacctacattatctcacagtagggtcatctttatttatcatgggttaatataaa

SEQ ID NO: 738834 - DNA, 600 bp, Homo sapiens
taacactcaaatgatcaattagtgaaaaaataaataactacaagcaagcaagccattctgctcaggaactaaagtagttctggtaattgaagacgagcaaggtgatgtcagttttcatccccacaggcagatggtttaggatacaatctagagctctcaggcctcgacactacatyttggaaactgacaaagataccttgcagatatttttatatctagaaatttcaatttcatcaatatataccatgatgtgtctgaccaatatcattctcatgaagaagtggtgtgtggggtggggagagaagtaacatttataatttcttaagtgtcaggcaccaagctaggaactttatatatatatatatacatatcgattcatttagccttcacaacaaacctatgaggtaggttctattttgacaattttcatgaagaggaaactgaggcccagagatattaagtgaattggtgacagctagtaagtaagtggccagaccaagatttgggtccagatctgtctgactccaaagtcatgcagttttctcaaacctacattatctcacagtagggtcatctttatttatcatgggttaatataaa

SEQ ID NO: 738835 - DNA, 627 bp, Homo sapiens
ggctgagatacttccttggactgcacaataaccaagaaaaaccacaatcgaacagtaagagaaacagttctttgaccatgtcatccttctaatatgctagccagagcaattaggtaagagaaaaaagtaaaatgcatcctaataggaaaagaagaaggaaaattgtctctatttgctgatgacatgatcttatatatagaaaaccctaaagactccatgaaaaattgttaggactgataaatgaattcagtaaaattacaggacacaaaatcagcacccaaaaatcagcatcatttctatagactaacagcaaactatctgaaaaagaaattaagaaaataatcccatttacaatagcaaaaaaattaaatacataagtataaatttaaccaagaagataaaatacttgttttctgaaagctataaaacactgatgaaataaaktgaagaaaacacaaataaatggaaagatatcccgtgtttatagattggaagaataaatgttgaacaggtgttcatactacccaaagcaatctacagcttaaattcatatggaatcataaaagataccaaatagccaaaacagtcttgagcaaaatgaaaaagtctggaagcatcatgccccct

SEQ ID NO: 738836 - DNA, 614 bp, Homo sapiens
aatacttctattcatcaaaaacgaagaatcttaactgataattactgcatgtactaaatgtatttaaatttctactgtaatgatggagcctgacagcatgttggccttcatacattttgtgctaagaagcctaaaggatcattgactgaccttcttcttttccagcaaaasgtagttgctcccaatctttaaggaagaccaagcaataattgtatgattgtatgtagaatgaatatggtaagagttactaaccttactatgaatagttatcatttcacattgtgaaatgattgccaccaccaagctaattcacatatccatcacaacacacagttacccttttattggtgtgtgtggtgcgaacatttaaaatctactgtctcaccaaatttcaagaatgcaatatagtattattaatgatagtcattatgttataaattggatctccagaacttattcatcttataactgaaagttgtaccctttgaccaaaatctctctatttcctccattccccaactcttggcaaccaccgttcaacgccctgcttctatgagtttgacttgttttaaattcacataagtttgcaagttttaaaggaaataactatgcag

SEQ ID NO: 738837 - DNA, 601 bp, Homo sapiens
ttgtgagttttagttctaattcgattcccattccaccctgatggcttactaaattactctctgtcagcttttttctctttctgattatttaaaaaaaatggctacaaacaaatttagttgaggcctgcctatactgtttagaatgaacttttcttggaaatgatactatgttagataaacatttttaggaacatatggatgacattcaagtgtggcttttactttccttgaagctaaagaaaacaaagcataaaattatcctaaactccagaattattcagcgtccccctatcctttctattaattgccagctttaaaaagcagtattaccagctttttgctggaggttgttctacatcaccatgaactcttctaaattttaaggggaaacacctttggaatgtgcagggttccagaagaccsgcatgaagaggaggggcatatactttttcctgagaagcgtaggtcttaatctctgcagaagtgagcttagttaagagatttgctttctgatggccactattagccagtctcagaaagacaaaagcttcatgattccacttaaataaggtatctaatatagtcaaagtcctggaaacag

SEQ ID NO: 738838 - DNA, 608 bp, Homo sapiens
tactgtgctatttcagttaaaacagctctgtagtataatttaaagatggtaatgtgattcctccagttttgttctttttgctcaggatggctctggctattccgggtcttttgtggttccatatgaatttcaggacactttttttatttctgtgaagaatatcattggtatyttgactgtagattgctttgggtagtatggatattttaacaatattaattattccaattcatgaacatagaatatctttacatttttgtgtcctctttaattccttttatcaatattttatagtttatattgtagagatattttacatctttggttaagtttattcttaggtattttattttatttgtagcctttataagttgagttacttttataatttttgtagattttttctttggcatatggaaatgctactgatttttgcatgttgattttgtatcctactacttttctgaatttatcagttctgatagttttttgaaggagtcttgattttgctagacattagatcatataatctgcaaaaagaataatttgatttattttcaatttgaatacctttatttctttctcttgtctaattgctctagtggtaa

SEQ ID NO: 738839 - DNA, 608 bp, Homo sapiens
tactgtgctatttcagttaaaacagctctgtagtataatttaaagatggtaatgtgattcctccagttttgttctttttgctcaggatggctctggctattccgggtcttttgtggttccatatgaatttcaggacactttttttatttctgtgaagaatatcattggtattttgactgtagattgctttgggtagtatggatattttaacaatattaattattccaattcatgaacatagaatatctttacatttttgtgtcytctttaattccttttatcaatattttatagtttatattgtagagatattttacatctttggttaagtttattcttaggtattttattttatttgtagcctttataagttgagttacttttataatttttgtagattttttctttggcatatggaaatgctactgatttttgcatgttgattttgtatcctactacttttctgaatttatcagttctgatagttttttgaaggagtcttgattttgctagacattagatcatataatctgcaaaaagaataatttgatttattttcaatttgaatacctttatttctttctcttgtctaattgctctagtggtaa

SEQ ID NO: 738840 - DNA, 689 bp, Homo sapiens
acagaatatctagtattgggtaatatgtaataaacagaaatgtattggcttacagttctgaaggctggatacttaaggccaaggtgccagcatgttaggtttctctgctttcaagactgtactttgcacactacatcctctggatgggaggatcctcacatggcaggaagtcagaaaggccaagagagacagctcattacccaaaacctttttattaagtcattaaactcacccatagaggtggcatcctaaaggcctaatcatctcttaaagtcccaacctctttgttctgttataatgacaatggagtctcaacataagttgtggaggggataaacattaataccatagcagatatttataaatagtaggacaagtagtcaaagcttatctagtcctacacagatagaatattttaagctgactgatccaagaagayagcatgactcttagccaagggctctgtaaggtcaaaggtaattttcagagaggactgatgctgaagacataaccacaaccaacttcagcagctggaggaatctttattcagtctaaaaaggagatctgggtttagcaacatacaatgttttagaatgaaacttaatattcataaacacctgttcacttatgcctaaactggagaaaaattgctataagcttgtataagctataaagaagtgtgctgcagg

SEQ ID NO: 738841 - DNA, 633 bp, Homo sapiens
taaaaacccaccttaggtgggaaatgagaatgaaaaattagcactaagacttcatgcctttgttcatcagttttttcagtgatgagcagtgaatctggggcacttctatctgtgttgggtctagaaaaaactttaaagggaaaagactcatagtaggaaagctaataaaaatgttaattgttactaaagttaattattaagttattaaaaataatcatttcccctgattttaaaatctgaattatgattgcagctttttgaaaatcagtcatattattgatggtttgaacttccaattataataggctcagaagacagytaatggctcacagcagatgaatttgtagagaaaattaaatataatacttaatgaagcatagaggctattagtgttattacctataaacacttgcagaatataaaaaggaggattagtatgtgttgccccaagctctcaagtggcatatagcaaggtcaaatggaaaggatgaagaaatgttagaaagttgtgaagagatggcaacaggcttgaattttaagtggaagcaacccttccaaagaaggaaatataattctatgtcaggttaggagattaaaagaaagaatatatccaaagattacgataaatacttt

SEQ ID NO: 738842 - DNA, 612 bp, Homo sapiens
ttttattaccattgctttaggaattgagctggcaaaatgttcttaataacagctcattatttggacccataacttctgggaaaaacaaaaaaggtatgcaatacaagttcagagcttcacgtgaactggaattactaaataacctaaatcttaaatgactctgaaaagtaaagcaagatcaaaataatggtctcaatttcttgttataagggatctattagcagtacatgaaaatattaaaatataaaaaatgttgcagcacttctcaatgcatgaatacacaaatatgaattctaaatctccaagggcagagtatagtacaaaatggcttccaagtttattaggcaaggtaccttttcacatttatgaaatgctaaaatatactgktaataatatctctcctcctttttattaaaatgttggggagagaattgagagaaaaggcaagttggcactgctgagaaaggaagtattcctatacccaaccagttgagagttaataatgagacgaaacccacaattgatattttataaaataatttttcattgaaccactccaaaaaatgtggggactgttgcgagttataggctccaggccataaaaatccatgt

SEQ ID NO: 738843 - DNA, 536 bp, Homo sapiens
caggtgatctgacagaatttaaagacagaaaaaggaaagtgatacgcaaaaaacagaagtgaggtacagaaacagctggattggtcacagctctgcatttgaacatggtttaaagttccagggatgtcaaatcttttggcttccctgtcccacactggaagaagaagaactttcttgggccacacattaaatacaataaacaccaacgatagctgatgagctacaataatgaaataaagtaaaatcacaaaaataaaatctcataatgttttaaggaagtttccaagtttgtgttagacggcattsaaagccgtcctgggccacatggggcccgcgacgccatgggttggacaagcttggagttggtcacctgcgagcggttgaagtacggctgctgtgattggctgagactgggctactccttacaagagtagattacagtctgtttacacatctagttaggttacagttcattatgtaagaagaaacctttagaccgacattaaaatacttgaggagaccaggcgcggtgcctc

SEQ ID NO: 738844 - DNA, 596 bp, Homo sapiens
cacagataccgcgttttttacaattgaaaatttatggcaaccctgtgtgaaaagcaagtctattggaaccatttttttctgacagcatgtgctcactttgtgttcctgggtcacattttgtgttaactcagcaatggagctgttttgccttcatatcatttagtgtcttcacyggagttgtgctcatcacttccttcaactacttttcttttgcagtcacaacttgtctaactggtgcaacatgccttcctcactaagtgtcattctttctagctgttttttttttttttttttttttgagacggagtctcgctctgtcgcccaggctggagtgcagtggcgcgatcttggctcactgcaagctccgcctcctgggttcacgccattctcctgcctcagcctcccgagtagctgggactaccaggctaattttttgtatttttaatagagacggggtttcactgtgttagccaggatggtctcgatctcctgacctcgtgatccgcccgcctgggcctcccaaagtgctgggattacaggcttgagccaccgcacctggcccactctttctagcttttgatttaaagtgagagaca

SEQ ID NO: 738845 - DNA, 642 bp, Homo sapiens
aattaaggtaaggttttccccttgatttaacttaaaaaagttacatttaaatgaggatcttttcataaatttttctttacatattttaatctaataactttctccttgatttctaagaaatagtctatataccaactgaaaacccttattcttttttctttccaaaagttttggttaatgataatacttgcctctgccttcaaagaatcatcctcctgagactcacagttatgctgccttacctacagtaaacactgactaggayataatattcatatcatttcttctgctgaaaatgaaggtgtaagtatgacctacatgaaattgggaaggaagtccttacttccattctgtaccttcacatgtgaatcaaatgcaatgaaattgctttacatttaacttggaaggactttgttaaatgttaatttaacctttctttactgtataggaaaacaataaattttttttgtaaaagatttttttttagtcattgtgacaaaatccttagaggggaaataaaataacaatgaaaaacaatcaatcagtcagttaggaataaattttaagtcagaatctgcctgtattataaaagcctgaagaggtagcctatttaaagattggcttctttaggagtgaggctgt

SEQ ID NO: 738846 - DNA, 534 bp, Homo sapiens
ttatacctcaaaaaagataaaagtaaacctcaaatatttgtacaagacaatgaaaaaaattgtttagacttgatcctggcccttttcaggcctttttttgtgattatatataattacaaaattgttattttatatatatatatataaacaatttaggattttatttccctctaagtagcaaatttttttctttgagataataaaatatatatatatatatactgccagatacctgagtgtctgagaaagtcaaaaacagtcagatggcatttattttgcatatcaacatgacaatataacaacaasaaaaatgttccttagtgaagcagaatatgcttcaaggtatatttgactgaggaattttgctaggaagaactattcatcattaaagatttatctgtgtttagtcaaccaacccatcaattaggttaattctaatagctcatcaattccatggaagtcacattacttgagctcaactgcattgacttattgaactgaccacatggttcaatctaaatatttcatcaatgg

SEQ ID NO: 738847 - DNA, 645 bp, Homo sapiens
agaaataatatgaagaataatggcaatgatttttgcattgaatgtgaaggagatgtaaaaggaggggaaaaaagagtcttatttactaaacagggcacctgggtgtctatgcagaaggtgagtcaatggaagcagaaggaatgtgatcctgtactttcaaagaagggagttctgtttcaggcagatatttgaaggtattattgagatatcctaaagagaatgtctagtaggcagcagaaaaggtgagattgctatctgggaaagagggataacacataggaatgattgcctttgatgtgacacttggtttacagagaatatgtaacttgtccagtgttacaaagccagtaaaaggcacaatcagtatttaaaccccacttctaggttcagaagtttctttggcccatataatgttctgtgtgtattgggactctccaggaggttgaaaagaactgtaaacctctattactatcagtttctaagtgcacaattagacttaygtgcaaagttataaccagctcattttttaaaaaagcaaaagaataagtgaagctctcttttcatctgtgagttccattgggctttatatagaagtaaggactacgttcagagccttgtaaggtttttgatagtcacgtgattgac

SEQ ID NO: 738848 - DNA, 603 bp, Homo sapiens
ttgctctatttatttagttgctcaagtttttgtaacattggccactgggagcaccttcaattgttccctttcttcttttgaataaacctatcattaattttttttttgaggggtatgtgagaacagggtcttgctctgttgctcaggctggagtgcggtggctcgatcttagctcactgcaacctcgacttctcagcccaccccagcctttcaagtagctgagactgcaggtgtgtgccaccacacctggccaaattttaaataytttgcaatgttgccaaggctggcttagaactcctgggctcaagtgatctgcccgcctcggcctctcaaagtgctgggattacaggtatgagccaccaggcctggcctgagtttttttctctttctttttttgattacttcttttctttctggaactaccagcctcaccttctatacttcttttcacatccagaaaattatctattcatctatttctctaagtatccctagttcttttgtttttttttttttttttttggagaatgatattagaagaaccaagatctggcactggctgtgctttgctgctattgaggtgtcattgcaactagaccctgt

SEQ ID NO: 738849 - DNA, 533 bp, Homo sapiens
atatactggtaggagaaaattaggactactactgggaaatattgttgttttaggataattttgaaaaagtcaatgaaattaaaatcaaaccaataatttagacatagttttacttatgtttaagtgtactgctgtttattgatttaattatttataactttgatgcttttagcctgtgtttccccaataaagcatttgcttaaattttaggtgaggaaaagattaaacactatgaaacatcttktggatttatgaacctacttggaagtattggagatcataattgcctctgtataaatttgaggttttcattattaacagatgtagctttgattctgtattatacttttttgggaaaatgatttggttatgggaacatattagactaaaaattggttttaatgaatgtcaagataactataatttatcatattgcattgctggttggcttggctttgttattctaataattttcgtgaggctaggagagctggggctcagcatcatttctcacctcacattagttacaacca

SEQ ID NO: 738850 - DNA, 501 bp, Homo sapiens
tgatgcagaaaatcacaactctaacgaatcccctaaaacaaacaaaaagcctcatcatcctactaatgatagattcatcttattctgattatacagcatgaaacagcatttatacagatatcctttttttcttccccccccctttttttttagctatttgccagtttataattctgtctcctcaaagagtgtgagtgaatctacattagtcctactttgcttcataaatcccagtcttaaagtatatcttttgataaaccattcactgttgtgatgaagttaagacgattatttactctaatgaactgaagcagagatgtgaataattgaaagyatgagtaatccaaagtcatttcacattatgtttcctatagctggagttaaaacacaaataaccaaatatataggaatacatttgctgcaagtatggcagaattaatacctttattacataaataatttatctaaagcaataggaaacaatactctcacaaagaaagg

SEQ ID NO: 738851 - DNA, 548 bp, Homo sapiens
actttttatttttaattggcacatttaattgtacatatttatgggattcaatgtgatgctttaatacatatacgttatataatgatcaaatcactgtagttagcatcacctgatgcatttatcatttcaaaagcctctcttctattttgtaatatgcaataccttactgttaaccatagtcgctgtactatgcaataaaacactggaatttattactactatccarttgtaaatttgtacccattgaccaacctgtccgcatcttactcttctccctccctctcctgtctctggtgcacactgttctattttctacttctatgatatcaatttgttttttcttttaggattctaagtatgaatgagatcataggatatttttctttctttgtcttgcttatttcacttaacatgatatactccaggtccatctatgtcatcacaaatgacaggattctactctttttatgggtgaatcatacttcattctgtatatgtactacattttctgtattcatctgttgttggacacttagtttgcttccata

SEQ ID NO: 738852 - DNA, 548 bp, Homo sapiens
actttttatttttaattggcacatttaattgtacatatttatgggattcaatgtgatgctttaatacatatacgttatataatgatcaaatcactgtagttagcatcacctgatgcatttatcatttcaaaagcctctcttctattttgtaatatgcaataccttactgttaaccatagtcgctgtactatgcaataaaacactggaatttattactactatccaattgtaaatttgtacccattgaccaacctgtccgcatcttwctcttctccctccctctcctgtctctggtgcacactgttctattttctacttctatgatatcaatttgttttttcttttaggattctaagtatgaatgagatcataggatatttttctttctttgtcttgcttatttcacttaacatgatatactccaggtccatctatgtcatcacaaatgacaggattctactctttttatgggtgaatcatacttcattctgtatatgtactacattttctgtattcatctgttgttggacacttagtttgcttccata

SEQ ID NO: 738853 - DNA, 590 bp, Homo sapiens
aacactgtgccttcagtgcgctgggcttcagcctgtctgtcttcaggtctcctggggagctccaaggacaccaatacaccaaaggagacatggcagcgctcatcaacattgaatttcactgtgaaagtgtgtcaggttgttattcttcatggatctctgagaatcaggcatcatggatgagggctcagagatgagaatttttggaatctggagcatgtagtggcagtgtgaggtccctgagcatctggaggtaagggaacatggtggtaggaaggctcagaggcccccctcaaagaatcagaatcagtcctgtgaaagtttttttttttttttttartcattattcttgcataaggataatgggccacaaaagggttacatttcttttataataaaagactacaaagggcgaccagtgttttattgatggttttcagaaacatccatcttacagtgattagatcgtgaaatgattagactggtgctaaacttagaagcggaaaaaggaaacatattctttaaaatttttaaggttcagaaaagcttcctgagaagcccattttccattttagtgagaaaaggagaagaat

SEQ ID NO: 738854 - DNA, 590 bp, Homo sapiens
aacactgtgccttcagtgcgctgggcttcagcctgtctgtcttcaggtctcctggggagctccaaggacaccaatacaccaaaggagacatggcagcgctcatcaacattgaatttcactgtgaaagtgtgtcaggttgttattcttcatggatctctgagaatcaggcatcatggatgagggctcagagatgagaatttttggaatctggagcatgtagtggcagtgtgaggtccctgagcatctggaggtaagggaacatggtggtaggaaggctcagaggcccccctcaaagaatcagaatcagtcctgtgaaagtttttttttttttttttagtcattatycttgcataaggataatgggccacaaaagggttacatttcttttataataaaagactacaaagggcgaccagtgttttattgatggttttcagaaacatccatcttacagtgattagatcgtgaaatgattagactggtgctaaacttagaagcggaaaaaggaaacatattctttaaaatttttaaggttcagaaaagcttcctgagaagcccattttccattttagtgagaaaaggagaagaat

SEQ ID NO: 738855 - DNA, 531 bp, Homo sapiens
aaaaatatatatatatttgcagactctgaactggttcagctgaaaggaaaagtacacctgcccagtgggagattatgtgggtctgagtcataaaagaaagaatccaacagatcacagaacgcactcagtgttgcacccacatttggaggtgatgccacctgttacctctgctgaagctgggtcaggcaatgaaccctcagccatccaggcccatcacctcccctgctgaagagactgtggccaccagacctccttaggtggttggatgagggatgatacaagatactaagatgaagtccaaactatatmttcactgtagaggaaaaatcaaaatggctttggtaagaaaatatttggcataatgtgtaccaaaatccttctggccataatatgctaagtctacattattttgcctaataatacctgtaccatctaccatcccttcagagtgggctggagtgaacccacatgctcaagcacattttatatgtagaacctgaagagacaggcctattctgggtaggccttcag

SEQ ID NO: 738856 - DNA, 612 bp, Homo sapiens
gcatgcagagattgaaactgaacccattccttacactatatacaaaaattaactcaacatggattaaagacttaaatgtaaaaccaaaaactataaaaaactctggaaggcaacctaggcagtaccattctggacaccgaaatgagcaaatattttgagaagacaccaaaagcaactgaaagaaaagcaaaaattgataaatgggatctaattaaaccaaagagcttccgcacagcaaaggaaactatcaaccgagtaaacagacaacctatagaatgggggaaaatttctgcaagctatgcatctgaggcctgctgtccaacatctataaggtttgctgtccagcatctataaagaacttaaacayatttataagaaaaaacaaacaatcccattaaaaattgggcaaagttcatgaacagacactttaccaaaagaagacgtacatgcagccaacaatcgtgataaaaagctcaacatcactgatcattagagaaatgcaaatcaaaaccgcaatgagatgccacctctcaccagtcagaatggctattaataaaaagtcaaaaaataacagatgctggtgaggttgtggagaaaaaggaacatttacac

SEQ ID NO: 738857 - DNA, 612 bp, Homo sapiens
gcatgcagagattgaaactgaacccattccttacactatatacaaaaattaactcaacatggattaaagacttaaatgtaaaaccaaaaactataaaaaactctggaaggcaacctaggcagtaccattctggacaccgaaatgagcaaatattttgagaagacaccaaaagcaactgaaagaaaagcaaaaattgataaatgggatctaattaaaccaaagagcttccgcacagcaaaggaaactatcaaccgagtaaacagacaacctatagaatgggggaaaatttctgcaagctatgcatctgaggcctgctgtccaacatctataaggtttgctgtccagcatctataaagaacttaaacacatttataagaaaaaacaaacaatcccattaaaaattgggcaaagttcatgaacagacactttaccaaaagaagaygtacatgcagccaacaatcgtgataaaaagctcaacatcactgatcattagagaaatgcaaatcaaaaccgcaatgagatgccacctctcaccagtcagaatggctattaataaaaagtcaaaaaataacagatgctggtgaggttgtggagaaaaaggaacatttacac

SEQ ID NO: 738858 - DNA, 605 bp, Homo sapiens
ttaagagaggtgcaagtttgaggggtaaaagataatacagaaaaatcaattgtattctatatatcagcaaaaataattataaattaaaaatgtttaaaagatataatttacaatagcataaaaaatcaaatatctaggagtaaatttaatagaagatataaaagactcttacagagaaatttattataaagatattttaaaagaccaaaacaaagggatatattatattcatagatcagatgattccataatgtaaagatgtcatttctcatctatttgatctataaagtcagtataatccctttcaatcttccagcagatctttcggggacattgaaaagatagcttaaacatttttaaagaactgcaaaaggccaagaatgccaagacgattttaaaggaaaaaatgttaagatatttcactttctgatctcaaaacttwttacaaaggtagaatgagtaacaacagcgtgacactgccaaaggtatagaaaccaaaggaacagaagagagaggcctgaagcagatacttatttttggacatttgctttataacacatgtagccttgaggagaagtagggaaaatgaatactttttcaataga

SEQ ID NO: 738859 - DNA, 585 bp, Homo sapiens
ttttattttctttaaactgccatctctattctttacatcaaaggtaaattgatagaccatgtacttttaaagtaattcttgatgtgttagagcttaattctgccattttattatttgttttctgtttgtttcctgtttccctgttctagtcttcccatgggatacttgatcacttttaaaattccatcttgtttaatttatactgtatttgartatatcactttacatagctctctcggtggttgctgtaggtattacagtatatatctataacttagcctattgctatcaacatttaactccttgcagtggagcattgaaaacttactttcatttaggtctttatcctctctactttttaggtataattctttcaaatatttatttttttatattgagcattccaacatatgctattacaatttttgctttaatcatcaaatatgatttcagaaattcataagaagaaggcaagtctattatatttatctttagttttactcattccatggttcttactttcctctcaagttcttggccttcttctgttatcatttcctttctatctggaaaaattacttcagc

SEQ ID NO: 738860 - DNA, 585 bp, Homo sapiens
ttttattttctttaaactgccatctctattctttacatcaaaggtaaattgatagaccatgtacttttaaagtaattcttgatgtgttagagcttaattctgccattttattatttgttttctgtttgtttcctgtttccctgttctagtcttcccatgggatacttgatcacttttaaaattccatcttgtttaatttatactgtatttgagtatatcactttacatagctctctcggtggttgctgtaggtattacagtatatatctataacttagcctattgctatcaacatttaactccttgcagtggagcaytgaaaacttactttcatttaggtctttatcctctctactttttaggtataattctttcaaatatttatttttttatattgagcattccaacatatgctattacaatttttgctttaatcatcaaatatgatttcagaaattcataagaagaaggcaagtctattatatttatctttagttttactcattccatggttcttactttcctctcaagttcttggccttcttctgttatcatttcctttctatctggaaaaattacttcagc

SEQ ID NO: 738861 - DNA, 619 bp, Homo sapiens
ggtagattcactgacagcttgcactgtgagtctggaaaagctgcagacactcaatgtcagcccgtgaaagcagctggggaggggggctgtaccctgcaaagccgcaggggcagaactacccaaggccgtgggagcctacctcttgcatcagcrtgacctggatgtgaatcatggagtcaaaggagatcattttggaactttaaaatttgactgccctgctggattttggacttgcaagggccctgtaacccctttgttgtgccgaatttctcccatttggaacatctgtatttacccaattacctgtacccccattgtatctaggaagtaactagcttgcatttgagtttacaggctcataggccgaagggacttgccttgtctcagatgagactttggacagttgacatttgggttaatgctgaaatgagttaagactatgggggactgttgggaaggcatgattggttttgaaatgtgaggacatgagatttggaggggccaggggtggaataatatggtttggctgtgtccccacccaaatctcaacttgaattatatctaccagaattcccacatgttgtgggagggacccagggggaggtaattgaatcatggg

SEQ ID NO: 738862 - DNA, 619 bp, Homo sapiens
ggtagattcactgacagcttgcactgtgagtctggaaaagctgcagacactcaatgtcagcccgtgaaagcagctggggaggggggctgtaccctgcaaagccgcaggggcagaactacccaaggccgtgggagcctacctcttgcatcagcatgacctggatgtgaatcatggagtcaaaggagatcattktggaactttaaaatttgactgccctgctggattttggacttgcaagggccctgtaacccctttgttgtgccgaatttctcccatttggaacatctgtatttacccaattacctgtacccccattgtatctaggaagtaactagcttgcatttgagtttacaggctcataggccgaagggacttgccttgtctcagatgagactttggacagttgacatttgggttaatgctgaaatgagttaagactatgggggactgttgggaaggcatgattggttttgaaatgtgaggacatgagatttggaggggccaggggtggaataatatggtttggctgtgtccccacccaaatctcaacttgaattatatctaccagaattcccacatgttgtgggagggacccagggggaggtaattgaatcatggg

SEQ ID NO: 738863 - DNA, 576 bp, Homo sapiens
cttggcttatgctgtcagtatggatcctgcacccaccacagctctgcactcagcccacagctggactggcagtgctacaagtgacttctgtattgggcaccagtgtctagacaagacaaggggaatgtggtggtgcctgaaaactcagagatgccagaaactgtggagtcctaagtggtgttatagcttatgcatgggaagttccargatctgagcccccaggaaatgttacagctctctctcttttcaactgcccacagttcagcaagcaggggcatgttacagcttgcccctgcttattcttgctgcccacagctcagcaagttctgtgttcttgtcttgggaccaagaggaatcaggtatgcacacatcaaagagtgagtagggcagagaagaattttattgagtgacagaaggaaagctctcagaagaaaggggacctaagccctctatgtggctgagtccggtgtttttatgggctctgaatgggcaagtgtgtgctgattcttctatgagtggtctcggaaaaagtaccatttaattggttaaatagcattgaggaagttttcactccag

SEQ ID NO: 738864 - DNA, 576 bp, Homo sapiens
cttggcttatgctgtcagtatggatcctgcacccaccacagctctgcactcagcccacagctggactggcagtgctacaagtgacttctgtattgggcaccagtgtctagacaagacaaggggaatgtggtggtgcctgaaaactcagagatgccagaaactgtggagtcctaagtggtgttatagcttatgcatgggaagttccaagatctgagcccccaggaaatgttacagctctctctcttttcaactgcccacagttcagcaagcaggggcatgttacagcttgcccctgcttattcttgctgcccacagctcagcaagttctgtgttcttgtcttgggaccaagaggratcaggtatgcacacatcaaagagtgagtagggcagagaagaattttattgagtgacagaaggaaagctctcagaagaaaggggacctaagccctctatgtggctgagtccggtgtttttatgggctctgaatgggcaagtgtgtgctgattcttctatgagtggtctcggaaaaagtaccatttaattggttaaatagcattgaggaagttttcactccag

SEQ ID NO: 738865 - DNA, 595 bp, Homo sapiens
gaaaaagagcccatatagccaagagaatcctaagcaaaatgaacaaagctagagtcatcatgctacctgacttcaaactatattacaagactacagtaaccaaaacagcatggtactggtaccaaaacagatatatagaccaatggaacagaagagaggcctcagaaataacaccacacatctacaaccatctgatctttgacaaacctgacaaaaacaagcaatgaggaaaggattccctatttaataaatgrtgctgggaaaactggctagccatatgcagaaaactgaaactagaccccttccttaaaccttatacgaaaattaactcaagatgaactaaagatttaaatgtaagacctaaaaccataaaaactctagaagaaaacctatgcaatacgattcaggacatagacatgggcaaaggcttcatgactaaaacaccgaaagcaatggcaacaaaggccaaaattgacaactgggatctaattaaactaaagagcttctgcacagcaaaagaaactatcatcagagtgaacaggcaacctacagaatgggagaaaatttttgctatctatccatctgacaaagggct

SEQ ID NO: 738866 - DNA, 473 bp, Homo sapiens
tccgccattactgaggcttgagtaggtggttttcccttcacagtgtaaacaaagccaccagcaattcaaactgggtggagcccactgcagctcggcaaagccactgtagccagattgcctctctagattccacctctctgggtagggcatctctgaaagaaaggcagcagacccagtcaggtgcttatagataaaacttctgtctccctgggacagagcacctgggggaaggggcagctgtgggcacagcttcagcagacttaaatgttcctgcctgtgggctctgaagagaagagtggatctccccrcacagtactcgagctctgctaagggacagactgcctcctcaagtgggtccctgacccctgtgcctcctgactgggagacatctcctagcaggggtcaacagacacctcatacaggagagctctggctggcatctggcaggtgcccctctgggaagaagcttccag

SEQ ID NO: 738867 - DNA, 569 bp, Homo sapiens
catctcaaaaaaacgaaaaaaaaaaaaaaacagcaattacttttgcaccaacctaatacttattccctcttctatgctacccagacctttacttctgctacagtggtctttcttttatgctataaccatttgttagtttctgaaatcttctcaatggcaggaccrtggctcactgttctctttatgaagtccaatgccatgttaatttaaaatagtaggcagcaataaactgctgaatgaactaattaattaaaattttaaaagaacagtaaaaataaaagtccaagtattcaaactaaaagaaatgaactttatatattatttcatcccccaaaccacaactccaaatacttttggtataatatcagataatccttttgttgttgttctttgagacagggtctccctctgtcacccaggctggagtgcagtgatgcaatccgggctcactgaagcctccacctcctaggcttaagtgatcctcccacctcagcctcccaagtagctgggagtacaagcatgcaccaccatgcccagactttttttttttttagtagaggcgggatttt

SEQ ID NO: 738868 - DNA, 694 bp, Homo sapiens
cggaaggctgtgttcaactagtgccaccagcccggatcccacaccagccgtggctccacgctcagcctgcggctggactcagcgtgccacagcagcttccgtgttgggcactggcgtctagacgaggtggtggcacccgaaaacttggagatgccagcaaccgcagacccccaagggatgttacagcttttgctctgggagtcccgaggtctgagcccccaggaaatgttacagctctctctggttctgccgcctgcagctcagtgaacacgggcatgttacagcttgttcattccccaasctcgcagcctcagtgagatccgggttcctgtcccacaatcaagaagaataaggtgcgtggacaccggagagtgagtaaggcagagaatttatttagcaacagaaagaaagctctcagggccgggcgctgtggctcacgcctgtaatcccagcactttgggaggccaaggcgcgcagatcacctgaggtcaggagttcaagaccagcctggccaacatggggaaaccctgtctctactaaaaatacaaaaattagccaggcgtggtggcaggcgcctgtaatcccagctacttgggaggttgaggcaggagaatcgcttgaccctgggaggcggaggttgcagtgagccaagatcgcgccattgcactccagcctgagcgacgagagtgaaact

SEQ ID NO: 738869 - DNA, 694 bp, Homo sapiens
cggaaggctgtgttcaactagtgccaccagcccggatcccacaccagccgtggctccacgctcagcctgcggctggactcagcgtgccacagcagcttccgtgttgggcactggcgtctagacgaggtggtggcacccgaaaacttggagatgccagcaaccgcagacccccaagggatgttacagcttttgctctgggagtcccgaggtctgagcccccaggaaatgttacagctctctctggttctgccgcctgcagctcagtgaacacgggcatgttacagcttgttcattccccaacctcgcagcctcagtgagatccgggttcctgtcccacaatcaagaagaataaggtgcgtggacaccggagagtgagtaaggcagagaatttatttagcaacagaaagaaagctctcagggccgggcgctgtggctcacgcctgtaatcccagcactttgggaggcmaaggcgcgcagatcacctgaggtcaggagttcaagaccagcctggccaacatggggaaaccctgtctctactaaaaatacaaaaattagccaggcgtggtggcaggcgcctgtaatcccagctacttgggaggttgaggcaggagaatcgcttgaccctgggaggcggaggttgcagtgagccaagatcgcgccattgcactccagcctgagcgacgagagtgaaact

SEQ ID NO: 738870 - DNA, 617 bp, Homo sapiens
cctgatttcctgtggcttggtggtcctggatctgggaaaagcagaagcagctttatagcttggtttgttagttgcctgccaaaggagcagtaacctgcgatgaggtttgtttggcactttttttttttttgccatttattcacttgttakactcgagtgtatatgctggtttgtgtactttctttcgactggggttggtgtatcaactagagcaggagggggtgcggtgatgacagaagtggaccaagaccattctcagatggggaagagtggagacagatgtgtgggaaattgacaggagccaggggtcaatttcttattgccagagctttgaaaggaagcgaaatcctttttcagagggctttggcagggctagtactagggggaggcaagtgagacctttgtcgtgggtacgaaatgcgagcgggtacccaaaactcagtaatcaagaaaaataatattttaatgcagttaaaaaaaatcaaaatgcaaaaaaaaatcataataaataaagcattaaaattttaagtaaagacaggatgcactcctgtacttgcgagactctgcctcacttaatcctaatccccattctgggctttctttggagccaagaaatg

SEQ ID NO: 738871 - DNA, 617 bp, Homo sapiens
cctgatttcctgtggcttggtggtcctggatctgggaaaagcagaagcagctttatagcttggtttgttagttgcctgccaaaggagcagtaacctgcgatgaggtttgtttggcactttttttttttttgccatttattcacttgttagactcgagtgtatatgctggtttgtgtactttctttcgactggggttggtgtatcaactagagcaggarggggtgcggtgatgacagaagtggaccaagaccattctcagatggggaagagtggagacagatgtgtgggaaattgacaggagccaggggtcaatttcttattgccagagctttgaaaggaagcgaaatcctttttcagagggctttggcagggctagtactagggggaggcaagtgagacctttgtcgtgggtacgaaatgcgagcgggtacccaaaactcagtaatcaagaaaaataatattttaatgcagttaaaaaaaatcaaaatgcaaaaaaaaatcataataaataaagcattaaaattttaagtaaagacaggatgcactcctgtacttgcgagactctgcctcacttaatcctaatccccattctgggctttctttggagccaagaaatg

SEQ ID NO: 738872 - DNA, 556 bp, Homo sapiens
gtccaagagcctctaactaatgctttgcatgtgattaatttgaatactcacagtgattaaaaatgtctaaaacttaagaaaattctcttaaagtcaaggatgttatttagggcaaacctaattttaaaaggtgacagttttgaaccaaaattctttagctcattactcagctatyacaaggccaaaaaggtggaaagggggagagcaagattactgaagaataagatgccaagtctttcttgtcttttgggagaaaggaagcctccaagttaggcattgatctttctttccatccgggaaaaaaagtggccgctttgtaccctgccctgccactcagacagcctgtccagaaggatggtttctctggtttctgtctctggccacctttgggaaaagtttctgctctggcaggtagcagcagcagatagcactgattgcgaggccactatgcaccatcgccattccatgcacgttatgtgtattggcccataccatactcataaccctctaagggaaacatgattatcctcatggtaaagaaaagagaggcagtgag

SEQ ID NO: 738873 - DNA, 559 bp, Homo sapiens
tatggttgtgagctaagactaaattgaacaacaatcaattttaacttatatagtacaattgttcctctaagatagcagtcctcaatctttttggcgctggggccagtttcatggaagacaattttttcatggacaggagggtaggaacaggggatggtttcaggctgaaactgttccacttcagataatcaggccattagaggtctcataagaagtgtgcaacctagatcccaagcatgtgcagtttacaatagggtttgtgctcctgtgagaatctaacgctgctgctgatctgacaggaggtggagctcaggcagtaatgctcacttgcccgccgttcacctcctgctgtgtggctcagttcctaacaggccaaggactggtatgggtccatggactggaggttggggrcctctgctctaagatatagggagggtaggaggcttaacagtctttccattgaaaagacttgaaagctccactttacttaggttaaaatatgccacttatcttggctttcattaatagacagaaagtgtcccgattaaaggaggtgcta

SEQ ID NO: 738874 - DNA, 519 bp, Homo sapiens
ttgcattggcaagacctcattcaatcctcatgaccatcatatgataaaggtatctttattttaagataaggagaccagagatgattgagaccactcgtcttccccaggacctcatagcaagtaagtggtggaaatgagatttagtccaaatgtggcaactgagacttttcacgkagccatttacctcccacagaaggtgctaaaggtaatcaggacagaggacatgatgagttgaccagaggagcagccagagcgctgtgagaatttgcaggaagcagtgagaaatacagacaagggcagtctgttgcagcagtcttgcatgcggtctgccctctggtagcaggtcttctttgttctgttttcactaggtgtctgacaatctgtctataggctgcttcatccagcagcccatctccctttcttttggccctgcctgttaggttctggagttccggtgacataaagacttcagacagatctcagggaacatattttattgcctcaaaaattttctaaggc

SEQ ID NO: 738875 - DNA, 617 bp, Homo sapiens
attatgtttgataggaaggacatgacaccacccatgtgacttcttttgaatggtattaattatgggagtcattactgtgttccagtgctctagtgtctatcatctgccacgcaaattcaaatgcagcctcactggatggtttcttagaccatcgaattagaccacrtgacatggcagcatgttgggaagatgatcaatgggagaagctctaggataaattacttctgcttgaaaaatatattgcctacctgggtaaaaatgtaattgtgactgtagaaatggaagaaatcaattataaaaataatgattgcctcagattgtttataatgaattcagtatttttttatttgctaagttcgtaagcaaactggaaagatagactgagaggagaaatggagtacatgaaagtttaaggatgatcaaatgaactaattttcttctttaagttaatgttttgaatgtacataaaggtaaatgaattatgttcaaatatactgatacattttcacaaacagaaaatacccatccacccatatcaagtcactgaacattaccagcatctcagaaccttgccattgggcccctttttaggctgccatcccccaccttccatccca

SEQ ID NO: 738876 - DNA, 462 bp, Homo sapiens
tatctggaaaaccttcacagacctgtgtcagtttcggttacatgaaagcctgagaacccatagtcagcgacacatagaatggtaaattcagaattggactattaatttttgagtcaaagtttttttttctctttccctttaaacttgtgatygtataatttcttttttgctttatgcactctgtgactgatttatcaattactataaagtcattaatcttggaaaataaaaataaaatcctaagcccgccaattgactgaatggaccccctcttagccaaggggaccccagagaaaaaccttaaaaagtgagtactggccatgatgagataggaggtccaatatgccttgttaaactccctcgctaaacgccattaggctttcttccttaagggttaaacagaaaccagcccttttattatttgttatttatttattattcctttatttatttatttattta

SEQ ID NO: 738877 - DNA, 547 bp, Homo sapiens
tctttcctttccttcctttccttgctgttctaaagctttttaataaactttcactcctggtctgaaacttgccttggtgtcttctcctttattcccttcagtcaaattctttcttctgaggaggcaaagactgaagttgctgcaaacccatatgaatacacctccagtaacttgggataacttggatctctgccactgctaacaattggtctatactttttctttgttgtaatgttcttgtaaggatttgaacacataaaatgtgttcaggattattgtcccttttaaaatattaagtasatgattgtgtaagattggctacaaattctttcataactgtgagaataattcacctgtgtagtgacttcatccaggacttttctttgtgcaaaattttaaattatagattatttttctttaggaaaatttaggtatactgttccttcttgtttagttttagtaaattgtccttttatatgaagaatccattttatataaaatttcaaaaacatgtgaataaatttgttcataatacccccttcttatc

SEQ ID NO: 738878 - DNA, 460 bp, Homo sapiens
agtagctaaagcttaaaatatcaaattcaattccactttatttataggatgaatgttcagaaaagagattgtttaacaagatttaccttcagtaaaccatcttgactaaatcatctgcctatatttaaaaatcattgttatgtattttaggtggctacatttccgtaaggtataatccccacagtcactttggctctagagtaattatctgtaaatcaccatgcccattacaaaarttaaggaagtacataggtttctttaggacagctattccttttctagatttctttccattttatttgtgtattatctaaactctttaatccagtcataaccagagaagaaaaacctaaactccctaatgaacatagctaggtctccataactacagtaaggaagggttggaacagttacatagtgaatatatgtgaagcatatggaagagacaggattagctaga

SEQ ID NO: 738879 - DNA, 551 bp, Homo sapiens
agataaaatggggatataggcattgcataaatacacccattcaaatgggagaaattgtccaaaacaaaggggctataggccccatgcaagtctgaaatccagtggggaaatcaaatcttaaagctctgaaattatcttctttgacttcatgtctcatattcaggtcatactgatgcaagaggtgggttcccatggtcttgagcagctccacccctgtggttttgtagggaagaatcccccctcctggctgctttcatgggctggcattgagtgtctgtggcttttcccggcacatggtgcaagctgttggtggatcgaccattatggtgtctggaggatggtggttctcttctcacagctccagtaggctgtgacccmgtgtggactctgtatgggggatctaaccccatatttccccttctgcactgtcccagcagaggttctccatgagggctccacccctgcagcaaacttctgcctggacatccagtcatttctgtacctccactgagatttaagtggaggttcccaaacctcaattgacttctgtg

SEQ ID NO: 738880 - DNA, 399 bp, Homo sapiens
tgtaccagaatctctggggcacagctaaagcagtgtttagagggaaatttatagcactaaatgcctgcaggagaaagcaggaaagatctaaaattgacaccctaacatcacacttaaaagaactgcagaagcaagagcaaacaaattcaaaagctagcagaagacataactaagatcagagcagaactgaaggaggaagacacatgaaaaaccctcyaaaatatcaatgaaaccaggagctgtttttttttttgaaaagattaacaaaataggtagactgctagccagactaaaaaacaacaaaagagagaataatcaaatggacacaataaaaaatcataaaggggatatcatcaccactgatcccacagtaatacaaactagcatcacagaatacta

SEQ ID NO: 738881 - DNA, 577 bp, Homo sapiens
agcttaaaattgtaactgagtggttaaaacattttaagcattttacattttgtgtaaagtttgtcctcacagaagaaatatctgttacaaatatgtcattaaaaattacagaagaagaaattatatagccacaatgtttgtatatgagccttactttggactcaaggtatagagacctttcaaaaatcaaattactaatctacatattatacacatttgtcatatcttatccaaattatttttcttttgaaagcattttcttctatcrtccatttaagagtggaacatagaataatagcaccaaaaacaataaaatcaacagtaatttattcagctctggctgtttggtgagatgaaatattttctgtaaacatttaagtaacactgtaacaataaatataactttcacattatttttctgcttaataatagagtcagagagaagttgaagacttaggccaaagcaacacaatgttttaagtgacaaacaagattctaatctatgtctttgtttttaatcatagcagtgcacttcccctaattaattttatcatttgtttagttattttgttattca

SEQ ID NO: 738882 - DNA, 577 bp, Homo sapiens
agcttaaaattgtaactgagtggttaaaacattttaagcattttacattttgtgtaaagtttgtcctcacagaagaaatatctgttacaaatatgtcattaaaaattacagaagaagaaattatatagccacaatgtttgtatatgagccttactttggactcaaggtatagagacctttcaaaaatcaaattactaatctacatattatacacatttgtcatatcttatccaaattatttttcttttgaaagcattttcttctatcatccatttaagagtggaacatagaataatagcaccaamaacaataaaatcaacagtaatttattcagctctggctgtttggtgagatgaaatattttctgtaaacatttaagtaacactgtaacaataaatataactttcacattatttttctgcttaataatagagtcagagagaagttgaagacttaggccaaagcaacacaatgttttaagtgacaaacaagattctaatctatgtctttgtttttaatcatagcagtgcacttcccctaattaattttatcatttgtttagttattttgttattca

SEQ ID NO: 738883 - DNA, 651 bp, Homo sapiens
cattataaatttaaattttaagaaaaaacctttgacaggtcagaaattagtttatattttgctttacatacaccattctaaaaggaaggaaacactaactgaaggcctggttttacattagcatattcatgtaataagcacagattaagtttgaaacttcttaagcagatctattacgtattttctcattttcaaaaacatcttaraaaactgtctcttttagaggaatgaaaacagcctgacagactacatgttttcttggaatgaagtctcccccaatttcttgtagccctaacaactaaaaccatgagctgatttccacgttaaacatgcttctgtgcagcaatctaaaaacactctttcacaaccacgggatgaactatttcattggaatttaaaatttgctttttgaattatatgaaagcttttcatgtataagtgattaaaaggatttgtaaaccaataaatatttctacatttaaaatcttcctctgtcagtttgcctttttcctaagcctttggcagccagaaaagaaaaactgatgtaacccactctaaattaacgatgacgaaaaagaacttggtaaactgaaaggactcatcggtcatacatttgttctcataccaaactttaactgcattaaaaaaaaa

SEQ ID NO: 738884 - DNA, 637 bp, Homo sapiens
gcagtcgggattcttacacaaggactgggaccatgccctgtagcctttcatccaaacaacttgaccctactgttttaggctggccatcatgtctccatgcagtagctgccgccaccctaatacttttagaggccctcaaaatcacaaactatgctcaactcactctctacagttctcataacttccaaaatctattttcttcctcacacctgacatgtatagtttctgctccctggctccttcagctatactcactctttgttgagtctcccacaattaccattgttcctggcctggacttcaatccggcctcccacattattccggataccacatctgacccccatgactgtatctctctgatccacctgccattcactccatttccccatatttccttctttcttgttcctcaccctgatcacacttggtttattgacagcagttttaccaggcctmatcgccactaaccagcaaaggcaggctatgctatagtaccttccatctatcattgaagctgccactctgcccccctccactacctctcagcaagccaaactcattgccttaactcgggccctcactcttgcaaagggactacgcatcaatatttatactgactctaaatatgccttcc

SEQ ID NO: 738885 - DNA, 591 bp, Homo sapiens
tttccagtgtgtgtccttctggcctgggtggcagataaacgactgctcttctacaaatacatgcacaaaaagtaccgcacagacaaacaccgaggaattatcatagagacagagggtgaccaccctaagggcattgagatggatgggaaaatgatgaattcccattttctagatgggaacctggtgcccctggaagggaaggaagtggatgagtcccgcagagagatgatccggattctcaaggatctgaagcaaaaacacccagagaaggacttagatcagctggtggagatggccaattactatgctctttcccaccaacagaagagccgygccttctaccgtatccaagccactcgtatgatgactggtgcaggcaatatcctgaagaaacatgcagcagaacaagccaagaaggcctccagcatgagcgaggtgcacaccgatgagcctgaggactttatttccaaggtcttctttgacccatgttcttaccagtgcctggagaactgtggggctgtactcctgacagtggtgaggaaagggggagacatgtcaaagaccatgtatgtggactacaaaacagaggat

SEQ ID NO: 738886 - DNA, 593 bp, Homo sapiens
ataggcatagtaagatattgacaacattaactaatactaaaatggaatgataccacgacaattgctctgataggcaagatggctactaaatgtctaatgggtgggtatggcatggatatgttggacaaagagatgatttgtgtctsgggtggggagcaggacagtgcaagatttcatggctatactcagaatggtgcacaatttaaaacgtctgaattgcttatttctgggattttccatttaatgttttcagaacgtggttgaaccggggtaactaaaaccacataagggaaaactgtgggcaaggggaaactactgtattgcatatatttgtgtgacataaatttgagatgggtttgaggaacttctggtggtaagactaggaaatcctcatgctgtttataatagaaaagttgctatgggttgatacacatcccccatatttatatgtttataagtcctaactgcccatgcaatgtcatttggagacgcagttttgacaaggttgtgagagtggggccttcttgaggagattagtagccccataggggacaccaaagagcttgctttctcctccctcctctgctcactcc

SEQ ID NO: 738887 - DNA, 542 bp, Homo sapiens
aaaaaaaaaaaaaaaaaaaaaaaaggatcctctctgctctaattccacctcctttatttttaaatcccatctaggtgttttgctacaactatgttccaatggtgtgggcttcctgcattcactctcttggaacaagaaaggtgggctgtattcgtttgttattgctactgttaacaaattgccacaccctcagtggctgaaaacaacagaaatgtactatcttatagactgcaagtcagaaatctgatacaggtatcagtgggctaaaatcaagatgttggcagagcggcatttctttctggaaagtctaggagaaaatgtttttttgcccttcccagcttctatggctrctcaccattccttcgctcactgctcttttctgtcttcaaacccagcactttcttaaatcatatctatctgacaataatttttctgcctcttttttcccttatgattacattgggcccatcagataaccccaaataatctaattttagggtgagctgattagcaaacctaattccatctgcgaccttaatccc

SEQ ID NO: 738888 - DNA, 527 bp, Homo sapiens
caaagaagtttctgagaatgcttctgtctagatttgatctgaagacaatcccgtttccaacgaaatcctcaaggctaggcaaatatcctcttgcagattccagaaaaagagtgtttcaaaactgctccttcaaaacggtggttyaattctcttagttgagtacacacatctcaaataagtttctgagaatgcttctgcctagttgttacgggaagatatttccctttccaacataggcctgaaagcgctccaaatgtccacttccagatactacaaaaagagtgtttcaaacctgctctaccaaagggaatgttctgctctgtgacttgaatgcaaacatcccaaagaagtttctgagaatgcttctgtctagattttacctgaagacaatcccgtttcccacgaaatcctcaaagctatgcaaatatcctcttgcagattctacaaaaagagtgtttcaaaactgctctatgaaaagaaaggttcaactctgtcagtagagggcacacatcacaaacaagtttctg

SEQ ID NO: 738889 - DNA, 475 bp, Homo sapiens
aaaaggagtgattccaacctgctctatgatagggaatgttcaactctstgtcctgaatacaaacatcacaaagatgtttctcagaacgctgcagtctgcaatttgtatgaattcccgcttccaacgaaatcctcaaaactagccaaatatccacttgcagattccacaaaaagagcatttcaaaactgctctatcaaaagaaaggttcaactttgttagttgagtagatacagcataaacaagtttctgagaatgcttctgtccagtttttatgggaagatatttcctttttcaccttagccctgaaagcgctccaaaagtccagttccagatactacaaaaggagtgtttcaggactgctctatgaaagggagtgttcaacttttgacttgaatgcaaacatcagaaagcagtttctcagaacgctgctgtgtgctttttatatgtattcccgcttccagcgaaatccccaaag

SEQ ID NO: 738890 - DNA, 558 bp, Homo sapiens
atagagcaggtttgaatcactccttttgtagtatctggaagtggacatttggagcgctttcaggcctatgttggaaaaggaaatatcttcccataacaactagacagaagcattctcagaaacttatttgagatgtgtgtactcaactaagagaattgaaccaccgttttgaaggagcagttttgaaacactctttttctggaatctgcaagtggatatttggctagctttggggatttcgctggaagcggaatacatataaaaagcacacagcagcgttgtgagaaactgctttctgatgtttgcattcaagtcaaaagttgaacactccctttcatagagcagtcctgaaacactccttttgtagtatctggaactggacttttggagcgctttcagggytaaggtgaaaaaggaaatatcttcccataaaaactggacagaagcattctcagaaacttgtttatgctgtatctactcaactaacaaagttgaacctttcttttgatagagcagttttgaaatggtctttttgtggaatctgcaagtggatatttg

SEQ ID NO: 738891 - DNA, 539 bp, Homo sapiens
ttctgagaaacatctttgtgatgtttgtattcaggacacagagttgaacattccctatcatagagcaggtttgaatcactccttttgtagtatctggaagtggacatttggagcgctttcaggcctatgttggaaaaggaaatatcttcccataacaactagacagaagcattctcagaaacttatttgagatgtgtgtactcaactaagagaattgaaccaccgttttgaaggagcagttttgaaacactctttttctggaatctgcaagtgsatatttggctagctttggggatttcgctggaagcgggaatacatataaaaagcacacagcagcgttgtgagaaactgctttctgttgtttgcattcaagtcaaaagttgaacactccctttcatagagcagtcctgaaacactccttttgtagtatctggaactggacttttggagcgctttcagggctaaggtgaaaaaggaaatatcttcccataaaaactggacagaagcattctcagaaacttgtttatgctgtatctact

SEQ ID NO: 738892 - DNA, 629 bp, Homo sapiens
tagtaaaatacaaccagtagaaggcgcagcacacatgacagtacaatatttttcaagtggtccataaatgtaacagtgatagagagtgaatcatagaaataaagtagctaagtatggatgtggtgagagatccatgagggaagtttgtggctccagagytagatttttcctgcactgaacaattcatcaattagaaattgataattgtggagtcagataaagtagaatgcacatttaaaagacatgaggcaaatataagatagatctcctgccctgaggattttaaaatctagttaagatgaaagatgttttaaaagatggaatatgaattacagtatatgagcaaggctattatattgtgataggtgttaatcatatcagttaaatgagtgtaagaatataaaaagcagactcaagaaattatagcaaataaatgagaacaaatatgagagaaaagaatgagcttttcgtggtataaggaaaagttaagaataatcaatggatttgtaagtaaagaaaacattttgtgcttaacttgctttactgcttccttaaattaattgtttaagtagattaaaggaacacttttaaagtttaaacaatgggcaagagatgctaggaataataaa

SEQ ID NO: 738893 - DNA, 581 bp, Homo sapiens
tctactaaaagacagagaatggcaagttggaaagggaaccaagacccatcagtatgctgtcttcaaaagacccttctcacatgcaaagacacacataggcaaaaaaaaaaaaaaaaatggaggaaaacttaccaagcaaatggaaatcagaaaaagcagatgttgcaatcattgattctgacaaaacagactttaaaccagccaagatcaaaaaagacagaaaaaggggcattacataatggtaaagggttaaattcaacaagaggagctgactattctaaatatatatscaaccaatactggagcacccatattcataaagcaaattcttagagaccttaaaagagacttacacccctcacaataagagtgggagattttaacaccccactgacaatattagacagatcatcaagatggaaaattaacaaagatattcaggacacgaactcagctctggatcaagtggacctgatcaatatttacacaattttcctccccaaaacaacagaatatacattcttctctttgccacatggatcctactctataattgatcacataatcagaagtcaaagact

SEQ ID NO: 738894 - DNA, 483 bp, Homo sapiens
actaatcctctttcaatgatctaagtaatttccattatttccctgtgctgagtactctggccaaatgcttctcagcctgtaggttataaacagacacatatgcctgacactttaggaagtgcagtctcaggttagcttttatattccctaaaactcatcttctttacaatagttgcactaagtaatatgggtggaaaataaacagagtgtttgtrtagtaaattgcaaattatatagaagtgcaacattattagaaagactcaaacagagaggagaacacaaagtgccttttgttgctgaagtagatgtgatcttgaatatagattcatacagacaagaccaggatttcagattaaggaatggaatttgggcagaccactttatatattgggttttatttagaaaacaatatcaaattaaaatatcataattcaataattgccagttcagaggactcccttgtatataaatgcacagcgtaac

SEQ ID NO: 738895 - DNA, 590 bp, Homo sapiens
gggccaagcgggtaacttgagggagtcaaatgtgtgtggtttgatctctgacgtggggttttattcattggcatataaaaccttgattcttcccttggggtatgctgcccgcgtgtggggtggcctgccagcaccaaggaggggacacatgggcaatgtgtttactgaagttgtacccatgctcacttgaggcattcttcccttaccaatcaggtgttcccataagattaatatcagcaaactctgccactttgcctcttagtgtgcatgtttgaatctactttcccagctcctgagatcttactgggaagctgatcaccagtttcaggtttttctatttactgggagactacsttttccctggtgccagctgtgaccattattttatagagacagtttaacaaccacctgaacatcacttgatggtcagctgacattcctggtttgggggccctctcctgcctgctcatgtctgcctgactacctactgtaacattctgatgagggagcttgaaggccaggtagcaggagagaggcaggagagggaaacggatgtaaggtggggaaggacaaacaagtttgtacccacc

SEQ ID NO: 738896 - DNA, 620 bp, Homo sapiens
tagtccttggtttagaatagtaaattggcttagtgcccattgttgcctagtataatcttaactgaaagaccttaactgagatccttgtttgaaagttctgggaactgataggcttaaatagagccatgggttggagatgtgtgagaatcaaaatatttaacctccatatgatacagagactgaccaatcagaaaagatgctgcttgtgaacaacacatattgtagaactaatgcctaccagctggatgtcagctctcattgtttttgtgaggattttgctgaggtggcatttactctggtgaattcgattaaattaatgggaggcaaatcaaacctcccttttaaamcctaaaaagcagtgtgtcaggggctctggtgactacatctttacatatgtacaaaaaactagcttagataacattttatttattagcaaacacttattgagtgtctacgctggtttaacctgggagtccatctataaaacttttcttatctgctcaaattacttaaaataaatcatagaactggatgaaattgggagtcatctaatatagcttttaattttaaaaatgaggaaactgaggcccagactaattaagtaacaaatatttattggg

SEQ ID NO: 738897 - DNA, 611 bp, Homo sapiens
agctttgtcagttattagctgcctctgatgaattggctctctctctgcatcagtttcctcatctacaaaaggggaacaataactccaattttgcagatttcttattgggatctgttgaaactctatatgcaaaatacccatcacaatatgtgatgcctggtgagccctcagcaatgccttttctctctccacctgaattcccacccagaaacatggaaaatagtcatttytaggcagcagaagtttccaaactccacagtgccctaatcacaaatatcaaaaagaaaaaattaataattgaatacataggcaacattctctggtgtcaggagcacaattcttcaataattttccaagtcccatttcctggctaggaccccctgtgggccctgatctctatgatcagcactatcctgggaatcctagaaccttgttggttgggttcctcttgccctcccctaccagggtggttccaccccaatgtttgggttctttccttcccttcttctcacatatcccatgggagtttttttttttttttttttgtcagacctcaagatcccttctgaatttcagaaaatcccacaataaacaaactaccctccccagag

SEQ ID NO: 738898 - DNA, 611 bp, Homo sapiens
agctttgtcagttattagctgcctctgatgaattggctctctctctgcatcagtttcctcatctacaaaaggggaacaataactccaattttgcagatttcttattgggatctgttgaaactctatatgcaaaatacccatcacaatatgtgatgcctggtgagccctcagcaatgccttttctctctccacctgaattcccacccagaaacatggaaaatagtcatttctaggcagcagaagtttccaaactccacagtgccctaatcacaaatatcaaaaagaaaaaattaataattgaatacataggcaacattytctggtgtcaggagcacaattcttcaataattttccaagtcccatttcctggctaggaccccctgtgggccctgatctctatgatcagcactatcctgggaatcctagaaccttgttggttgggttcctcttgccctcccctaccagggtggttccaccccaatgtttgggttctttccttcccttcttctcacatatcccatgggagtttttttttttttttttttgtcagacctcaagatcccttctgaatttcagaaaatcccacaataaacaaactaccctccccagag

SEQ ID NO: 738899 - DNA, 611 bp, Homo sapiens
agctttgtcagttattagctgcctctgatgaattggctctctctctgcatcagtttcctcatctacaaaaggggaacaataactccaattttgcagatttcttattgggatctgttgaaactctatatgcaaaatacccatcacaatatgtgatgcctggtgagccctcagcaatgccttttctctctccacctgaattcccacccagaaacatggaaaatagtcatttctaggcagcagaagtttccaaactccacagtgccctaatcacaaatatcaaaaagaaaaaattaataattgaatacataggcaacattctytggtgtcaggagcacaattcttcaataattttccaagtcccatttcctggctaggaccccctgtgggccctgatctctatgatcagcactatcctgggaatcctagaaccttgttggttgggttcctcttgccctcccctaccagggtggttccaccccaatgtttgggttctttccttcccttcttctcacatatcccatgggagtttttttttttttttttttgtcagacctcaagatcccttctgaatttcagaaaatcccacaataaacaaactaccctccccagag

SEQ ID NO: 738900 - DNA, 611 bp, Homo sapiens
agctttgtcagttattagctgcctctgatgaattggctctctctctgcatcagtttcctcatctacaaaaggggaacaataactccaattttgcagatttcttattgggatctgttgaaactctatatgcaaaatacccatcacaatatgtgatgcctggtgagccctcagcaatgccttttctctctccacctgaattcccacccagaaacatggaaaatagtcatttctaggcagcagaagtttccaaactccacagtgccctaatcacaaatatcaaaaagaaaaaattaataattgaatacataggcaacattctctggtgtcaggagcacaattyttcaataattttccaagtcccatttcctggctaggaccccctgtgggccctgatctctatgatcagcactatcctgggaatcctagaaccttgttggttgggttcctcttgccctcccctaccagggtggttccaccccaatgtttgggttctttccttcccttcttctcacatatcccatgggagtttttttttttttttttttgtcagacctcaagatcccttctgaatttcagaaaatcccacaataaacaaactaccctccccagag

SEQ ID NO: 738901 - DNA, 592 bp, Homo sapiens
ttgattaaggagctctaagaaggaaagatactagccagaataagtgtctgttcctatgagaaagaattgctgatgtttccaagacagaaggggcccaaaacatttaacttgctaccaagtagctggttgatcttctgaacgaatagtgtcattccaagtactcatggttgagctctattgtcgtcagatttatttcccatcatttggaaggcttatgtcttatcaaggcctgcagcattgttctcaccttttgttcatcctacttgatcagcatggtatcatttatatcatatattaatgtgatgttttatatgatatgatgtttgtgttatgttgagtcggtatggatctttttgaattgtaatttgacagagagtagaagagtttgtatacccctgaaacaaaattgtaaatgcatattattccctgttctacatgaatgcaaactaagatattmtttttctattggaatagaaaataatgcattcaccaagtcaatgaataaatatcttgtgtcttaggccataccaatctgctttaataataataccatgtatggcatagcagttacaattaggactatcactggttg

SEQ ID NO: 738902 - DNA, 470 bp, Homo sapiens
ctgaggggggggtgcgggtcttttctccccctttcttgtgcttccccactgggccccctttgtggggggggggggggaagggccccagcccccctattatgtacccggaggagaggagcgacatgcactgggcttggccagttttgcgcaagatctcaacccgcgcccggattctaattttcacctcttggggttgggtgttttgttttttccttgagggattatcaaggggttaagaatgtgggttttctccccaaagtgggagtcggggaggctgcgagccgagaggaaggaggcccaactcccgaattgagccgggccgrgaagttgggagaaaagggtagggactgtgacagttctgtcctccgccttgcgcgtctaggccagcaggcgacatgaaattgagggcaagggtataaaaaggtgcagtcgattagctgactttcaaaaagaaggcctcgtaaactttt

SEQ ID NO: 738903 - DNA, 581 bp, Homo sapiens
caagttcctacaaatgacaggatgtcattctgttttatagattaacaatattccattgtgtatatataccacattttctttatcctttcgcccaatgatgggtacttaggttgattccatagtttggttattgtgaatagtgctccagtaaacatgaaagtgcagatatccctttgacatattgattttgcttcttttgtatatatacccagtagtgaaattgctggatcatatagcagtttttagttatttgagaaacctctatatagttttccataatasccgtactaatttacattctcaccaccagtgtatgagtgttcctctttctccacattctcaacagagtctgatattccctgtctttttaataaaagccattttaactgacttgtgataattcattgtggttttgatttgcatttctctgataatgagtgatgttgaacatttttttatatacctgttggctatatgtatgtatttttttttgagaaatgtctattcagattgcttgcccattaaaacaattgaatcatttgtgtgggtttttaaatttaaattaatttaatttttttttt

SEQ ID NO: 738904 - DNA, 594 bp, Homo sapiens
ccatcattattctacctagactaatgttatgagcagggccttcttgtgttaaatgctagcaagaagaactgaggcaaacttttgaaatgacatgcttagggaagatttataaacagggagttaagatgattacaaagtcctggataggatgtttgttaactagaattttgggtacagtggaagattccctcaatcattctatggacaagagaatgaatgaaggaacatcataaggaacataaagtasagaagttttctctgccttcaggagggatgaatacaacaaaaaatgtcaatctaaattcatttccttcaacttgaaacaaaggttagtatttgttatatattagattcacagaaattaaagacagttcatttttcaaaataagatgataaggaaaattctggagattaggaaactcaatatggctctacctgggtctgagtgaggagaaaatcaagagacttacttcaggttattcatttatgaacgaatatttttttcattcaggcaatccttcaatgcatactgcctccacatatctggagacattatggaacaagtagagagacataatttagcaatcactaaat

SEQ ID NO: 738905 - DNA, 611 bp, Homo sapiens
aacaccttgcctagaagagcaaagaacagatattttcctttcttctccctttatctctttgggtaaaaagactggattaaaacttttataggagcattaaaggaagctgagggagtcatggatttttggtctgttggcttttgtggctttaaatcttttagcctgtgagctttcaggattttgccttttggggctaagaaagtttgtgggtcttttggacctttggaattctggggctatgttttctctcttggactgaggaatgctattgttttacagatacagggawggaaaaagtacagaacgaattgtttgagattgactctcagcctcaggctgaagtaagagaagtgaaggatacctgtatatgtctttctgaattcttgtagcagacacttgtcatttcttttgactgcccagcattggagtccttctctggatttggggaattctctaccttataaatcttgatgggagacaaagactccctgccccacacagaagctagatactctctttcctactttcctttgcaggtagaataaaatgtacccaggctccactttgactcaggagttagtggcgcaaggaagcaggcactgtgcggaatc

SEQ ID NO: 738906 - DNA, 537 bp, Homo sapiens
tattgtactattttaaccaaaccatgtggtgaatattaagttatggtagctgattatatttttagaagataatcacaacaatgtctcttgccccacatatttttttagaacttcctaccactcattaagagttggggtctaattctcctattgaatctgagcacacttatgtaaccattagaatgcagcagaagggatgccatgtgactttcctagcttaggtcataaaaggcaatgctgcttccgctctgattgttggaataccagcctgcttggagccctgagaaatccgagtacctggaggttgctgtgtcaggaagctaagccttgtagaaaggtcccaagtctcaggtatcagatttcaggtcagaaatcmtagtgtttgagtcctttcatgccagtcaccagccatgtgagtgaatgaactgttagatgatttagatcatgccagcttcagccactgagtcactcccagtcacccctagcctttgagactctgcatcaaggctgtagattttgtgaagtagagaccagcca

SEQ ID NO: 738907 - DNA, 537 bp, Homo sapiens
tattgtactattttaaccaaaccatgtggtgaatattaagttatggtagctgattatatttttagaagataatcacaacaatgtctcttgccccacatatttttttagaacttcctaccactcattaagagttggggtctaattctcctattgaatctgagcacacttatgtaaccattagaatgcagcagaagggatgccatgtgactttcctagcttaggtcataaaaggcaatgctgcttccgctctgattgttggaataccagcctgcttggagccctgagaaatccgagtacctggaggttgctgtgtcaggaagctaagccttgtagaaaggtcccaagtctcaggtatcagatttcaggtcagaaatcatagtstttgagtcctttcatgccagtcaccagccatgtgagtgaatgaactgttagatgatttagatcatgccagcttcagccactgagtcactcccagtcacccctagcctttgagactctgcatcaaggctgtagattttgtgaagtagagaccagcca

SEQ ID NO: 738908 - DNA, 627 bp, Homo sapiens
ttcctaaaatcaacagcaaacatacttaaatgtgaaacgttcaaagaattatcattaatgtcaggagcaagaagtagatgtaggctattatctctatgttttaaatcatcattgagacacaaagtcagagctataagtatcaaaataaataagggttgtgaatattggaaaaatacataatgtttagtgataatgtcattatcggtcttgaaaattcaaaggaataggcaaatggaatattcaggtgaatgggctttcagaaagaggtgtgtaacattactatagcaaagtcaaaatctttgacatgcgaaagcaatacctaattagaacaaacaatagaaaatatgccatttgcartagtaacaaaatccaagaattaacctgaaaagaaccctaacaaaaatgtataaggtctttctagaggcaactatcaaagtatactgatagattcaggttaagagggtctgaaataaagaggagcataacctgttcattgatggggaacagaacattgtaaaaatgtcaattatacttaaattatttacaatttagtgccttacctgtagccgccaaaattacaatcaaatttgggcggctattctctgcttcccaaatcaaccctggaaa

SEQ ID NO: 738909 - DNA, 591 bp, Homo sapiens
gagtaacccacaggaggccatagaaacactcaccccagaaccaaaggggtcatacctggacaccccatgtgggggtgacaggatgtagctccatctcattcctgttttcagatctcggggaggtgaggaacttgttctccgaggatgactcaggtcaacacaggggcccccatctggtggatagacagagtggtcccaggatctgtcagtagttccggtgaggaacatgagggacgattgagggcacccttgggccagaacacagatgaggacctcacggaaatctgccctgcccctgctgtcactccagagagcatgggcagggctgtctgctgcagtccccccsacttaccctgggatcattggtgtcagggatggggaggtctttgtcgaggggtctgcactcaggtcagtagagggagcgtcttaggccctgccaggagacaaggtaagaacgaagcaggttcctcacccaggacacatgaattccaatgcatttcagcatctcttcctgtccttcccaagaggacctgggcacgtgtggccagatgtgagtctcctcatgtcctgttccctatcagggatgtgagc

SEQ ID NO: 738910 - DNA, 597 bp, Homo sapiens
tccctggataccaaatcagggaaggtaactgtgtgcccatttgtacagccagcctggagggaaatttgcaaaggccaaaaatgatcattttgactgcatgttcaccgtgtttctggtggctacatagttataatgtgtcactacagtgacaagattaaagatctggcaactggagggctattcaaagtaagagagtagaggggattttgagcttccaccatcccatccaaaaaaatacaatagactaacatcaaacgtaggttaaccatatggtgaggaaagtgattagccatcgtgttttcactgaagtttaaaatagaaagaaacgctaaagtttctgtagttcaacgctgtcataggtgaggagatgaagcccagaacattaagagtgacattcctaatggttgcagaagtaattgacagtcatggatgcaaaratgttattttccttcacagtgatgagacatggtttatttgggactggatgtactgaatagagatttaaagtgcgttatcttttccttcttagtttcacctgtgattccctggatggttaccattcttttgaatgcggctccatagatcccctgacaggct

SEQ ID NO: 738911 - DNA, 475 bp, Homo sapiens
cttttgtgtacagcagacgtggttctttataacaatattgcccgctgctagactacaataacaaataggacctgaagaggattgaggctggccattggcagagagctgacatccagtgatgtacaagtcttcctggcagcacacacatcactagtcargtcctgtgcacctctgtcacagatggatctgcaggatattaaggttatactctccactccaagtagtggggctcaagagcaaccatctggctggagcccactgctaggggacatgtcctaaagtcattttgcacagcaacacactttatacacttggaggagaatcagtggatgttgtgttcattatctatcaccatgtaatgacattagcacaagcttagcagcttagaacacacattaatctcagtttctgcagaggtctttaactgcgtcctctgcaaggttgtaaagaaggtgttgtcctgcaccggcctctc

SEQ ID NO: 738912 - DNA, 688 bp, Homo sapiens
aatacacataaatcttaactcttgaaccagtaaaaggggctctcttaaaatgcttgtggatccttttcagctcttgggacatgcacatatataataaaatatagcgtcttgtgataattgaccaaattatttattgcaactggggagagtgtgagctcatttgaatgagatctcgaaggatagtagtagcagtcatcatagcagtagtaatagtaatactgatagctcttctttattgagagcttaaatgtggcagtcatggtgctaagtattttcaatatatcacctcttatttctcagaacaattcgctccctaacagacacacctaggcaaatgactaccaggtatttgttcacaacactcacatatattctttcctagcctaatattaagtatttttagtaacctctttttattgatggggaaatttagacttaaagtgactgaataacttggccagattatccaattgaattaagtgacttctcttcaattacaaggcattcatgtatcayagcattttggctgaaaaatgaagtaatttatgtcctaaaatttaaattttaccatctaaaccccaaatttaatagcattaattgaggaagacattttcacttatttgcataaccaaaaatcctacaaagttttctaacagattctctgggaaatgaatttgcaaccctttgc

SEQ ID NO: 738913 - DNA, 518 bp, Homo sapiens
ccataatatagtcagtggtggtaattgctatggagaaaaccaaagcagggaatggggtaggaattattagggagcatgccattttaaataggcaggctagggcaggcacaaagtaatctgtgattaagacctgaaggatatcatgcggaaataaatcttggagaagaatgttttgrgaagatgaacaacaaatgtaaaagctccaagtcaagggccggcctgatgggtttgaggagcagcaaggaggtccttgtggctgtcaggaggtgagagagggagtatggcagggaaacagaccaggcagacctcagaggccagactgtggctctgcgaggccactgtggggcttagtttcaccaggggtgagatgaaaaaccgtgtgagggttttgagcaaaggaatgacataatctaatttatattttaactcagagatatgcagagaatgggctgaaggcagaccagaaagaccggtagggggccttcatgataaacagatgagagactataaacaggagg

SEQ ID NO: 738914 - DNA, 613 bp, Homo sapiens
aaatggacaacagatataaatgttatgagctgaatctactaaactcttagaagaaaacgtaggagtaaatttagtgaacttgggttagacatgacaccaaaagcacaagtgacaaaggaaaaaaaaaatagagaaattggacttcaccaaaattgaaaacttcagtgctataaatgataccatcaagaaagcaaaacacaacatatagaaggggaaaaaacatttacaaatcatatatctgatatgcaacctgtatcccaaagctataaagaactattacaaccccgtaataaaaagataaataacccaacttacaaatagtygaagaacctgagtagacctttctccaaggaagatataggaatgaccaaccagcacatgaagggcgggggcagtggctcatgtctgtggtcccagcactttgggaggttgaggcaggcggatcacgaggtcaggagattgagaccatcctggccaacatggtgaaaccccatctttactaaaatacaaaaaattagccggacgtggtggtacacgcctgtagtcccagctactcaggaggctgaggcagggtaatcgtttgaaccgggtaggcagaggttgcagtgagcca

SEQ ID NO: 738915 - DNA, 780 bp, Homo sapiens
ccaccacacccagcaatttcttattactttggtttccttttttttttaatctgcgaaagagggaataatattaataccaattttcatgggtaaaggattataccatgaagattaaacaaggcaatatctgtatggtaaattgctataattgtactaattattttctcttccctgtatctacaccctttgccaggtgaaatttctctatcaaaaggaatggagtacatttccccacaccttggcacggaattcatgtgacttgctttggccattatatgagaccttgcaatgtttgcttgctttcttgygcctcttctatcttttctttcattaccatgagaacatgcctaggttagcttcatgaaagataaaaggcacatggatcagagctgagtcccccaggtcatctgatagctcagatcaattgacagccccaaacccccaagtatgtgaataagcctagccaaaatcagcagagtcatgtagcaaacctctagacttacgagcaataaacccatattgttgtatgcccctgtgatttcatagttgtttgttacacagcattattttgacaacagataaccaatagtctgggagattaggctcccacaaactgtaaagtattacacaaatgtaaactattaaagcttaaggatggcagaaaaatatatatgtatccaagggctcccttggtctatgagatattagagcctatacaaaatctcattaaatcctgtttcagagagtcatgggatcccagttcgtgttggacaggacatt

SEQ ID NO: 738916 - DNA, 593 bp, Homo sapiens
caaaaaagcaatggaaaaaatcccaaaagaaaaacattctgctcttgcctgccaccatgtaagatgtgtttttgctcctcattcgccatctgcatgatcgcaaggcctccccagccatatggaactctgagtcaattaaacctctttcctttataaattaaaaaaagagaagaaaagatcagtctacataaaaatataaaacacttatgtgtcacaaaaccaaatagaaagccaaacagyctgagggagaattgcctgagaaaggagtgccttctcaactatagatttcaggcaaaaatatttttaaatccctctaaattaaaagatattacaaaaagagcagacaacttgtagaaaagtaaacacaattagctaataaacttatttttaaggttcaactttagtaaaaatcaaagatgtacaaaataatacaataaaacactatttttgcctgtcaatgtaattgtaatggcaatacacaatgcaggtgatggtgcagtgaagtgtacacaaccattacactgatgaaagtataaactgatgtaatcctcctagagcaattaataactacctaccaagaccctaaaaatatt

SEQ ID NO: 738917 - DNA, 656 bp, Homo sapiens
agccctagcgatgtggagagcagaagttggagagcaggggaagaacaccctagaccaagaagaatgccagtcagtcagtcagccagcacgcctggctaagcatctgcttgtatatgggctgtgtaagacaccaagagcatgaagcccattccctgccctggcagaatgtacaaactagttacaagctctgatgtcttcaaaatatttggagattaattatttctgcacatttttcttagggctgagtttaagtgaatggattcaaagaattcagggatttagaacctgagarcagataatgttctgaatattacccaatggtaacatgggactaggaatatagttcgctgtattttaagagactgccgtctttagaagacaatctatagagattgccctgttcagatagagagagcctatctgaacaagaaatccagagacagtaatggacagaggtcatggattcaagagctgggtgtgcacataattgatgttcaaggactttaggaacgagaggagaactgggggcaccctcattggcatctgcttcaaacactcattgacatctgcctccatggactaactggtacatgatgtaccagtatacggaattggcttaaagggacagccagccggtcctcgttagcaggatcccc

SEQ ID NO: 738918 - DNA, 564 bp, Homo sapiens
acatatggagttaatggtgccaacttgcttccttttataagcccaagagctttttaaagctgagcactctggctacgcccattaggttacaaggtcctctcggactttgttgtatgacatctggtactttactgccttagaggctaaaaagaaataccatgcgtgccatttgctttgtctcagtctttctaaaaggttccctttcaacttggtctttctctgttagtggtaatagtctttaagggtttcagatattgaaggtctgttgttaacagattttcttttgacttttaaataagtcacatatccactactcagagaagaagcagrggaatatacaactaggatttgtatactagttttacttttgcaaagattttgaagtaccttgtcacccagatgactgagtttttgaaacaaagtatatgcattgtagctggacaccacaatataactagtatcaggacactgacagggaaggtcaggtgcagatgaacgatagaggtgcagggttatactttctatggcaaggctggtacgttactttaacaaaaaacccctatc

SEQ ID NO: 738919 - DNA, 618 bp, Homo sapiens
tgaaaagtggctatttttctggtggtatatgaaaacacaatttcagtggagacggaaacttccactcaaaacttgctttgcttctttgcaattaataagttcctggtggactattcagaaagtgttcagctacaattgctgaaaaggatgtcgttgggtgaagaggttaacgatagcctcctagaagcagattcctgctagaagaaaaggaggtttaggaaatgcccagtgaccatggtctctctggtattgcataaaacaaccacaatttggggatgggttcttgcatcctcaccctgggcccttgtaatgagacaccatgcttgaactcaatactatttgtrtaggggctgggaatgaggagaagacagggaatcaataaactcaatgttcaagacatcatttgcaaataaattcaatatttgaaggggaacatgccaaagagaaaaatcaaaccataaataaaagaaaaaaagtttgttaattacaaatatctccagaagccacaatgtctccttcctccctcattccctaacactccttcaggtaggactgtacttcagtcatgtaggaaaaaacatttttctatttcatattaaagattaatgaggcctgttt

SEQ ID NO: 738920 - DNA, 639 bp, Homo sapiens
caccaagttaaacagcatgctattgagttcttttagtttgttctggtggaaatgcctgtctgctatttagagggcatttccatagttcaacctaacattaaggtttagattcaaggatgttaggacttgattgtctcacttcctctgttagtggtgcagcatgttgttacctggctacaattgttaatggtgatcatgacatagacttggagatatggtgtattaggagctgtstatcgtttttcatggtagccatggaggatgaggcacacatgaaaaactgacttgcatgtagcttggacttaaagttatttattgtcctttctgaagattagtcttaaaatgcatttcccccaggattcctatctttatgtcactctgaacagaggagtagattagaggtgagaacgccattggtttcctattcaaactaaaggtaataatttataaacatttattgagtgcttactacttccaaggcaatgaagtaactgtataagcttttcagcttggcttagtgggtcatgtctgtaattccagcactttgggaggctgaagtgcgtggattgcttgagcccaggagttcaagaacagccggggaaacattgggagaccccatttctacaaaaaaatgaagaa

SEQ ID NO: 738921 - DNA, 673 bp, Homo sapiens
ttcttcatgtaacttaattgtgccttcagggcctgctcaggcccaatgttgtatataccacttccatttgatgatggagggttggctgcgcacactaaactttacggcttggtgggtcagataacacttagttcatgatgggaagctcaggccacatggtaacttggtggcacatgggcaacgttcagtgtctrctaagccccagcagcaggccaagagctgtctctcagaaggaaagtagttatctgcagaaaatggcaaggcctttctctaaaatcctaaaagcctatgctgtgatttacctatacaggcctgccaaaggctccaaacagcatccctatctgccactgacacttcaagcaccattggatctgctgcatcacacagtccaagtggcagagcagtttgcacagctgcctggcctgttacagagccttctcttgttctgggccccactcaaaactagcagctttttagatcactcagtaaatgggtcagagtaatacacccaaatgaagaatatgttgctaccaaaatccagaggtctattaggcattttgcctctttctttgttgtaggaggggccaaatgcaataacttatccttcactttagaagagataccttgacctgctccacaccactggatccctagaaatttcactgaggcagaa

SEQ ID NO: 738922 - DNA, 528 bp, Homo sapiens
atgattagtcttttcagttattaaaaatttatagctttgacaaattgtatcaagcagccacagttgaattttgttcatataattaattctctagatattattctatttaaatagctggtgtttttattttgctacattgagtgcacataaacattttattcagaaacagttttaaacaaaaaaatgaaaacccattataagactaaattgtcctcccaaatgctctcatagcattctgtgaatttctatctattcagttaacgccttagcctattcatcggtgttcctcactagcttgtaaattctagaggagtagaactgtttcctgtatcttgtgtacccagcatcaggaatataatagctatccaataaatttttgktaacttatacaagtaaaaaaataaagcatatacagccaccttttaaaggactataaataatttatttacttatatgctgattgcagcagctatgtgcctccattgaatgcacacttctcaagtcactgttagacttatcaggccattg

SEQ ID NO: 738923 - DNA, 629 bp, Homo sapiens
aaatttagaagactcaaatcagactgcattcgttggcaatagaaaagcttattcaaaacaaaatgacacagaaatattggagtaataaaaaaatgaaaacaaataagccagtaaattgttaaaaagtatagcaatgttaatattagaccatttagaatttacagtaaacagccttaaagggacagaaatagatattttatactgacttaatataacataggaattttaacagtatattgcagtaatggttctttatgtaccaatcaacatagttacaaaatacataaggtgaaactaaaaaatataaaaaaggataaatccacaatcrtagtgagaaagtttaaaacttactattagaaactattgatttcatgagtttgaaatagaaatacataataaataatgatataaactatttgtgtaacacaacgagcttgatctaatagatagacatagaattttttagaagtttatattcaacagaggatttagcacaaaagagagatcaaaagaaatgagaaacaaatgaccatgtactaataaactacaaagagacctcaaaaaagccaccgaaaacagacctcacgaacaggctttattcactgaacgtattgcacgaaaacaagaaa

SEQ ID NO: 738924 - DNA, 668 bp, Homo sapiens
agtgtaatcccagctacttgggaggctgaggtagaattgcttgaacccaggaggtagaggttgcagtaagccgagatcgtgacactgcactcaagcctgggcaataataataataataataataataataataataatagtaaacaagccaaatgcctatcaaccaatgagtgagtggataaagaaaatgtggtacatatacaccatggamtactacttagccataaaaaggaatgaaataatggcactcgtagccacctggatggagttggagaccattactgtaaaagaaataactcaggaatggaaaaccaaatatcatgtgttgtcacttataagtgggagctaagctatgaggactcaaaggcataagagtgatataatggacttcagggactcaaggggaaaggtaggatagaggtgagagataaaagactactcactgggtacagtatacactgctcaggggacaggtgcacaaaaatctcggaaaccatcactaaataacttatccatgaacaaaaaaccacctgttccccaaaaactattgaaataaaatacaattttgaaaaagatttgtatttgacatccatcattggtaggttttgataaagatattctcttctattccaattctgataaaaatttttatcatggatggaatgttg

SEQ ID NO: 738925 - DNA, 668 bp, Homo sapiens
agtgtaatcccagctacttgggaggctgaggtagaattgcttgaacccaggaggtagaggttgcagtaagccgagatcgtgacactgcactcaagcctgggcaataataataataataataataataataataataatagtaaacaagccaaatgcctatcaaccaatgagtgagtggataaagaaaatgtggtacatatacaccatggaataytacttagccataaaaaggaatgaaataatggcactcgtagccacctggatggagttggagaccattactgtaaaagaaataactcaggaatggaaaaccaaatatcatgtgttgtcacttataagtgggagctaagctatgaggactcaaaggcataagagtgatataatggacttcagggactcaaggggaaaggtaggatagaggtgagagataaaagactactcactgggtacagtatacactgctcaggggacaggtgcacaaaaatctcggaaaccatcactaaataacttatccatgaacaaaaaaccacctgttccccaaaaactattgaaataaaatacaattttgaaaaagatttgtatttgacatccatcattggtaggttttgataaagatattctcttctattccaattctgataaaaatttttatcatggatggaatgttg

SEQ ID NO: 738926 - DNA, 510 bp, Homo sapiens
atacatcatgccaaggaattttgggcatctaaactttagcatgggccatgttttaatccagattttagccatttggccaagaaaacactttgattgaattgattattaaattcagtctaatgtagtgctcttcctttcttggtacttcagaatatcttctcacacatatctcccaaagttttgttaaaataattgtccagttctttttatttctttggggtgaaatcttccctttttaggttttaactttgaatgtggtgaaatctcctcctcttaggcttaaagctttgaatctggctwacatgtatattccattccccaattctagtaggatgtgtgcagacattgaggtacaggcaagtcttcagaagaactgacttaccttgcaaagaacttttcttcatcatcttcaaatcagatgaaactgcctcatcagacataaaagatggcatagcttcatctggcaaaggaagctagtgagagttagggtacaaagtacatcaaggtcat

SEQ ID NO: 738927 - DNA, 579 bp, Homo sapiens
agttttctcctattttattcaattctagtgagacagctttacctacacaaagccaacctgctaaacatttgaaaatattttgttgggtatagtgaataaatgaccaagtgaatcttttatctattatgtatgtatgtatgtatgtatgtatgtatgtgttatctatgtatgtatatatctgttatgtatgcatgtatgtatgtatctatcatttatgtatgtatgtatgatctatgtatgtatgtatgtatctgttatgtatgtatgtatgtatgtatgtatgtatstatctatctatctatctatctatccatctacctatctatctcatctatcttttatagttttctggcacttgacattcaaggccctcaatcaaccttcttcctacatgtaccgtatttccatttctcttctttccaccaactcctctctggcaagaatactgttcatcaatctcagtgtgcatgatacccttgtttccccaaatgctggctcacaaggcttccaatgcctttcacccaacttatctccataagttttatttctaatattctttcaaggcaaaatgtaattctt

SEQ ID NO: 738928 - DNA, 593 bp, Homo sapiens
ctaaagagtttattgatattaagaggataataacaaatattgtctcttaaaatatgtgaataaatttgactacttacaagaaaagaacaaataccgtgaaagataaaaattaacagagtttactgaggaagaaatagataacctgaatagtcccatatttagtaaaatagttgaattgtagttaaaaattttttacacaggaaactttagacccagatgcttcgctagggaattctatcaaacatttaaacaagaaataaagcyaatgctatacaagttcttccagaaaattataaaagagaaaatatttttcaaccaattatacgatgccagcattactcaaacaccaaaaccagacaaagatattgcaaaggaagaaaattgcatgccaatattcctcataaatgtgatacaaacctttctaacaaaattttaattgatcaaagttaacaacatataacagtgataataagtcaaaaccttgtatgatttattccaagaatgcaaaatgagtttaacatataaagatcaattcatttaatatgcccgattattagactaaaaaagatactctcatttaaagtaataaaatg

SEQ ID NO: 738929 - DNA, 552 bp, Homo sapiens
ccaggttcacgccattctcctgtctcagcctcccaagtagctgggactataggcgtccgccacggcgcctggctaattttttgtatttttagcagagacggcatttcaccgtgttagccaggatggaatatattttaaaagttaattttgaaatgttaataaaagagtagaaattggacttgataaaaatattagaggaaatgtcattaccacttaacacagtccttatttttgaggctgtgcctctccccatttttgtccccaaaaagttaacaaaacatgaaaagagaatttgaaggactttaaatcctaagggagagcttgaccttactagtttagaaaataacgcacttctttcaattaatctttcsagcgatggttcttttcagtatgatatttaaggaaaggaaataactcagtgactcagttgcaagtgaccaagtttcaagttagataaaaactgggcacatggcaaagggacccaaacaagtacagagccatgggaaagagtaagaaaagttgagcttagaggactagcagtaatataatgaa

SEQ ID NO: 738930 - DNA, 485 bp, Homo sapiens
acttctttctgtctaccttgaggaaaggaaaataaacaagttcccagaaaaagcatcagcaaacttctaaatgaatataaccaactcctctcaggagatggaacaggctcagtgatcacgtgtcttgggtttcctggcatgctcctggtttcacatattctgtgycatttctgctgtgagcttacttgtatcagaccatgtgtcctgacttggaatccaaaaatacagagatgcagtctttaaccacttctatgcacaacaacctccaagtccctggaatgacatggtgcctgtcttacctcccaaacctatgcaggccaaatcctaggtcccccacccccatcccatgcaggtcaagtcccagcctccccccatctcatgcaggtcaagccccagtcctcccccaacccagacacaaagaaacacactgagtaactgtcacctccccattcatagctgatggtgctcccagcttgtccccataa

SEQ ID NO: 738931 - DNA, 485 bp, Homo sapiens
acttctttctgtctaccttgaggaaaggaaaataaacaagttcccagaaaaagcatcagcaaacttctaaatgaatataaccaactcctctcaggagatggaacaggctcagtgatcacgtgtcttgggtttcctggcatgctcctggtttcacatattctgtgccatttctgctgtgagcttacttgtatcagaccatgtgtcctgacttggaatccaaaaatacagagatgcagtctttaaccacttctatgcacaacaacctccaagtccctggaatgacatgrtgcctgtcttacctcccaaacctatgcaggccaaatcctaggtcccccacccccatcccatgcaggtcaagtcccagcctccccccatctcatgcaggtcaagccccagtcctcccccaacccagacacaaagaaacacactgagtaactgtcacctccccattcatagctgatggtgctcccagcttgtccccataa

SEQ ID NO: 738932 - DNA, 476 bp, Homo sapiens
ctcccggcaccagggagagactgaagtcagacagtggaactaatggcttagctccccaggcacctggacaacatccagggctctggacacattccatggcggggccatccatctcctttaggggtgcctttgctaacccaaacatstgagcaagaagatccatcttaccctactccagggatatgggctagagggagcattacatctgctatgctgggtaagagccagctcagagccaatcactgcgggaagacctgggccaggtaggcaggaatagagagtagagaggatgtgaagggtctgatattcatggaaacctgctgggggttacctaagacacacggacgcctcactcccatgttactaaacaaaacattataaggcatattaaaaggcagaaaacacatttgaagagatggagcaagcatcagaaccggattcagacatggcagggatgttggaattatcagactggg

SEQ ID NO: 738933 - DNA, 616 bp, Homo sapiens
ccttatcagattttgtgaaacacattgattaaactgtgtattgctaataatagtaacagttcaatccagaagaaaatttgcttcttaggaccctaatgatacagtctgatcaataaaaaactttgaaggatagagcatattcaattatgatagaatcctgtggtagaagtgaaataaaaatattttcagggagaaaaataatcaatgcaaaattttcaactggtcaaaggcttaagtatttttgaaatgaatgatggggtggatattaagtcactataatatttataactcactgcatacatttaaaaattttctgtaatcactttattttcaaaacatcattcataactcatcagaacttcrtaactacttaaatttataattaaaagcctttttaaatttatcattaaaagcccccctctccccacctttttttttctttgagatggactctttctcttttgcccaggctggattgcagtgacgcgatcatggctcatagcagctttgaactcctgggctcaagcaatcctcccaactcagcctcctgagtagctggggctacaggcatgcacaatcacacccagctaattaaaaaaatatatttgtagagatg

SEQ ID NO: 738934 - DNA, 617 bp, Homo sapiens
tccatctctacaaatatatttttttaattagctgggtgtgattgtgcatgcctgtagccccagctactcaggaggctgagttgggaggattgcttgagcccaggagttcaaagctgctatgagccatgatcgcgtcactgcaatccagcctgggcaaaagagaaagagtccatctcaaagaaaaaaaaaggtggggagaggggggcttttaatgataaatttaaaaaggcttttaattataaatttaagtagttaygaagttctgatgagttatgaatgatgttttgaaaataaagtgattacagaaaatttttaaatgtatgcagtgagttataaatattatagtgacttaatatccaccccatcattcatttcaaaaatacttaagcctttgaccagttgaaaattttgcattgattatttttctccctgaaaatatttttatttcacttctaccacaggattctatcataattgaatatgctctatccttcaaagttttttattgatcagactgtatcattagggtcctaagaagcaaattttcttctggattgaactgttactattattagcaatacacagtttaatcaatgtgtttcacaaaatctgataag

SEQ ID NO: 738935 - DNA, 649 bp, Homo sapiens
tctttgaagtacctaagctttttagtttaatatagtcccatttgtctatttttgattttgttgcttatgcttttgaggtcttaaccataaactctttgcctagaccaacatcctggagtgtttcccctgttttcttctagaagttttctaattacaggtcttaggtttgagcttcttttaaaccagtttgatatctacaartatcttctaataagacaagaactttactatgctctcatatcttttgttcttgccatcttctgccaacccattaatattggcattaactaacttttaattcttagttgtaaggatgtattttttcttgttagtcttatcaatttgtaaagataacaactctactaaggtataaagtcatttttccttcaagaatttcttggaatatctcttgaatttccttcactttttagttagtttttcaaaactattttcaatgtgaccttttctacaaaatcttgaaagcacttgtatgcctgaggaaattcatcatctcatcttatttgaatgatagtttggctggatataaaattctacatttttaagttcttttccatcagtatgtcgaaaataagattccagttatcttgcatccattgttgctgttaacaaagatgatatcaagctgatt

SEQ ID NO: 738936 - DNA, 649 bp, Homo sapiens
tctttgaagtacctaagctttttagtttaatatagtcccatttgtctatttttgattttgttgcttatgcttttgaggtcttaaccataaactctttgcctagaccaacatcctggagtgtttcccctgttttcttctagaagttttctaattacaggtcttaggtttgagcttcttttaaaccagtttgatatctacaaatatcttctaataagacaagaactttastatgctctcatatcttttgttcttgccatcttctgccaacccattaatattggcattaactaacttttaattcttagttgtaaggatgtattttttcttgttagtcttatcaatttgtaaagataacaactctactaaggtataaagtcatttttccttcaagaatttcttggaatatctcttgaatttccttcactttttagttagtttttcaaaactattttcaatgtgaccttttctacaaaatcttgaaagcacttgtatgcctgaggaaattcatcatctcatcttatttgaatgatagtttggctggatataaaattctacatttttaagttcttttccatcagtatgtcgaaaataagattccagttatcttgcatccattgttgctgttaacaaagatgatatcaagctgatt

SEQ ID NO: 738937 - DNA, 649 bp, Homo sapiens
tctttgaagtacctaagctttttagtttaatatagtcccatttgtctatttttgattttgttgcttatgcttttgaggtcttaaccataaactctttgcctagaccaacatcctggagtgtttcccctgttttcttctagaagttttctaattacaggtcttaggtttgagcttcttttaaaccagtttgatatctacaaatatcttctaataagacaagaactttactatgctctcatatcttttgttcttgccatcttctgccaacccattaatattggcattaactaacttttaattcttagttgtaaggatgtattttttcttgttagtcttatcaatttgtaaagataacaactctactaaggtataaagtcatttttccttcaagaatttcttggaatatctcttgaatttccytcactttttagttagtttttcaaaactattttcaatgtgaccttttctacaaaatcttgaaagcacttgtatgcctgaggaaattcatcatctcatcttatttgaatgatagtttggctggatataaaattctacatttttaagttcttttccatcagtatgtcgaaaataagattccagttatcttgcatccattgttgctgttaacaaagatgatatcaagctgatt

SEQ ID NO: 738938 - DNA, 588 bp, Homo sapiens
catgtatcaagcaacagagctgaaaaatgaagcagaaactgagagaactgcaaggagcaatagacatcttcacaattataactggagatctcaacatccctgtctcaacaattaatagaacaactagacagaaaatcagcaaggggccaggcatggtgactagtgcctgtaatcctaagactttaggaggccaaggcaagaggatcccttgagcctaggagtttgagaccagccagggcaacacagggagaccctgtctctataattaataaataaataaataatcagcaaggatgtggaaaaactcaacaacaccatcrggatttatccaacatttatagaacacttcacccaacaacagaagaatatacattattttgaaaagcctatagaatatatgccaagatagaccatattctgagccataaaacaaatctctccaaatttcaaagaactgaaattatacagcaggtattctctgaacacaataaaatcaaactagaaatcaataatagaaaggtaacagaaaaaaatcaaacactttgaaactaaacaatatacttctaaataacacatgaattaaaaagg

SEQ ID NO: 738939 - DNA, 679 bp, Homo sapiens
gaaattttaaaatacatggaactgaaagaaaatgaaaatacaacatatcaaaatttatattatgctgcttaagcagtgctgagaagcgttaaagcatacattagaaaagagaaaaattcccgaatcaataatcttaagttccatatcaagaaactagaaaaggagcaaaataaactcaaagcaaacagataaaataaaataataaatggaatagcagaaatcaatgaaactaaaaacagaaaagcaatagagaaaacaaatgaaacaaagagttggtttgttgcaaaggttaataaaattgacaaatctctagcaagactgacaaagacaaaagagagaataatatcaggaatgaaaacaggggatagccatacgaaaaaagcttgacatcactgatcattagagaaatgtaaatcgaaaccacaatgagataytatcttacatcttctgaatggctattaccaaaatgtcaaaaaataacagatgctggggaggttgtggagcaaaagcaacagttatacactgttggtgggtgtgtaaattagttcaaccattgtggaagacagtgtggtaattcctcaaagaactagagggagaaataccattcaacccagcaatctcatcactgggtatatacccaaaaattatataaatcttcctattataaagatacatgcat

SEQ ID NO: 738940 - DNA, 545 bp, Homo sapiens
aagctatttgtgcttcatcttctgaaatactctatttttcttggggattttaatctgaccataggcagaaaggtgatcattagggtaagatggtatcttcttttttaaatgctccattacattgtgcatagtaataactggtactcacatgcacactatccacggaagtgaaggagattaaatgggtgctaggcagcatcagcttctgtaaactcagactcccaggagaagcccagcttgccctaggaggagcaagaattcagggccaraagaccaagtcacttgctgcctgcaacagctgaggcgaatcccttagcctttggcaccctaagtttagatgtaaaatgcggatagtaatacttgttctgccatcttcttggggtgggatggggcggggctggggaggttgggactcagtcccaaaaggaagggatgcaaattgaggcaggagaatagggtctggaggcagggaacctaaggctgtttcacgctgacttcctagaatgaaattgaaaggaaaaccctaacttttcctgtctaagtaa

SEQ ID NO: 738941 - DNA, 639 bp, Homo sapiens
aggaactaattctaaagacatatttgatttgaaaaaaaaattcaatcaaatcagttcattgtaagtttctgaaccagacactctccttaacgtgcatttctgactttttttttttaactctacttcattttgggtgaatttgtgctctttgtttgccttttctattaataattcttatgacagaaataatagtgataattatttttaaataatttttaatataattacaattataattataaaaatacaatttataattatataggaagtgatactaccttcaatattcgtagcttctaataagtgacaagtcctgtacayacacacacatattttaatacacaccatgttctcccccatcctatgtgtcaaggaacaattccttctcaggttgagagggctgacaatgactacaataaatgtgctttttaccttggctataatgtcctaattttcacttatggctctcaaagtatagtagcagggttcaaataaatcaaatccttgtcatgaacgagctatctttaaccaatttatgaaacagaaaacacactatttccaaggaaggttaagtgcaatgtattatgcagataaaataaggtattattagtgtaaatagaatacactgatatcagatac

SEQ ID NO: 738942 - DNA, 601 bp, Homo sapiens
ttgaatattccatagtaataagtaaggcatgatcttttcacaaggagagaaaattacaaatgaatttactttaaaatgagacttgtgactatctctggttaataagaattatggagaaattttattttctttagatttcttatatttaatrtttaagctttctattataaacatcatttatataatgaaatataaattataaaagaaaattttcctatgaagcaaattcccaagtttattattagaattgatattacttcttcttaaaatattttgtagaattcagcagtgaaaccatcaggccctgagcctttctttgatgggagacttcttattaggacttcactcttcttactcattggttttcttagtttatttactttattagtttactttattttcttactttattattagcatgttgtgaaagatgtggctcattatttcactattttctctttgagcactcctagaagaaaatatattcttactttagtagcccacaaaaagttgtaatttgagcattttgttcgatttttttttctcaaagacactggccttaagtatgagctaccaagagccttgggctttactatcatag

SEQ ID NO: 738943 - DNA, 463 bp, Homo sapiens
tgatctagctaatcctgtctcttccatatgcttcacatatattcactatgtaactgttccaacccttccttactgtagttatggagacctagctatgttcattagggagtttaggtttttcttctctggttatgactggattaaagagtttagataatacacaaataaaatggaaagaaatctagaaaaggaatagctgtcctaaagaaacctatgtacttccttaayttttgtaatgggcatggtgatttacagataattactctagagccaaagtgactgtggggattataccttacggaaatgtagccacctaaaatacataacaatgatttttaaatataggcagatgatttagtcaagatggtttactgaaggtaaatcttgttaaacaatctcttttctgaacattcatcctataaataaagtggaattgaatttgatattttaagctttagctact

SEQ ID NO: 738944 - DNA, 645 bp, Homo sapiens
agagagagggttattgagttctcagaaaatggaaattagccctgttcagagagtctcaaggagctgcccttaataaaaatagcggaaattatgggtttttttcttgccttacaaatatttttttttttgagacagagtctcaccctgtcacccaggctggagtgcaatggtgtgatctcagtccactgcaacctccgcctccttggttcaaacrattctcttgcctcagcctcccgagtagctggaactacaggtgcccgccaccatgcccagctaatttttgtatttttagtagagacgggggtttcaccacgttggccaggctgacgtcgaactcctgacctcgtgatccacccaccttggcctcccaaagtgctgggattacaggcgtgagccaccacgcccagcctcagatctttattccatatgagggacagtgagctgcattcgtggaattgctgcctggacacctgggaggcaagaggctcagcgcctgcccaagaagatggtatggttacaagtgcagggaggggcatatgaggcttgagggacttctcgtttgtttgttttctgttttcccaaatacacagtacatagtatagcagtctttagaaaaccaacctgccttaaattggtttactgttt

SEQ ID NO: 738945 - DNA, 633 bp, Homo sapiens
ctaatccacagaccttattcaaacggtatcaatggagcttggtggatagttctaaatcattctggagacctcattatttttagttattccatccctttagtgtacttgaatctttcctaggtgatcttaatgtgcagccagggctgagaactgctgggtgtggacggtggagcctggagttagtattctacgagtagacttaattggctttacggtgcatttttttctccccgttctctgacatgtaagagctatgtctgaaaatctagtatatttctaagctattgttatgctgctgatgggatgaatcatttgaagatttctgactatttttatgaagtgacagttatatctgctgggaggagaaatgagccctagttwtattcatagcaaggttactgccacctaggtgaaaaatggaaaatggtgtattggggagggaagagttgaagagctttcaaatatgaactcacaagtcagtgggctaggtcttcgcagaactcaatgccattctttggatgtgagtctggaatacagtttagattttaattagagatgtgctggaccttaatgtaaatgtatttagatagggaagccaaagacactaaactgaaaaccttgcatttcctacag

SEQ ID NO: 738946 - DNA, 600 bp, Homo sapiens
ttactctggctttcacctctcattcttcctttgaatatgtggaataggtagaattaatagatgttaggatttgttgttgttgttgttatcattggagacacaacagcttagtaggaaacccagctctctgtttcagtgggctttgtgacattcattgaatttattggtctgctgggaactgcacagagtcctgtgttcttatctcaagtaagttttgaaagagttttgtaccttttgaggaaccaagacctcagatactgtaattgcctttgggctaatgaatgatttttcatttcaaatagtccatacaataaagttacaccatgttcaaaataaaaatatttttaaaagcttctrtgtggagtgccaaggaatagagtaagaatcttctgcattatttaaatcatattttacttaagagttaagaatacccacttgatctgttagtctctggattataacatttcttccatccattctttcaactaaaaatgttttagtgcctgtcatgggccaggcatggatccagaagataaaacattaaacaggaaacatatctttcctgctttcacaaagctttttgttccatggaggttacag

SEQ ID NO: 738947 - DNA, 643 bp, Homo sapiens
tattaatgagtagtattccatagtatgaatctgtcacagcttgtttaagcatttgcccattgaaggacatatgagtcatttccaggtcttggctattttgaataaagctgctatacatattcaagcacaggctttgtgtaaatataamtttttatttttctgggataaatgactaaaaacaacccaaccattgttgggttgtacatttatttaagaaactgcatattgatttatagggtggttgtaccattttatactcccaccagcaatatttaaatgatccagcttctacacatgctcaccacatttggaaaaatcgaggagtgttatttagatcctgccggagttccaggtgagtttggggattccttaacagcctttcttttcccccaacttttaaaaaagactgatgttccatccctagtttggctcagatggcagattacattaacgataaaagccaaccaccatctagataaaacagtccaccaagccaagtccaccattttcctttaggacaacaagaaaggaaactcatacactttctgaacttcctagttaactgtaaataatgtcagaaaagatgaaccatcctttgaggtttttgaggagagtatgtggcaggactcaggccgagaccttg

SEQ ID NO: 738948 - DNA, 552 bp, Homo sapiens
cttcttattaatgagtagtattccatagtatgaatctgtcacagcttgtttaagcatttgcccattgaaggacatatgagtcatttccaggtcttggctattttgaataaagctgctatacatattcaagcacaggctttgtgtaaatataaatttttatttttctgggataaatgactaaaaacaacccaaccattgttgggttgtayatttatttaagaaactgcatattgatttatagggtggttgtaccattttatactcccaccagcaatatttaaatgatccagcttctacacatgctcaccacatttggaaaaatcgaggagtgttatttagatcctgccggagttccaggtgagtttggggattccttaacagcctttcttttcccccaacttttaaaaaagactgatgttccatccctagtttggctcagatggcagattacattaacgataaaagccaaccaccatctagataaaacagtccaccaagccaagtccaccattttcctttaggacaacaagaaaggaaactcatacactttct

SEQ ID NO: 738949 - DNA, 643 bp, Homo sapiens
tattaatgagtagtattccatagtatgaatctgtcacagcttgtttaagcatttgcccattgaaggacatatgagtcatttccaggtcttggctattttgaataaagctgctatacatattcaagcacaggctttgtgtaaatataaatttttatttttctgggataaatgactaaaaacaacccaaccattgttgggttgtacatttatttaagaaactgcatattgatttatagggtggttgtaccattttatactcccaccagcaatatttaaatgatccagcttckacacatgctcaccacatttggaaaaatcgaggagtgttatttagatcctgccggagttccaggtgagtttggggattccttaacagcctttcttttcccccaacttttaaaaaagactgatgttccatccctagtttggctcagatggcagattacattaacgataaaagccaaccaccatctagataaaacagtccaccaagccaagtccaccattttcctttaggacaacaagaaaggaaactcatacactttctgaacttcctagttaactgtaaataatgtcagaaaagatgaaccatcctttgaggtttttgaggagagtatgtggcaggactcaggccgagaccttg

SEQ ID NO: 738950 - DNA, 574 bp, Homo sapiens
tccctttcatatctttctttaacggtatatttgcagctgtttcctgttaatcctttgtctgtctgacttccttctttagggtgatgggatccttaagacaagcacagagtatgtcctgctgtggtgtcctgcaggacaggccacactytggcccattaacggtgtttgatgtgacgatgcacatgagcccatggaggtctgtgcctcaggccccgtgggtgtttgcaggttgaagatggaatgatacacgccatctctgagatttttatttgctcagaccttcccctgttctggcccaaacccacttaattctgtctaataagtggtggtgggttttggggggcctagtttgtttgtgtcctctcttatttccttgagcattggtttgtagttctccttgaagaggtccttcacatcccttgtaagttgtattcctaggtattttattctcttagtagcaattttgaatgggagttcactcatgattttgttctctgtttgtctgttattggtatataggaatgcttgtgatttttgcacattgattttgtatcttgagactttgctgaagttg

SEQ ID NO: 738951 - DNA, 590 bp, Homo sapiens
aaaagcagcaagtcactagggaaaaatgctctgcaagtgcagccattgttctcgcacttctcaactcccaggtgcatgtacatactatttaaatagagtcttatccagggtgccacttactataaatggctttctagttaggcagagatagcagacccacagctaagctccttaaaccggaataatcacagtcagatcttatcacaggatatgacttgaaattttcacatggactagccaattctaagagtttcataaaattaaatttcttatttaaaatccattatttcgtagaagccctcgatgtttcttgaacataaatttattttagcttgaattactatttcttgagcctccttaatctaaggtggaagaaacaaaasagattagtcaggtcttattgcctataagaatgtgtctcatagttaacctactgcttctagtaataaggatgacattttagagaaaatagatttacttttctatcattgtgtgtcattgatatgaattgattctgtttgttattcagtatgatcaatcagttagtacttcttaattatcaagtctgattaagtttttgcaaatatttt

SEQ ID NO: 738952 - DNA, 590 bp, Homo sapiens
aaaagcagcaagtcactagggaaaaatgctctgcaagtgcagccattgttctcgcacttctcaactcccaggtgcatgtacatactatttaaatagagtcttatccagggtgccacttactataaatggctttctagttaggcagagatagcagacccacagctaagctccttaaaccggaataatcacagtcagatcttatcacaggatatgacttgaaattttcacatggactagccaattctaagagtttcataaaattaaatttcttatttaaaatccattatttcgtagaagccctcgatgtttcttgaacataaatttattttagcttgaattactatttcttgagcctccttaatctaaggtggaagaaacaaaacagattagtcagrtcttattgcctataagaatgtgtctcatagttaacctactgcttctagtaataaggatgacattttagagaaaatagatttacttttctatcattgtgtgtcattgatatgaattgattctgtttgttattcagtatgatcaatcagttagtacttcttaattatcaagtctgattaagtttttgcaaatatttt

SEQ ID NO: 738953 - DNA, 575 bp, Homo sapiens
aactcagaaaatacacaaacacatgaaagttaaacaacacgttcctgaatgagcatcatatcaatatgataattaagaagaaaataaaaatattctttgaaacaaatgaaaattaaaacacagcatactaaaataagtgagattcagcaaaagcagtgctaagagggaaggtgatagcagtaagtacctacatcataaaagtagaaggatttcaaataaacaatataatcatggactttaasaaagtataaaagcaaaaacaaagaaaataccaaagtattaaaagaaaaaaaatgaagatcacagcagagctaaatgaaataaagtcaaaaaataatgtaaagtattaacaaaagaaaaactggggttttcttgaaaacataaacaaaatcaataaaccacttactacattaaacaaagaaaaagagagaaatcccaaataaacaatattagaaatgaaaagaagccattaaatacaaaagatcattagagactattatgaacaactctataccaacaaactaacaaacctaaaaaaaaaatggataaattcctgaacacatacactctaccaa

SEQ ID NO: 738954 - DNA, 575 bp, Homo sapiens
aactcagaaaatacacaaacacatgaaagttaaacaacacgttcctgaatgagcatcatatcaatatgataattaagaagaaaataaaaatattctttgaaacaaatgaaaattaaaacacagcatactaaaataagtgagattcagcaaaagcagtgctaagagggaaggtgatagcagtaagtacctacatcataaaagtagaaggatttcaaataaacaatataatcatggactttaacaaagtataaaagcaaaaacaaagaraataccaaagtattaaaagaaaaaaaatgaagatcacagcagagctaaatgaaataaagtcaaaaaataatgtaaagtattaacaaaagaaaaactggggttttcttgaaaacataaacaaaatcaataaaccacttactacattaaacaaagaaaaagagagaaatcccaaataaacaatattagaaatgaaaagaagccattaaatacaaaagatcattagagactattatgaacaactctataccaacaaactaacaaacctaaaaaaaaaatggataaattcctgaacacatacactctaccaa

SEQ ID NO: 738955 - DNA, 620 bp, Homo sapiens
ctttttaatagggttttttattttttgttgttgagttgtttgaaatccttgtagttcttggtattattcctttgttggatgcagtttgcaaatattttctcccattctacatatatgtgttcactctgttgtttatttttttggctgtgargaagaattttagtttaagtcccatttgtctatttttgttcttgtttcatttgtttttgagatcttattaataaattctttgcttagggcattcagaatcatttttttctaggttttcctctagtatttttacagtttcaggtcctatatttaagtctttaatcaatcttgagttcattttcatgtgtggtaagagataggggtccagttttattctgcatctggctatccaatatttcagcagtatttattgaataagatgtctttcctcagtgtgtgtttttgttgcctttgtcaaagatcagttggctgtagatatatggttttatctttgtgttctctattgtgttcccttataaaactgaatgcctttaatagcacccaagtcacatcttgaatgctttgctgcttagaaacttcttctaccagataccctaaatcaattctctaaagttcaaagtttcacaaat

SEQ ID NO: 738956 - DNA, 620 bp, Homo sapiens
ctttttaatagggttttttattttttgttgttgagttgtttgaaatccttgtagttcttggtattattcctttgttggatgcagtttgcaaatattttctcccattctacatatatgtgttcactctgttgtttatttttttggctgtgaagaagaattttagtttaagtcccatttgtctatttttgttcttgtttcatttgtttttgagatcttattaataaattctttgcttagggcattcagaatcatttttttctaggttttcctctagtatttttacagtttcaggtcctatatttaagtctttaatcaatcttgagttcattttcatgtgtggtaagagataggggtccagttttattctgcayctggctatccaatatttcagcagtatttattgaataagatgtctttcctcagtgtgtgtttttgttgcctttgtcaaagatcagttggctgtagatatatggttttatctttgtgttctctattgtgttcccttataaaactgaatgcctttaatagcacccaagtcacatcttgaatgctttgctgcttagaaacttcttctaccagataccctaaatcaattctctaaagttcaaagtttcacaaat

SEQ ID NO: 738957 - DNA, 620 bp, Homo sapiens
ctttttaatagggttttttattttttgttgttgagttgtttgaaatccttgtagttcttggtattattcctttgttggatgcagtttgcaaatattttctcccattctacatatatgtgttcactctgttgtttatttttttggctgtgaagaagaattttagtttaagtcccatttgtctatttttgttcttgtttcatttgtttttgagatcttattaataaattctttgcttagggcattcagaatcatttttttctaggttttcctctagtatttttacagtttcaggtcctatatttaagtctttaatcaatcttgagttcattttcatgtgtggtaagagataggggtccagttttattctgcatctggctatccaatatttcagcagtatttattgaataagatgtctttcctcagtgtgtgtttttgttgmctttgtcaaagatcagttggctgtagatatatggttttatctttgtgttctctattgtgttcccttataaaactgaatgcctttaatagcacccaagtcacatcttgaatgctttgctgcttagaaacttcttctaccagataccctaaatcaattctctaaagttcaaagtttcacaaat

SEQ ID NO: 738958 - DNA, 626 bp, Homo sapiens
cttcaaatgctacattctccactgaagccacctcattctgcccaaaacaaaactaatttaccccttctctgtttacccccaaatgctttgtttctctgttactaaataattactgtctcttgagaccaagcatattgtaaatcaaaggaaactgatatatattacaggaaatagataagatctggcatataaaaagtattttttattgtttgttgatttttttttttaatattcagctgaagtcccttgattcttccatttaaggatatgctaaatgcaggactagggcagcatatcgtgtgacttgaaaaatctctaaggtattctcaaacttacattttcatcatcccaactagaactctttcttttttttaatttttatcgatacataacttttgcagatatttatgggggtacgtgtgatattttgatacatgcawacaatgtgtaaagatcaaatcagggtaatttggatattttttatctcaaatatttatcatttctttttgttgggaatatttcagattttctcatctacatttttaaagatatataataaattctttgtacttatagtttccttactatgctatccaaaattcaaaattattttttccatccgacta

SEQ ID NO: 738959 - DNA, 629 bp, Homo sapiens
attgagaagatcactagtgactttcctctgtaggctggagctgatggaaagaggcgctgccacagaattgggctccctaagaacggggaagataggatcacgagctaggaagagccaggtgtcagcacttaatcatcagattcgaggtaggcaaaattcctgtaatgggtagcaagactggatggtagccatagaatcctggcccctagaactctacagagataacgaataaaacctggttttcttaggaacaagttgtgtgctcctccaagagtagtgcttaatacatatgatcaaaagaaataaaaaatgaatgagcagaatatgggcttcaactgacgaatgacaagtcataatcccttgcctagttttcatacccgagccagttctcagacccaggaacattaagccaatggccattatatggtgtagtgcccccgacagayagaaacgtgagtttggaaaccaacaagcttggagatccatttgggagaccacttgggggatttgtgtttgctgccctgtagcttgacatcgtgtgcctctagatgtcctgatgtccagaggagaaaccctttcatcaggtgactcagtaggtgtctctcaaaacttaaagctacggctgcctc

SEQ ID NO: 738960 - DNA, 536 bp, Homo sapiens
agtagtacaatattaactttaaactgtgataagatatgataatccttggaaaaaagaatttaaaaaatacagaaaggtacagttaaaaagctaataaataaaatgaaggctggggacggtggcttatacctgtaatctcagaactttaggaggctgacatgggaggattgcttaagccctgaagttcaagaccagcctgggcaacacagcaagaccccctctctaaaaactattttttaaaaaagtatctggtcatggtgacatgcgcctatagtcccagttacccagagactraggcaggagaattccttgagcccagggatttgaggctgcagtgagctatgattgtgctactgcactataccctggacaacagacaaggtctgtttttgagacaacagatcttgtctcaaaaataaataaataattaattaaaaatgagaaattaaaatgaaattttaaaaaacccccaacaattaggtgggtcaaataaaaatgttaaacaaaaaaaatggcaaaaatccaaatatcaacaa

SEQ ID NO: 738961 - DNA, 589 bp, Homo sapiens
ttaatcttctataatcagtttctctgacaatgggtcatcaagtaatcatgatacctgagcttcccatcatgaactgtgttttctgggtcatgaagccatagattgggcatgtaagatagcaatctgccactaaggagaagaagccaacaagagaacaggttcaagctagccaggactgcacaagttagttgcatgagcaggtagttctgctccattgcctcctctcttctatggcacacctatggcctcttagttttctgtttaataatgaactgatctgagataggagaaactggcatttacaaatggatattctggcaacaactgggaggtggactccccaagcattaaaccacaatcaggggtgtctcatccattgagtctggacagatytacattaattcatggctagttgctaacagcttgacttccatcatggttagaatttatcctcactggaataaacagatatttttggatatggatgttcctgttaataatgcttctgccgccaccattaattgtggacttagggaatgctttattctccatcagcgtgttttaaacacggaattatttccatccaaga

SEQ ID NO: 738962 - DNA, 630 bp, Homo sapiens
agatctctcctttcccctgtggctgatacatccctgtatacgtcctctgcccgttcttcttttccccaacccacaacttacttttgaacatccttccaaccatgcaggcctcttctgttgttgctgtgcatattcctcttcctctggagcacttttctcctgggaactggaggtggcacatcctacacygaataatttctatcacttggccagagagaggggaaagagaagtgagaaaagatggcactaccaggaaagaacccctctccccttttgggttagaagtctgcctagagccacagggctttgccagagcccatcaagcgtgaacatcttcctctgtggaaatacactaagccaagagagtgattgaggtttatggtctcaggaattttagcctgaaaaatgggaggggaaagaaggtggaggaataaggaaaagtgaaacattatcaagactgaggtgatcagacaggtcctcctcatacttaccaggaaaattgtttttcacagcaactatttcattgactgtactggcaagagaaagaaaacacatctgaaatgtgcctgagatttactcttgtattgggttcttatagtctgcccttcagggtccatcctgcactcttaa

SEQ ID NO: 738963 - DNA, 622 bp, Homo sapiens
agcttatttctcttttacagtctgaagactttaacttcatctgttctgaagctttgttattagatacatacatgttcgagattattgtgactcactgatgaagtgacctctttatcattataaaatgttccttttaatctcatgtaatattccttcttctgaagtttactttgtctgatgtatttcttttagtggttagtctaatatttacaatatacatctttaagttatcacagtccaacttcatayaatattgtcacttcacatatagtataaaaatcagagaagaatatattttcattttctacttgtattctttgtgctattgtatgcctacattttatatctaaacatattataaaccccatattttatttttaagtggttatctttcatataaatttaaacttgagaaaaaatgtattctacatgtacccacatatttatcatttcaagcagtctctattcccttgggtagactcaaattttcatctggtataattttccttatgtcaaaagtacttactgtaatatttcttgtagttcaggtctactggcggcacttctttcagatttgtttggtaagttatttttttttgcctttatctttgaaagatatttt

SEQ ID NO: 738964 - DNA, 560 bp, Homo sapiens
cagcctccataatcatattagccaattctttaaaataaatctctttctctgtatgtacacatcctattggttcttttctctggagaaccctgactagtataacagtctcaggagaagaccagccttatgaggaatcagtcaagatgtggttttcctcttttcactccctccctcctcctaaatcctatcaatattacctcttctcctaaatcctatcagaggaggaaaatatatatgtatagaggttgagtatcccttatccaaaatgcatttcagtagtgtttcatgttttggatttttttagattttggaatatttgcatatatataataaraaatcctggggatggaacccaaatcacaaaattcactcatgtttcatatataccttatacatgtagactgaaagtagttttatacaagattttaaataattttgtgcatgaaacaaagtttgtgtacattgaaacatcagaaagcaaaggtgttactatctcatgccagtgttcaaaaggttttagattttggagcattgtgaatttcagatttttagattaggga

SEQ ID NO: 738965 - DNA, 609 bp, Homo sapiens
aacagtgatacagtcaatatacaggatatttctatcaccctacggatcccttatgttggccttttgtagctgcacccacttttctcctgcctctataccctcctttgcccctggaaactattgcttatctgttctccatttctataaatttgtaatttcaagcagtttatgtgaatggaatcatacaatatgcaacttttggaggttgggttttttcaaccagcataattctctgaagatctatataacaccctttgttgtatgcatcaatagttcctactctttcttctctccagctttgttgaggtataattgaaaaatttaaattgtttaacgtgtatagtatgacggtcggctactttgtgaaattattaccacaatcaagctaattaacatgtccatcctsttaacatatccatcaccacaattctgtcctttttattgctgagtagtattccatggtttggctgtatcacctgttctcagcactttttacattaacactcgttgtgtattcacaaggaccccggatttattgttaggaccaacaccgctttcttttattttcgttcctctctgtaaatgtatgttagttatctttttcaaaat

SEQ ID NO: 738966 - DNA, 527 bp, Homo sapiens
gtgtggctactcctagaagagtagaaaactccccctacccaccatattctgcaggaagaggcagtaatcagactttttttttccatcagtggaaatgtggcccagttacctagtctggaaagaaagtggtggatgrttctgggtgtaagaggaggaggacaaaaaaccaagagtgatcatgttcctggaaagtggctgtcatagagaactgcaagtgtaggtcactagatctataactggtagaagtccaactttggggcattgttggctgtgcctggctctaaaggactgggactcacctctctcaaataatcactgcagctgttctgggatctggagcagtgaaatatcacagaagcagatccacagcaactttggtaaagaaccagatccaacagagaaatgagagcggacccactggcagctcaaacaccatttttcctactccacggtaagaaaggccctttttatgggtctcaaattcccttgagtttcttggataatttatgggaataagaatactcaag

SEQ ID NO: 738967 - DNA, 614 bp, Homo sapiens
tactattatttataatgatcattaatgttaataattaatattaattttgtcattctggttaatatcagagattactattattatatttattcatattaataactaatattattattcctgatatccggggggtagaagatgataatactcccaaattcacagaaggtgtacacccccctatgatgttattcctaatagccagggggtagaggaygacattactcaaaatgttgcagtggatatacatttcttctgtgatcttgttcctaatatccttcatggggagaggatgatattactcccaatatcacagggggcgtagacctcccttgtgatattgtccctaacatccaaaggtggagaggatatttctcccaatatcgcagggggcatagacctcccctgtgatattatccctaatatcctaaggtggagaggatgatatttctcccaatttcgcagggggtgtagaccaccccagtgatattgttcctaatatccatggggtgagaggatgatattagtctcaatatcacaggaggtgtacactccccagtgatattgttcctaatatccagggactgataggatgctattgctcccaatatagcatc

SEQ ID NO: 738968 - DNA, 614 bp, Homo sapiens
tactattatttataatgatcattaatgttaataattaatattaattttgtcattctggttaatatcagagattactattattatatttattcatattaataactaatattattattcctgatatccggggggtagaagatgataatactcccaaattcacagaaggtgtacacccccctatgatgttattcctaatagccagggggtagaggacgacattactcaaaatgttgcagtggatatacatttcttctgtgatcttgttcctaatatccttcatggggagaggatgatattactcccaatatcacagggggcgtagacctcccttgtgatattgtccctaacatccaaaggtggagaggatatttctcccaatatcgcagggggcatagacctcccctgtgatattatccctaatatcctaaggtrgagaggatgatatttctcccaatttcgcagggggtgtagaccaccccagtgatattgttcctaatatccatggggtgagaggatgatattagtctcaatatcacaggaggtgtacactccccagtgatattgttcctaatatccagggactgataggatgctattgctcccaatatagcatc

SEQ ID NO: 738969 - DNA, 605 bp, Homo sapiens
gaatcctggatcatttgagaaacatatatatatgtaatagtcagggattacaatttcaggattattgcttggattggatctcatgtcttgaatgtatacccaaatgctcttcctcatactcccttgaaacccttgctgaagctggatgttgggatctgcatttgggaagggtcacatctagggccagttgagtagagaaacatggctgcctcataccaggtgcatgcggggagccagggagaggaaggtcctcaaggcaagagagctgtagaattttacccctccagaataaagagaggtggatgactgaatgtttgcctcttactttttcacctgctggatgaatcattcttgctcctgtgaggagaaaccaatgaaactgtagagaacaacagattctgccaattacacccaagtggtgttytattggctgacaaaatcatagggagagagagcatatggctttcactacagtctctgatcttgcttttttaaaatttattgccctctcttgatttgacatgtggagaattacaatttgaggttcagagaagttaatgatttgaaagtcacacttcagtgactaacccaggcctagactccag

SEQ ID NO: 738970 - DNA, 635 bp, Homo sapiens
ctttaacttttaacttttttttcctgactctaatttctccttgtcttcctctccttttcttctacttccattcaagtctgctttggactagagtttcagattaactttcaattctttctttagtagatttttaattatcccaaagccacactgagagcaggtcagttcagaggctccaggcagctttgctcacatctgcagaccacgtaggtataatctctatggcaactgacccatgttggttaggaacaaataagctgaaaaccaaaggttaattgctgtttcatttctgcttctttttttcccttgcaagtccagcattgtggatggaagttctaattaaaatcaaattatcagcagattgagcatcttctttataatttcagtggttgaaaaattattctggctgccttgaaaagggaaagcaatagayggtttctattggcctccatggctcctcttcccacctttaaggcaaagacaaatagcttagaggacccagccaaatggcctggatctttgctacacctaagaacagtatgcaccttcactgtcacttgattttgttattaatactatcactgatagtgctgaccatattgggaatttactttctgccatgcactgtgctaagc

SEQ ID NO: 738971 - DNA, 643 bp, Homo sapiens
tgaacatacagctaccaccccatcgacagcttctctttcttttgctcaatttctttttttttttttttttttttttttgagatgatggaatctctctctgtcgcccaggctggagtgcagtggcccgatcttggcttactgcaagctccgcctcctgggttcacggcattctcctgcctcagtcttccaagtagctgggactacaggtgcccgccaccacgyccgactaattatttgtatttttagtaaagacggggtttcaccgtgttagccaggatggtctcgatctcctgacctcgtgatccgcccgcctcggcctcccaaagtgctgggattacaggcgtgagtcaccatgcccagccctcaatttctatgctgtagccaaagcagctttaaaacaaatttgaacttgtcactttcctgctttcaaagcttcatgactctttctggcctcctagactccgaattccctagatgggtctaccaggcttgtactgtctgtccccaaaccccctctgtaatctcactttcctccattcccccatgattcacacttctgtctactttgaatttctctgttgttatccctttctgaactacctctccctccattttctgcctagtaaacgtttcttcattatat

SEQ ID NO: 738972 - DNA, 643 bp, Homo sapiens
tgaacatacagctaccaccccatcgacagcttctctttcttttgctcaatttctttttttttttttttttttttttttgagatgatggaatctctctctgtcgcccaggctggagtgcagtggcccgatcttggcttactgcaagctccgcctcctgggttcacggcattctcctgcctcagtcttccaagtagctgggactacaggtgcccgccaccacgtccgactaattatttgtatttttagtaaagacggggtttcaccgtgttagccaggatggtctcgatctcctgacctcgtgatccgcccgcctcggcctcccaaagtgctgggattacaggcgtgagtcaccatgcccagccctcaatttctatgctgtagccaaagcagctttaaaacaaatttgaacwtgtcactttcctgctttcaaagcttcatgactctttctggcctcctagactccgaattccctagatgggtctaccaggcttgtactgtctgtccccaaaccccctctgtaatctcactttcctccattcccccatgattcacacttctgtctactttgaatttctctgttgttatccctttctgaactacctctccctccattttctgcctagtaaacgtttcttcattatat

SEQ ID NO: 738973 - DNA, 673 bp, Homo sapiens
agagcccctctgccaattttgcttttgttgtaattgcttttggcacctgtatcgtgaaatctttgccagtttctatgtctagaatggtattgtctaggttgtcttccaaggtttttatagctttgagttttatatttaagtctttaattcatcttgtttatgtttgtatatggtgtaaagaaggggtcaaatttcagtcttctgaatatggctagccagttatcccagcaccatttattaaataggaagcctttccccattgcttgcttttgtcawctttgctgaagattggatggttgtagatgtgcagccttatttctgggctctctattctgttccattggaaaatatgtctgttttcgtaccagcaccttgctgttttggttactgtagccatgtagaatagtttgaaatcagataatgtgatgcctccagatttgttctttttgcttagaagtgccttggctatgtaggctcttttttggttccatatgaattttaaaatattgtttttctaattcagtgaagaatgccactggtagtttgataaggatagtattaaatttataaattgctttgggcagtatggccattttaaatatattgagtcttcctatccatcagcataaaatattttcccatttgtttatgtcatttattttaggactttctt

SEQ ID NO: 738974 - DNA, 673 bp, Homo sapiens
agagcccctctgccaattttgcttttgttgtaattgcttttggcacctgtatcgtgaaatctttgccagtttctatgtctagaatggtattgtctaggttgtcttccaaggtttttatagctttgagttttatatttaagtctttaattcatcttgtttatgtttgtatatggtgtaaagaaggggtcaaatttcagtcttctgaatatggctagccagttatcccagcaccatttattaaataggaagcctttccccattgcttgcttttgtcatctttgctgaagattggatggttgtagatgtgcagccttatttctgggctctctattctgttccattggaaaatatgtctgttttcgtaccagcaccttgctgttttggttactgtagccatgtagaatagtttgaaatcagataatgtgatgcctccagatttgttctttttgcttagaagtgccttggctatgtaggctcttttttggttccatatgaattttaaaatattgtttttctaattcagtgaagaatgccaytggtagtttgataaggatagtattaaatttataaattgctttgggcagtatggccattttaaatatattgagtcttcctatccatcagcataaaatattttcccatttgtttatgtcatttattttaggactttctt

SEQ ID NO: 738975 - DNA, 602 bp, Homo sapiens
gcaaagacacacacacacatacacacacacacacacacacacacacacacagacactctacaagttctaagtcagaaagtccagagttaatcaaggaggtaagatagaagttagcataaagggaaagtgtggctcagtggttaccgtgtctaaattatatttaacaaagattcgtcattacaatggggttgataaacctatgactaatagagaaagcctatgtggttaaatttgttttttaattatctcaaagaatgtgatgctgatttaaaaaattctaatgaagcaccatttttacctacacaattgatatttaaaagtgtgaatatccagtgttttcaaggttggcaacaataggcaccctctaacaacacaggtgggaaactgytttaacaacaacaacaaactttctacagagcaatttaataacaggtatcaaaaaaccttaaaaatatgcatacataacacccacaaattcaacttagaggaattttacataaaaagtacgaatgtagaatttgatatttgtgtaaataatctttgtcataactttgttttataaaaaggacaaatggataaaaactaaactcctataataggaa

SEQ ID NO: 738976 - DNA, 588 bp, Homo sapiens
ctccccttcctgcactgctttctgctgtgctcagccaagcaaagcatcccctacatagaccacagggtataaataatactccatctcttgtggtatcacagccaggtccagtgtctggctcctgggaagaccatgggccagagaagtcaggagaaaacacatcccaactcagaagggctccagagtggatttcaggttccctttattgactccaaagaaaaatcctgtccaaatagggccacatggcatgcagcactagccacagatttcctcctttggaactctccaaaggtaagaggaggaaacagctttaaaaatgcaacccgaagcttyttacctctgccttatggatctagatcctttcccactattgcacagtgctatgccatctgcaattccaaccattctaaaccaactgcttattgtacttcttagagtagtaaactttgataggcctttgtttcacaacaattgtttctgaaacttctttttagtccacatctatggggtctgtgataccagtacagtggatgactttatagtctacgaaaaatggatccctggaaacctcttttcaaggagtaagat

SEQ ID NO: 738977 - DNA, 588 bp, Homo sapiens
ctccccttcctgcactgctttctgctgtgctcagccaagcaaagcatcccctacatagaccacagggtataaataatactccatctcttgtggtatcacagccaggtccagtgtctggctcctgggaagaccatgggccagagaagtcaggagaaaacacatcccaactcagaagggctccagagtggatttcaggttccctttattgactccaaagaaaaatcctgtccaaatagggccacatggcatgcagcactagccacagatttcctcctttggaactctccaaaggtaagaggaggaaacagctttaaaaatgcaacccgaagcttcttacctctgccttatggatctagatcctttcccactattgcacagtgctatgccatctgcaattccaaccattytaaaccaactgcttattgtacttcttagagtagtaaactttgataggcctttgtttcacaacaattgtttctgaaacttctttttagtccacatctatggggtctgtgataccagtacagtggatgactttatagtctacgaaaaatggatccctggaaacctcttttcaaggagtaagat

SEQ ID NO: 738978 - DNA, 670 bp, Homo sapiens
ggagcccagctggcttcacccagtggatcccacactggggctgcaggtggagctgcctgccagtcccgcgctgtgcacccgcactcctcagcccttgggtgggtggtcgatgggactgggcaccgtggagcagggggcggcactcaytggggaggctggggcagcacaggagcccacggagggtgggggaggctcaggcatggtgggctgcaggtcctgagccctgccccgcgggaaggcagctaaggcccagcgagacatctagcgcagtgctggtcggccagcactgctgggggacccagcacaccctctgcagccactggcccggttgctaagcccctcattgcctggggccggcagagctggccggccgctccaagtgcgggcccgtggagcccacagccacccagaactcatgctggcccgcaagccccacccgcagccccggttcccgccagcacctctccctccacacctacccacaagctgagggagccagctctggccgcggccagcccaggaaggggctcccacagtgcagcggcaggctgaagggctcctcaagtgccatcaaagtgggagcccaggcagaggaggcacctagagcgagcgagggctgtgagggctgccagcacgctgtcacctctcaaaattaaatatttttcattca

SEQ ID NO: 738979 - DNA, 525 bp, Homo sapiens
gtgaaatagagtagggtttggaagttaggcacatatattcttgattctatgttgtttgcaaatcacctgacattttctgagcctcagtttctttttctgtaaacataaataataatacttttcttacaaagagaatgattagatgagataatgtatgtaaaggggatacacacacacacacacacacacacacacacccacacacacatatgcacaaggccctgaacatagaaggagataaataaatggttgttcatttttctttctctttcttacttgggccatggggtataaatatagaaaaaaawaatcataacaattattgggcaactttcagtttcccttctgttctgttgaaacttaggagtgcttcatagcaccccaccagtctggcactgggtaaactccaggacagtgcgggacattaattgtagggctggaatcaagagaacacaatggagcgacagggcagatctatcccagacacctccaggttcaggatggaaaggtgtgtagtgtagtcag

SEQ ID NO: 738980 - DNA, 601 bp, Homo sapiens
tcattgaaaatatactgaattaaggcaaagagtaaaagtacaaaatgataaagtgaagagatgtaacaaattttaaaataattagcaaaataaatcataattcaactatatcaaaactatatagaatataagtggtctaaatattccatttaaaagacagagaccataaaagcagatgaaataataaaacctaaatatattatatataaaaaacactcacttttaaatctaaatatataaatgaattaaaagtttaaagwtataaaaagattactatataaatcaaaagaaagctaaagcacctatacaaattatcagagaaaatagacattgaaacaagtagcattgccagagatcaggagggtcattgcataattttcctcctaacagtggtgcttcaatgtacatgaactgaaaaaatagataaagaaatccacagttgcagttacagactttaatactcctttcttagtaactagtaaaacaaatagacagaaaatacatgaatatatagatgacttgaacaacagtatcaaccaattttatctacttgatgaattagaagcacagaacacttccaacaacagcaaatacatatttt

SEQ ID NO: 738981 - DNA, 656 bp, Homo sapiens
aaaatatgcaggcttagacatagaggatccccttaggcaggggatgttaaacctccattttgttactaggtagccagatatcatgaagaaattaaaaaaagaaaattgagaaccagaaagactggcctatagagaaactttagagggaggcccaaaaagtgtatgtaagaagggatgaagaaaagcaaagcaaaagrcaaaaatcttactgtctgctctaaaacaaagtatccaaggcatcaaaccctgtaaagaactaaggctctactcgctaggccatataaagggtatgaaaaagcaaagcaagggaacttaaaaatagggagagtaaaagggcaaacaaatgtttcaaatgtggaagaataggtcacttcaagagagaatgtcctgaatgggaaaaagaaaaagaagtcatccacttatggcctttgaggaggaatagggagctcaggggctctgtttcttttatctcaagtcccaccaagagcccttgataaatttagaggtaggacccacttctttacctttttaatccactcacgagcagcttactcctctgtttgttatactccatctggtgtactttgttcaaaactatccttaatcagaagccaggaaggtggcttactgactcaaggattttaaagtatgaggct

SEQ ID NO: 738982 - DNA, 641 bp, Homo sapiens
aaatgaaagaacatctttgatggtctcattagtagacttaacacaattaaggaaatcagtgagcttgaagatatgttaatagaaacttcccaaatgaaatggcaatgagaaaaaataatgggaagaaaacagaactgaatatgtaatagcactagagggattttttaatagactttattttttagaacaaatttagacttgcagtaaaattaagaaaatggtacagagatttccagtatatcttctgcccagtttcactattatgggcatcttacattagtaagcatacatgttacaattagtgaaccaatactgatacataagtattcactaaagtccatatatttttccattttcttagtttttacctaattttttttgtttcrtgtcccatccagagtgccgtgttacatttagtcatcatgtctgtctccttaggcccctcttacctgtgacaggttttcagacttcccttatttttgataatcctgattgttttgaggagtactatttgggcattttgtagaatatcattctctggggatttgtctgacgtttttattatgttgtaaacttgagttatggttgtgctgggaggaagcccaaggcaaaatgccattttatcacatcatatcaagggt

SEQ ID NO: 738983 - DNA, 561 bp, Homo sapiens
gttaatctgatgggcttccctttgtaggtgatttgtcctttctccctacctatgtttaacattttttctttcatttcaaccttagagaatctaatgattatacatcttggggatcatctttttgtgaagcatcttgcaggagttctctgtgtttcctgaatttgaatgttggcctctctagctaggttagggaagttcccatagatgatatcctgaartattttttccaagttgcttccattctcctctttcagggatgccaaaatattgcagatttagtctctttacataatcccgtgtttctttgagtttttgttcgttccttttcattcttttctttattcttgtctgactgtcttatttcagaaagccagtcttcaagctctgagattcattcctcagcttggtctattctgctgttaatacaggcagttgtattatgaaattcttgtagggtgtttttcagctctatcaggtcagttatgttgttctcttctgtactggtcattttctctgccagctcatgtatcattttcttgtgattcttagcttccttggatt

SEQ ID NO: 738984 - DNA, 502 bp, Homo sapiens
tatctaccaattggacaatgccaccaacacatgacagtattagtgttcttgttttataaacgttgtcgtgtgtgtgtgcgtgcacacgtgtctttgtatatgaatgtgtatgtatacatatataacaaacaggggtgttattgaaaaacatttaatgaagttaatgtaaagtattaatgtccaaagcaaaaaattaagactatatttttattttctagacagaactatgtgtttataygcataataaaactgctttccaagtgatgtaagttcaagtcactttaatcattcccaaatcacctgctgaggtttagcatttcttttccacatatcccatcacactgtgtccctcctcactgggtttccgctgcacacttggttgcagtgaaggaatggctgctgtaagggtctgtctgctcttggttccccagcgctcccagaggccgtgagccaggacgtgtccaccaacactggggcctgcagcctcatccactgcccctgc

SEQ ID NO: 738985 - DNA, 502 bp, Homo sapiens
tatctaccaattggacaatgccaccaacacatgacagtattagtgttcttgttttataaacgttgtcgtgtgtgtgtgcgtgcacacgtgtctttgtatatgaatgtgtatgtatacatatataacaaacaggggtgttattgaaaaacatttaatgaagttaatgtaaagtattaatgtccaaagcaaaaaattaagactatatttttattttctagacagaactatgtgtttatatgcataataaaactgctttccaagtgatgtaagttcaagtcactttaatcattcccaaatcacctgctgaggtttagcatttcttttccrcatatcccatcacactgtgtccctcctcactgggtttccgctgcacacttggttgcagtgaaggaatggctgctgtaagggtctgtctgctcttggttccccagcgctcccagaggccgtgagccaggacgtgtccaccaacactggggcctgcagcctcatccactgcccctgc

SEQ ID NO: 738986 - DNA, 395 bp, Homo sapiens
aaaaaaagtaactgtcctgtctctttgttcatttgttttatgttatcattagttttcacaaacatggggaccatcagcaggaatgtgaggaatgtatagtgctcccaattaatcataaagaagatattataatgcctaaaacttgctacatattgagttatctccccagatatattaaaattttctttaraaaataagtttctaattatattccatattcagaattcatatacccaaatacgcaacaaccagcacaaagaaaggatctcaattcaaatgaaaaactatttgctctcttatttccttagaatttttctaacttatttttgtcctcatttcactaaccaaccaaagattccactgaaaatggaagcggaggcccctaccacacttgc

SEQ ID NO: 738987 - DNA, 569 bp, Homo sapiens
agttttccataataattatttttggttttcctgtttttaaagagtgtgttctgctaaaacatggctccttggtgtcattgttttatgtcacttcttttgctttatttgagtttccccacagagttcatttttcttcttttttaaggttggcactgtgtaagggttctgccacggagaactggatcaccccctatcatgatcctaaattcagtacagccagcagagtggcacctacaatgagcagatatattaggcacagatgctgtcctcagagcacttacaggctacctatcatcaagrtctataaccacttcctcgagaccatgacccagtttctctcaaagagactctggcctagaactgaatactgtgtcacttttccataactggagagctttgcaggaactctttcttactaaaattactggtcacttgaaggttgcccttaaatgacttccaagcagaattagaggttgggcttatgtgcctcattccattacttattcattctaccagcatatattgttcctttctcacacctgagtactgtgctagaatgtgtggaattt

SEQ ID NO: 738988 - DNA, 590 bp, Homo sapiens
ctcaaagccacatgcccacttgagccttggcatagtgcttgtgcctggatatcccaacacctcccactactgcaaagacatctctgatagaaggaacagactcagaacttggttggcctatgattgacaccaagaattctgagtatttggctgaacttccttccatcactagtggttgcccctaagtgtgtttacctttcaattaaggaagaaagactagcatgaaaaaaaratattttatggtaggatttccggccgtgaagctagtgctcaaagtatttttggagtgaaagaaagactttcttatatgcctcaaatcagccgtcccaaatgtccatccatgagcaaattcagctggaagtatccctttctctttggcaggtctcccaaactacatcccatcctagtcacctaaaacgttatgcaggcttcatatgagaacctagaagccattgttaatgcctcgtgggtgcatggcgagaagctgccaaggctcactctgattcattccaaatgtggagcagaaatagtagaattttaaatatacgtctccttgggaaaatcatttttgtagttttctatgagtgcac

SEQ ID NO: 738989 - DNA, 574 bp, Homo sapiens
acttaaatctaagacctgaaactacacagattctagaaagaacctgggaaaaactcttctgcacattggtctaggcaataacttatgactaagatgccaaaagcaaatgcaataaaaccaaaactaaattaaattggacctaattaagcaaaaagcttctgcacagcaaaagaaataatcagcagagtaaacagactacccacagaatgggagaaaatatttgcaaactatgtatccatcaaagaaataatatcgagattctmaaacaaatcagcaagaaaaaagcacaaatgatcccatcaaaaagtgaacaaatgacatgaatagacatttctcaaaggaggatatacaaataaacataagaaaaaatgctcaacatcattaatcatcagagaaatgcaaattacatagtgagatatcacctaactcctgcaacaatggccactattaaagggtcaaaaaacaatagatgttggcatggatgcagtgaaagtggaatgcttttacactgctggtgggaatgtaaattagtataaccgctatggagaaacagtatggagattccttaaagaac

SEQ ID NO: 738990 - DNA, 646 bp, Homo sapiens
ggaacagattatttaatttccaggtatttgcatggttttgaaagttccttttggagttaatttccagtttattctactgttgtctgagagactacctgatataatttaaattttcctaaatttattgagacttttttgtggcytatcatatggtctatctcggaaaaacttccatgttcactgatgaatatatattctgcgtttgttgggtcgaatattctgtaaatatctgttaagcccttttgttccaggatatagtttaaatccattgtttattgtttctttgttgactttctgtcttgatgacctgtctagtgctgtcagtggagtattcaagccccccactattattgtgctgcgtctatctcatttcttaggcagtagtaattgtttttataaatttgagagctccagtgttaggtgcatatatatttaggattgtgatattttcctgttggacaaggcttttattattatataatgtccctctttgtcttttttttttttcttttttgagatggagtttggttcttgttgcccaggctggagtgcaatggcacgatttcggctcactgcaacctctgcctcccaggttcaagcaattctcctgccacagccaaccaaatagctaggatttcaggcatga

SEQ ID NO: 738991 - DNA, 606 bp, Homo sapiens
aaaaggatcccaaataagtttcagattaactgataggcaaaattaactgtaaaaaaaatctgttattggtgtatacgaatgcttgtgatttttgcacattgattttgtatcctgagactttgctgaagttgcttatcagcttaaggagatttkgggctaagactatggggttttctaaatatacaatcatgtcatctccaaacaggaacaatttgacttcctcttttcctaaatgaataccctttatttctttctcttgcctgattgccctggccagaatttccaacactatgttgaataggagtggtgagagagggcatccctgtcttgtgccagttttcaaagggaatgcttccagtttttgcccattcagtatgatattggctgtaggtttgtcataaatagctcttattattttgaaatacgttccatcaatacttagtttattgagagttttgagcatgaagggctgtttaattttgtcgaaggcctttcctgcatgtattgagataatcaggtggtttttgtcattggttctgtttatgtgatggattatgtttattgatttgcatatgttgaaccagccttgcatcccagggatgatgc

SEQ ID NO: 738992 - DNA, 616 bp, Homo sapiens
aggagcaactcacatcttacatggatggcagcaggcaaaaagagaaagcttgtgcagggaaactcccaattttaaaaccatcagatctgccgggcacagtggctcatgcctgtaatccctgcactttggggaggtgaggcgggtggatctcctgagctcaggaattcgagaccaacctggccaacatgatgaaaccccatctctactaaaaacacacacacaaaaattagccaggtgtggtggcaggcacctgtaatcctagctacttgggaggcctgaggcaggagaatcacttgaacccaggaggtggaggttgtagtgagctgagatggcaccactgcactccagcctgggcawcaagagcaaaactccctctaaaaaaaaaaacaaaaaaaaagacaaaaaaacaaaaacaaaaacaaaaaatcagatctcatgagatttattcactatcacgagaacagaatgagaaagagccacccccatgactcaattacctcccactgggttcatcccatgacaagtgggaatagtagatgagatttgggtggggacatagccaaaccatatcagtaagggataaaatactttttgtttctgcctaaatatttttggc

SEQ ID NO: 738993 - DNA, 616 bp, Homo sapiens
aggagcaactcacatcttacatggatggcagcaggcaaaaagagaaagcttgtgcagggaaactcccaattttaaaaccatcagatctgccgggcacagtggctcatgcctgtaatccctgcactttggggaggtgaggcgggtggatctcctgagctcaggaattcgagaccaacctggccaacatgatgaaaccccatctctactaaaaacacacacacaaaaattagccaggtgtggtggcaggcacctgtaatcctagctacttgggaggcctgaggcaggagaatcacttgaacccaggaggtggaggttgtagtgagctgagatggcaccactgcactccagcctgggcatcaagagcraaactccctctaaaaaaaaaaacaaaaaaaaagacaaaaaaacaaaaacaaaaacaaaaaatcagatctcatgagatttattcactatcacgagaacagaatgagaaagagccacccccatgactcaattacctcccactgggttcatcccatgacaagtgggaatagtagatgagatttgggtggggacatagccaaaccatatcagtaagggataaaatactttttgtttctgcctaaatatttttggc

SEQ ID NO: 738994 - DNA, 561 bp, Homo sapiens
agaaccccaaagggggtttggaaatggtaatgaggggcaagaaaaataactgaatttcctctttattggtttctggtatccacagagcttggacgataggaaaggtacagttaagactgattttgaatatagggggctggtattatttctaactttaggattgttatgargactcagtatatgtgaaaacattttgccagcagtggattactactcttacataagttaataaaatatagagaggaagcaattgaaaaaacaaggtcaaaaaggatactggatgacatcaagggatataaatagaagttgggagcagcattgtaaagaaagatgactattttctctgggactggagggtaatttgagaatgtaagagtagaaatggagacattgctatcctcatctattctagagcacattcaggttcgttatgtggaatttgaacatatctgccaaagtgactgggttatgaggtcattaattcaggagactggcttagattttaaagccattttgtttttgaatttatctttaatatcatatttctactttcagaggtaa

SEQ ID NO: 738995 - DNA, 591 bp, Homo sapiens
gtagctgttcaccctgtcatcctgcagggaagctttctagtccaggagcgatacccactgacagagctaccaattcagtttggtgtctcgatcttaaatatatccacacagtcaaaaatcaatcaccagtcaaatgaggaaattctttaacaccaaaatagccacataataagtaaacagagaaaatacttagggaaaamaaagaaaatgtaagtcaaagcaattgtatatactatccttagaaaggtaagagaaaatagagcattcattaaaaaaagcataaaaaggaaaattacaaaaagaaaactttgtgaattaaaaatacgatatctaaaataagaaatttagtataggagataaaagatacaatctaggacctctttaagaaaatagaaaaaaacaaaagacaaagattagaacaataacacaggcccatatatgactcctgactggcagctcaaaggaacatgaaaaaacgaatctccaggtatcccttggccagaggaagggggaactatttgtttttaatctctttatgcccaaagcttgcctccttttctcacttttctatactggtactgagaattccca

SEQ ID NO: 738996 - DNA, 594 bp, Homo sapiens
ttaatttagtgaaggtagggtagaggtgcagggcagaaaatgaagggaactggtcaaaggcatttcaccatggagcagaatatcagccacatcctgcactaacagatgattccctcttttccacctacagaacggaagtcaaatctcttaggaagctgtgaggggattctcccagcaaatctagcagcacaayataaaggagaaagaggagagcatgggatccagaaaacatgtgtttcaacctagaaagtgttaaaagttttagaaaaaagacttgtacagtaggcctgaaccatgaaaatagaaaagagagaattcatagattctcagataaatatgagaattctgaagaacaaattgatattctttttgtagtggatccaatggagcagcttgaaaattttacagaacagcttaaaagtatacaccgggggaaacaaataattaaacttattaaaaaacaaaagcaggaagaaaaatctaagcacaaacatataaaggcaatatttatctactcatgatataaacaccaagtttattgtatctcaaattatgactattataaatgaactattactatattacgttaaatga

SEQ ID NO: 738997 - DNA, 594 bp, Homo sapiens
ttaatttagtgaaggtagggtagaggtgcagggcagaaaatgaagggaactggtcaaaggcatttcaccatggagcagaatatcagccacatcctgcactaacagatgattccctcttttccacctacagaacggaagtcaaatctcttaggaagctgtgaggggattctcccagcaaatctagcagcacaacataaaggagaaagaggagagcatgggatccagaaaacatgtgtttcaacctagaaagtgttaaaagttttagaaaaaagacttgtacagtaggcctgaaccatgaaaatagaaaagagagaattcatagattctcagataaatatgagaattctgaagaacaaattgatattctttttgtagtggatccaatggagcagcttgaaaattttacagaacagcttaaaagyatacaccgggggaaacaaataattaaacttattaaaaaacaaaagcaggaagaaaaatctaagcacaaacatataaaggcaatatttatctactcatgatataaacaccaagtttattgtatctcaaattatgactattataaatgaactattactatattacgttaaatga

SEQ ID NO: 738998 - DNA, 506 bp, Homo sapiens
caatgatttaaaaaggataagaagaatatataatataatgaaaaatccaaggtaaaacaaaccatgaagaaatgatagataaaactttatataacaaagaaaataggatcaaaacagtcaaggcaaaactggtagctacacaaagagaaactagcaacatgaaaatcctagtgggaatctttaacatgactctcagaatttgcaattcatgcagaaaataaagaataccttgttcaattttctttaagcttctgatgttgctgaaaaattgtgttcttctgttgtaaagtattttaaatgtgaactcactttttttctctctctctggawgtgttccagttctatttatgtttagtcctgttaattttagtgatgatgtctattaaagtgggtcttttttcactgtgctggtcactcagtgggccctattcattttggaaacatatccatcagttctgaaaaactgtttaaattatttatttgataatttctggcaatactaatgc

SEQ ID NO: 738999 - DNA, 598 bp, Homo sapiens
ctagtttatttgcatagaggtgtttatagtattatctgatgatagtttgtatttctgtgggaggaggaaatactcttaaactaatctttaaaaagccagcatcaccctcaaattaaggcaagaaaataacactgcaagaaaaaattatgggtcaatatccctgattaacaaagaygcaaacattatctacaaagtactagcaaacaaaatccaataccacattaaaggacttgtataccacaatcaagtaggacttaaccctgggatgcaagggtgattcaacatacaaaaatcgataaatgtgatatgccacatgaacagaattgagaataaaaaatcatatggtcatctcaattgatgcagaaaaagtatttgacaaaattcaacattgacaaaaagtctcaccaatttagatatagaagcaatgtacctcaagacaataaaggccatatgtcaaaagcccacagttaacatcatactaaatggtgaaaagctgaaagcattttctgagatcaggaaaaaggcaaggccactcacttcactctcaccagttctatttagcatagaactataagtcttagctggagcaattaggcaa

SEQ ID NO: 739000 - DNA, 598 bp, Homo sapiens
ctagtttatttgcatagaggtgtttatagtattatctgatgatagtttgtatttctgtgggaggaggaaatactcttaaactaatctttaaaaagccagcatcaccctcaaattaaggcaagaaaataacactgcaagaaaaaattatgggtcaatatccctgattaacaaagatgcaaacattatctacaaagtactagcaaacaaaatccaataccacattaaaggacttgtataccacaatcaagtaggacttaaccctgggatgcaagggtgattcaacatacaaaaatcgataaatgtgatatgccacatgaacagaattgagaataaaaaatcatatggtcatctcaattgatgcagaaaaagtatttgacaaaattcaacattgacaaaaastctcaccaatttagatatagaagcaatgtacctcaagacaataaaggccatatgtcaaaagcccacagttaacatcatactaaatggtgaaaagctgaaagcattttctgagatcaggaaaaaggcaaggccactcacttcactctcaccagttctatttagcatagaactataagtcttagctggagcaattaggcaa

SEQ ID NO: 739001 - DNA, 448 bp, Homo sapiens
ttgatttatttctttttcttcttcttaaaccatgaccctgcgaggagattattggtatctgccagttctgagaaagaggtggatggttagagctggggatttatagattgagtgtaggaagcaggcttccttctcccacagtacatctccaggaagaaccaactgtgatggagctattgtgaagttggagagatgatgaagagtaagaaccaacttcaatccacatcttccacccctgacacmtagggtttgtgagcacctggaaacagaaaatttggctattctgtaagaatagcaaacaaactggctgggcatggtggctcacacctgtaatcccagcactttgggaggccaaggcgggcagatcacttgaggtcagaacttcgagaccagcctggccaacattgtgaaaccccgtctttatcaaaaatagaaaaatttgccaggt

SEQ ID NO: 739002 - DNA, 626 bp, Homo sapiens
catccatgactaaatctgtcatctggtttgccttttttttttttttttccttctcagggcctctttcatcttccccttccttctgccacccctgaggaccaggtctttatcagttcaccccaaactataataatccccatcccccaaataatttattacaggagacagtgctggaaactggaagtatagagacagcaaagcagatctkgcatctctcctcgtggagcttgcagtgagcttgttcatgcatgcgtgaattcacatattcattcattcattcattcattcaaacagttattaaacaccttccatgttacttcgtctagttgtctcagattcctgatagttggaggtaactttctaacttagttgtaatgaggggggcagtttccagtaaatcgcttgacaattgctttgataattagcagcagtaactgagaaggactgcctggaatgtcagggatactttctttctccaccccataaaaacgatgaatctgagaatttctgggctgctggtcttatctacaggtctggctgattacaagatgccctgcagtgatgtctcaggaaaggccaggactgggaaggccaacccccagagcctgcctctacattcttgagac

SEQ ID NO: 739003 - DNA, 591 bp, Homo sapiens
aatgacatggctacaggaaggtgcgaaggaagaaggtctaggcagttttggctttatgaagctcagagcaagtgggcaaacgccgtgggaagaggctgagacctcaaaagatgatgacaaatccactatgcctgcaactgtttaatcaagacttgtttttttaatgaagagytggtgcgtgttcaggagcacgagtggtggaattcacagattgctatcctcagaataccttcctggcagaaacccaggagccatgctgggatccacacccactccacctcccgcccttgcagtttctgctggcatcactggagacagtggagacttgtccgttactctggcagggattggacatgcctccagtgggctgtcgctccagaaagcagagagcaaaggaagcctctggctaggctgtcaccagcccctgagtggatgcatcatgcccagggattggcagtgagtcattgaagccccagactggtggtagccaagttccttgaagcctttaccttgtgtattgctgagtggcactattgtaggcaggagaggagggccacagaggcataaaggctgtctgcccccgagcttctt

SEQ ID NO: 739004 - DNA, 591 bp, Homo sapiens
aatgacatggctacaggaaggtgcgaaggaagaaggtctaggcagttttggctttatgaagctcagagcaagtgggcaaacgccgtgggaagaggctgagacctcaaaagatgatgacaaatccactatgcctgcaactgtttaatcaagacttgtttttttaatgaagagctggtgcgtgttcaggagcacgagtggtggaattcacagattgctatcctcagaataccttcctggcagaaacccaggagccatgytgggatccacacccactccacctcccgcccttgcagtttctgctggcatcactggagacagtggagacttgtccgttactctggcagggattggacatgcctccagtgggctgtcgctccagaaagcagagagcaaaggaagcctctggctaggctgtcaccagcccctgagtggatgcatcatgcccagggattggcagtgagtcattgaagccccagactggtggtagccaagttccttgaagcctttaccttgtgtattgctgagtggcactattgtaggcaggagaggagggccacagaggcataaaggctgtctgcccccgagcttctt

SEQ ID NO: 739005 - DNA, 558 bp, Homo sapiens
caacactatttcagcagctacataacaaactttttcatgttaagcttatggtccactaagacctacccctgatggcttttttaaaatatggactacaatccttcgtatttcacccactctttgattgggtaattgacatttttaaagctaaatatagactttgtgttacatttcctctagataaatttaatattattgctttggtccatccatctaggctattaaaatatttttattactactttggccattccatacattaccttgccctgttgacttggcgagagttraacatttcaacagtgtccaatccattcatccattcaacctacattaactgagcacttactactctctagatgttacgtaggagccaaagatgcagaggatgtatttgacagagggtggcaagtacttctgtagaagcaagccatgggttcagagagcagggaatctctattgctgccagcagcaatggaaaggtttcccagtttatgaaacatggcagaagccaagacccagtctccttttctttttgagcatactgctgggctgtat

SEQ ID NO: 739006 - DNA, 641 bp, Homo sapiens
atccctctcctgcaggaaaaggctatgaattgatggcagatgtttcccatgccaatcagtgttttttatcactatccaacaaactggaacttgtcaatacttgcaactaggaccacgatgaaatgccaggaatgctaaatataaattacatacctatattcattatcaaaattcaacacttccagcggygtccaagggagagaatacactcatgggctcttagtttctatttctagttgaaccagtaaagcccctttctcacccctcttttctgcttatcactagagacagaaactaaaaaccatagcttcaggctgctcaaagcctaaaactaaacaaaacagaacaacagcaaaataaggcgggttgaacaagttggagtttgataaagtcatttctacctggagacattctgagaaagaggacaggtcctatatgacccaggggaacaagtggcacttgggagagaaaaggaataatttttattgagcatctactattatatctacttccaaagagtattgcgaggtagttattattggccccattttgaggaagttaatttcagaaagcttgagggacagaccctgtgcagcgccagcgtgtgcgtgcagctgtgcctggagctgaggcccgcactc

SEQ ID NO: 739007 - DNA, 629 bp, Homo sapiens
cagggagaatgttacttcacttgagaaagcttcatgattccctgactcagagatgccagagattcctggccgagcagtctgcagccgggatacatgcacctctagaaggcatccaggcctcacctctttcatgtgcagctttttctggacaggatatgatttcccacctcccttgtggaacgtacattttggagtgactacctgccaatataaggagtagaaacttattttaataaaaagcaacataatctgtgaatagacatagacattcaatgttaagcaatgcaaggaaggagaaagtgtctgtaytgggagtcaagagacctgggctctagcctgattctgccacaaccaactgtgggacatcttctctgggccttggttctttatttgcaaaataaaacttggcaggtcatctttgtggttccctccagctctgataattaatgagtataaatttgaggaaataaaaaggcaaagtagaatatactattatgttaagatgttattattctctcaagatgagaattttatattggaaaagaacctggtttttacgtaatatcagaaaggaggctgagtgcagaggacatttcccaggcctactagaagatgtattcttgactctt

SEQ ID NO: 739008 - DNA, 610 bp, Homo sapiens
ggatatgatttcccacctcccttgtggaacgtacattttggagtgactacctgccaatataaggagtagaaacttattttaataaaaagcaacataatctgtgaatagacatagacattcaatgttaagcaatgcaaggaaggagaaagtgtctgtactgggagtcaagagacctgggctctagcctgattctgccacaaccaactgtgggacatcttctctgggccttggttctttatttgcaaaataaaacttggcaggtcatctttgtggttccctccagctctgataattaatgagtataaatttgaggaaataaaaaggcaaagtagaatatactattatgttaagatgttattattctctcaagatgagaattttatattggaaaagaacctggtttttacgtaatatcaraaaggaggctgagtgcagaggacatttcccaggcctactagaagatgtattcttgactcttgcttctgctgctgacctgcctttctcactctggacctcaatttctccatccttaaaattgattcactcaacctctttctacagctaattccagagaaaatttgctagacagatgccaatgatatagcagtga

SEQ ID NO: 739009 - DNA, 614 bp, Homo sapiens
caatcagggaattgctcaaagaagaggagagtttaagaggccccagagaataattgctccagggaggcaggaggtgatggccaggaggctgcgtgtgagaaggtgcaaagctgtgacgtagaaacaggtatggaaaaagcatcctctcacgggaggatttgagatgagggcctgtgcactgtgaaacatcagtcttcttctctgccttctctgtgaattstacaatattctacattgctcattattccttaagaatgaagtcagtttggagggagcttaaagaaagagaacagggaaacaggaacgagcagcaagcatacatttacatatatcaggcattttggcttaaaaggacttgggatgcagacgctggtgggtagaggaatggataatcccctttacagtaattttgcttatatcgcagctgaaatgaagccacaatgttgacagcaagtggagtctggcaaccccaagtttccaaagtgcacatctgcgctggggcctggagatttctggaagggaatcagtctgtgtcctttttgcaggtctgtgtccttgtacgtatttgcatctactaatttacatattaaacttataaaattgtcattaaatct

SEQ ID NO: 739010 - DNA, 634 bp, Homo sapiens
tctgatctcagagtattcagttagcagttattaacgctgtattagacattgagcatacaaggatgagaaaatacctctgtcctgtggaactcagaattgacaatgagaggaaggagttgaggactgagaataagaaaataaccaagagaaaataaggtaaatgctacagaagagtcatgtggaaggggctgccttgactcccaagagagctaagttaattctgcataatggagtaatatctgaggtcagaaagccaagacatgtagactaacaacatttaacaaggaagaaagagctaaatgtctcaagagaggatggaggaaagtgggaggtttttgttttttgtctgtttgtttgtttgtttttccgagaggtgtccaagagggatccaatgccacgggatatccaattacacttcgacaaggtttatgactggatgtgaggatggtaaaagggttcyattatgatagaataaatccagtaaatagtgtctgtgtttagatccccaggacacagtgtttgcctttgtttaatggtttaactttttacttgttttccctttctttttttttttttttttttttttgccttttcgtagccagaggaagaatttgcagcagccagcacaccagcg

SEQ ID NO: 739011 - DNA, 646 bp, Homo sapiens
gcttgcaggctgcctggattccaactcagcactgttagtggggcactgtgggagtgagactggcctcgacaactgcatgggagttgagtgaggcctatcattacctgctatccctcacttccctggtgacccatatgacacagcagaggcagccatacttccctctggaacataacaccgttggcctgagaaccacccccatgctccacagtggccacagcaagccctgcccaaggagagtmtgagctcagacccacctaaccctgtccccacccgatggcttttctctatccaccctagtagctgaacaaaaaactatagctcttgggagctttatggccctgccgagtgcctgagaagccagaatacctcccctggccaaattagggcaagcttaaatcccactgctaataccacaactggtgctgccttgaaagaaccacctcctggctggaggccaaacaactcaggccattatagcaactcatgacagaatgatcctgctctcaggaaagagaaaacaatagttaattccaccacctgcagcattctagttaactagaggtcctgagtttgtccacatgccaacttcactgctagcataaccagcatttgagaaagccagcacactaaacctctctacaac

SEQ ID NO: 739012 - DNA, 646 bp, Homo sapiens
gcttgcaggctgcctggattccaactcagcactgttagtggggcactgtgggagtgagactggcctcgacaactgcatgggagttgagtgaggcctatcattacctgctatccctcacttccctggtgacccatatgacacagcagaggcagccatacttccctctggaacataacaccgttggcctgagaaccacccccatgctccacagtggccacagcaagccctgcccaaggagagtctgagctcagacccacctaaccctgtccccacccgatggcttttctctatccaccctagtagctgaacaaaaaactatagctcttgggagctttatggccctgccgagtgcctgagaagccagaatacctcccctggccaamttagggcaagcttaaatcccactgctaataccacaactggtgctgccttgaaagaaccacctcctggctggaggccaaacaactcaggccattatagcaactcatgacagaatgatcctgctctcaggaaagagaaaacaatagttaattccaccacctgcagcattctagttaactagaggtcctgagtttgtccacatgccaacttcactgctagcataaccagcatttgagaaagccagcacactaaacctctctacaac

SEQ ID NO: 739013 - DNA, 631 bp, Homo sapiens
actctggcattaatttagccttactactacagcatgtcctttcaaaggctctaccaatacctcatgtccagccttaggagtttcacccaacgtatgcgcaggttaatgttcaggatttgaggggatcctcctgtasctctcaagtgctttctgtttctctctgtgccttccttatctctggtcctctgctccaccacacattcctaacgtgagtgatacctggggagcgctgagggtggagggcatgagaaaataaggaaaggaagctgtgttccatgcctggggcaatccgaagctgagccaggacatcttgtgtacaatgacaagacaaactacaaactatgctaacttatctgaatttatcttgagtagattcagaggcataggcaactaaagatagcagaaatcatcatccttcctcctcccataaccggtgaataaggtggaatgtatcagtctcactgcatgtagtgtgggacaggagtctcttcatttgaatatcaaaaactagagactctaagctgacatttgggtcacagggaggaaccaggggacaggaagagattggtgagatgggaaaagaaaaataaggacctagaaaaggaaataaaattcatgtctggaagggaat

SEQ ID NO: 739014 - DNA, 621 bp, Homo sapiens
actctggcattaatttagccttactactacagcatgtcctttcaaaggctctaccaatacctcatgtccagccttaggagtttcacccaacgtatgcgcaggttaatgttcaggatttgaggggatcctcctgtagctctcaagtgctttctgtttctctctgtgccttccttatctctggtcctctgctccaccacacattcctaacgtgagtgatacctggggagcgctgagggtggagggcatgagaaaataaggaaaggaagctgtgttccatgcctggggcaatccgaagctgagccaggacatcttgtgtacaatgacaagacaaactacaaactatgctaacttatctgaatttatctkgagtagattcagaggcataggcaactaaagatagcagaaatcatcatccttcctcctcccataaccggtgaataaggtggaatgtatcagtctcactgcatgtagtgtgggacaggagtctcttcatttgaatatcaaaaactagagactctaagctgacatttgggtcacagggaggaaccaggggacaggaagagattggtgagatgggaaaagaaaaataaggacctagaaaaggaaataaaattcatgtct

SEQ ID NO: 739015 - DNA, 633 bp, Homo sapiens
actctggcattaatttagccttactactacagcatgtcctttcaaaggctctaccaatacctcatgtccagccttaggagtttcacccaacgtatgcgcaggttaatgttcaggatttgaggggatcctcctgtagctctcaagtgctttctgtttctctctgtgccttccttatctctggtcctctgctccaccacacattcctaacgtgagtgatacctggggagcgctgagggtggagggcatgagaaaataaggaaaggaagctgtgttccatgcctggggcaatccgaagctgagccaggacatcttgtgtacaatgacaagacaaactacaaactatgctaacttatctgaatttatcttgagtasattcagaggcataggcaactaaagatagcagaaatcatcatccttcctcctcccataaccggtgaataaggtggaatgtatcagtctcactgcatgtagtgtgggacaggagtctcttcatttgaatatcaaaaactagagactctaagctgacatttgggtcacagggaggaaccaggggacaggaagagattggtgagatgggaaaagaaaaataaggacctagaaaaggaaataaaattcatgtctggaagggaatta

SEQ ID NO: 739016 - DNA, 621 bp, Homo sapiens
actctggcattaatttagccttactactacagcatgtcctttcaaaggctctaccaatacctcatgtccagccttaggagtttcacccaacgtatgcgcaggttaatgttcaggatttgaggggatcctcctgtagctctcaagtgctttctgtttctctctgtgccttccttatctctggtcctctgctccaccacacattcctaacgtgagtgatacctggggagcgctgagggtggagggcatgagaaaataaggaaaggaagctgtgttccatgcctggggcaatccgaagctgagccaggacatcttgtgtacaatgacaagacaaactacaaactatgctaacttatctgaatttatcttgagtagattcagaggcakaggcaactaaagatagcagaaatcatcatccttcctcctcccataaccggtgaataaggtggaatgtatcagtctcactgcatgtagtgtgggacaggagtctcttcatttgaatatcaaaaactagagactctaagctgacatttgggtcacagggaggaaccaggggacaggaagagattggtgagatgggaaaagaaaaataaggacctagaaaaggaaataaaattcatgtct

SEQ ID NO: 739017 - DNA, 545 bp, Homo sapiens
aaaataagcaaattaaaaactataagaccatcattggctctaaaaaataataaaaagttattcagaaaaaagaatcagttgaaagtacatgtttcactgtttaaacagtgtttgcgcagtcaaaatcataaagaggatttaaacccctggctaaccctaacccaattktttacaaaagaggaagtataatatataaacttagaaatgacaagataatcagcgaaccagaaaaaaatgaaaccttatgaaactaacttatgaactctgtgcagacacatttaaatctagcccaggttaggacataattgtcatgagaagatttggatagtatgaaaggatgtgcatatgtgataatggaagagggagaaaactgaaaaaaacataagtatctctatcctgaatcaaataccaaaaagtagtggctaaaataggtgaaagtggtgtgttggagaggtggacatgaaagaaagggggagaagggcgctactgctttctgaaacgaatcttgtggacttgtcaaccatcagcgtatgtataatccttat

SEQ ID NO: 739018 - DNA, 545 bp, Homo sapiens
aaaataagcaaattaaaaactataagaccatcattggctctaaaaaataataaaaagttattcagaaaaaagaatcagttgaaagtacatgtttcactgtttaaacagtgtttgcgcagtcaaaatcataaagaggatttaaacccctggctaaccctaacccaattttttacaaaagaggaagtataatatataaacttagaaatgacaagataatcagcgaaccagaaaaaaatgaaaccttatgaaactaacttatgaactctrtgcagacacatttaaatctagcccaggttaggacataattgtcatgagaagatttggatagtatgaaaggatgtgcatatgtgataatggaagagggagaaaactgaaaaaaacataagtatctctatcctgaatcaaataccaaaaagtagtggctaaaataggtgaaagtggtgtgttggagaggtggacatgaaagaaagggggagaagggcgctactgctttctgaaacgaatcttgtggacttgtcaaccatcagcgtatgtataatccttat

SEQ ID NO: 739019 - DNA, 599 bp, Homo sapiens
tttgtttcttactgagccctaaaatgatgaccttattgataacacctccattcagatgaggaaattgggacataaagagagtaaagggcttgcctaaggttcccagctggtgcgtgtcagagctgggactcataccaggtcctcttcctatctcacccctctacacacacaaatctttccaccccaaacaaatgtcttcatttggtccgtgcttgaatagactttaaaagaaaaggtcttrtaaagacataattaacatttgggattaattgcagatacaaagatatttttaaactttttcttccgaaataattttctatttacagaaaatttacaaaaatagtacagagagttcctgtatacctcttaccccgcttctcctaaatgttaacatcttatacaaccatagtacatttgtcaaaactaagaaattgacattggtataataatattaaactacagacttaatttggatttcaccagttcaaattttaatggactaattagagtaaattgttgagttggaatagggtcatagatataaggtcttgtggcccccatcaaataatactatgcacagatgtgtatgtacagctggc

SEQ ID NO: 739020 - DNA, 506 bp, Homo sapiens
taagataaagttgagaaaatctttcttaaagccaaaaaaaactttaaaaatgaagatcaaataaatgagagaaaatacaagataattacgttacttcccccttattagatcctacatttgaataatatgaattccagaaaagaatggargacaatgcggcatatcattgtgaaatttcagaacataggataaagaaaaaaaaatctataagctttcagagagaaagagagagagaaaaataaaccaagccccatatgaagaatcaaggatcagatttcacaccaccaccagatgctagaaaacaatcgagcaatatcttttaaaatcctgagcaaatatattttcccattagatttctatacccaactaaactatcaataaagaagggctgtagaccaaagaaaatatgggctttcaggagctcacaaaaattacatctcatgtaccttttcccaggaagctagctagtaggtaatgtgctgcacaagaataaaagcataaagaca

SEQ ID NO: 739021 - DNA, 597 bp, Homo sapiens
gaaacttaaaagtatagtatataaataaaattcaatagaaagctcataagataaagttgagaaaatctttcttaaagccaaaaaaaactttaaaaatgaagatcaaataaatgagagaaaatacaagataattacgttacttcccccttattagatcctacatttgaataatatgaattccagaaaagaatggaggacaatgcggcatatcattgtgaaatttcagaacataggataaagaaaaaaaaatctataagctttcagagagaaagagagagagaaaaataaaccaagccccatatgaagaatcaaggatcagatttcacaccaccaccagatgctagaaaacaatcgagcaatatcttttaaaaycctgagcaaatatattttcccattagatttctatacccaactaaactatcaataaagaagggctgtagaccaaagaaaatatgggctttcaggagctcacaaaaattacatctcatgtaccttttcccaggaagctagctagtaggtaatgtgctgcacaagaataaaagcataaagacactggatccaagaagaaagaagtcaaagaaattctcaaaactttgg

SEQ ID NO: 739022 - DNA, 607 bp, Homo sapiens
agctcaagcccatgctcagtgggaaattcttccctgaaatcatttgtcacagaatcatttggccatctaagacgtttattatcctacttactggcagtaagtttcatagaagagcacaagatactctgtagatttttgttccccttaaaaagctgatattctagaatctgtccaacatgcaaatattgaaaaaatataatactttctaccaaagagcaaatcatgtaatctggaaaakagggtctggaacccagcatgagtgctgtctttgggatacatctttttaccttccttgggctttgtcatcttcacttgtagagcaagagttaatctctatggtcccttccagttcaatgatctgataattcttttattttaaaaaatgaagtaagtcaccaaagcccctgagagcgcgggcatgaaaatcagtgattcaaattcaggtcaactcaacgaaaatgtattgcatacctgctatgtgccagacatgatgctaagtgctgatgtgcaggaatgaataagatgtaatcctcaacctctaaattttaataaaaagggaaaatggagatcaaacattaggagaggaagaaagtttgtgacaacagag

SEQ ID NO: 739023 - DNA, 607 bp, Homo sapiens
agctcaagcccatgctcagtgggaaattcttccctgaaatcatttgtcacagaatcatttggccatctaagacgtttattatcctacttactggcagtaagtttcatagaagagcacaagatactctgtagatttttgttccccttaaaaagctgatattctagaatctgtccaacatgcaaatattgaaaaaatataatactttctaccaaagagcaaatcatgtaatctggaaaatagggtctggaacccagcatgagtgctgtctttgggatacatctttttaccttccttgggctttgtcatcttcacttgtagagcaagagttaatctctatggtcccttccagttcaatgatctgataattcttttattttaaaaaatgaagtaagtcaccaaagcccctgagagcrcgggcatgaaaatcagtgattcaaattcaggtcaactcaacgaaaatgtattgcatacctgctatgtgccagacatgatgctaagtgctgatgtgcaggaatgaataagatgtaatcctcaacctctaaattttaataaaaagggaaaatggagatcaaacattaggagaggaagaaagtttgtgacaacagag

SEQ ID NO: 739024 - DNA, 605 bp, Homo sapiens
cactctcttttttttttctagacagagtctcactctgttgtccaggctggagtgcagtggtgtgatatcggctcactgcaacctccacctcctatgctcaagcaattctcctgccttagcttactgagtagctgggattacaggcatgtaccaccatgcccaccttatttttgtgtttttgttagaaacagggctttgccatgttgatcaggctggtctcaaaatcccgacctcaggtgatccacccaccttggcctcccaaagtgttgggattacaggcgtgagccatcgtgcccagactcatattgattttaggaatcatataatatgtactattttgtgttgggcttctttcacttatcaaaatgtttttaagattcatacatgscattatgtgtatcagtagtttttaccattttatttcagagtagtagtctactcgataggtataccacatgttggtagtcccttttcctattgatagccatttgggttgcttgtagatttttggctcttgtgactgaagcagttatgaacctttgtgtacaagtctgcatgtggacatatgtttctatttgcatttacctgatggctagtgatgtgga

SEQ ID NO: 739025 - DNA, 647 bp, Homo sapiens
atcttaacaatattgagtcttcaaaacatggtcttgtcttttctattcttttctttctttctttctttctttctttctttctttctttctttctttctttcttttctttctttcttaatttctgtctctctctgtctctctctttccctccctcccttccttccttccttccttccttccttctcagggtctcactctgtcacccaggctgtggagtacagtgtcatgatcacagctcattgcagcctccacctccaggactcaatcaatcctcctgcctcagattcctaagtacctgggactatggacttgaaccaccatacctgctaatttttcttcttcttttttctttctttctttctttttttttgagagattgggtctcactatgttgcataggctggtcttgaactcctgggatcaagtgatcctcctgccatggcctcccaaaatgstggcattacagctgtgagctattgcacctggccccttgctccaatttttacatctttaattttattgatcatttttgataattatttgataatttgatatttgctattttctagtgaatatttgattatttgtagtaaacagattttgcatattttactaaatttatccttaagaaattaatgttatttatt

SEQ ID NO: 739026 - DNA, 464 bp, Homo sapiens
tctggatgaccgtattagccactatccacagctagaggatcccatgggcttctctaatgcatatattggcatcaccaactccttctgagctggaaagagtagcttccctctattatttcccctactcgcttatatgttgtgtattccacttaggaagaaatgcccaaaagacatcctagccatcaaacactattctctcacaaagyccactttactcaaattggtgaacagtatgtaggaagaagccagcaggagctctgactaaggctgagataatagtctacctcccatttctttgacatctgatcaaatgtacagacttgcctttgtttttgtgttattaggaaattctgatgagcactgctattcactgatgcagaaagacgttcttttgcctagaaggctttttaacactttggacttttctgaagtatttagaagtgctaatttctggtccagcccca

SEQ ID NO: 739027 - DNA, 647 bp, Homo sapiens
agggtgcagagacaaaccaggctcaggcctggtccagtgacatagccatgtgaacctgggtgcacgacttaacgtctctgggcctggagaaccttgttctctttctcccccttagaaatacccacttcccctgcaggagccaggtcaaagggctgccctgctcctccatcccaggcaggctgcccaagcactcagcacacacaccaccccccagcccccacccatgcagcatttgcctcctcttgttacagtgatcagtttacctgtctgtcgccactcacaaattataaaatcaatgacagcacattatttatctttgaatccccaatatctaagcaattcctgggctataacagagaatccataagaccttttatggaaggaaggaggaaaagtggaagtgagaaaggaaagatgggtggagagaagaagggaggacagacataattgattatgctttcaaacagwaacagcaggcatggtgtgagaagtgctagaaaaacattctttccccaatatgtcaattctgcttgcccagtgtctaaaacgtccttttttggagatttgttcctggggtaaagatactgtctccggttctccttgtcattgtttcccaccaaccaccgcccccgtccgcccacccccac

SEQ ID NO: 739028 - DNA, 592 bp, Homo sapiens
accctcttttcccttttgctctcattcaaacagttaagaccctatctcattgcctcaggggaggcaggggcaaaactaacaaaatacaacgaaggagtttgtaaatctttctggactttgttttcctaaagctcaagttcttccaagagtttagagaagtggagtgggagaggacctgaatattgggggaaaagagaggagatggggttttccttccagaaaacgagattacctcagattgggggaaggagggagaggcagacgcaayaggaccaggccctgagaggcgaggctgcaggggctggatggactggagcccagaccacatggaattagagaaaggctgcgctgggagggccctgaaaatagggtcctgggaggtcaggctgacccctgtggactaaagatccttgacagcgttcgcgtgtgtgtgtgtgaacaaatttggcctctaaccttccgggcagtcttgactcaagaggcaagctgcagtcttataaactcatttgtgtcctggactacattttagaagtgaaaaaaagggcagaaaataccagaaagcatagaatgtggtaaaaggaggtgtttcata

SEQ ID NO: 739029 - DNA, 499 bp, Homo sapiens
catcactctcagccttacggaaattaaaaggataataagggaatactatgaacaactgtatgccaacaaaatagacaacctagataaaatggacaaattcctagaaagacacaaactactgaaactgatttataaagaaaatctgaatacatctataacaaataaagaggttgaatctgtaacgaaaatactttacacaaagtaaagtctaggcccattggtgaattctaccaaacatttaaagaagaattaccaatctttctcaaactcatccraaaaaaaaaaatagaagaggaaggaacagtttccaaatcattctatcaatatagacacaaaaatcttcaactgaaactaacaaactgaatccagtcatatataaaaaggatcatacaccatgaccagtgtgtcataatataaatgccaagtctgtttagcatatgaagtaaaccaatgtaatataccacattaatgaaatgaagaaaaacaacacatgatcatc

SEQ ID NO: 739030 - DNA, 516 bp, Homo sapiens
tgggccaggtgagtgacccatgcttgtaatcccaccacattaggggtctgagtcaggaggactgcttgaaatcagtttaaaaccagcctaggcaataaagtgagatcccatctctacaaaaaaaaaactttaaaaattggctaggcatggtggcacatgcctgtaggcttagctatgtagtagggtgagrtggaaggatcagttgagtccaggagttcaaggctgcagtgatgcagtgagctatgatcatgccactgcactccagcctgcgggacagagcaagaccccatctccgaaaataatcattgtgctcctggcatagagctaaacatatagatcaacagaatagagttgagagtccagaaataaatccatacatctatggccaattggctttggtctgacaaggatgcccaagacaatcagtggaaaaagaatagtgtcttcaacaaatggccctgggacaactggatatctatgtgccaaagaataaagttggactcctatcacactgca

SEQ ID NO: 739031 - DNA, 468 bp, Homo sapiens
cattgaaaaactctaagattctgagtatgatatgttttaaatatgcttcattgtcttaaaaagttagcatttagtacattatatatgtacatatatatccattctatctatatctattatatctctatgtctatatctatatcatctatacctatatctatatgagacagtacgagtgacctctctcttttttatccagatgccttttgcctggtattccccttaaatgcgtatcttcttacaaaagtcaaatttgtttaaaattatccccctgaaggaatttttttttttgagaaagtrggcataaaccttgaaatgacaactgtttgtttttattcttattaattctgaaagttgaaactaaggattttaaggatatcagtacccaaaggctaaactaccacacacacacacacacacacaccccgctcccctccccaaccaaataccactcaccttgcaggacca

SEQ ID NO: 739032 - DNA, 598 bp, Homo sapiens
aatctcatctggatgttagcttagtgttgttacctacactgttttttagggacgcctttattgctgtaatgtttttctaagtctctggtggaaaagtcactggcatttgttctagcagcattgattcattgccaagttttaaaaaaggaaataattaagagaatgcaatgacctttagagaaaacaggtcacccatgtaagtcctgctttcaaggtggtgtgctttcttctgcttttagagtttcttttctcttttgggctatgaaccgtacctggaggccaggcaggccttattctggagcagatagtgagtgaggttcctagagtactgcatagcctgagagtgcctcctaagtggatgccctccacacctcctgcacttggccctggccctgggtcctargctcattgttgatcttcttagatctgggttccttgcattgcaggacctacctcagcctgctcttgtctgcctttgctgatgcccctcaattcacctctttcctgcctgtactgtgatatggtgtgaacttgacttatactgcttgtgaaacctgagtcatgtgctgaaatcctgccccgccaccgcattcctccc

SEQ ID NO: 739033 - DNA, 632 bp, Homo sapiens
tttaacatcatttttgtttgaaaataagaatttcatataaaacataacaattgcatgtttagcatgaaaatagcatttgtttctataaggattatttataaagaaatatagaatgggccacattcatttttttgtaacacatgggttggcagcagtagtagaagacctttatctagctttgtaaatggagcaggttcaaagtaactgtttatgtatttagatacatgatcctttgtcatgaaatattataagtgatttarcaccattctagactgttgaactgacacatttagtttatgtcattgacttcttatcccgacataacagcaaacaatttactccctatgcataatgaaaggatttaatagaaatattaacctaattttttttaaaaagttgctgtgtccattttaatgaagtgctttaaaaaagtactcatcagtgtctaatatctgcagttaaggacactcttgccctaagtcatctttagtaatcctcaaaacaataaaagattgaaagtaaaagattcagtttgttaaatgttttaaatataaaaatgaaattcagagtttattttcatgtacgtatcatcaaaattaatatcaaatcacattcatgattatgcttaacta

SEQ ID NO: 739034 - DNA, 622 bp, Homo sapiens
atttaggatatggcttaggtacagttagtaaaacatgccaactttgcgttcatttgaaaaggaattgtggtgagagtagcaaaattggaatattcaaggttattgtgattttgagaacattcactaaaggttgggcaaaatgtaatgaagatgatcaattttcatatgtaggttttacgatagtaggcaaatattggactgcccattttaaaggtaaagaaacagatcctacgaagcctttacacatctcatgtgatagctaattagcggcaggtgctgaaatctcttgactcttctttgcagcgctsttttccatcttgccaccaccttttcttcctcctgtcctcattgccccactcctcctcctctttgtggattttggggggaaaatgccagtatattcatactaccttattttctgacaggcatctgcagtcaggtgtaaatctccgtaggaagatacaatcttccttttcaagatgtgctgaagagaaaaactgcgtctgtatcaaaatcagggaagagcaattggtctgggcattagctcccatgcagtgcctgttataatgagacaggctttccctgtgcaggcctgacatcctagaaggtgcccggagaattg

SEQ ID NO: 739035 - DNA, 641 bp, Homo sapiens
ttaaatataatactcttttaaaatggttgttatgctttggtttgctgattatcaaatattatgatggtttcttttatacagagcaagactccgtctcaaaaaaaaaaaaagttcacggtctctttgatccagaaattccacttctttttttatttcaatagttttcaaggtacagatggttttcggttacatggataagttctttagtggtgatttctgagattttggtgcacctgtcacccaagcagtatacactgtgcccaatatgtagtattttatccctcaccccckcccaacttccccccaagtccccaaaatccattatattactcttatgccttcccatcctcaaagcttagctcccacttataaatgagaacatatgatatctggttttccattactgagttacctcacttagaataatggcctccagctccgtccaagctgctgcaaaagacattattttattcctttttatgactgagtagtattttatggtgtatatataccacgttttcttaatccactcattggttgatgggcacctgcaaattgtgctgctataaacatgcatatgtgcatgtgtctttttcttacaatgacttcttttcctttgggtaagtacccagtagtagtga

SEQ ID NO: 739036 - DNA, 623 bp, Homo sapiens
tatcactagtcaattagagtggcccctttctaccaatagtgaactgattaatgctatcacaacaggaataattttggagtcttggccttctcaactattttcattactcttcacaccttaaaagaccatcctcattgctggaaatgtttctgaacttacagytcatgattcttgaagttgcccccaaagctgacctctgaataaagaaatcattttaatttttctacaaaagaaatgagtgaaaaaaaatcaaaacaacttactaaagggaaaaaacatgaattaaattggtttattgacaacatgtagttgtcaataaaaaacctgattgattttatttttattcagaggaggtattttgatttaatggagactcaagcaaaatatgatagcaaatttcaaagaagttatttaactaaaatcccaaaatccaattttaattacttaatcaatgattcacatttattgagcatccattggtgcaatcagggactaaaccataaaagctctctgtctgtgagatataaactccctggaaaagcctcttgagtactaacaatcacaaacatccagaaagcatgtcactttgtattacatgcactcagaaaagataaaaatttgcc

SEQ ID NO: 739037 - DNA, 623 bp, Homo sapiens
tatcactagtcaattagagtggcccctttctaccaatagtgaactgattaatgctatcacaacaggaataattttggagtcttggccttctcaactattttcattactcttcacaccttaaaagaccatcctcattgctggaaatgtttctgaacttacagttcatgattcttgaagttgcccccaaagctgacctctgaataaagaaatcattttaatttttctacaaaagaaatgagtgaaaaaaaatcaaaacaacttactaaagggaaaaaacatgaattaaattggtttattgacaacatgtagttgtcaataaaaaacctgattgattttatttttattcagaggaggtattttgatttaatggagactcaagcaaaatatgatagcaaatttcaaagaagttatttaactaaaatcccaaaatccaattttaattacttaatcaatgattcacatttattgagcatccattggygcaatcagggactaaaccataaaagctctctgtctgtgagatataaactccctggaaaagcctcttgagtactaacaatcacaaacatccagaaagcatgtcactttgtattacatgcactcagaaaagataaaaatttgcc

SEQ ID NO: 739038 - DNA, 614 bp, Homo sapiens
aaaaaaagacaatgaaatgcaagatgaagtgttaaatcagaaaggggttgccacattaagaaaaataagattgtgaaatttgcaagagttggacaggggttgaaaagtatgatatatgacagtggggtaaaaataagacagttgggaggaaagaagtgaaaacaaagtgaacaaattagacaagccactcattttaaatccttaaaagactgtagctcactgtcaatacacaagatgtgtcagagctagcatatctatttttatacttctcargtttttttccttgtgtgctttaaaagtataaaatggtatttgcttttaaaaagatcaattttagatttccaatttgcttcagtttgatataggcaagaatatacaatgtgaatttttcatcttcctccatagtgcactgcagtgtcaaaaacctcaaaagtggtttgaatcatgtgccatgaaaaaatacaagaagcacagactatgcacccaggtaccctgcaccacaggtctccactgcagtcacaagtctggcatggtagacagtgtggtcctctcaatactagccattctcttttaattttttaaatgactgaactttaaagctacacaattttatg

SEQ ID NO: 739039 - DNA, 567 bp, Homo sapiens
gacgttagcgatcttccatgaggatgactgcttttctcagcagagtaccaaacactcttgctataaggtgaggtggtgaggtctggagtttgaggaatgacacgaaaatctcaaagagctgtgagggaaacaggactagaactggaaatgatcgctctgcagaacggagggccctgctggggtgagcccaasaacgtgtagcaagttcacagtgtcacctgcagcagcagcactggtgcacgggtggggaaatcgggtgtttggactgacgggggactggagttttgctgagcaaagcgggtaagggagtgcaaaaacagtggcaagagtacgattgacgtgatggaccctggagttcaggctgcaaacaaagcctggagagagtagaagcaacctgattgattgggcctggaggttttccgcagccaaagattatggcaagtaaaaggaggcacgtgaaactagttcagaaaaaaacatcagagagcaggggatgggcagggtttttatttcctagccccatggtatagaataaaatacatgctatagaatagcaacttattttat

SEQ ID NO: 739040 - DNA, 462 bp, Homo sapiens
tgtattacacagtggccaaattaagagctgaaacaattcccagtagattttaaactctttggggaaagacactttatttttttaacccttaaattatactgggcatatatagtccagtgccttgcatatatagttaccctataattttttaataaatgatctccaacttagggctttttttcaaacagaaaactaggaatgctataataatattcataaaatcttgagttatawttcatctcaatgaaatttgaacttctccaatatataagaataataccctatttgttgtttgggtctcagaacacagtatagaaaatgtttaataaatgaagttgaattaacgaatatataaaacataatatatcaattaaaataatattgatgaatacatattagtattaatggatattatatcaatcaactaataattgaattaatatgtaggaaaatatattacat

SEQ ID NO: 739041 - DNA, 600 bp, Homo sapiens
aaagccgagcaaagaaaaaaaaaaaaagaatggattaggtacaagtcagagttctaaacactaattttcacttgtttttaagtgagattcatattaacccacttttgtttaaatattgagactttctgttgatttcactgtgatgaaagcctggctgatgcagtagaccattatacttgaaaaactcctcacatatattttaaaagctcatgccttgcagtgtatacctaaaatcccacaataagtagaggatagatagatctgcaaaaccaaagcccactgtattaattttctgttgctgcayaacaaactaccagaggcttattagcagcttaaaacaacacacattttattatcttgcagtttctgtggtcaggagcatggcttagctgagtacttttgctcagggtctcgtaaggctactgtggaggtgttgggggaatgtttttcatttggaatcttgactggggaagaatccacttccaagctctttcttttagcagaattcatttccttatggcttcatgactgagagtcccagcattttgctggctatcaactcgaggggtttttcctgtcctagagaccactcacagttcc

SEQ ID NO: 739042 - DNA, 654 bp, Homo sapiens
aaattgccaacacaggacttttttgtagccatacacttgttttgttttacatgaatatgcatgagagtttatttttatattttcacatgaaaatatttatattgtgataatagtttgcctctgcacttgaaatatgagactagttatatattgataaaatattgtctttttaactctcgtggatacatatattatttcttgaactgatgaaaaatttactgttgctaagcttaaacataaaaattcttatataattatatttgaacaggtatatggtgcataattggaaatggagcatgatggggagaagtatgaaccagagacttttggaagaagtctgaattctgtgtgctttatatacatttctcaygaagtaggtccacagttgtaaagaatttattccattgcatacatttattcaccattaacactacttcaaaacaaccctttatgcataaacacatatatgagaacaagataaacttgtttaaatttctactaaggattgtttagaaaatatccaaatgaaccgagcttaaaccatgctgaatattcatacatctctaatttttttaaatgttgctaaaaattaaaaataaggtttgcgtctagtaaggtgacatatctagagtttacaagatcatgtttaatact

SEQ ID NO: 739043 - DNA, 643 bp, Homo sapiens
tgtctcacttttctacatttgtaaatgtaatgtatttcttaataaatttgttcttcagaattagagtttttgtcttcctgttcttcatgattgttttctttggcaacatctccaagtaagtgcattcttacatccattgcattgcttatgcctaaaactagacagactaaatgaagtgctaagtgtgttagacaaattatttatgctaaaagttatttttgcaagtgaactgacctggaaattgtggattttgcctttttatttttctagtatagaatatccaattttagatattttaagaaataacttttaaagctttgcatttaactgttaaagaagtatgtcaatacataatttaaaacttgaactaatatttgctatatcttcatgtttcttgtctgccagagtttagtgctaasagaactagatttgtactaggagcccagagcactttttatctggttagtatgaaagctttttaattttcaataggtattgtttcttaaagcatcaattttttaaaaacaagaaaaaaaacaactgaaataactgttaatgtggaaatcattttgttttaggagcaaatgtgaaaaatgatgcaatctgcagataataaaactctagttgttttgaggtcaaaata

SEQ ID NO: 739044 - DNA, 646 bp, Homo sapiens
caaggagggcataacctattcatgaggcatctaccttaatgaaccaaatacctcccattgggccccacgttcaatattttggattaaatttcaacgtgaagtctggatggaacaaatgtccaaaccacagcaaggactataggcatttgggctgttttgttttgttttgctaactgttaatggtctgttacctgcaatagaatataagcttcatgacagtaggtatcttagcatgtttaccaatgtatcctaagattctacaagattacttcacacaaaattattgcactatatatattttaaatgtaaaagttaatgcaaacaaacaaaaaagtaaaataaacaagcatatatgtagcactcagcctaaaaaataaaaaactcaacacagttgagctgaagtatccaatacggtatacacattctttattgaatcttcatcttttcycctgcagaaggaaagactattttgaatttttaaattattattgtacagttacttacatgtttattataaatgactttcttccaaagcaattaatatgcattactttcatatcttaaaactttatatgatgcttgctttttgtacttaacattttgtttgtgaaattcatccttatggataatatattttcactgttct

SEQ ID NO: 739045 - DNA, 527 bp, Homo sapiens
ttctgtggttgttggatagaatgaatgttctataaatgtctattacgtttgttttttctatagtccagtttaaatccagagtttctttgttgagtttctatcccagtatctatttagtgatgtcagtgaggtgttaaagtccccacttattgtattgctatcaatctgttttcttaggtctagtagtatttgttttatgaatctgggtgttccggtgttgrgtgcacatatatttagaatagttacatcttctttgtgtatttaaccctttgttattatataatgaccctctttgtctttttttattgttgttggcttaaagtttgtttcatcttatataaggatggctactcctgcttgcttttgttttccattttcataatatatatttttccacttctttactttgagtctatagctgcctttagctagtaggtgggtctcttgtagtagcagttggttgggtcttgttcctcacactgtccccccaccccgcccaatttgccgctctatatcttttaagtaga

SEQ ID NO: 739046 - DNA, 527 bp, Homo sapiens
ttctgtggttgttggatagaatgaatgttctataaatgtctattacgtttgttttttctatagtccagtttaaatccagagtttctttgttgagtttctatcccagtatctatttagtgatgtcagtgaggtgttaaagtccccacttattgtattgctatcaatctgttttcttaggtctagtagtatttgttttatgaatctgggtgttccggtgttgggtgcacatatatttagaatagttacatcttctttgtgtatttaacyctttgttattatataatgaccctctttgtctttttttattgttgttggcttaaagtttgtttcatcttatataaggatggctactcctgcttgcttttgttttccattttcataatatatatttttccacttctttactttgagtctatagctgcctttagctagtaggtgggtctcttgtagtagcagttggttgggtcttgttcctcacactgtccccccaccccgcccaatttgccgctctatatcttttaagtaga

SEQ ID NO: 739047 - DNA, 608 bp, Homo sapiens
agtatcaggaaaatgcaaattaaaaccacaatgtgataccacctcatccctgcaagaatggccatagtcaaaaaatcaaaaaataatagatgttggcatagatacggtaaaaagggaacacttttacactgttggtgggaatgtaaactagtacaaccacaatggaaaacagtgtggagattccctaaagaactaaaagcagatctgctgtttgatccagcagtcccattactaggtatctacccagaggaaaagaagtcatcatyatatgaaaagatacttgcacgcacgtttatagcagcaaaatttgcaattgtaaaaatatggaagcagcccagatgcccatcaatcaatgagtggataaagagaatgtgatatatatatatatatatatatatatatatatatatatatatatatacacacacacacacacacacataaaatgtgatacatatatatacacacacacacaaaatgtgatatatatatatgtgtatatacacacacacacacacacacacacacaccatggaatactactcagccataaaaaggaatgaaataatggcattcacagcaacttggatggaattgaagactattat

SEQ ID NO: 739048 - DNA, 582 bp, Homo sapiens
ttgcttgacacttctctctcttgccaccatatgaagaaagatacatttgctttctctttcaccatgattgtaagttcctgaggcctccctagacatgtggaactgtgagtcaattaaacttctttcctttatgaattacccagtctcaagaagcctttttatagcagtgtaaaaacagactaatacactgaattgtactaggagtggggtgctgctataaggatacccaaaaatgtggaagcgactttggaactgggtaataggctgagtttggaatagtttggagggctcataaaagacagraaaatgtgggaaactttggaacttcctggagacttgttgaatggctttgaccaaaatgctgatagagatatggacaatgatgtccaggctgaggtggactctcagagagagatgaggaacttcttgggaactggaataaggtcatttcttgctatctttcagcaaagagactggcaacatttgaccctgccctagagatctgtggaactttgaacagatgaaataaatttctaagcagcaaaacatttaagaggaagtagagcataaaagtttagaaaa

SEQ ID NO: 739049 - DNA, 324 bp, Homo sapiens
gccctttatctccaaaaagcatcctattctatcaagaattatactattaaatggaaggcattagtcctcctctggctgaaatcaccattgcccgtttatctgactttgtgttctttcaaaagagcctacaggaattagaggcaatcaaaaatatatcctggaggcagcaaatgcactcaatccarcccctgggagtacatcaatcagataacagtaaacaagaacctggtgttcttggccactacttctggcactttctttgcttaagattagtagtacatatatccagaacactctgagcagctcactattgataacattctc

SEQ ID NO: 739050 - DNA, 559 bp, Homo sapiens
catctataaggaacttaaacagattgacaagagaaaaacaaccccattaaaatgtgggcaaagtacgtgaacagacatttttgagaagaagacatacatgtggccaacacatatatgaaaaaaatctcaatattattgatcattagagaaatgcaaatcggaaccacmatgaaatgtcatctcacaccagtcagaatggctattattaaaaagtcaaaaaatagaagatgctggtaaggttacaaagaaaagggaacacttatacaatgttggtaggagtgtaaattagttcgaccattggaaagcagtatggcgattcctcaaagagctaaaagcagaactaccactcaactcagtaatctcctcagtgggtatatacccagagaaatacaaaccattctaccattaagactcatccatgcaaatgttcactgctgcactattcacaatagcaaagacatgggatcaacctaattacacatcaatgacaggttggataaagaaaatgtggtacatataaaccatggaatactatgcagccatacaaaagaacaagatc

SEQ ID NO: 739051 - DNA, 583 bp, Homo sapiens
ataaacagaaccaaagacaaaaaccacatgattgtctcagtagatgcagaaaaggccttcaacaaaattcaataccccttcatgctaaaaactcacaataaactaggtattgatggaatgtatctcaaaataataagagctatttctgacaaatgcatggccaatatcatactgaatgggcaaaaattgaaagcattccctttgaaaactggcacaagacagggatgtcctctctctatactccttttcaacatagatttggaatttctggccagggaaatcaggcwagataaagaaaaaaagagtattcaattagtaaaagaggaagtcaaattgcccgtttgcagatgacgtgattgtatatttagaaaaccccatcatctcaacccaaaatctccttaagctgataaacaacttcagcaaagtctcaggatacataatcaatgtgcaaaaatcacaagcattcttttacaccaataacagacaaacagagagccaaatcatgagtaaacgcccatttccaattgctataaagagaataaaatacctaggaatccaacttacaagggatgtgaaggatctg

SEQ ID NO: 739052 - DNA, 583 bp, Homo sapiens
ataaacagaaccaaagacaaaaaccacatgattgtctcagtagatgcagaaaaggccttcaacaaaattcaataccccttcatgctaaaaactcacaataaactaggtattgatggaatgtatctcaaaataataagagctatttctgacaaatgcatggccaatatcatactgaatgggcaaaaattgaaagcattccctttgaaaactggcacaagacagggatgtcctctctctatactccttttcaacatagatttggaatttctggccagggaaatcaggctagataaagaaaaaaagagtattcaattagkaaaagaggaagtcaaattgcccgtttgcagatgacgtgattgtatatttagaaaaccccatcatctcaacccaaaatctccttaagctgataaacaacttcagcaaagtctcaggatacataatcaatgtgcaaaaatcacaagcattcttttacaccaataacagacaaacagagagccaaatcatgagtaaacgcccatttccaattgctataaagagaataaaatacctaggaatccaacttacaagggatgtgaaggatctg

SEQ ID NO: 739053 - DNA, 630 bp, Homo sapiens
cccttgacataaggggcatggatgaggggggcagcttatttctacttggacaatcttttttaaagtgtccttgtagaccacactggaagcaagccctattaggcattcaatttgcccagcttttcccttttccagagcctccaaagtccacttgcctgagggccatgactaaagcggtggccttttctttatcctgtttgtcccgttctgcctgctccgcctgatctctattataaaaaactgaggttgccaagttcaatagggtttctaagttttgctctgggcctaaggcagacttttgaagcttttttctaatgtctgcagctgaatgagtgataaacttatcctttaacattagttggycttcaatagagtcaggtgacagggaggtatgcttcctcattgcctcccttagtctctccagaaaggcagtaggattttctccctttccctgtgttatagtggacatcattgaataattcacaggcttattcctagttttccttagtccttctagcacacaagttagtaaatgtctgcggcaccaatctccatgttctgattctgcgtcccaatgagggtctacactgggaactgcctgctggcctgtggggaatcgttctctttcct

SEQ ID NO: 739054 - DNA, 659 bp, Homo sapiens
gtgggcccttgggatccccaattccaggctttggctcttggatggcatttctagacctgccctgggccagaggggagcccactgccatgaaggtgagtcccaggcctggcaacctttatcatatgctgactgaagatcccgtgggtctttgaacattgacagtagcttgaaagtattccccatgggccttaactggtgctggccatggggagaggtgcctgtgtaaaggggagggaagagtggtttaagtgccagcttagctgcagtgaatagaacaccaagtagatttataaggtttttgacttcagtctctggctcctacatggcatatctggacctacccagaacctgagggaatgaaccatcctgaagggaaggacactagtctggctggctttaccacctgctgattstaaagccctaggaccttgagcaaacataggccaggtaatcattacagcaagctttgggcaagacccagtgatgtgttgactttaaatctgatccagcacagtcctaggggtggtggtcacaggagtgcttgtgtcaccgcaatcccagctccaagtggctcataacagagagacagtccatttgtttggaaaaaagggaagagaacaagggacttgcctggtaatccggagaattcttccagttct

SEQ ID NO: 739055 - DNA, 586 bp, Homo sapiens
agggactaatcctggagaaacagagatatatgacctttcagactgagaatacagaattgctgttttgaggaaatttaaagaaattcaagacaacccaggagagaaattcagaattctatcatataaatttaacaaaaagattaaaataattaaaaataataagaaattctggagttgaagaacacaattcacatgatgaaaaatgcattagaatcttttaatagcagaattgattaagcagamggaataatttatgaacttgaagaaaggctatttgaaaaataaacagtcagatgagacaaaagaaaaaaaaacaaataatgaagcacaactacaagatttagaaattggcctcaaaagggcaaatatatgacttattggacttaaagacaaggtaggtaaagagatagggatagaaagttcatttaaagggataataacaaagaacttcccaaacctagggaaaaatatcaatatctaagtacaagaaggttatataacaccaagcagatttaacccaaagaagactacttcaaggcatttgttgatcaaactcccaaagatcatggctaaagaaaggatccta

SEQ ID NO: 739056 - DNA, 600 bp, Homo sapiens
tcatacaatttgcatttctaaagtgttgtgtgaaggagacatacatacacacatactagttgaatcatgtaagtgaatagcttctgtactgaagtgttttagccggagttgcttgttggggatagcctcagtcgttctggctccttacagctgacaacgcagaagtagttctttctttccctcagacatacattctggacactgaggtaacaactaattgccctgaaaccagcctgagtatctcgtggaaatcacacgttctctccccactcactgatgcatttaatctcccctggcttctcctgctttcaagttcaacaagcactctggtgtcgaaaagacatagcagagattcagtgcccattctgaactgaatgttgttattagccctccagctatagagagaaagacgaaaaacacgtgatatacatacatccactttaatctgcttcctttaatacrggttaacatgcagtatgattcccacgaaaggaaacagaaagagactgttgagcaaaacaagtctcctaaaagtcactccacgtgagaacttgtaaatcttagtatcttacttttcattaaatctttttatttaaaatg

SEQ ID NO: 739057 - DNA, 605 bp, Homo sapiens
aaaggaaagacaccatccaggcttggtggctcatgcctgtaatctcaacactttgggaggctgaggtggacaaattacctgaggtcagaagttcaagaccaacctgaccaacatggtgatatccatctctagtaaaattacaaaaattaaccaggcatggtggtggctgcctgtaatcccagctactcgggaggccaaggaaggagattccttgaacccagaaggtagaggttgcagtaagctgagatcacgccactgcactccagcctggtgacaaagcgagacttcgtctaaaaaaaaaaaaaaaamcaaaaaaaaaacatgaaaacatacacatctttgaaataaacttgcaacttgattataaattgttctttattatcaatggtattacctacatgaaatataaatatctgttcaaaatatcagtatagtttaatgtattctacaattttgaacaatttaatttaattcttcttattttcttgtctcaacaaatttgctgctggatttctatgcttttaccttgctctgttgtctgtcagcttagccatggccagttgcctcctgctccgtggcaagaaagatcactgacaagacattac

SEQ ID NO: 739058 - DNA, 621 bp, Homo sapiens
gctcttaagtacaggcctgtgctgccatgctcagctaattttttttttgttgttgttgagacagagtcttgctctgtcacccaggctggagtgcagtggtgggatctcggctcactgcaacctctgcctcccagattcaagtgattcccctgcctcagcctcccaagtagctgggactacaggtgtgcactagcatgcctggctaattttttttttaatttttagtagagacaggktttcaccatgttgatcagactggtctcggactcctggcctgaagtgatctgcccacctcagtgtcccaaagtgctgggattacaggcatgagccaccacatccggcctaatttgttttgttttgagactcagtcttgttaggttgcccagactggtatctaattcttcaagccattctcccacctcagcctcccaaagtgctgggattacaggcttgagccactgcaccaagctgtggtgtttgatcaagcaactaggcaccagagcctagctaggctgacacataaaattaactatcgctctccacacgcttggccactgatccttagcaactgggcctcagtccaaagttagagagcttaactgaagaggacattgtgatgat

SEQ ID NO: 739059 - DNA, 621 bp, Homo sapiens
gctcttaagtacaggcctgtgctgccatgctcagctaattttttttttgttgttgttgagacagagtcttgctctgtcacccaggctggagtgcagtggtgggatctcggctcactgcaacctctgcctcccagattcaagtgattcccctgcctcagcctcccaagtagctgggactacaggtgtgcactagcatgcctggctaattttttttttaatttttagtagagacagggtttcaccatgttgatcagactggtctcggactcctggcctgaagtgatctgcccacctcagtgtcccaaagtgctgggattacaggcatgagccaccacatccggcctaatttgttttgttttgagackcagtcttgttaggttgcccagactggtatctaattcttcaagccattctcccacctcagcctcccaaagtgctgggattacaggcttgagccactgcaccaagctgtggtgtttgatcaagcaactaggcaccagagcctagctaggctgacacataaaattaactatcgctctccacacgcttggccactgatccttagcaactgggcctcagtccaaagttagagagcttaactgaagaggacattgtgatgat

SEQ ID NO: 739060 - DNA, 626 bp, Homo sapiens
gtcatgaagtctttgcccatacctatgtcctgaatggtattgcctaggttttcttctagggtttttatggttttaggttttctatttaagtttttaatccatcttgagttaatatttgtataaggtgtaaggaaggggtccaatttctgttttctgcatatagctagccagttttcccagcaccatttattaaatagggaatcctttgcccattgattttttttgtcagatttgtcaaatatcagatggctgtagatgtgtggtgttatttctgaggcctctgttctgttccactggtctatatatctgttttgatactttgaaaactggcacaagataaggatgccttctctcaccattcctattcaacatattattggaagttctggccagagcaacaaggcwaaagaaagaaataaagcatatttaaataggaagagaggaagtcaaattatctctgtttgcagataacataattgaatatttagaaaaccccatcatctcagccccaaatctccttaagctgataagcaacttcagcaaagtctcaggatacaaaatcaatgtgcaaaaatcacaaggattcctatacaccaataatagacaagcagagagccaaatcatga

SEQ ID NO: 739061 - DNA, 626 bp, Homo sapiens
gtcatgaagtctttgcccatacctatgtcctgaatggtattgcctaggttttcttctagggtttttatggttttaggttttctatttaagtttttaatccatcttgagttaatatttgtataaggtgtaaggaaggggtccaatttctgttttctgcatatagctagccagttttcccagcaccatttattaaatagggaatcctttgcccattgattttttttgtcagatttgtcaaatatcagatggctgtagatgtgtggtgttatttctgaggcctctgttctgttccactggtctatatatctgttttgatactttgaaaactggcacaagataaggatgccttctctcaccattcctattcaacatattattggaagttctggccagagcaacaaggctaaagaaagaaataaagcatatttaaataggaagagaggaagtcaaattatctctgtttgcagataacatrattgaatatttagaaaaccccatcatctcagccccaaatctccttaagctgataagcaacttcagcaaagtctcaggatacaaaatcaatgtgcaaaaatcacaaggattcctatacaccaataatagacaagcagagagccaaatcatga

SEQ ID NO: 739062 - DNA, 607 bp, Homo sapiens
tctttttgttcctttgatttagtctgcctaacctctctcaccatttaattctaatcagatagagccagaaaattgaactggcaggaatagtcattgacatttaattaatgtctggcattccatttgttgaagaagaaagttgaagtaatggaaacttggcatagccatcttgaagaataggcaatgataaaaattacatgaggyctgtgctttcaaaggccattaataacacaagaatacttatactattttatgtggttcattcttgtccctgtgaagaagcttaaactttagggctgatgttctacctgtgtccctactgcctagaacagagctaagaatacagcagatgctcaaaaggattttaaaatatcactgcgttttcacaaagagggcaattcgggggtgggtggctgcactattccccatgcacacagctaaatcttctcaaaaagtcagttgagagaatgacattttccaaaaagttgtgagaaaagagatgaggccactgagacataatagtaaaacccaaatatgtgcagatgacccacaggcaagatagctttgattgcccaatcaaacccacacataaaattccaactgcagg

SEQ ID NO: 739063 - DNA, 607 bp, Homo sapiens
tctttttgttcctttgatttagtctgcctaacctctctcaccatttaattctaatcagatagagccagaaaattgaactggcaggaatagtcattgacatttaattaatgtctggcattccatttgttgaagaagaaagttgaagtaatggaaacttggcatagccatcttgaagaataggcaatgataaaaattacatgaggtctgtgctttcaaaggccattaataacacaagaatactyatactattttatgtggttcattcttgtccctgtgaagaagcttaaactttagggctgatgttctacctgtgtccctactgcctagaacagagctaagaatacagcagatgctcaaaaggattttaaaatatcactgcgttttcacaaagagggcaattcgggggtgggtggctgcactattccccatgcacacagctaaatcttctcaaaaagtcagttgagagaatgacattttccaaaaagttgtgagaaaagagatgaggccactgagacataatagtaaaacccaaatatgtgcagatgacccacaggcaagatagctttgattgcccaatcaaacccacacataaaattccaactgcagg

SEQ ID NO: 739064 - DNA, 614 bp, Homo sapiens
acccatcaggtcaaccgcaggccttgttactctggatgccacatcaggcagccctattggtgatgggcccagacattacagggctggctctaacagtcagaagtgaagcacctcccctgagccaggtatccactgggctctgatgacaatcatccttcggccttcccattgccgagggccaggacactcagacagccaggaagtgtcagagctggggctacccckgaggaccagggatttcctggaatctacacatttcacttacctgggaaagtcaagcccacccttacccttgtggagttcatttccaagaggattttggggatcgtattaaagcagctcctcatcaagccatcaagttggcagtgaggcagctatagtaagagtcataggcagtcttcttcccatgacccccagcccctactccatgagctttcttccctactgatatcacaccaaccctccccaccaagtttactctcctaccatctggagaaccagtctttcagctttcacaacggtacatatattattctctcagtgccaggctataagaacaaaggcataacgatgcaagaaaatgatggcaaacttgtattgaactcttcctatat

SEQ ID NO: 739065 - DNA, 598 bp, Homo sapiens
gggaggactgcttgaggccaggagttcaagaccaacctgggcaacatcgctacagaaaatacaatttaaaaaaaggtgcatgcctgtggttccagctactcaggaggttgaggtgggaggattgcttgagcctaggaaggcttgtgccactacactccagcctgggcaacaagcaagaccctatctcaaaaacaaacaaacaaaaaaccccacaacaacaacaacaacaacaacaacaacaacaaaacaacagacaaaaccagaaagagctgcaagggatcccaaatagcccaaacaatcttgaaacagaaaaacaaagttggaggcctcatactttctgattttgaaacttactacaaagctacagtaatcaaaacagtgtgktactggcataaggacagacatatagatcaatggaatagaattgagagcccagaaatacacaaatctacagtcaactgattttcaacaagggtgctatggggaaacggtctcttcaataaatggtagtgggatagccacatgcaaaagaatgaagctgatctcttacttcacagcataaacaaaaattaacttaagaccaaagacctaaatttaa

SEQ ID NO: 739066 - DNA, 624 bp, Homo sapiens
cttcatttttttttccctctaacatacatgggcaaaagtaatttgaatgcaagtgctcattactaatctgttgaacagtcttcagatgaaagcactggatgaccattgtgtataagccagtaaatctctataactattcatgtaaatataatgtgaacattgtttaggagaataaaaatcacataaattacagactttttttgttcaagatttttttgggaacttagtctggtcatccatgcctttgtaaaaataattgctgcctcaatgaataataccattgtgattctagatatttgcgtgacatatctagtaatgagattttatgcattttacttwtggtgaccattttaaaataaaatttaataatgcatattctttcattattttgttataaactaatatctaatatttcaaaacctcttaggttagtttttaaaaataacataatcttataattgggaaataaatgggctttatgctcatttaattcaaagacatggaaaatttcgtctcattggaaaactataaaatcaatccaatttaaatggctttctgctagtaagagaaagttcttacaaagcctctgaaatagtagcatctaacattttgtattacttgtat

SEQ ID NO: 739067 - DNA, 667 bp, Homo sapiens
tcctatgcagcctcccactgagtaagggtggtcactgtttgtagggtgtagagtttgatagatacgtctgttactttgacttcattagttttatttaggatgcttgaatgtgtgaatgtattgattaatatattcgttattgccttctctctgtgcttggaagagaagaaaattgaagtttaccactaccatgggtttactttgcgtgctttgttatttggtgtataaagattcacaycttagatcttttgtaggtcatatggtgtttcgtttaaagggaatcttcttctgaagagtttagccttgaattctgctgagatttacattggcaatcctgtttgcattttgtttgccttggacagccatacttttatgcactcctttcctactaatgtgtttattttgcttttgatgttgatatatttgttcaaccaacatttttagatgcccgagtgcgctccaagcactgtctaggtgtcacagtggcgatcgggatacagtcctgccttcatggatcttctgggctggtcgaggagacagacaataaaccagtcaatgaatgaataagtaactgcaaaattttagttctgctctaatgtggtagccattcacttcatgggggttatttaaattagttaaattaatagtagcttactcattcagcatg

SEQ ID NO: 739068 - DNA, 633 bp, Homo sapiens
gcctgactgaagtctggaacatcctaactggcacaaaggcccttaagatgaccccaagccacctgtctggctttctctcttgtcacttccttctacatcctctctgcaataaccaaattagattactcaccattctccacactgccttgtgattttctttctttttttttttttttgatgaagttttattcttgttgcccaggctggagtgcagtggtgtgatctcagctcactgcaakctccgcctcccaggttcacgccattctcctgcctcagcctcccaagtagctggaattacaggtgcccagcatcatgcccagctaatttctgtatttttaggagagacagggtttcaccatgtgggccaggctagtctccaactcctgacttccggcgatccacctgcctcggcctcccaaagtggattttctttttttacccatgcacttgcccaagctgactttctggctcaaacctttcccctggccttgcatcctctctatccatctgcccaaacctccctcactctccaaagtctcatttcaaatgttgcctttccctgaagcttctcccggaatgacccatctctccctcctcattctgatcatttcctctttgaattcccgtagtgtt

SEQ ID NO: 739069 - DNA, 633 bp, Homo sapiens
gcctgactgaagtctggaacatcctaactggcacaaaggcccttaagatgaccccaagccacctgtctggctttctctcttgtcacttccttctacatcctctctgcaataaccaaattagattactcaccattctccacactgccttgtgattttctttctttttttttttttttgatgaagttttattcttgttgcccaggctggagtgcagtggtgtgatctcagctcactgcaagctcygcctcccaggttcacgccattctcctgcctcagcctcccaagtagctggaattacaggtgcccagcatcatgcccagctaatttctgtatttttaggagagacagggtttcaccatgtgggccaggctagtctccaactcctgacttccggcgatccacctgcctcggcctcccaaagtggattttctttttttacccatgcacttgcccaagctgactttctggctcaaacctttcccctggccttgcatcctctctatccatctgcccaaacctccctcactctccaaagtctcatttcaaatgttgcctttccctgaagcttctcccggaatgacccatctctccctcctcattctgatcatttcctctttgaattcccgtagtgtt

SEQ ID NO: 739070 - DNA, 633 bp, Homo sapiens
gcctgactgaagtctggaacatcctaactggcacaaaggcccttaagatgaccccaagccacctgtctggctttctctcttgtcacttccttctacatcctctctgcaataaccaaattagattactcaccattctccacactgccttgtgattttctttctttttttttttttttgatgaagttttattcttgttgcccaggctggagtgcagtggtgtgatctcagctcactgcaagctccgcctccyaggttcacgccattctcctgcctcagcctcccaagtagctggaattacaggtgcccagcatcatgcccagctaatttctgtatttttaggagagacagggtttcaccatgtgggccaggctagtctccaactcctgacttccggcgatccacctgcctcggcctcccaaagtggattttctttttttacccatgcacttgcccaagctgactttctggctcaaacctttcccctggccttgcatcctctctatccatctgcccaaacctccctcactctccaaagtctcatttcaaatgttgcctttccctgaagcttctcccggaatgacccatctctccctcctcattctgatcatttcctctttgaattcccgtagtgtt

SEQ ID NO: 739071 - DNA, 633 bp, Homo sapiens
gcctgactgaagtctggaacatcctaactggcacaaaggcccttaagatgaccccaagccacctgtctggctttctctcttgtcacttccttctacatcctctctgcaataaccaaattagattactcaccattctccacactgccttgtgattttctttctttttttttttttttgatgaagttttattcttgttgcccaggctggagtgcagtggtgtgatctcagctcactgcaagctccgcctcccrggttcacgccattctcctgcctcagcctcccaagtagctggaattacaggtgcccagcatcatgcccagctaatttctgtatttttaggagagacagggtttcaccatgtgggccaggctagtctccaactcctgacttccggcgatccacctgcctcggcctcccaaagtggattttctttttttacccatgcacttgcccaagctgactttctggctcaaacctttcccctggccttgcatcctctctatccatctgcccaaacctccctcactctccaaagtctcatttcaaatgttgcctttccctgaagcttctcccggaatgacccatctctccctcctcattctgatcatttcctctttgaattcccgtagtgtt

SEQ ID NO: 739072 - DNA, 647 bp, Homo sapiens
ttctatatctagaaaatcctaaggaatccaccaacacacacacacgcacacacacacaaattattagaacaaatgatttcaggctgaacgcagtggctcatacctataatcccagcacttcgggaggtggaggcaggcggatcacctgaggtcaggagttcaagaccagcctggccaatatggtggaaccccatctcttctaaaaatacaaaaattagccctgcatggtggcacatgcctataatcccagctactagagaggctgaggcatgagaattgctagagcccaggaggcagaggttgcagtgagctgagattgcaccactgttytccagcctgggcgatagagtgagactctgtctgaaaaaaaaaaaaaaaaaaaaaaaaaaagaaccaatgagttcagcaatatggcagggtacaagactgagatacaaaaatctattatatttctatacactagcaatgaacaatctgaaagtgaaattaagaaaacagttccacttataatgacatcaaaaagagtaagatacctaggaacaaaagaagtgcaagatttgtagttgaaaactacaaaacaatcttgaaggaaattaaaggtctaaataagtgggaaaatagtggaaaactcaacattgttgatatga

SEQ ID NO: 739073 - DNA, 453 bp, Homo sapiens
acagacgtgtgaggatgtatgactctaaaccacatggcatacagttcctgcctacttaatgtttacttttctacctctgcctctggttttggtccctggcagctgctgattcttggcaaaacctcagagcttggagtcagaagactgagtttcaaagttccagtattgcctttttctttttttttttctagccatgatatcaatccttctcagtcactaaatgagtgtgacaacaccttgtacagttgttggtgtcattaaatcagatggtgtgtaagtgtattttgtaaaaactgtaaaggaggatgtggctgyaggggctgatggttctcatgagtattactgctcttctttccaacagttaaaagaatattggcagaaaaacagccctagagttccagcaggagcgaacaggaacaggaaaacaaatggcagtatccctgagaaagccac

SEQ ID NO: 739074 - DNA, 524 bp, Homo sapiens
agacaagtatataaagtgcctcttacatagtaagcactacataaacgttagctattattattacagttgggtccttaattctcaatgtggataccaaccagcaagagttttgactcttctagactctgattttcttaacttgaagaattagaatgtttgtaaaaacactttaagattcccaaagtgattattactgtgaatattaggtaataaaagttcacttaagtacctgcctacagcataatacagaaaagcatagtccaaaaagtataaaggagaaaaayagctatgttcacatctgaaataataacagtttcagaaaacttggaaaatccaaagaaaagtgttaaagagtccaaacaactgaagatttctagctaagagaaaggcaatcttggggcgttgggggaaaaaaggctgagctgcaggatttagcctgggtcccatctgcccctgaggttggacagttgagacctagaagttgtactcttcccttaactggcatcaaagttggaaattatttt

SEQ ID NO: 739075 - DNA, 613 bp, Homo sapiens
cattcattcactcatcccttcaatcatttaacaaacagtattcttttacacattccagatactttcttagaaattgcatatgatatttacgtgaaacaataaaacaagacatgacctctcaaaaactcatcttcaaaatgctttgaatctgttaatgaaacagtccaatctaagattctgtagtgtataatgggcaccttggtagagcaatgtgcggggtacaccaggagcaagaagaggatraggccaaaggatgtgagagcgtcctgataagtgtttcctctcttccttatttccagatgtctctctgattctcgtgccccaccatctgcctgactgacttcctgggcctgaacttgttctctgggctctccctgtgaagatctatcctttgccatcagtcccagatttcatctgggaatttgatttgttcctcctaactgacatgtttgaaccaggggtattggccttttctaatcctggtcacacccagatcaacccctcttcgagtatctgccatgcccagcaatgccacaactggaacttgatatatagtgtgtctttaactgtggaaaaagagagaaagtagtcatctttctttatcttgccacac

SEQ ID NO: 739076 - DNA, 574 bp, Homo sapiens
gagattctggtactttgtgtctttgatgtcattggtttcaaagaatatctttacttctgccttcattttgttatttacccagtagtcattcaggagcaggttgttcagtttccatgtagttgtgtggttttgagtgggtttcttaatcctgagttctaatttgattgcactgtggtctgagagacagtttgttgttctttctgttcttttacacttgctgaggagtgctttacttccaactatgtggtcaattttagaataagtgtgatgtggtgttgagaagaatgtatattctgttgatttggggtggagagttctgtagatgtctattaggtctgcttggtgcagagctgagttcaattcctggatatccttgttaaccttctgtctctttgatctgtctaatattgacagtggratattaaagtctctcattattattatgtgtgtgtctaagagcctttgtaggtctctaaggacttgctttactaatctgggtgctcctgtgttgagtgcatagatatttaggatagttagctcttcttgttgaactgatccctttatcattatgtaa

SEQ ID NO: 739077 - DNA, 523 bp, Homo sapiens
gagtcagatgaacattttaactagatccccaggtaactggtttccacattaaagttgggaagcaatgatctgggaaattcagtgggactcattcagcacaatttcttctcctagggtgtttgacaaccttttatttcaccttgttgtttaacggattctcagcttaracttatggggatgaacaaacacacaacacctgaaactgaaccaatgtgatcacagctgtttgttagtacatatacccacaccacacggtggcataatatacatagcacaattcactgggccatggagagattgcactcaggaatagagtcaataactgagggctatgggaggcagacattttagtttcaagagggtgagctgccccctatttcctgtgggaaaatattagtgacttttgaaactaaatctacaggctatcagggactgaaatacctattcaaggataagtaggaactgcccctggtccctttgattaagagggttatctggttggagactttatccacaagagcag

SEQ ID NO: 739078 - DNA, 619 bp, Homo sapiens
gagtttacatgattctgtgctcaggatccaaggccctgatggcataggctcacagggggatctcctgatccacagaaaaagcatggtttccctggtgaggtagcacaatcactcaccacctcccttggttgggggtaggaattccccttaacctatgtggctctcaggtgggctgkggctccaccttgctttttctcactctctgggtgttgtaccaactgtctagttggtcccaatgagaaaaacctgaatacctgtgctgaaggtgtaggatttacttgccattttcattcttctccatgagagccactgacagcagctgcttctagtcagccatcttgccccctcctccctattgcttcaatgttctaattttctacaatatctatatattgcaactataataatgcaagactcaattaaaaaattaaactcaagccattgtgaggttgattatataattacacagaagttgttgaactaccaatttacttgtctctcctagccccgtgaatataattaatataacaaatgtagtcaaacgtgactacatgtttataaaatatacctttgacttcatgttcatgaaatacatgcattttataaacttctctggtgt

SEQ ID NO: 739079 - DNA, 598 bp, Homo sapiens
tgttgttccatttgaagagcacagacagggtagatttattaagagcatcattcttaagggccttagaattttcaaaatggtaagtgagcattggcttcaatgtaaagacacaagctgaattaatccctaataagagagtcagcctgtcctttgaaactttgaaggcagatattgacttgtcctctttatgaaagccctagatrgcctcttctcccagtagcagtctgttttatttacattgcaagatctgttgtttagtgtagccacattcatcaatgatcttagctagatcttgtggataatttattgtagcttctacatcagcaccttctgttgttggttctacatcagcaccttttgttgtaggttctacatcagcacctttgttgtagcttctacatcagcaccttgctgctttacttgtacttcacttatggagatgacttctttcttttaacctcatgaaccaacttctgatagcttccaacttttcttctgtagcttcctctcctctctcagccttcacagaattgaaaagagttagagccttgctctggattaggcttagttctaagggaatgttttgtctggtttgatc

SEQ ID NO: 739080 - DNA, 531 bp, Homo sapiens
ttctcaaggtttgggaagttctctgatattatcccttcgaataaactttctacctctctctttctgcctcttctttaaggccaataagtcttatatttgcccttttgagcctattttctagatcttgtaggcatgcttcattcttttttcttttgtctcctctgtattttcaaatagcatgtcttcaagattactaattcttctgcttgatcagttctgctatwaagagactctgatgcagccttcagtatgtcagttgcatttttaactccagaatttctcgattctttttaattatgtcaatctgttcgttaaatttatctgatagaattttgaattccttttctgttacttgggtttctttgagctttctcaaaacagctattttgaattcactgtctgaaaggtcacatgtctctgtttttccaggattggtctctggtgtcttatttagctcatttggcaaagtcatgttttcctggatgatcttgatacttgtagatgtttgtcactgtctaggcattgaagagt

SEQ ID NO: 739081 - DNA, 534 bp, Homo sapiens
cccaaggtccctttatttagcaggtgatgaatgctgtcagaactgggtccttcccttcaaggcagcagattccctcttggcccaggatgtgtctagaaatgtcatttaggagctagggcttgtaatggtggctgcgtgactcwgcctggcaccctgttggctgtcttccatggccgaggtggtatccgagatgcaagataacatcctctttactttttgttctcctctccttaaacagaaggaatgagacacttttgttgctgtgaactgcactgcctggtgttggggaaggcatggcataagcaatcctttagtgccctggttggtgttttcctaggtcacaattggtgtctccctaggtgccagcctagtcctctggctctgagtcaagcccagcactaggatttgcttagaaaatggagccattgtatcctagactgcccttcaagtttacctaggaccccagagcactttggccagtagtggcaagacttgctgacaaactggagttctgacccacaggatgggtgattt

SEQ ID NO: 739082 - DNA, 643 bp, Homo sapiens
tgttttgttcgcttttgcttttctagttctttatgatgcatcattaggttgtttttgaaatttttcttctattttgatgtaggcactcattgctataaattttggtcttagtacgtattttgctgtatctcataggttttgataygttgtgtttccattttcatttgtttcaagaaagttttaaatttctcttaatttcttcattgatcattcaggagcatatcatataatttccgtgtatctgtatagtttccaaatttcttattattaatttccagttctattctattgtggtcagatacttgatattatttcaatttttctgaatttttaaagacgtgttttgtggcctaacatatggtctatccttgagaatgatccatatgctgaagagaagaatgtatattctgtagctatggatgaagtgttctataaacatccattaggtttatttggtctatagtacagatcaagtccaatgtttctttgctgattttctacctggatgatctgtccaatgctgtaagttggtgttgaagtccccaactattattgtattggggtctatctctctctttagctctagtaatatttgctgtctatatctggatgctcaagttttgggtgtgtatctattaacaat

SEQ ID NO: 739083 - DNA, 635 bp, Homo sapiens
taatttagttgtacatttaaaaataactagaagaatatagttggattttggtaacacgaagtacaaatgtttgaaatgatggacaccccatttaccctaatataatcattacactgtgcatatatgtatcgaagtatctcatgtaacccataaatatatatacctactatatacccacaaaaattaaaaataaaaaaatttgttaaagtgtgcaatgtatttaaacacaaacgattcatattttcttcatagtttagaaatatgacttatataagtttaaatgcaaaatattatatgattgtatcataaattacagccatttaggttacagggattcmacttcatgtgtttcatatactgctgctacttcaacttaggatgcatttatttacatttatggatattgatttggattttacctgcataaagtccagttcagtaccatcatggtctcccatgtgcagttgcatcgctgaaatactttcatttcttctcagagtacttgttatttgttagtttgtagcggtggcaaattatgtatcatatccccataatctcaacttgttcagtgggtgtgattgtcttaggttgggtttctgggaaacagactctgagatggtgcaataaactgaatg

SEQ ID NO: 739084 - DNA, 614 bp, Homo sapiens
gcagccatcggatgaataactgatggtgattagctaaatcataacattgctcatgccatgcataagtgatgagccaactggtgccaggccgcgatgagaggcagtgagcacccccacctcaccccccagcccggagaagccaccaccgcgctgcctccctgtgttatctggcacatcaagtgctgcgacaatgaatatagattgaccttattatagcagccggctgctggtgccaggcgcagccaggcatactttgcacaaattaaaggtgtcagcatgtaatttacggttcatggcaaaaaggggtggtaggggtaggggaggcactgaggcaggtagaaaggaaggtgggctggctgtggggctggcaccaggagcccaggcgctaatgacaggaggcgcagccgtggtgtcattttcatcccggtttgctcatttttagctatttcttgctcaagggggrcagccccctctcctgagccctccccaacatgctctgtgtgcatgtgtgcgtgtgtgtatttttcagctaaattactggttttacctgaagagcgtaaagtaggtgtgctaatttacagctcggcagataaagccgcagcgtgcagcgctgt

SEQ ID NO: 739085 - DNA, 488 bp, Homo sapiens
ggatccatctcttctccctctccattaattcaggccttcttgatttctcaccaggattgctttaatgtcctcctacgtgatctccctgcctccatctcttgacccacttcacccactgctgccagaatgtcctttctaaaacccaaatctgccagcctgggcaacatagtgagaccccatctttacaaaaaatagaaaaaatttagctgggcatggtggcatgtgcctgtagtcctagctgcttgggaggctgaggtgrgaggattgcttgagcccgggaggctgaggttgcagtgagctgtgattgtgacactgcattccagcttgggtgacacagcgagaccctgcctcaaaaacaaaacaaaacaaagcaaaacaaaaaagctcacaaatctgatcttattgcccttcagctgacaactctttgatgactgctacagtaaaatgtcaacttcttggtgtgacttctgaggcccttcacagttagg

SEQ ID NO: 739086 - DNA, 539 bp, Homo sapiens
  misc_feature 172, 360: n = A,T,C or G
tatttgaaacttaattaatgtaatcaaccatattaacaggtgaaataagaaaaatcacatgatcatatcaattgatgcaaaaaaaagcatttaatcaaattcagcaacaattcacaataaaagttctcagaaagagaataggaatagaggactagctttctcaacttgatanaaagcaaagaacaaataccttcaggtaacattatacttaacagcgaacaactgaatgctttccctctaagactaaaaacaggcaasgatgtccatcctcaccactcttattcaacacagtgctagaattgttagccaatgtaataaggcaagaaaggtaattaaaaagcatacaaatcagaaaagaanaaccgtctctatgtgcacatatagcatgattgtctacaaagaaaatttcaaggatgctacaaaaatacaaaatacaagcaaacaacctcctagaagtaaccagtgatgttctatcacaaggtaaaagacaaatacataaaagtcagttgtatttttatacactagcaatgaacacatgg

SEQ ID NO: 739087 - DNA, 649 bp, Homo sapiens
ccatggcacgatcatggctcattgcaggctcaaactctcaggctcaagtgaccttcccacctcagcctcctgagtagctgggtccacaggcatgtaccaccatacccagctaatttttatttttttgtaaagacagggtctcactatgttgcccagactggtctcgaactccttggctcaagcaatttgcctacctcggccccccaacgtgttgggattacaggcgtaagccactgcacatggccagaacttatttattttattacagttttatcctcatgccttgctctagggacacatgatagatgytcactcagttcatgttggttgaatacataaatagatatttataaagaaacattcacattctgaagtgaattgaatctgagccttgttgagagaaggagaaaaggaaataaaagcattcccatgagaccaatgtacactcactcacacacacacacacacacacgtacacacacagacacagacacacgcactcctctcaatatgatcccctccagctacacacatcctccatttctgaacacatggacatgtgcatattcaactgttacgatttaactatttttcagtttgtgaagaaatatgggaacctttttagcttggagcttggtgacatatctgc

SEQ ID NO: 739088 - DNA, 605 bp, Homo sapiens
aaaaataatacaccacatcaattaatgtttaaactaaatccttaaagcattcaaaaaacatttatggcttctagttgtcaaacaatgtatctatgttgtggaagaagatgtaagatcactaatagaaatttttaaatctcaaattatcctgatttctgaaataagaaatttgcaaaataagaaattatcattgttgcttgggaaatacgccttacttttttatctcaaatttcctttaaatttttggtatataatttaatacctagaagtattctagctagattttatgttaatatgtatagagttcacttttttggataaacaggttttcaacagtttttaatgctgaaaatataacttcttagttgtaatcacaagtaatgattgattaatgggttattggtttattcaraaatgtgggtggcataaggaccaataaagggaataatctgataatttctctctggtattctgcccactagtaatactaagacaatatgttatatatgttctactcagtttcacttgtatttttccatgtgtgtgctttaatttaaaaaaaatgtacacaatgtcaaactttttttcttcttccttttttaaat

SEQ ID NO: 739089 - DNA, 613 bp, Homo sapiens
cagttccatacagtaatcagataggcaaggtgtggggacaaagggaaggctttgggttttgacgggaggggcttggtctaaagtcctcggctcttattccacccagaggttcacctgggcttgggcagtggagcagatgggcgcccctctacatctctctttgaaaggtctgcctggcaacaaacggtctttacaggaccaggaaaccactttcttgctttaccttcaaactsattttggaattaactgttactggtggaagaatgtctcaggctttaatagttgacttcgtaagagtagggtatcttgcctctttagacaccttgcacacaaacctttttcatctttaaaagtggtcaggtttttgtattttgagagggtaagtctgcttcatttccgcatatctaaaatttatacttatctttaaatcaaaaactttaaaattatttggttcccctgggaggaaatatacagagggaactaaagatatttatcagaagaaaacatttaagaatgaataggtcactgtctttgaaagttactcacagttggacacagtggctcacgcctataatcccagcactttagggggctgaagaaggaggatcgcttg

SEQ ID NO: 739090 - DNA, 487 bp, Homo sapiens
atgccctgcttcccttttaaatataagtttcagtttcagataatctctttgcacatgcatatgagtgtacactcttagaagcagccaggccacatcttgaatgcttgctacttaaaaatttcttcagccagataccytaaattatctctctcaagttcagaattccacagatatatagagcagaaacgcaatgccaccagtctctttggtaaagcacagcaagagtgacctttactctagttccaaatgagtttctcaccttcatctgagacctcctcagcctggacttcactgttcttgtcactatcagcatttggtcacaattttacatgtctctaggaggttccaaacttttcctcatgttcctgtcttcttctgagccctcaaaactgttccaacctgtgcccattgcccagttccatagctgctgccacattttcaggtattgttatagcaatgccccacttctctggtaccaattttctgg

SEQ ID NO: 739091 - DNA, 629 bp, Homo sapiens
ctgaggcagtagaatcacttgaactcaggaggcagaggttgtggtgagccaagattgtgccactgcactccagcctgggtgacagagtgagactctgtctcaaagcaaaaaacacaaaaacaaatggacctaagcacagggatagggtgttttgaagtttgaactactggttgtttgggaatcaaagtccttgtagtacattcttagtaaaacagattatgaagagaggactgaaatttagcagaggtccaggattacacaaaccagtgggtatacattgctttgacatacagaagacaggagagaaataattagccaaagatttaagaaataaagatcagaatatccttccagttgtatgaggaaaaaaagaaacaygtaataacaatgatagttacctcctgcatttatttatttatttacttttgcagccattttcatgatttttattagaggttgacagaccttcacaatacaattaggaataacttgggaaacaatgcttttcaaatgcttttagtagcaaagcattttttggacaaatggatgattgccctcccttagagctttagtattttcatatttttctactttattacatctatgtccatatgtcaatcacaaacaac

SEQ ID NO: 739092 - DNA, 623 bp, Homo sapiens
gtatagtacttaaaatgccttggatattttatttacatcagaactcatattaaattggatgtaaaaggacattgatgtgtgatttaatcatcttctataaagtttattagcaagtgctctctttttgagtaaagaaaatgtcaaatattttatacttaatattcatattattttgttgaatacttatcgaatgtgttcttaggtgatttacctttatattaaatataaagtgtattcatacttgaagttttgcatatcatgacaatgtatttgtacttaaggctataaccttatgagagaagaaaagccatctatcagctttaaaagatgattattttctaagrtcatgtgtccgttgttttacttttttgtcatccatgcttaaaagaaggtatttgtagtttaaattgtagatttcaactcaccacctacattcctcctttttatgttattattataacatcaaatttcatcagtctggcgttcaagactctctgttaactgagttcatatgcgctattgaatagttttatctctcattaatccctaaatcaaattttctgcttcagccagtgtggttttcatagatttcctaaaagtataccatgttcatttgttcctgc

SEQ ID NO: 739093 - DNA, 532 bp, Homo sapiens
gtgaaacctcgtctctactaaaaaaaaatacaaaaaaattagccgggcatggtggcgggtgcctgtagtcccagctactcaggaggctgaggcaggagaatggcgtgaacctgggaggcagagcttgtagttagcggagattgcgccactgcactccagcctgggcgacagagcaagactccrtctcaaaaaaaaaaaaaaaaagtctcccagctacgaaaagtccaggactcagtagcttcactgctgaatttcatcaaacatttaaagaagaactaatatcaatcctactcaaatgattcagaaaaataaaggaagagggaatacttccaaagtcattatgcaaggccagtattaccctgataccaaaatcagacaaagacacattaaaaaaaagaaaactataggccaatatcacttatgaatattgatccaaaaattctcaacaaaataccagcaaactgaattcaacagtacattatgatgatcattcatcatgaccaagtgggatttatcccatgaatgcaaggat

SEQ ID NO: 739094 - DNA, 634 bp, Homo sapiens
tgagttcaggttgtcaatcaaagctgtgctgcctcttgttttaactaataattgctccaacagcaaagctatttgccttggtcttaaaacctcaaaaaaaaaaaatgctgctttaacgaacaaatgtagggtatgtgaattatataccgtaaagattgtttaaatgctgctttattgtttcattttatgtgaattatggaattaaaagactgttgtctgttattttacctcatccatgcatattctgagacaaaaggacatttccttttgaatcagaaaaaaaaattataagaatttaaattaatcccaaacacacaaagaaaagctttcctattgtatagagtggcagagactacaaaatatgacctcaagaatttttactacatgtttcatttgtgttgttttaayatcattattcctcttgtaattcgatgcctagtaaattattaagagtatattgttgctaaaaataaattctatagaggcaggctcacaaacatttttagatctaggaatagctgatgtacttttattccatagaaaacagcactagaaatttagccccatcgagaatatatttcttgcaaatattgccaaaatgctaggtgaatttatttctatataattaaatttt

SEQ ID NO: 739095 - DNA, 634 bp, Homo sapiens
tgagttcaggttgtcaatcaaagctgtgctgcctcttgttttaactaataattgctccaacagcaaagctatttgccttggtcttaaaacctcaaaaaaaaaaaatgctgctttaacgaacaaatgtagggtatgtgaattatataccgtaaagattgtttaaatgctgctttattgtttcattttatgtgaattatggaattaaaagactgttgtctgttattttacctcatccatgcatattctgagacaaaaggacatttccttttgaatcagaaaaaaaaattataagaatttaaattaatcccaaacacacaaagaaaagctttcctattgtatagagtggcagagactacaaaatatgacctcaagaatttttactacatgtttcatttgtgttgttttaatatcattattcctcttgtaattcgatgcctagtaaattattaagagtatattgttgctaaaaataaattctatagaggcagsctcacaaacatttttagatctaggaatagctgatgtacttttattccatagaaaacagcactagaaatttagccccatcgagaatatatttcttgcaaatattgccaaaatgctaggtgaatttatttctatataattaaatttt

SEQ ID NO: 739096 - DNA, 565 bp, Homo sapiens
ttcctgacagtttttctaattggcgatgtatgccattgaattaatcttacacagcgaataagcaaatctgaaagaaaataaatatcgaacatagaattatttattattttcaaaaacttcggaaaggataattttgaactttggctctaatgtttctgtgcttttggatttaacaaatccatgtttttgtaaatcttagattatataaacctcatttattcagaagagcaccctcggttttccttcactctgagcattgcctgcactttcactggaggycttgctcaaagtgtggtgtggtagaaagagaggaagcaaaacaagactgacagttcactttggtaatagctggtaaaggacttgcttgggcaggaagatctgttttctctgagatgggtgttttcgcattgatgtcttgctttagtttccaaggaccaaatgtattggcttaagtcaagagtcatcacctccaaggttcctggaccaatctcatctctacggtttgctacgctgcaggttcctttcaactgtgtgtatatgtgccatacacacagctcagtggcca

SEQ ID NO: 739097 - DNA, 564 bp, Homo sapiens
tctttacctcttcctttcatataagctgcggctgccaggtccctcttcctctgttggcaagtattctgcactgctgcttcctggttgaaccccactaactgtgggtgttgttacacaggatgattcttagcactccacacctcaactcctcaaactgctgtaattggagttcctatttctgttctgcttctctctgcctcaacttgtctttcctgtctgcacccttactcccattccttcctggcttgttccaagaggagtgtcagatagaatgccatgggcgtcttctcctccaggattgcagggrttaaagatggagatgacctaggacagcacctggcccacaggggacactcttagttagctcccttcttctctgcttaattactttccaaccttctttttgttatccctggaaccccgtgaaacttaactttgctcttccaaaggtgtgccatacagacaggctatgtttcactcgcttctgtatctttatagcctaacccctagccattgcttagtaaatgtttgctgggtggatgagtgcatagaaagataattcta

SEQ ID NO: 739098 - DNA, 647 bp, Homo sapiens
catttcacattaagttgtattttacaacatttttaggtagaattttattactgtgaacaattgactattgattcatgtttctcagaactcagcagggcatggagaaaagtctcagccaattgcaaattcttggaaagtgttctcaggcaacatggcttacaaccaaaagtgctgggaatttaagcaaaatcttaaagggttagtcctgtactctatcaatgaaataacttactcgtccatcttgagctttcttgggacaagtatagctgactcctgctacatcaaatgtcacaaccatataaaatctgttcagtgtgaccctggcattttcaatagtacagtcccagctgaaaataatattagatattatcttgcatctacagttaaagccatctgaatgtagccttaatctttcctgtgccaaatcagytctgatgatcatcacaaattaacatattagaaagctattttaaaaattcaagagattcattaaagttcaataggcctgtgttcaaatcctaaaccaagaggccttgaaaaaactatcttaacacatcataagtgtcataagtaaaacagggattaccttgcaggtttattgtgatgtttaaatgagataacaaaggaaaaaatggaaaataattatt

SEQ ID NO: 739099 - DNA, 624 bp, Homo sapiens
  misc_feature 598, 599, 600, 601, 602, 603, 604, 605, 606, 607, 608, 609,610, 611, 612, 613, 614, 615, 616, 617, 618, 619, 620, 621,622, 623, 624: n = A,T,C or G
ttctataattacagaatgccaatcccttgatattcactagtgcttgtcgtcgatctgcatgatgacacgcatttacaaagaaaagagaaatttagtctttatcctaagagctgacactgcaatacttgctgagtctcagaaataacctcttcttccaatagatacccttttctggggatagacatgtgatgtggtagaatgaacccaggattgaggatttaaaaggcttgaatttcattccttgctatatcactgactaactgtggaatcttgagcaaaacaatttacttctctttgccttttttctctctgcaaagccagaataaatgttttaaacatagaagacatgtaatacaattttatatggtaccttcatcctttcctttcctaactttccttcaacccaactagcacttcagctatacmttttctttgtaattttaacttcgcgataataatttttgcaaatatgcatgagattacattgtcaagaaataacttatttaatttactataacacttggaaatcctgtatcagatactatatcaaatggaaatccattttagagatgaagaaactggaacttcgaaatagatnnnnnnnnnnnnnnnnnnnnnnnnnnn

SEQ ID NO: 739100 - DNA, 469 bp, Homo sapiens
attcagaattgattacaagatggggaaggactgagtacagaagcaggaagaaccataactgggctgccacggtaacaccggggcagtaggagtgttacttctgcctgggtgggcagtgtccaggaagggaacaggatgtgcctctcatttgagatctttctagaaagttcaataggayttcatcaggcagagaaaagatgaagggtgctttagttagaggggacagtgattgcaaatgtacagacatctcttaagtacacagtgtgtgtaggaaacagtaacagtttatctccagattgtggtggggtctaaaaagtcaggagcagacagtgaggggcctggagcaggtgcatctccttcccataggatgtctctcactgtgctaataagcaaaaggcactgcttcctccaggtggatggggccccaaaccagagtacatgggaaggaaaagcagtaatgataatcagt

SEQ ID NO: 739101 - DNA, 343 bp, Homo sapiens
ataaaatcattgactgataagaagatggaagagttaaaccagacaataattgaggaagagacaaactacaaagataacctaaaagtatctccagggagcataatgtgactgttaaaagattaagaagagaccttcaaaaaatgagtgaagtactaagtacttttgaaaacagtactttctttaaggtgatgcttaaggtaatgttgraaaatgaaggacattttatcctgatctcatatgtgtataacaaaaattatttactcaccttcaaaacagtaaagtctgcttgatccgttctttgcttattctaagaattagatcatgattgcatttgcaacttaca

SEQ ID NO: 739102 - DNA, 669 bp, Homo sapiens
cctcagataatattcattataaactgcagtgcttatttgtgaatactaaatgtttcagatgaacattcttttcttcataaggccacaatgcaacctattttacagtattcttaagtatttcactgattgcaaattaaatacgtattctttcataattagaaaattggggaaagtgtttactcaaatctagagttcaaggtgcccatgatacaaaaaggaattcactgatattcaatttgctgcatcaatttcacactacttccatatctaaagaaacaaaaaaattacctgctgcatataagcatcttgaagtaggtggtggtggtggtggtggtggtgstgctgctgctgctgctgctgctgctgttgctgttgctgctgctgctgttgctgttgctgctgctgctgctgctgctgctggtgaggatgacgatgctgtaaatggagttgctgtaatctccaatctccctgctgtagttgctggagtactctatgctgctgtggcggctgctgaggaggtccctgacccaataaaatttcagggccatttccaggtcttagtgcccctaaagacaggtccaaacacttacattaacatactaatgatttcaattaaaaagctggatttcaacatgctcatttcaataataatttaaataaggcatttat

SEQ ID NO: 739103 - DNA, 602 bp, Homo sapiens
catggtagtagcatgatcttggctcactgcagctttgacctcccgggctcaagcgatcttcccacctctgcttcctgagtggctgggaccacaggcatgtgccactgcacctggctaatttttaaaatttttataaagacgaggtctcactgtgttttccaggttggtcttgaacccctgggctcaagtgattctcccacctgggcctccmaaagtgctgagattacaggtgtgagccaccatgccagccgtcataaagttatgggatgtttgattactatttatctctaatcataagagggattatatgaataagccactgcattggagggtatgtaaattaagtgtttgcctgtttagtttgaataggttggtgatgctgtgtatgcagtagattcttggcttatgtaatcagttctcatcaaaaaagacttcctaaaacaatgaaatttcagggcttgttgaagtgaagagagaatgcttgattgaaggtattccaaacataatttcttcattataaccctttgtacttcagttatatttgctcacatttatcgcagtgtgccataataacttttttgtctttctctctcaatagacta

SEQ ID NO: 739104 - DNA, 583 bp, Homo sapiens
tatacatacacggaatctaacatgaggtaagaacatccagattggaaaagtctagcactgaagtcgtgcaaaaaaatatacttggatgtatagcccctggaagttcacctaagtgagccattgttgctaagggcaattcttatttaccaggtgtgctggtaggggaaaaaaacagttgactatcactgctttyagttagtctacaaaaagacttagaaaaactggctagcagcccaaagcccatttcaggttcagtttataaagggtctagtaagcacatttatgattttcctagcaactccaggttagcctcagcttaggcagagaataaaacaaactacctaaggccgggcattaatgtggtgagcatcatagagtgatggtcccattatctattaaaacaaaaatagaacaaaaagtgcacatgttcatcaatttcacttctccatattaccctagacaaacatagctgcataaaggaggaataaacaaagatgttcaatgcaggatttatttataatagttaacaaaaaatactggaaagaatcaagtatccattaatagaattaaggcacatttatat

SEQ ID NO: 739105 - DNA, 432 bp, Homo sapiens
ctgtgcctggccaaaatttttacatttattgaagttcttttttagatttattcagacgtttacactgatcataacactcctgtgcatattttctaaaataaaaaagaacatttcctaaaatgtcttcacacccataatctaacttatttgaattgctattcaacttggagtaatctatgtctattctmttgatttattttcctcacataaaatgtctgtggtgcagcctttcttaagagacgtctgtaaccggacctggcattttctaagccattttgcaaattttgaagcatgtttgcaggtgataaccatgtcacaatgactggctgattaattgtacagtgcatctcaaagatgtaaaatgtaaaaagtatcttcagattgatgggatgtgtctctgcttgtcttctccatccttacccctgagacact

SEQ ID NO: 739106 - DNA, 624 bp, Homo sapiens
taaaataataaattaaaaaattgtaaaaattataaactctcaatattgaagagaacagatggagaacaaaagtatacaaacatactttctagtggacagaaagcatgtggaagagtgataattaatgaagcagagtgaaattyaagaagaagaagctgtgaaaaaaagaaagctattctatcctgaagtattccataaaggtatggagctcagtcatgccaggctgcagtgagaagacaagctgaaaacaaggagaatagctaaaaacaacagaggcagggcagtcaatattctgtcaagcacaaaattcctcaagtgcataatatctggtaataggcatgtattatcctgtcaaaaataaatatattttttctcttcccttaaaaaaatcaaacaaattgtacagaggagagccaagtttgggatggtttgttatgcagcagtaacttatactgtttctataacctatagaagcagcaaagaaaagactccaaatgacagctgtgcagcaagcatatgaacaatttgtgatgattcaaatacgagggctcccaaaggaaggctgggaagtctggccacatggcttgaaccttggctctaccgcttaccagctctggggacagg

SEQ ID NO: 739107 - DNA, 529 bp, Homo sapiens
tgtaccatctcatttgtgcaatgcctaggacatattaataacttaattaaaaaatggctgcaactgaataggaaaaagagaggcaaatccagaagactgaggacttctacattcatcctactgcccatgacaagttttcctattcttgcccaagccagactttggggatgaggaccaaattgtgacaactccttcttgaacactaagagtctctctggatgcycctgtcctctgcaaagccctctgtaggcctataagccaaccttccagaagagaaacaaaactttggtggaaaaatctgattgagatgggccattccaggagcaaacacctgatggaccactcgtccctccaacagcgtatctgcagctcccaccatatctcactgagtccctgctctgttccacccgtgcaccctcatcacctgacaatgttttgcagttgcttacacttgttccatgaggttgtcagtcaggcactgtggcccctgaccagcaggctctaaatgacacaatagttatgtaattaa

SEQ ID NO: 739108 - DNA, 622 bp, Homo sapiens
tggcttagcagtcatccaacaacatcctcctcctcctcctcaaccaccctcctgtggttgccttttggaccttcttctcctcggaagtgttcaaactcattctcccaagctctagtactacatagctaactgtttgctwgatacctcatagtcaacacgtcaaaatcaaatttacttttcatgattctcactctacctctcaacctcttaatttcactgttttttttttgttttgttttttgagatggagtttcactcctgttgcccaggctggagtgcagtggcgcactctcggctcactgcaacctccacctcctggattcaagcgattctgctgcctcagcctccagagtagctgggattacaggaatgcaccactatgcccagctaattttgtattttcagtagagatggggtttctccatgttggtcagactggtctcgaactctcgacctcaggtaatccacctgcctcagcctcccaaagtgctgggattacaggtgtgagccaccacgaccaccaatttagctctttttactccttcccttcctctcctactattttccctatctttgttaatggcagcacgagtgaatgagagccaacattcaaactgctaag

SEQ ID NO: 739109 - DNA, 594 bp, Homo sapiens
ttcttaaccagggctctatatttctgactgcccttggcctgtaccaaacaaacaactccatgacctcaacaactgcttctgaatgaaaggcagctctagagcactgctactccaagtatggtctgcagattagctgccaatttgcaaactgtgttactggctggtcactatatagaaaacttatatgaagcctgaatgtaaatcaattatgtsagagtaaacacactgtctagttctaacattttttcatacaagattttcttgatgaagagatcagtcttacattctggtacatatgcttcttatctcattgaagattggcatattaagtagtactgctcttgagggctccagatgaagggtttccagttttgcaaaagcctaggagctaatggagcagatgacagaaggatcaggcagaggaggcctgagatgatgcaactgatacctcagagaagatcagggtcacccacccatcttgcttccttccttcctcttcccaaacaggttctctatccaaggtagattttaccctaatagtggagggttgaaccaacatagtatctaatatagctttacagacccttgtctatg

SEQ ID NO: 739110 - DNA, 587 bp, Homo sapiens
attatcttttaataaaaatatatataaaaagaaaagaggtagaagtcttctggagcaacatttagaaatgtcaagattttgtttttgtggcttccatttgacccagcaactgtaatttagatattttttactaaagaaggtttaaatatgaatttttttttttgagacagtctcgctctgtcgcccaggctggaatgcagtggcacaatctcagttcactgcaacttccacctcctgggttcaagcaattttcttgcctcagcctccccagtagctgggattacaggcgcttgccaccaatgcccagcwaatttttgtgttttttgtagagatggggtttcgccatgttgtccaggctggtaaaaaatatttgaactcctgagctcaaagtgatctgcccgccttggccttccaaaagtgctggcattacaggtgcgagccaacacgcccggccggtttttaaggaaacagtctgtcctggttctttttctgcctctcaagctgggcctttttagtagtggccattgctgtgtctcctcctctgaatgcccatctcactgcaccgtctttctcttgtccactgtctg

SEQ ID NO: 739111 - DNA, 631 bp, Homo sapiens
tgagctttgaagaaagaataaaattgggctggacaaagacactaagaaatgcaaggctggcaggggctcaggccctgggcaaaggctcagaagtgtaaattaatatggtctgtatattgctataatatatattaatacggtatgtgtgcagaaagcctaagaaattggatagaactagaacataaatgtcaaggcagagagtgataggagacaaaaagagggaggaatgtcttgatggtcttatctatgatgctaaagaacctggactttctgctgtggttggttttaagcaaagttggatttcgattttagaagccaggtggccaggtgtggtggctcgygcctgtaatcccaacactttgggacgctgaggcaggcgaatcacttgaggtctggagttcgagactagcctggccaacatggtgaaaccccatctctactaaaaatacgaagattagccaggtgtggtggtgcacgcctgtaatcccagctacttgggaggttgaggcaggagaatggcttgaagccgggagatggaggttgcagtgagctgagattgcaccactgcactccagcctgggtgacagagtgataccccatctcaaaaaaaaaaaaaaagggattttagatg

SEQ ID NO: 739112 - DNA, 592 bp, Homo sapiens
ctggacttctagacaacaattctgtaatttgtacaaaatatagcaaaagtatatatagtgctaaataaaatagaaaatctgtctaacatgataataattcattccacaaatatttattgctgtttcccacactttgcttttttcctggaccaagagatgtggataagaatatagattttattttatttatttatttttatttgtggttttttttgagtcagagttttgctctgtcacccaggctggagtgcagtggcgcgatctcggcttactgcaacctccgcctcccaggttcaaaggattcttgtgcctcagcctcccaagtagctgggattacaggcatgtgcttccatggccagctaactttttgtatttttagtagagacrgggtttcaccatgtttgccaggctggtctcgaactcctcagttcaagtgatctgcctgctttggcctcccaaagtgctgggattacaggtgtgagccactgcgcctgactggaatatagattttaaagcattgttttcaatcattgcaactaaaagaaaaaaaaaaacaaaacaaaaaactgaagccagatggtctatcaactaa

SEQ ID NO: 739113 - DNA, 483 bp, Homo sapiens
ccaaatccccctctgtgagaaacacccaagaattatcaataaaaaaataaatttaaaaaaaaaaagaattaaaaaaaaaaaaaaaaactcctcaagaagctgcctatgtaaagggcagggagggaggaccgaattgtaatttgcagattactctactgactgtatgtggccaccagggggaggttaaactgtgaggctttattttagaggtggagccccctgcaacatttttcttcaggtgtaatctttgcctttgacctgctccaaacccaaatatgtatcccagttaggggaccaaattggtcagacagctcagtgmtgttttccttatataatgtaatgcctggggcctttttccacttatttgttgcttcaccaaagtgcttaagaggccagtgtgacaaagcaagtgttctaagcagaagtgaggtcctgagcatcccagttctaaccattacttttgtgcccaggagctccagtaga

SEQ ID NO: 739114 - DNA, 637 bp, Homo sapiens
cattataattggattattgagattctctgagagtctctggcttctgcccttgacccttgtagccaggtccattcttcccacaataagcagaatgaacattttagagttcaaatcagatcatcaacaactccaggccttctatttaattcataagaaaatttataattttgatagtagtcaacacagccttatagagtctggtcccctgatgcttttmtgactttacctcccactcctattttccactttactctgctctaggctggggtcctttagctgtgcttccaacaagtcaggcattctcttgcctcagttagtttgtatttgctatttcttccctgcaacttttttcccctaaagttctacataacttgttccctatcttccttaggttttcattaaatgacctaatgtattaaacagcaaaaatagcgcgactgttcccacactccctttatacatgttatctatttacttgattgattattgtctgtctctttccactagaagcaagatccaggaattttgtctatttggttgcttctatatattccaagggcctaaaaataatgaacaataaatgtaagcgtgtgttgagtggataaatgaaggtaaaaattaggaaaattttggagaa

SEQ ID NO: 739115 - DNA, 647 bp, Homo sapiens
ttttacatacgtgatgaaagtctaagaagccagagcacatgaaggagagaacctcagagatttgtaacaagaagaagccgctaatacttttgtaagcaggtctcactgccagagcccacaggtcaggactgttcaatagcagctaggcccatgacatggggtttcccagtgtgagctgtgccaataggaggatgggctgtccagctgaacctggagccaaggaaataaaaggctttggaggagacaccgcctgtgacaataagagagaggaaaatagcctgatttctctctttctccagtctacaatcactctcttgccagtatctcccattgagtgaaccctgccagaaactaaaaaacatagtaggctgggaatgcaccttctggtgtgggggcracatagagcatagcaagagaggtgcagagaatagctttgagatcaaataggcaaaaatgagtgcataatatctttccattaattttaggtagaagttttcaaaaaatatacgattattttcaattatgttcaaaaccttaacattggtataaatttgttatatccttttcacatagaatttctccatgagaagggtaattaattttgttgatattttacagtctaactttgttgtctaaattcttagtaa

SEQ ID NO: 739116 - DNA, 569 bp, Homo sapiens
ttttgcccttgcctgctttaaggattgtctctttaccactggttttaatgaatttgattatgatgtgctttgctgtagctttcttcatatttctgatgctaggatttcattgagcttcttggatctatgggtttatagttttcatcaaatttggggattttttggctatcattgcttcaattttgtttgtcttttccctcccactcctattttcctttatggactacaattacatgtatattagayagcttaaaattgtcccacagctcactgaaatgaaacttttttttcagtttttttctcgtgtgtttcattttgatatcttcaggttcataaattttttattctgtaatgcccattctgttatttgtatctggggtgctgttcatattagacattatagtctttatctctagaacttcaatttggaactctttttatcttgcatgtctctaatgaacattctgaaattttcttctaccttgttgaatacgtagataaaatatgctaagtgtattaatgtctctatctattaatgctaacacctgtgttgttcaggagtcaattta

SEQ ID NO: 739117 - DNA, 566 bp, Homo sapiens
aataaataaatataaatagaggctgttctttcactgaaactcgggctccctgctactgcaaggtgcaccattctaaaaggctttactaaacgtgctcaagattttttatctttatgaaacttttgggaatagaaacaggtaactctacttaaaaaactgaaaaaggaaatctggatttagtggctacaaagatggaggggttaaaagctaagctggaatgggagcagagagagaaataaagaacawctgttagtatccataacaggaacattgtcccgtctctctatgggtgtcacctctccattgggacatctttgatgtgccttcacatctcaacacctttgcctcacactagcaaaactcctgctgaaggaacttactctgcattattttcaatattttaaaggattacttatccgatcaagtgcacaatgaaagtaaaacataacattgtttaccttgtttatatctaaacatcggtagaatcagaaacaaaatagcaaaccacaaaaaaagcacctaaaaccaagccatagtttacaagctctttctatattactattgac

SEQ ID NO: 739118 - DNA, 487 bp, Homo sapiens
gaatagaatgggaggcaggttgaccctaagaagttcgcagcttgactttttccctttagcttagtgatttagaggtcccaagatttattttcctttcacactatctattattattttcattatcactgttagtaattattaaaggtgcataggaaatcactcaggactgtctcaatgaacagcagttcaggaaataggagtgaaagacaaatctgwagtctgtggagaacactaagttctcagaggtcacaccaaaaacagagaaacacaaccatccgctgcctcaaggggagataaagcacatcccaaaaaagccacgtgcaaaaaaattacaaagccacatagcagttaggcacaaaaaacaaggtgccaggtaaatatatccatactgagggcatgcagacaagagggcaagagggggccatgggcagctccttgaggacctgggggggtctgagcttgaagcaggaggcaggtgtgagcaagg

SEQ ID NO: 739119 - DNA, 639 bp, Homo sapiens
aattttggcattattctgttagcaaattggaatttttcttaagtatgatttaaaaacatttgccgcatgctttttagtatatttttaatctgactgcaaagcgatatgtgcctattatagaaaaataactataaagaagaaagtaaacaccacctaacttctaccatttacattttggcatattttcttctattttttatttttattttttctgatcataaaaataataggccgggcacagtggctcacgcctgtaatcccagcactttgggagactgaggcgggcagatcacaaggtcaggagttcaagaccagcctgcccaacaaagtgaaaccccatctctactaaaaatacaaaaattagccgggcgtggtggtgggcatttgtggtcctagctactcrggaggctgaggcagaagaattgcttgaacccaggagacagaggttgcagtgagctgagatggtgccactgcacttcagcctgggcaacacagcgagactctgtctaaaaaaaaaaagtaataatatacatttggtataaaatcaattatgtatataatgcacagaaagtaaaaatttcctgtgattctctgtgataaccacattagtattcctaggctggtattaacaattttgga

SEQ ID NO: 739120 - DNA, 642 bp, Homo sapiens
aaactcatttcaaatatagtgttataagtaggtcgcaaacactaatctaaaggaagctagagtgaatatactaatatcaatgtagacttcagagcaaaaaaattatcagagtttaagaaggatattgcctattgataaaagggtaaattcgtaagaaggaatagcaatcttaactgtgtagccattttacaccagagtttcaaaataaatgaagcaaaaccagacagaactgaaagaagacacacataaatgcaggactatagttagagaatttgactttcatctctcaatatcactacaactggtagacagaaactcagcatggatacagaagaactgaacaatgccatcaaccaactgaatgtgatagattaayacaatattctacacagcaacaacacaatcttttcaagtatacatagaacttttacaaagatagactatgttctgggtcgaaatacaaatcttaggtcatttcaaaaaccaaaataatagaaaaaatattttcagaccataatagaattatactggaaatcaataacagaaagataacaggaaaatatagagacacttcaaagttaaacagtacttctaaatgatccatttgctaaaatagaattctcaaaggaaattaaaaactac

SEQ ID NO: 739121 - DNA, 591 bp, Homo sapiens
gcatggtgaccatgtaaggaaaaaacaattgaagatacatactaaagattttatagaagaaatgacatgatatgagggatttgctttaaaatactccagaaaaatacagtgcagggataagtaaaataagcattgcaaattgttcataatgactccaggggaatttgtataacttcccctggagtctctacttcagtgattgtttgaaaattcccctaataaaaaatattctttaaaatatgcattctttccagaaaattaataccttcaaatagaaatcatattttgtttacaatttgagggggggttacatagtgctaaacctatttcagattttaaaaycttgatatagtgggagaaggaaaatatttgagtataatctcaagggagaatactattaataagaaagaaattgccatggagattagacaggtgttagctctttgtaaccaccaaaagcagagcctaggtacccacaaaaatagagaaaggaagagcgacaagaacaactctgagacctgtgtggactttacttctagatttgcaaaggatttaaaggaatgaatgacacaggacacagggaaggcagag

SEQ ID NO: 739122 - DNA, 504 bp, Homo sapiens
tcatatattcaaaatcattttacacattccaactagtacttctaaaggcttgaaatggaagagttgtcatactgccagaacctgaagtttacagaattcatttaacctataaaacgggatgagatcacctagggagagagtgtaaaatgaagagaagctcagagaggaatgacccgcaggaaactccaatatttagaagatgaatgaaatgagataaactggagtatgatctccctttattctagaatttttgcaagctgtcttcctgttagaggtttcatgaattctcaacgattcgaaaaacaaatgaaacaaacagaggccagccttctacaaacactcattaatatcttaaccaaatataaaatatgataataagagcattggcaaatattatatctttggtgcatgaaggcagctagttttttcttgtacatagagatgtgtcaaaatcactcttccttttactgagtcttraaaataaggaaagcttctattgctggc

SEQ ID NO: 739123 - DNA, 527 bp, Homo sapiens
  misc_feature 39: n = A,T,C or G
cacaaaaaaacttgcacatggggatgtttacatcagctntattcataattgccaaaacttggaagcaattaagatgtccttcagtaggtgaatggaaaaactatggtacatccagacaataaaatattattcagcactaaaaagaaatgagctatcaagccatgaaaagacatggagaaaccttaaatgcacataactaaatgaaaaaaagtcaaactagaaaggctacatrctgtcagtttccaagtatatgaaattctggaaaagttaaaactatagaacagtgaaaagatccatggtttccagaagtaaggggtgagggaggaatgaataggcagtgcacagggaagatttagggcagtgaaaatactgggtatggtactgtaatggtggacacatgtcattacacatttgtccatacccatagaatgtacaacaacaagagtgaaccctaatgtaaactacagactttgggtaacaatgatgtgtcattgtaggttcatcaattgtaacagatgtaccactct

SEQ ID NO: 739124 - DNA, 624 bp, Homo sapiens
gcctgatccaacccccgatagtctccccacccctaatcctccactccatagagccccttcggcctctccctcaccaagcctgcaggcagcacccttcttacccaagtcctgggcccatgcccagagctgcgacccctcccaggctggcgtgggcctcctcagctctagcctgcagtgcccatgggcacccaggtggcaactctgtgggcagctcaatggctcctctgttccattcctggctccacacccagctccaggaagccccggccccacgccctgggctgggatgcccaaaggagccgcccacagggctgggagttgggagcagcagcagagatgccagttgggaaggatggcaggacaggcacccaccctgggcatagaagttcctgggcagaacccaggcctgctttcctgtggcttctaggtccccargatagactgcttagtggaggaagctgctcctataggcttccgacccctttgacctaccctaatttgttattttgtttatggtccctttgccccactctgatgtgctcactactgtatcctgcatcaatctcagggctggcacacagtaggtactcaatgtatactaagggacgctcaacaggcgtcctc

SEQ ID NO: 739125 - DNA, 528 bp, Homo sapiens
ttttagaatttcccaagatggtttaaaatttatatggaaatggaaataatgtagaatagccaatgtaatcttgacaaagaacaacatagaggaagagctccataacattggtctcagcaacgattttttgaagacgacctcaaaagcacagcaaaagcaaaaatagacaaatggggttacatcaaactgaaaagattttccacagtcagggaaacaaytgcagagtaaacagataacctacaaaatgggggaaaatattgcaaatcatacatctgataagtggttcttatctaaaatacataaggaactcaagtcagcaaggaaagaaataccccagttaaaaaatgggcaaaggacctgaatgcatatttcctgaaagaagacatacgaatggccagtggttatatgaaaatatgctcaacatcactaatcatcaagcaaatgtaaattaaaaccataatagaataccgcttcacacctgttagaatagctattaccaaaaagatgagataacaagtgttggcgagg

SEQ ID NO: 739126 - DNA, 660 bp, Homo sapiens
agtatagttcaatggagcagaatatacagtgcagaagtaaattcacacttatgaggttaactaatttccaacaaaggctgatttccaacaaaggcactgaaataattcaatgagcaaagggaaatctttttaataaatactttggaaaaaatgaatagctacaagggaaagctaaaataaaattcaacctctatctcacagagtatacaaaagttaattcaagatggatcacaaacccaacataataaactaaaactttaacattttgagggggaaaaaaacatgagagaagttctttgtagccaaatagatatttcttggactcaacacagaaattactaattataaaggcaaaataattacaagttggattacattcaaataaaaaagcttctgttaatcaaaaaacatactcctaagaaaatgagtaggcaagtaacagagaaaatgggagaaaatgtatgcaaaacatttatctgacaaagaactgttatcccaaatacacaaaagatagctacaactcmgtgaaaaagataaacaacccaattttaaaatatgcaaaagactcgataaacactttaaaatggaagacatacaaatagccaaaacgcatatgaaaagatagtcaacattattcatcatttgaaaaatgcatataaa

SEQ ID NO: 739127 - DNA, 593 bp, Homo sapiens
atacatactggcccttataaggagaaaggattagaagggaacaatgcacccagtagagaagttcgtcttgtatttctagttattttatgagtttagacttattaaattacaagctttaaaatcagccactcattattgaaaaaagtgtggaattgtgaattaaaagcgtatctctgagacagttgtcactggctttggagctaagcatcccgggaagtcagataaggtttcatcagagaaagggaaatgatcctgttatgaataaaaattgaaaggttctgaaagtcacttctggaagaccagcatggtgaggacaggaatcttaagtgttaacaaggttggacttaaatacctaaaatgattaattggtcaaactagcatgaggttaaagcttttttgttcctaaaataccttttgattccaggaagaaattcttttccccaagccrccctgagtgaaccattagtttccatttcagtgatctgctttctttctgtgtgtaatctcaagtctcacctgagggcagatggcggggcgatgacaatggcagcctatcagagaatgtgatttccaatctcagctccacaatccaa

SEQ ID NO: 739128 - DNA, 606 bp, Homo sapiens
aggctgaatgcgacggagtgtgcattacatttggaaaaaaatgtgaatcagtcactactggaactgcacaaactggccactgacaaaaatgacccccatttgtgtgacttcattgagacacattacctgaatgagcaggtgaaagccatcaaagaattgggtgatcaagtgaccaacttgcgcaagatgggagcacccgaatctggcttggcagaatatctttttgacaagcacatcctgggagacagtgataatgaaagctaagcctcaggctaatttccccatagccgtggggtgacttccctggtcaccaaggcagtgcatgcatgttggggtttcctttaccttttctataagttgtaccaaaacatccacttaaattctttgatttgtaccattccttcaaataaagaaatttggtacccccacccaaaaaaaaagcagagaaatcagcacwctatttgttaatctcacaggactaaagaggaataagctaaagtttgtgacttcaaaacagctgagatgtgaaatcaagttattgttgagaaaagagagataaagaattaggacattttttttctcccttagaggcgtttgctgaattct

SEQ ID NO: 739129 - DNA, 531 bp, Homo sapiens
tggctgaattaaatttttaaccagcattttagaaaaatttcatgtagctttgcagtccttatcctttaaatactatttgaaataaggagataaataaatacacattaaattgtcccaatttcactgcatatgtactgagaggtatttagggaatgggcagtatttccaaggagcagtcagaacatctagtgaaaagctcttttactgagcatgtgaatgctggaaagactggaagaggcaggcctgtccccagcagccagggctttatttctcctctgcatgtacactcccctcctttggcgcttagaggtgaggacccayggagggagagaatccccaacaaggaccgctttaaatacagcagatgaaggccttggaaggaaacagtaggaagctcgagtgctttccctcccttggatactgcatgtcttctttttaaaaatcacacacacaaattaaaaagattgagcaatgctttcagggaaagtagcaacagtgaaagtccccagctcaattctagtcatgtgccaa

SEQ ID NO: 739130 - DNA, 664 bp, Homo sapiens
atagagtagagttaattggtagattttcctaatcaaagaaggtagattgctgtgagttgatggaattaagaaagaaaagagagaaaacaagagtcaagtattttatgatagcatatgtaaaactgatagtttaaacagacagacaaatagaaaatattttgagacaaggaaaggtagttgtgggtacatcacactagaacattataaaaatattgaataaataaggattttaagacaacattaaccagctggccaagcttaaaaaacaggaacattttcagcctcttgcaaactttaagtttagtaacagtcaaaaatcttcatagattattttcaaataagattttttgtttttaaacrgagtcttgctgtgttgcccaggctggagtgcagtggcgatctcagctcactgcaacctccgcctcctgggttcaagtgattctcctgccttagactcccgagtagcagggattacaggcacaagccactgctcctggctaatttttgtatttttagtagagacagggtgtcaccatgttggccaggatggtcttgaactcctgacctcaagtgatccacccgcctcggcctcccagagtgctgggattattggagtgagccaccagccccggcctcaaataagatttaattctgttttgattag

SEQ ID NO: 739131 - DNA, 456 bp, Homo sapiens
tactttattatttgagaataggcactgacatcttttttttttttttttttgagacagagtctcactctttcgcccaggccagactgcagtggcactatctcggctcactgcaagctccacctcctgggttcacgccattctcctgcctcagcctcccgagtagctggaactacaggtgcccgccaccatgcctggctaattttttgtatttttagtagagatggggtttcaccatgttagccaggatggtctcgatctcctgacctcgtgatccgcctgsctcggcctcccaaagtgctgggattacaggcgtgagccaccgtgtccggctgggactgactttttgacgccatttttagaggggtctggaggagataacagtagacactgcatcaatgttttaaaattaaacataaaaatttatgcaaaatgcccagcccagtaactattaaggag

SEQ ID NO: 739132 - DNA, 575 bp, Homo sapiens
caagcacctgctcttctttgaaagcattatttgaatgttaattttcaatgaatcctcctcttcccaagggaaattttagccaacacatctgaactttttgtgctctcgtgatgctccctatgtactgtgttcaagggcagggacattatcttctacaggtattactgatctcttgcataggtctgcatgggccagatacttaataaatattggctgaataaaataactgtgagtggtagctcatttggaataggaacctaggataactttagactggtgagaacaaaatggcagccctgttcacatatacagaggytggcacttaggagtccctcctgtgtgaagcagagaattgttgctgtagcaaacctgttttcaaaaacctcttcattcatgaaaagagagtaataacaacagggaaaattatgtgaatttggaacaagagcaaaataagacaatgtagcaatagtagacagtgtaattacttgatatgaatgttaggcagtgtattaatgtatttcttttgcaccgtaaggtccaaaatagtagcattgaatgccacagcctatgaggta

SEQ ID NO: 739133 - DNA, 612 bp, Homo sapiens
acaaataacaggattcccttgtttctatctggctgcatagtggtccattgtgtatatagactacattttctttatccattcatctgccgatggacttttagttgtttccctatcttggctattgtgactaatgctgcaatgaacatgggggtgcagacatttctttgacatactgatttcatttcctttggataaatacacagaagcaacaaggctggatcatatggtagttctagttttagtgttttgagaaatytttataatggctgcactaatttacattcccaccaacagtgtgcaagggttcctttttctctacgtcatctccaacacttattatctcttgtctttgccatactaacaggtgtgaggtgatacctcattgtggtttggatttgcatttctctgatggttagtaatactgagtatttttttatatacttgttagccatttgtagatcttctttgaaaaaatgtctattcagatcctttgtccattttcaaaattgggttactttttttttttttttttttgctactgagttgtgtgagttccttatatattttgcaggttaacccccttatcagatatgtggtttgcaaatattttct

SEQ ID NO: 739134 - DNA, 601 bp, Homo sapiens
tgtttaacattgtatcctcctgaggtggtgataacagttaggacaaaaaaaccttaaagaaaaaactaatgagtaagatgactacggagactttgaaaaactccaacatatttttgggaattgagaaagccacacacaaatgcaaggctttgtgcctgcccagagaaaacctcagaaggctctaatgtctcatctctggctgaccttgaggctctgaacaagcaggaagtaaagactaagacagagttgtaagttgcctgcaagaagagatgtgctccaacagtggttgtacatggtgaagaacacagacttcatataattagtccaataaactcattaaacaagcaaatagcaacaacaacaacaaacagaaaaaacaacaaaacttggraataaaagaagaatcttaattccagatctgacacactatattattctaaaggtacagatttcaacaaaaaatgcaaaacatgtaaagaagcatgaaagtatagcccatacacagaggggaaaaaaagcaatcaatagaaatatctgaggaagcccagatgttgaacttactagacaaagactttaaaccaactgctataaatatactcca

SEQ ID NO: 739135 - DNA, 601 bp, Homo sapiens
tgtttaacattgtatcctcctgaggtggtgataacagttaggacaaaaaaaccttaaagaaaaaactaatgagtaagatgactacggagactttgaaaaactccaacatatttttgggaattgagaaagccacacacaaatgcaaggctttgtgcctgcccagagaaaacctcagaaggctctaatgtctcatctctggctgaccttgaggctctgaacaagcaggaagtaaagactaagacagagttgtaagttgcctgcaagaagagatgtgctccaacagtggttgtacatggtgaagaacacagacttcatataattagtccaataaactcattaaacaagcaaatagcaacaacaacaacaaacagaaaaaacaacaaaacttgggaataaaagaagaatcttaattccagatctgacacactatattattctaaaggtacagrtttcaacaaaaaatgcaaaacatgtaaagaagcatgaaagtatagcccatacacagaggggaaaaaaagcaatcaatagaaatatctgaggaagcccagatgttgaacttactagacaaagactttaaaccaactgctataaatatactcca

SEQ ID NO: 739136 - DNA, 655 bp, Homo sapiens
attgagaaggacttggagcactttaggggagacctgtcgggggaccatctgcccagcatgaatgagccagtcccatgaaacctggggttttggctgcagctctctgctctctgctgtggtgcccttgaggtgggagttgagactcaacatgtagggcagggcttagacactggaccaagttgaggactagctaaaactggaatggggttgaagcagctttccataagacataaccaccagtgtgccatgtcagtttaccattgccacggcaatacccgggagttactgcctttttctatggcaatgacmtgacaaccccaaagttactgccttttacctggaaatttctccataaaccacctcttagtccacatgtaattaaaagtaggtataaatatgactgagcagtgacgtgacatgcagcccgcggtctgtacggacgcgccctcgcttcttcctctttctcgactccatcttcgcagtagtggcagctgggaccgcggttcagtcaccaatatgcagctctttgtccgcgcccaggagctacacacccttgaggtgactggccaggaaatggtcgcccagatcaaggctcatgtagcctcactggagggcattgccccggaagatcaagtcgtgctcctggcaggtgcac

SEQ ID NO: 739137 - DNA, 514 bp, Homo sapiens
tccaatgctgctgctgttctgacaggaggcggarctcaggtggtgatgtgagccatggggaggggcggtaaatacagatgaagcttcactcactcatccactgctcacctcctgttgtgcaacccagatcctgatagggcacagaccagtacccgtccatggccgggtgttggggacccctgcatgaaaggcgaccagagagtgcatccagctggacgctgctatcagcgacattgacatcctcagctagcttctgttgccgggccccagcacactttgataggtgttgacaaatttttcttgaggaagactacaccaatttacccccctgcccacatgcttttctcatatccttacaaaaactggatattattggttgattctgtttctgcctatttaatagaagggggagacacagatcttatcaattcacatttccactcactggtgaggctgtgctcatgtattagctacatgcgtacttttttggtgaagtgtgcacatactttgctca

SEQ ID NO: 739138 - DNA, 636 bp, Homo sapiens
tctgagcagctgacgtggcctgtggtgctgggcccatattaactgcagtagggatggcagtgaagcagctacattgtctgagatctatgttcctggggttccttgttgtgcgccaggaaaatttagaacacggacacacatgaggagtttaggagcagaggtttgataggcagaagagaaagagaaayagctctctccacagagaaaggggtctccaagtggaaaggaccagctggtggccaatgtgctggattttatagtctggtttaagaagggggtgtctgatttacagaggcctcacagattggttggatcaggtacgacatttacatagtgagtggggaaggctggtcaccccaccctaatcttattatgcaaatagactttccagtggatcggggccatcttttctgctctttactgtacacgtgctggcagagaagggaagatggagttgctaccctggagatatctagtcccttgctcccatcggcattcactcatacagactcccagcttgcttgtctctgtttgcagctcgactttacaggctgctcgttgttagaaaatgatttggggctgctttgtcattaaaaagaaaggccttaccgaggactccctgccctcactatctgc

SEQ ID NO: 739139 - DNA, 616 bp, Homo sapiens
ctttttctttgttttgcacctttttggatgtaattaattcctattttatttcatttttttgagcggaagaaaagcaggtaacaaggataagtaggctgtgtacctaaatataagtagagacaaatgatatgtcttcaaaatctctttctctctctacaaaaatggggtaagtctgtggttgctgttgcagcatatgtcgcagtgtaattgacgaaggacgttggatccctgcagcctttttctgagactctacagatacggataggaaaaaaactgagatgtgtcaggcaaagaaagcaggtttgtaaaatttgtgatagtaatttgctaaaatctctttcgagtctttsatactttgttttgctttggtttgattttttatttttcttcttgaggataattgagaaaatatatttacccctaaatcacgaacaacggctgtaacatagccatctatcttaaatcctttctggaccgaggagagggatgactaaacacatccttttaggtccagcatgagctgtgtggaggaacctgttggaaatgtatgtacacacatctgcagcttggccataccttttgttcttggatccatccttggactctgttctccaaa

SEQ ID NO: 739140 - DNA, 633 bp, Homo sapiens
aacaaagataaaaaagacaaagaaggccattatataatggtaaagggagcaacgcaacaaaaagggctaactaccctaaatatatatgcacccaatacaggagcacccagatccataaagcaagttcttagagacctacaaagagactaagactcctacataataatagttggagactttaacaccccactgtcaatattagacagatcaacgagacagaaggttaacaaggatatcaaggacttcaactcagctctagaccaagcagacctaatagacatttacagaactctccaccccaaatcaacaaaatatatattcttctaagaaccacatcacatttattttaaaattgaccacataattggaagtaaaacactcctcagaaaatgcaaaagaacagaaatcataacaaacagtttctcagtcyacagtgcaatcaaattagaactcaggattcagaaactcactcaaaaccgaacaactgcatggaaactgaacaacctgctcctgaatgactactgggtaaataacaaaatgaaggcagaaataaataagttctttgaaaccaatcagaataaagacacaacatgtcacaatttctgggacacagctaaagcagtgtttagaggg

SEQ ID NO: 739141 - DNA, 627 bp, Homo sapiens
tccagttcctgtaatatatatgcttaaatgctctgaaaagccccctctgacctctccaggagaatattggagcaccttccgctaggcatccatacagccttgttcatagattcattatcatatttatcacatattcttgtcgttatggctttacacatctttttcttacagtagaagtcccttgtggtgtgagaaagggtataaactgtgttccccttgattgtaatctgcagtgtcctgcattcagtaggggcttaacaattgttggtttgatgaagtttacaataaataagtaaattttaataactgatacaaactagctcacaagtgactgtggatttcctcaatttgtaagctggactctgacaaacatcccaatatggaagagttaattgattgaatagatcaccagatggaataccagatagctaaacttttgtggaacgagaataratgcccctgaatttcattagtcttcaaatattggcccctatttccaatttttttaaaaatatcgttacttactcagctgccttccctagattccgtagactcccatatgtcttattaaattaaaggcaaaatcattaaggccaatataaactctgtatggaactagtgaaatgt

SEQ ID NO: 739142 - DNA, 530 bp, Homo sapiens
atggtgagagagagcggaagagagagcgaggagaggtgctatactcttttaaacaatcagctgtcctatgaactaacagagaattcactctgtatgaccagtaccatggggaggtcactgatacagttttgctctgtgtccctatccaaatctcatcttaaattgtactcccataactccccrtgttatgggaaggaacaagggggagataatttgaatcttgggggcagtttcctccatactgttctcatggtagtgaaaaagtttcacgagatctgatggttttatcaggggtttctgctttgcatcaccctcattttctcttaccaccgccatgtaagaagtgcccttcacctcctaccatgattctgaggcctccccagccatgtggaactataagtccaattaaacctctttttcttcccagattcggggatgtctttattagtagtgtgaaaacagactcatacaggcaccaagccattcatgagggacctaaatacctcccactaggccacatctaaatattg

SEQ ID NO: 739143 - DNA, 602 bp, Homo sapiens
cctcacctggcatacatgtatggcatgtaagggaggggttttggctacctgcctatgaatccccaaaccattagccttgaggacccagattaaccttgctggtctgctcttgacctgtgcatctaagggcaattcttctgctggcctgcatcccctaattacatatatggttgaagactgaacgtatataccctatggccaccctgcatttaaataactatatattcccatttcagataaaagataaaggtttaagtgcaagctagctaccctgaacaacagatatccagagccactcctaccaaatactctccccaaattcagttttatagagcayttataagtcaaaagcagactatcaccacaaaaattaagaatataaaagggaagtaagcaacagaaatccctccatgtagtagaactattggaaaaagaaaactaatatgaagaatagagaagaaatccaattccatatagtaggagttcataaagaagaaaaaggtgaatgaaagattaaaatatattttcaacatattataagaaaatcttgactgggagcagtggctcacacctgtaaacccagcactttgagaggcatcagg

SEQ ID NO: 739144 - DNA, 602 bp, Homo sapiens
cctcacctggcatacatgtatggcatgtaagggaggggttttggctacctgcctatgaatccccaaaccattagccttgaggacccagattaaccttgctggtctgctcttgacctgtgcatctaagggcaattcttctgctggcctgcatcccctaattacatatatggttgaagactgaacgtatataccctatggccaccctgcatttaaataactatatattcccatttcagataaaagataaaggtttaagtgcaagctagctaccctgaacaacagatatccagagccactcctaccaaatactctccccaaattcagttttatagagcatttataagtcaaaagcagactatcaccacaaaaattaagaatataaaagggaagtaagcaacagaaatccctccatgtagtagaactattggaaaaagaaaactaatatgaagaatrgagaagaaatccaattccatatagtaggagttcataaagaagaaaaaggtgaatgaaagattaaaatatattttcaacatattataagaaaatcttgactgggagcagtggctcacacctgtaaacccagcactttgagaggcatcagg

SEQ ID NO: 739145 - DNA, 604 bp, Homo sapiens
gattcaaacaatagaaaggaacttgaatgtattaactctaattctcttgcaagtccaaaattctgagacacgtgacttctttgtaactaccttaagcaatgttatataatactaatacttgcctatggcctggctgaaaagaggaagaaattaccaactgtggggtcagataagaataaaactaactggccgggcgcggtggatcatgcctgtaatcccagcactttgggaggccaaggcgggtggatcacaaggtcaggagtttgagaccaacctggccaatatagtgaaaccccatctctaccgaaaatacaaaaaaattarccaggcgtggtggtgggtgcctgtagtcccagctactcaggaggctgaggcaggagaatcgcttgaacctgggaggtggaggttgcagtgagccaagatcccgccactgcactccagcctgggtgacagagtgagactctgtatcaaaataaataaataaataaataaataaataaaactaactgaccgtcccaaggctgagactcagagcattaaacctatgatgccaagttttaaggctataatcactagcatatatgtctacttacaagaagcattc

SEQ ID NO: 739146 - DNA, 625 bp, Homo sapiens
gcttttgctagaaaaatgttgctgaccaaaaggatccacattaaccaactacagccttaaaatgtcagccttactcacttgaatgcaatgtttgaagatagagaacatagcaataaaaagacatggctgtatgtcctccaaaataacaaggaaatgttgccttctcaaatagtattcctaaaaaaaaaatggctttgggatctgaaacaaaattagtaggcaaaagtattttgagggcttcagagggtaagccagcagaactctgggaagcttgagttgggtatgttgcattaaagtaccttagatcttcataagttgtaaagctctcaataggctctggataaatgtttatccagcacagaaacactcatgaaattcatgagctccctaggatggctwataaacatgactttaacttcagctcttacctaacatgactttaacttcagctcttacctgtactttgaaagcctcttcatcaagaggtggtggaggaggaaagtttccagagatagatggaagggcactggaatcatctagaggtggaggtgggggtggaagaaaatcacctacagaaaagaagtaaacaacatgaagttaataaggatgcaacgttatagtactc

SEQ ID NO: 739147 - DNA, 501 bp, Homo sapiens
tttattaatccaaggaaactgcttagtagccctctcgacactgatggtttatgattctatgactcaaaatgcaagggtcaattaatggcaataagagactaaggcttcctttaataggtatagccagaaagctcctcctgatgccataagatggccgttaacctaactgtaagtaggcactttccaggcacattacttaaaaataattctccaggcaagatcagacaaaaagcaaccagtaacgtggacaataccaatgaatgaccctgactctcccatctcactgccgtgttgaaaatgaagcctttaatattcagaaatttccacaaagttwtattctactgaactattgagccatgatttttcatatgacaaatgagtagtcaccaggcagtctaaaggagagtacctaggattctgatcctcgcaaatcttgccccttcttcctgccctgccaggaatccctaaaccttcttcatggaaatagcctatcccctttga

SEQ ID NO: 739148 - DNA, 630 bp, Homo sapiens
ctgcatgttgacaaggtccccaggtgtttcatatgcacattcaagtttatggtgctttgctctagatcccaggctgagtgttagttctttaaagagacctttcccaactggccaaatcgtattaggtcatgtgatggattcacccacgcggtctgtgatacagaagggaaaaagagttgaggcctattgatcagaagctgctcactttagagttttacctaagggtgatcytatcaaaaagttctggattttgtagagaagcatacaaaggatgtgaatagtttgacttgagcaaattgaaaattgccagttttgtttgctctaaccaatatgtttgctttccctctgaaaatcccttgttacaggtccttagttttagtttgccacattatgacacaatgggaataatgcacggcagggatcctcagttggtttgggttttcaatacataattgatccatggttgtggcatgcattgtagaatgtccagctagaacacctattctttcaattactttcattactttcaatggcaaaaccacaattacttttgcactaacctgatagctttgctacaagtcagttgttcagtttctttgttgttgtttgtttttatttttgcaaacactt

SEQ ID NO: 739149 - DNA, 630 bp, Homo sapiens
ctgcatgttgacaaggtccccaggtgtttcatatgcacattcaagtttatggtgctttgctctagatcccaggctgagtgttagttctttaaagagacctttcccaactggccaaatcgtattaggtcatgtgatggattcacccacgcggtctgtgatacagaagggaaaaagagttgaggcctattgatcagaagctgctcactttagagttttacctaagggtgatcctatcaaaaagttctggattttgtagagaagcatacaaaggatgtgaatagtttgacttgagcaaattgaaaattgccagttttgtttgctctaaccaatatgtttgctttccctctgaaaatcccttgttacaggtcyttagttttagtttgccacattatgacacaatgggaataatgcacggcagggatcctcagttggtttgggttttcaatacataattgatccatggttgtggcatgcattgtagaatgtccagctagaacacctattctttcaattactttcattactttcaatggcaaaaccacaattacttttgcactaacctgatagctttgctacaagtcagttgttcagtttctttgttgttgtttgtttttatttttgcaaacactt

SEQ ID NO: 739150 - DNA, 604 bp, Homo sapiens
acacttgtagaggattcttctggaatcctatatgagggacaaacattcagacaatcgtaacagtgttctggaatcctatgggagggacaaaaactccgcccccagtagcagtgcactggaatcctatgtgagggacaaacattcaaacaacagcaagattgttgtgggatgctacgttacagagaaacattatgaccctcgtcgcagtgttctggaattctatgtgagggagaaacatacagaacccagcagcagtgatctggaatcctatgtgacggccatacatgtagaccccagcagcagtgttctggaatcctaygtgagggacaaacattcagaccctagcagcagtgttttggaatcctatgtgtgtgacaaatattcagacccttgtagcagtgttccggaatcctatgtgagggacaaacactgagaatctagcagcagtgttctgcaaccctatgtgagggacagaccttcagaccacagcaggagtgttctggaatcctatgtgagggacaatcactcagacaatcgtagcagtgttggggaatcctaagtgagggacgaaaattcagaccatcgtatcactgttctggatccg

SEQ ID NO: 739151 - DNA, 604 bp, Homo sapiens
acacttgtagaggattcttctggaatcctatatgagggacaaacattcagacaatcgtaacagtgttctggaatcctatgggagggacaaaaactccgcccccagtagcagtgcactggaatcctatgtgagggacaaacattcaaacaacagcaagattgttgtgggatgctacgttacagagaaacattatgaccctcgtcgcagtgttctggaattctatgtgagggagaaacatacagaacccagcagcagtgatctggaatcctatgtgacggccatacatgtagaccccagcagcagtgttctggaatcctatgtgagggacaaacattcagaccctagcagcagtgttttggaatcctatgtgtgtgacaaatattcagacccttgtagcagtgttccggaatcctatgtgagggacaaacactgagaatctagcarcagtgttctgcaaccctatgtgagggacagaccttcagaccacagcaggagtgttctggaatcctatgtgagggacaatcactcagacaatcgtagcagtgttggggaatcctaagtgagggacgaaaattcagaccatcgtatcactgttctggatccg

SEQ ID NO: 739152 - DNA, 423 bp, Homo sapiens
attgtgggttccccagtgcatattaaagttatatttacatgacactgcattctgttgagtgtgcaatagtattatgtttttaaaaacatgtacaatcatctaaaccttcaatgactcatcatctttttgctggtggaaggtctttcgtcaatgttgatggatgatcagtgatcagggtggtagttgctgagaattgaggtgacttgcaatttcttaaaataagacaacagtaaagtttaccacrtcagttgattcctcctttaatgaaatatttctatatagcatgtgttgctggttaagaagcattatacctacaggagaaattctttcaaaattcagtcagtcttctctaaccctgctgctgctttattaactgagtttatgaaataatcacaatcttttgttgtcatttcaacaatgttc

SEQ ID NO: 739153 - DNA, 413 bp, Homo sapiens
ggctatgattcttagttttcataattatctgtcttgaacatctgacttcatgtagaaaaaagatgataaaatagatgcaaagacggaggatagcctttcacccagtatctttcatccttgctttccctttggttttgcatgaastgactctgtggaaacacatttgaggaaaaagagccttgtacccttctctgtgtctgaatttcagtcttcgccatgtggcaacacttgattttcatcatacacaaaactaagagctcatgttgtcttgtttctcagttgtggagttgctttagaatatactcattaggttccaccctgagggtatttacacaatacaaatagcatttgtcactttacttaaagcataatgttatagttacgtttgttctgtgaggctgtgttaaatcagc

SEQ ID NO: 739154 - DNA, 652 bp, Homo sapiens
catttatttggaaaatattatcgggtagctagcatgtgcaaggcactctgtggtgttctgtaaaattaagaggacatgccaaacatccctgcgctgagtgggacttagaaatacacacatacaatgacagaacgggctaggcagcagaacacctttaagagccagacataaacggttaaggtcgtacagagaaagaagggatacctcagaggtgcagtgggaacaggagacaaagaaggaaggaggcgttgcccatgactggcagttgaaacagtccctaaggagaggtgaatgtgaatctttagaaataatgggtgagtcttccaaacagagaaaagagcttgaacaaaggctcaggaggggaagctcagaactgttttcattgttttgtaaatgagccacctrttccaggctttcccattcctttcttagggctccttctgacttcctccaaggatattcgtggagaagggtctccttcccctattttatttttcacccaaattggacgaacatcaatgatttgtcagttttctctaactctcatttttccctgggccactttgttcttctttgagcagtctttcttatggaagacagtgaaggaaaactttgggtgtgtgtgttttaaaatatattccaaaaaaagaaa

SEQ ID NO: 739155 - DNA, 652 bp, Homo sapiens
catttatttggaaaatattatcgggtagctagcatgtgcaaggcactctgtggtgttctgtaaaattaagaggacatgccaaacatccctgcgctgagtgggacttagaaatacacacatacaatgacagaacgggctaggcagcagaacacctttaagagccagacataaacggttaaggtcgtacagagaaagaagggatacctcagaggtgcagtgggaacaggagacaaagaaggaaggaggcgttgcccatgactggcagttgaaacagtccctaaggagaggtgaatgtgaatctttagaaataatgggtgagtcttccaaacagagaaaagagcttgaacaaaggctcaggaggggaagctcagaactgttttcattgttttgtaaatgagccacctattccaggctttcccattcctttcttagggctccttctgacttcctccaaggatattcgtggagaagggtctccttcccctattttatttttcacccaaattggasgaacatcaatgatttgtcagttttctctaactctcatttttccctgggccactttgttcttctttgagcagtctttcttatggaagacagtgaaggaaaactttgggtgtgtgtgttttaaaatatattccaaaaaaagaaa

SEQ ID NO: 739156 - DNA, 609 bp, Homo sapiens
ggcagtcagtgttcaggtactggaatggaaatttgtggctcagccttggaaaacccaacaatatttttttgtcctcaagacctagcagtgtgtccttggctctgactctctctagcaactacactctctctctctatagacagacagatagatagatagatagatagatagatagatagatagatrgatagatggatagatatagtgtgtgtatatatatgtgtgtgtgtgtatatgcgtgtgtatatatgtgtgtgtgtgtgtgtgtatgtgtatatacattgagcacgaaagtttttgaaagagtagcctacacccacatctgtacttctttaactagtaggtacttctaaattcaattgatcactacaatgtaactgttgttactaaagtgatcagtgaccaattctatgccaattacaatggtcatttttcagctactgcccacttggctcctccattccatttgacattattggttgatctttgtttcctaaaacctatctgggttcctctctcatctcctctcttatcaccaattattttttatttgcttttcctatcttccttttaattgctcatgtacctcaggcttttgttcttgtcctt

SEQ ID NO: 739157 - DNA, 610 bp, Homo sapiens; identical to SEQ ID NO: 735235

SEQ ID NO: 739158 - DNA, 610 bp, Homo sapiens; identical to SEQ ID NO: 735236

SEQ ID NO: 739159 - DNA, 591 bp, Homo sapiens; identical to SEQ ID NO: 735237

SEQ ID NO: 739160 - DNA, 591 bp, Homo sapiens; identical to SEQ ID NO: 735238

SEQ ID NO: 739161 - DNA, 630 bp, Homo sapiens; identical to SEQ ID NO: 735239

SEQ ID NO: 739162 - DNA, 516 bp, Homo sapiens
gcccctgtagaaagcagcttgagtttgtaaactcaccaatcagcactctgtaaaaatggaccaatcagcactctgtaaaatggaccaatcagtgctctgtaaaatggaccaatcagtgctctgtaaaatggaccaatcggcaaggcgtgygcagggccaaataagggaataaaaactggccacccgagccagcagcagcaacccgctcaggtccccttccatgctgtggaagctttgttctttcgctcttcacaataaatcttactgctgctcactctgggtccgcggcacctttaagagctgtaacacttgctaagaaggtctgcagcttcactcctgaagtcaagcgagaccatgaacccactggaaggaagaaactccagacacttctgaacatcggaaggaacaaactcctgacacaccatctttaagatctgtaacactcactgcgagggtccgtggcttcatttttgaagtcaagagagaccaagaacccaccggaaggaaccaatgctg

SEQ ID NO: 739163 - DNA, 632 bp, Homo sapiens
caacacagtgctgagagggacccctttcacttggggaaaagggagaaaagaaagctaaagactttgcctgggaaccttatcttccccaagtccaccagggctggatcgcgaggatttgcagcacacatgggcttagagtgccctctagtgctgaaatggctacagttacccacaggcttaagtaaatactcagtacccttaacaattattggaagaccctctgaaggactggaacaaggcctgactacaaagactggaataaatacttaaagtcttcaatgcctaggcatcaacaaacatacacaagcatcaagaacattcaggaacatatgacttcaccawatttactaaataagttcccagtaaccaaccctggagtcatagagatacataatctctcaagcaaggaattcaaaatacctattttggggatactcaatgaacttcaagaaatcacagagaaggaattcagatatttatcagaaaaaaaggcagcatggaaactgaactaattaaacaaatcctggagctggaaacatcaatgattaaaagaaatgcattagaatgtctccgtgtggaattgatgaaggagaagaatcagtaactcgaagacaggctatttgaaaattcgc

SEQ ID NO: 739164 - DNA, 583 bp, Homo sapiens
cacctcagcctcctaaagtgctgggattacaggtttgagccaccgcaccctgcccaaactttttcttttttgagacaaggtttcactctgtcacccaggctggagtgcagtggcacaatcatggctcaccacagccttgacttctccagcttaggtcatcctcccacctctgcctcctgagtagctaggactataggggcccgccaccatgcctggctaatttttgtgggttttttttgtttttttttttttcgtagagacagggtttcaccatgttgcccaagatagtctagaactcctgggctaaagtgatccgcccgccttggcctaccaaagggctaagattacaggcgtgagccatcgtgtctggccacaagcattttaaaatgtttttgctaatttcaacaaaatattatttgggttgaattaacayactctctaacgtgaatagataaacacaataagcttaactagaagagaactgtaattttcatttctgtaccttgtttgagcgtaatgacactcgacctccacaacgagcacagaactttgtttggcaatatgaacagttatggccacatcc

SEQ ID NO: 739165 - DNA, 705 bp, Homo sapiens
caagcccacctaccaaccatgcaaacagcttgcccagaatcaccacatgggctgactggtgaagacattttccaaacaaagacaatctaaacagactggaataagtccctacttcctacatgcacagacatcaacagaaggtaagcataatcatgaaaaaccaaggagatataacactaccaaaaaagcaatcatttccagcgaggaagaataagaagatggtggaagagaagcctccattaattatcctcctcacaggaacaccaaattgaacaactatccwcataaaaaagcacggtcataaggaccaaagatcaagtgagcaattacagtacctcgttttaacttttatataaaaaagaggcactgaagagggtagaaaaaacagtcttaaattctcgatgctatccctccttcacctatcagcagcagccacagggtgcaggaagagaatctgtgaacttatggaagggagagtttagtaattgtgggactttgcattgaaactcagtgatgacctgtcacaggggaaagcaacatcaggcagaactcagccacccctcatagagggagcatttagaccagccctagccagaagtgaattgcccatcacagcagtaggaaccagagttcaaccaaaggtaagccccatcaccatgagctaaaggggtctgggatcctaaataaacctgaaaggcagtccag

SEQ ID NO: 739166 - DNA, 639 bp, Homo sapiens
aagtctaatgcttcagagtggcaggggtgatttgtgaagtatttggcatgtcctgggcactgccctatcagccagccctcctgctggagcagggccctggaggtccccactgtgctagacattaactctttgattgtcagatcatggggtggccagggtggttgggaggtgtgtacttgtggggttcagggcatgggctatttactgcagctacagaaacatataaaaatatttcagcattttaacaactaactagagtgtacycttgcatcctgggcctggaagtgagatggttcagaatttaggacaaattcattctcataaaatattgttaaattaggcattaaaagatcatgacagtgatctggctgggctctcctgtatccgtatttccaggtgaagaaaccgaggcccagacaaggaagtgacttgctttggtttggctgagttttagctccaacctctttccacagcaacacaaatgccctgactcctttgtcttggctgcacactgtccacatccatagtgcaccatcatcatttcacgtcgtcattagaacaataaccaggcaataggtgttagtgtgtctgaacaataataaaacttgctctgtagttttcatataaggtgagcatcaa

SEQ ID NO: 739167 - DNA, 639 bp, Homo sapiens
aagtctaatgcttcagagtggcaggggtgatttgtgaagtatttggcatgtcctgggcactgccctatcagccagccctcctgctggagcagggccctggaggtccccactgtgctagacattaactctttgattgtcagatcatggggtggccagggtggttgggaggtgtgtacttgtggggttcagggcatgggctatttactgcagctacagaaacatataaaaatatttcagcattttaacaactaactagagtgtacccttgcatcctgggcctggaagtgagatggttcagaatttaggacaaattcattctcataaaatattgttaaattaggcattaaaagatcatgacagtgatctggctgggctctcctktatccgtatttccaggtgaagaaaccgaggcccagacaaggaagtgacttgctttggtttggctgagttttagctccaacctctttccacagcaacacaaatgccctgactcctttgtcttggctgcacactgtccacatccatagtgcaccatcatcatttcacgtcgtcattagaacaataaccaggcaataggtgttagtgtgtctgaacaataataaaacttgctctgtagttttcatataaggtgagcatcaa

SEQ ID NO: 739168 - DNA, 640 bp, Homo sapiens
atgctcttttgcaatactcttatgcatactagcatacacatatatatgcacacatgcacacacacacacacacacacaaatatattactattaagttaaaaataaataaaagagttgatgtaaaagtctaggagaatcatttagtttacaacatttcagttacttgggtgggagttaccctggctgggatataaggggaaggcacataggataattatgggtgtagtattggccaaacagtgtggccaacactgtcccaggcaggcctcttagtagtgggggaggcttttggtctctccttctgacctgttcccaacagggagtttctcctgaagttgtgtctcagccacaccctcttcccaggcctcctcatccaccccatgatgtcctggcctctgaggtcaggtcagcccrcagcagaacaggtgccagctgaggctggctgagattcagaaagctggtggctgggtcccagccagctcctctctgggctgagccgtggtcagcaggactatgcccctggtgctcatggccagcgagagcctggatgggagagcagagggctgagtggcttctcccaggtagagctttggggtgccaggagcatttctgggtgcagagcaaaaggggggtgtctaaa

SEQ ID NO: 739169 - DNA, 481 bp, Homo sapiens
tgaccaagaagggcaataggatacagtgggggccctaggagatggggaggaacgaagggggaatgtctaacccagaagaagtctttctttggctttctgcagggcagaggccacagtaatggggctgctggacctgggctcttccctagactcagtgggaggaggctgccaaaggcccaggtggtaggacattgctgttcccaaccttctcttgaaaacaggagctgctaatctttctgcttctaraaaccccttgatatttgccttgttggggagaagtgtgtggcggcacatataactctggggatacagaggaagtggtcagctcaaagcacctcacttctgttaagtcccaaacttctcttgtggacacacatggggtttcaggcagcaaaataattcatttaatcttcccccaaaatatgtggtgtccatttttgggctagcaccaaagtaggccctggggggtatgtagtgaaca

SEQ ID NO: 739170 - DNA, 554 bp, Homo sapiens
aaccagagcgactccactttgagtgagggctaggagaatgaggctgagacttgctggactgaattcccagaaagttaggcattcttagcctctagatgtttacggttaagggaacaaattaataatgtttactaaaacagacccagactcgggagtgtccagatatcccaatatctggggaacaaaggcattcctaattttgcttgaaagataataatattgattcttgccaaatacsataattaagaaaattaatagtttatcacaaacccttgtagcagagcacatctctccatatatacaagcattgtacctagggtggatgcgttcctcctcttagtttcgggaacgtcccgctctgtctatggagtagcagtcctttcaccactttgctttcttaataaacttgctttcgctttgcactacagactagccctgaatcctttcttgcatgagatccaagaaccctctcttggcgtctggatctggacccctttcctgtaacagtttcagggtgtatacatatattaaacttattaatttgtatactttaa

SEQ ID NO: 739171 - DNA, 504 bp, Homo sapiens
ctgaaaaaaacaaaaaatgaatgagcaactaactctggctttcatgatttgtgcttataaatctttttatttatttatttatttatttatttatttatttatttatttattttgagacggagtcttgctctgtcgcccaggctggagcgcagtggcgcgatctcggctcactgcaacctccgcctcccgggttcacgccattctccagcctgagcctccggagtagctgggactacaggcgccygccaccacgcccagctaattttttgtatttttagtagagacggggtttcaccgtgttagccaggatggtttcaatctcctgaccttgtgatccgcccgactcagcctcccaaagtgctgggattacaggcgagccactgtacccagcctataaattttttttataatgccctgattcccattatttgatgtatttggataaatatgtcatcctgtaaattgaaggattaaactgataagagcagaaaacagaaattagta

SEQ ID NO: 739172 - DNA, 579 bp, Homo sapiens
ggccccagccccccaggaacttggggctgccggtgagcaggatggtgagtagagctctcaggcggggtgggcaggcaggggcaggggaggctcgcactgtgctcagacccccgcctccctctctctgaagatttttatgaagtgagcctggacaacaacgtggagcctgcaccaggagcggccagggagggttctccccatgacaaccccactgtacagcagatcgtgcagctgtctcctgtcatgcaggacacytaggagcacccaggcttgcccagcaaaccctgcgtgccattcttctaccaggcagccgagaacagggagataaacatcatcatcttctaagagctgatcaagaaatttaaaacaacaacaacaacaaaaagttacggggttcatctcctacacaattcatttactccatttgaatgctagagccactcacatttatttgtgtttctaatttaccgtttaaatttatttgtaaaaagttaagggagagttggtctttccctgatgttctttctggcatcctttagcatttttatttttaatttgataattgtaggtcattagtat

SEQ ID NO: 739173 - DNA, 617 bp, Homo sapiens
cttaggatttgtatgtgctctgggctcatgaagatattgcatcatgagctgcagcagttgtaccctttcttgatgacctaaaaagggattatttctgaggaatgaaaggctcccatcattgactgtggatgtggaaaaccttttctagcttagagcatttatatctacaatacattttaaagtcagagttcatgttacctgttttaatcacatgagtatatgtcccagtacacaaaagggcacyggttggcattcttcttaaggtatttagtgaagatcataagaaatcctttaagagtttaaatgtccctggaagaggcatacaggctctagtcaagaatgaattcgagtgaaggaaagctgtgtgacacctggccttcctctatgttcatggagcttctttgaggctagaagattgattttatcatctagacctctctggctaatacctattcttcagccacattagttactctgacgtaggaatttacttcttttctttgaatggaaaacactttaaaaataataacaaccattattataaaccaatatatgtgagagtacttagttgaaacaaaaaggagttttagtagacagtattatactacacatgaaaa

SEQ ID NO: 739174 - DNA, 617 bp, Homo sapiens
cttaggatttgtatgtgctctgggctcatgaagatattgcatcatgagctgcagcagttgtaccctttcttgatgacctaaaaagggattatttctgaggaatgaaaggctcccatcattgactgtggatgtggaaaaccttttctagcttagagcatttatatctacaatacattttaaagtcagagttcatgttacctgttttaatcacatgagtatatgtcccagtacacaaaagggcactggttggcattcttcttaaggtatttagtgaagatcataagaaatcctttaagagtttaaatgtccctggaagaggcatacrggctctagtcaagaatgaattcgagtgaaggaaagctgtgtgacacctggccttcctctatgttcatggagcttctttgaggctagaagattgattttatcatctagacctctctggctaatacctattcttcagccacattagttactctgacgtaggaatttacttcttttctttgaatggaaaacactttaaaaataataacaaccattattataaaccaatatatgtgagagtacttagttgaaacaaaaaggagttttagtagacagtattatactacacatgaaaa

SEQ ID NO: 739175 - DNA, 617 bp, Homo sapiens
cttaggatttgtatgtgctctgggctcatgaagatattgcatcatgagctgcagcagttgtaccctttcttgatgacctaaaaagggattatttctgaggaatgaaaggctcccatcattgactgtggatgtggaaaaccttttctagcttagagcatttatatctacaatacattttaaagtcagagttcatgttacctgttttaatcacatgagtatatgtcccagtacacaaaagggcactggttggcattcttcttaaggtatttagtgaagatcataagaaatcctttaagagtttaaatgtccctggaagaggcatacaggckctagtcaagaatgaattcgagtgaaggaaagctgtgtgacacctggccttcctctatgttcatggagcttctttgaggctagaagattgattttatcatctagacctctctggctaatacctattcttcagccacattagttactctgacgtaggaatttacttcttttctttgaatggaaaacactttaaaaataataacaaccattattataaaccaatatatgtgagagtacttagttgaaacaaaaaggagttttagtagacagtattatactacacatgaaaa

SEQ ID NO: 739176 - DNA, 654 bp, Homo sapiens
tggctaatacctattcttcagccacattagttactctgacgtaggaatttacttcttttctttgaatggaaaacactttaaaaataataacaaccattattataaaccaatatatgtgagagtacttagttgaaacaaaaaggagttttagtagacagtattatactacacatgaaaatcaaggcgaagtttatgcaacttaaaatgtttacaagctgcagtgcaatctaatgtttgcgaatgtccaagtattatgagaaaaagtgtctatacaatgacagacttaygtttcctcacaaagttcttcacaaagagtgaaatatgtttttatacctctcagtttcagttagaggcatattttgtgccatatttatgttaatgtgcctatacgtgatgagtgaattatttcagtcatacattgcctaaatcataactttaagatgcttgggaaagaatcaacagctaaaagttcatgaagttctaatgtctgtgttccaaaatacgtcacagtattaggatgcagggagagatgtgtgtgcgctccctggggtgggcatttctagttactagaccatctccatttttagcatttggcatcctcatgatacttttatacatatgacgttaataggagagcaataatacgattttaca

SEQ ID NO: 739177 - DNA, 508 bp, Homo sapiens
ccttttttttttttttttttttttaatgctaggttcgtagaggcttaaccttaacggaaacgctggaagtctgcagggggagggagaggggaactgatatctcccaagattaaccttcactttaaaaaaattattgtacatgtgatttttttttcctgttcatacatttgtgctgcccatctactcctggsacatttcaataaaattgtttggaaaataaacacagcacttgctgggaaaaaaagaaaagaaaagaaaaacaatttccaatatttgttgtctcaaagatactagaatatactgatttatagctacttattttttccaaacaaattagtccactatgaataacctccacagtctctttttgttgttgttgttatctatctgaattctgcccatttaaggtaaactgatgtctataattactcctgctcaagaacttctagagccttctaacatctggtaaccaattccgtctttaaagtacctactaccatgatttcag

SEQ ID NO: 739178 - DNA, 665 bp, Homo sapiens
gggcatgtgatctctgccgaagacattcaagccacccagtgatgtgtgctgggcctcgatccccaccgaccgccagtcctctcctcccctggacagtaaaggtttctccaagacttcagacgacggtgtcacctgaggccctcacctattaagtcaccggggcaggtatgcatggcagaggacacggaggagtgccggagaggagctgaggcctggagggggcctctgcagccaggctcaacccccactctccccactccaacagccctcactgcagccaccgcggcccaatccaaacaaagcccagcctgatgccaatctcaccatcaactgtttttcctctgacttcctcagttttgtctaggaaaaatcaaagtgtcttatcccatctctaagcttccaggggtgtgatcagtgtcttttacaattaccttttacttttatccagcatttcttagctcggttggcaaactggatatttatgcacctscatttcacaatccatctccaccgattattcctgtaaaacatttttttttttaaagtttagagttacttaagaaggttatgtaaacaagttaaccagcaagccacaacttgggtctgcggtgtcagagaaaacatgcaaggtgcaagagaatgaggagctgatggtcaccagcttt

SEQ ID NO: 739179 - DNA, 702 bp, Homo sapiens
cagtgattcaggatcctgtatttaattagctgttaaacatttattacaatttttgattttgtcattttttattaaaatagttttaacaaacatgattcattgaaaataatattctcatcccacgttaaagatagttttctacttttattttttctactcaactctttttaccttatattcatcaaagaaaagtagaagtaaacgtatccccccaaaattcatttctacttgggctctgtgaakttgactttatttgaaaataagatattttcaaagataatgaagttaagatgaatttacactggattgctaaagatctgaaatccagtatgactgatgttcttataagaagaggggaatttagagacagacacaggcacatagaagagatgcgtgtgtagatggagacagaggttggagttaggttgccactggcaagagtaccaaaggttgatggcaaccaccaaaaactagggaagaagcatgagctcgattttccctcagagcccacagaaggagccaatcctattcacaccttcatttcaaatgttcagactccagaaccacaagagaatgaatatctgttgtttgaagtcaccaggtttgtggtgatttgttacagcagtccaaggaaatatatacagaataaaatacagtaccagatctgttctcatccactggcaaacattttttggaatatta

SEQ ID NO: 739180 - DNA, 679 bp, Homo sapiens
acagaaggagccaatcctattcacaccttcatttcaaatgttcagactccagaaccacaagagaatgaatatctgttgtttgaagtcaccaggtttgtggtgatttgttacagcagtccaaggaaatatatacagaataaaatacagtaccagatctgttctcatccactggcaaacattttttggaatattaaatctggaaatgaagagtggattgccactttcttttttttttttttgagatgaagtctcgctcttgttgcctaggctggagtgcartggcacaatcttggctcaccgcaacctctgcctcctgggttcaagtgattctcctgcctcagcctcccaagtagctgggattacaggcatgctccaccatgcctggctaatttttgtatttttagtatagacggggtttcaccatgttggccaggctggtctcgaacacctgacctccagtgatccaccctgcttcggcctcctaaagtgctgggattacaggcgtgagccaccgtgcccagccaattgccactttgggagtatcaagagtcggcccttattagcaagtatttctatctgcccgtttgggttgagcaaaattagaactgacaacggactagatgcttctattaccagtatttcaacctccagaggatccagataacagttttcaagtaac

SEQ ID NO: 739181 - DNA, 551 bp, Homo sapiens
aattacaagggtgtttaatttccaagttcatgaagcctttggttaatctcttcattattaacttctaaccttaactgcttcatatttaaattatcaattttatggtgtggattgtaccaattgtttttcaatcttctgacgtgcttaatggattaatacataattaatgtttctcccacagtccacatatgcttgagaagaatacagaatatctgattattgggtacagaggtctatatttgtccattrcatcacgtccattcacgggttattcaaatctatatatgggcattctgtgtaacttacttatggtaagcagggtatgttgaaatctccaaatacaatggcagactcgtcaatttctccctgtggttttatcagtttttcctctgtattttgagtctattttgataggtacataaaatatgaaaattgctacatcctcctaattaacagtcagttggcatcaagctgttactaatgctttgtgttccaacatcctatcttgtttgaaactgaagctccatcagttgttttggttaatgtatacc

SEQ ID NO: 739182 - DNA, 624 bp, Homo sapiens
gggtgctacaggtactgataaggttttatttcttttatatatatgtattttttgagacggagtttctctcgtcaccaaggctggagtgcaatggcacaatctcggcccactgcaacccctgcctcctgggttcaagtgattctcccagctcagcctcccacgaagcgggggttacattacaggcgcccgccaccatgcctggctaatatttttgtatttttagtagagaaggggtttcaccatgttggccagcctgctcttcaactcctgacckcaggtgatctgcctgccttggcctcccaaagtgctaggattataggcatgagccaccacgcccagccaaaggttctatttcttaagtttggtgttgggcatatggatgtatgatttaatgttttaaaaaaggaagataccttcctagtttttttgtgttttgttttttttgttttaggcctgcgtgctttattcgttaccccgtatgaatccataaagaagtagccattagcaaattcaggcaatacataccggattcatacttcaggaagacaacccagttgacaacgacaacagtttctatataacaaaagtgagagaaaatactgacattagggtcatatcaagaaa

SEQ ID NO: 739183 - DNA, 625 bp, Homo sapiens
tccgcaactttgcccaaaataactttacagaacagtcaattacagttgtttaactgtatctgcatggacattcctaattacaccaacaggacagatcattttcgtacatatctggtgtaagaatatcagaaaaaaataagtaaaaaaaaaaaaawatatatatatatatatatatatatatatatataagctagccagttacattgcatcgtttgaaagtgttgcaaagtaacctgaaccgtcaagtaatttaaactcagtaacaagtagaatccagaaccaaacattactaataacaataacaataataataataataataataataatataataatattcaacaaatcattagaacaggaaacccacactttagggtgtgtgtgtgtgtttgtgtgtgtgtgtgtctgtgtttaaacaagactttgtatcagaagcccactgtctacaaaaactgcactagtccattaccgtattaagtaaactgttgctctcgccagtattaaaggttaggataatttctgtacatgtaaaattattgcttttttgaaaaatatatttagcatgctcgttttaatccatttcctgcctttacaaaatttcacaattaaaaaaaaacctagta

SEQ ID NO: 739184 - DNA, 630 bp, Homo sapiens
  misc_feature 106: n = A,T,C or G
gtaactgacttgaaaatgctctccatgctggcttcaaggcagctcatctcagcgaaagcctgggtgcgttctaagcgctagagaggaggttcaggaaaacagcacntaagttgtcttctgtcacctctagactcgaggtccacaggtctgacttctagccccagggcccccctgatactgtataagtcgggaaacactctcatcccttgaacatagctctgggtgacatcgtccattcaataccggtcccaggtggtcaccacctgcaggaggagacccagccaccagccctcaccatgtttctgcttggaaccagcaataatcacttaagattgtgagtgacatgtggatgaaatggaaactgctaagatacctggctctttggcctagtttggtctcccagtggggtggtttcaagggtaaggatgtgcctctcccaccgtgggatgagcagascatcaccgcagagcaatcagccctgcccaagggcagcagcccttctgaaagtggcccttcctgcacacgccccccactttagcaaactcaggcaggagggtgtgaaagggctggaaattcagagtgagcaactggaaggggagacagatggagggacaatttcccaagaggccg

SEQ ID NO: 739185 - DNA, 492 bp, Homo sapiens
tgctctctggataccaagcacttcctggggtcaggtcattcctttggaataatgcaccctgaagatctatgccagtatgccaagagcctgggccacgtgtgtgtgtacagtgtatcagtggggtggtgtgtatgtcaggtgatatgtgtgagccaggaacatatctttcccaaggggtaaaatattgggctcayggcggtgtcttggaaggaactgaaactcacagccaactcaatattggtttgaagagatcagatcaagagagggcatgtggctttgcaatgtagaggggtcgagtcttatgtggagcaaggaatgacattctggaagatgatttttccagctgtgagggagtggacacacttgagtggagcatccagggctcctggcgtgcacaggaagaagccacatgccacctggactggacattctgaggatcacttgctgcccaagtctccatcactgtgggatccatacctactgggacaccat

SEQ ID NO: 739186 - DNA, 597 bp, Homo sapiens
gacaccatgatggctctctggtggcctgtgatgacttctggggtcttcaaccctgccctttggatgtcttgctctgaccactgggccttttcctcaactcccagcccattccagagggcatgttccttgccmctcatccatgagctcgtcagtgaactgcaccacccaactctgtcctgaaagaagacatccaaagtcacagggtttttgagaaacagagattactgtggaaataaatgtgagacaactacaagactgaagaggacatttcatctcctttgggctgacccgaatttattgctattttgcttcatttttccttaggtttagcccaactccctttttgctttggacactaggttgcattttcctggctgggagatagcttgtggaagtcccacctttcaaagcatgttttggtgggttttctttgcccatttttctcagcaactagatcagctgttcccaaaaatgtaagcaaaaatgaaccatgcttacccccccgccaccacttgtttgaattttagtttttgattctgagacttctgaaacatttcccagcacaagctgatagagtgggacaaaaagtaactgttg

SEQ ID NO: 739187 - DNA, 677 bp, Homo sapiens
ggccattcagaggtgaaatctggggccctttccgacctttgctaggcatgcacatggccctggacatgcttatggcggtgtagattaccaagaatgtatcagagcttttcagcgccccctatggacagctcgttccccagatcttcccttcagatttttggccaagttmtttttgtgccaaatggtatccagcaactatgatgttaaacaattacagctgattgttttcaacaaatgccctggaaacagagctatttctgcagagtgagctgtgagtcaggtcaaataacaactaccacctgttaagggagttttcagagagcggtaaggcaggtcaaatagtggagttggggctttttgaggcattgcaactcctgtcatgcttcctttgggagcttcgaggctgctagtttcgacagcaactgtggtttcaaaaacactacagaacttgagagacttacgggagcaggccgtattgaaacaccacaaactttgctattttaactgagaagcagctgcttttctttaagaaatgcttcttagattgttgcaagcctgtggttaatttccagagttctgaaaaagtagatttttataatgttgctagaatttttcttgcttttatggaggaatggtgtattagcttcctgttgctgctgtagcaaatgactacagct

SEQ ID NO: 739188 - DNA, 473 bp, Homo sapiens
gatgaagaatgaacattttcccttgggcgggtggcccttggtcactcccacaggcacgttaccgggctccggcgtgtgctcccaccaaccacggcaaacaaaggcgtcctcctcacttgaagtcctggcctgtggttgtttcatctgtttttttgctcagtgaacaaaacgttctgaaattagaactcaccaaagttaaaagcagtaaaacaacatatgctacttaagacattttgaagcrgaaagtaaagctatgtgaatgccgtccttccttacttcctttttctacagcttggaaacctctgagaatttgctgggggtggcagaggagggtttgtctagtttgaaggaaagaatgttggtagacagtctccagccacgaaagcccaggaggtgcccttctttggtacaacagactaagcactacacccactttttttgatccagaaagcatccctactgaccctgtgaca

SEQ ID NO: 739189 - DNA, 558 bp, Homo sapiens
tgctgctgtgaccctgtctatccatgtacttgtttgatacctgtttttaattcttttaggtatatacctaggagtggagcaagtgataccttttgaaaaattttaaaaatgagcgtaggttggtatgatgcttgttatgtctgtgataatgagaaatgagtgacagcatgtggaagtgagtgtgcaggacactagccctcccttggtgtgcctgttcctccacccatrtgatgtttattgacatcaactaagctaggctggatgaggacaggaggcaggaggagctgccattgtgtagcatgcacacactttgcctgcttattcaaccaaatactcattgtggtctgctgtgaagggattttgcagaagccattgaatccttctcagttgaccttaagtaagtggagcatgctggtgggtgtgatcagcagagccctgcacaggaaggctcaggtattccttgccctggactccaaatagcatcagggtgttcatggctcaccctgcactggggacacccttcctgactgcctgccctacgagattttagatttagtt

SEQ ID NO: 739190 - DNA, 621 bp, Homo sapiens
atctctatctgtaaaatgggaatgataattgtttgcccagacatatcatatattaaatcctttgttatagctatatacatatatatatattatgtgtgtgtaatgtatatatacttttgattttacatccattctttgaattgcaaataaaaccaatattagaacaaagattcaaaattttagctaaataggggagttcaatgygtgaaattctatttttatctaaattactcttgtgaaattttagaaaaatatatttggtgtgtatgggcctaatggcataattgtttgtggattttatgtgttgtggatattaatatcatttttcataaagaaaatcactactttattattttatgaaataaatatttcctagaacatgttgaagaaaatagatttatttatattatatatatattacattatattatctgatttattcaaagagtcacacttacagatgtgaaatttcttgtaaatagttcttatggataaaaccactcaaatgattgaaactctagtatatttgacccatactgtgtaataaatagctactttctgaaaaacataaaatgattgaaggtaggataaattgtctttgcactaaaaaatacatacatt

SEQ ID NO: 739191 - DNA, 625 bp, Homo sapiens
catttagggagagctgaagagaaagacatgaaaatatctgaagagcaaactggcttgtccacatttgcttagaaagaagaagagtcagcaaaggagacagaaaggtgcttcaaagaagtcatagaactagctcagtccaatgtaatttaaatcaaaggcaatgcttcaaggtaaaaagtttccatatgactcctgaagagaggagaataggaagagcactgaaattcccctgacgttctttccaactttctgamtgttacttttctgtttcttcgccagtacattcttctctaaccacccattcaatgtatcgtcacatgaagcttgggtctgtgtccctctttcctgtttgttgtccctcccaaaagtgatctcatgcaaataacaacttatagatagatctatccggtccaggtcttttctcctgaactccaaacctatacatccaattgcctacttgacatttatcttggaagtttcaaatacaattcaaactcaatgtgttggaaattcattctcaccttcaccagtgatcacttcccagaaaataatacccccatctatctagttgtgcaagagagaagcccaagagatattatcaacattctttttttcctacccttct

SEQ ID NO: 739192 - DNA, 608 bp, Homo sapiens
tccatttgtaagggcatctccctcactgctcttaaaccactagaaatttttacaatggggaaggcttggcttagagtttacctaacaaaccttatcttgtttaagacacttttcctggcaaccttgtcttgactgggcctttacctatgcccttctttgtctcatgaaataatggtgtttagacctaaatactgtgcctttgggatgtaaattttcacctaagagtcatgtcctttgtaagtgcaaatttaaagttacccagttaacaattgttgacgattcgatagtctaaagtggggaagggaaattatttgaattggcaaatgaaaaacctaataaagttataaaatctgcttctgtctgtgtatggtctgtgtatattctgtctgtatatttttatgcttatacatgtcatgagyacatgaaattttactatcaaaatatatgaaagggctctaattggcttaaagtaaaagtaagaacttacatattttatcagaaaaatagacacaaactcaaatgcctttgagttcacacaacttaggaaatctttagtaaataagactagtttaatattgctattttaataaaaacagaagtgtcttcta

SEQ ID NO: 739193 - DNA, 581 bp, Homo sapiens
gataatcataaaatgtgtgagtcatttataatagcatagaaaggctaaatatacttcaatctgttaataaacaaaaaaatgatgagtatctttctaaaaactatgaaatgggcttcacctacaaatactggtatgtaagcttaaaattactaacttcctaggctttctttagatattagggttgctaagagttgaaattgtagtttatatatatatataactaaaactataagatataaaaaaaaattctatatacagagtacayaaagaaagtaagatgtgggccaggcattgcggctcacatctgtaatcttagcactgtgggaggctgagacagaattgcttgagcccaggagtttgagacaacataggtaacatagtgagacccccatctctataatatgtttttagtagccaggcatggtgatgcacatctgtagtcccagctactcaggaggctgatgcagcagtattgcttgagcccatgaggtcgaggctataatgagccatgattgtgccactgcattacagaatgggtgacgaagcaagagaccctgtctaaaaaaaaaaaaaaaaaagta

SEQ ID NO: 739194 - DNA, 587 bp, Homo sapiens
aactggctagccatatgtagaaagttgaaactggatcccttccttacaccttatacaaaaattaattcaagatggattaaagacttaaatgttagacctaaaaccataaaaacctagaagaaagcctaggcaataccattcaggacataggcatgggcaaggacttcatgtctaaaacaccaaaagcaatagcaacaaacaccaaaatagacaaatgggatctaattaaactaaagagcttctgcactgcaaaagaagctgccatcagagtgaatgggcaacctacrgaataggagaaaatgtttgcaatctactcatctgacaaagggctaatatccagaatctacaaagaacttaaacaaatttacaagaaaaaaatcaaacaaccccatcaaaaagtgggcaaaggatatgaacagacacttgtcaaaagaagacatttatgcagccaaaagacacatgaaaaaatgctcatcatccctggccatcagagaaatgcaaatcaaaaccacagtgagataccatctcacaccaaatagaatggtgatcattaaaaagtcaggaaacaacaggtgctggagaggatg

SEQ ID NO: 739195 - DNA, 568 bp, Homo sapiens
ctccggggcaaggggggcgctgacctctgtttatgcttggaaatctcttgggcagaggaggcctgttttgctctggacatcaaggagcaggaggaaattagagaccctcaacgaagccccctgtggtccctcccaccccayggccttgtctctgggcccaggctagtggggcaggacagaaaggcaggatggtggggacccctgtttgctcctctctccttctgggcacagtgaggggatgggagaaggaacaggcctggactctgtcctccagatgcaggctcggggaggactccccagaaagagcactggactgggagtcagagactggggtttaattccgctgaccctgactccttggactccccatcccgttgggcctcaatttcctagggtgtgagagagagctgatcttcttggtctctaagggctctcccagcttggggccttgaaccccaaggaggtgactgagagatgctgctctcaatccagcctctctgcactgcagagagacccccttcccaccccagcagaaaagcagggggaacccaagtggatggaggaagct

SEQ ID NO: 739196 - DNA, 568 bp, Homo sapiens
ctccggggcaaggggggcgctgacctctgtttatgcttggaaatctcttgggcagaggaggcctgttttgctctggacatcaaggagcaggaggaaattagagaccctcaacgaagccccctgtggtccctcccaccccatggccttgtctctgggcccaggctagtggggcaggacagaaaggcaggatggtggggacccctgtttgctcctctctccttctgggcacagtgaggggatgggagaaggaacaggcctggactctgtcctccagatgcaggctcggggaggactccccagaaagagcactggactgggagtcagagactggggtttaattccgctgaccctgactccttggactccccatcccgttgggcctcaatttcctagggtgtgagagasagctgatcttcttggtctctaagggctctcccagcttggggccttgaaccccaaggaggtgactgagagatgctgctctcaatccagcctctctgcactgcagagagacccccttcccaccccagcagaaaagcagggggaacccaagtggatggaggaagct

SEQ ID NO: 739197 - DNA, 589 bp, Homo sapiens
aaagtcctggagtgggttagtgtatgtatcattttccaaacctttgaccatggttcaaccatggaatcatcttcagaagaacctcttccaacctctcacaaaacacttttcacactttttagcaagtttggctgcaagcagtggggagccattgaaggttcaagcagggaaagggcctggtagagctgcacctagagggaagccaggctgtggtggggacatgaaagcgggaggacagcctagtggcttcgtgccagtgaaatggttaaaaaggattctgaatagacatttctctaaagaagatatacaaatggccaatagacatacaaaaasatgttcaatatcgttagtcgtcaaggaaatgcaattcaaaccataatgagataccacttcacacccaccggatatggaggcagaggtggtagggatccaaacacagtgttcagaggggactaccctgccacttctttcctcagctctaggaacgggagcttctcctctccctggactccctgacctgagtcctaggaattcccagattctccctgatccatcctggagcccctgactgcttcactgcttccagaga

SEQ ID NO: 739198 - DNA, 582 bp, Homo sapiens
aggatccctccctggggagcctgcttctgaggagaccccaggttatcccaagctggtgccccagccccacaccctctggaatatgggagaagggagccttgaagaaacaggtgatgatggaaggagatgtttcctcatttgtaaaatggggataatagtgcctggagtttgagcgtgtgtgtgtgtgtgtgtgtgtgtgtgtgtgtgtgtrtgtatgcacgcacaggacttggatgttgtgagtgcttgataaattccaaagggctgcagagtatgtcctgctgctgcataggggtgaagatcctctgagtccagagaagccctgagagcttagaacttaagacaagtatgcactggggatctcttggctttggaggatgcccaaagccaactgtggcagaaccctgccagaaaacccatgcctgcccttctttcctgggtctgacaagaaaggattctgtgcacatggttctaagagggaatgtctttccacttatcctgtcaactccagctcaaaagcacttcctttgggaaaccctccctcacagccaaccccacccaaaaaacattctcttcctttga

SEQ ID NO: 739199 - DNA, 525 bp, Homo sapiens
catctgcctctgcaggtgaccgtaacaacatgcaaatggtgagttctgctggggggtcatggaagctccctggaggaggtgtatctggacaacagggaaagaaaggagctggagaagagaggcagaaaaattgggtcctggttcaggtgaagttttcccagctggaacaatgacaatgtcaatatcccacaaaggcggcttctgtttatttagcgcttgctgtgttcccacaagtcttyctctacctgccctctccccagccctcatctcactctcccagagccccagagcacaccaatggacaccatcacctctcgggcagatcagcacagagacgtgaagcacacaggcagctgctggaaaaataacaaggaattgcaatggtgtgcccctccgttgaatgcaagctctcttctgccttctcaccttgggcaagttaccttccgttccaggcctcggtttctccatgtgtgaaatgaaagggctggagagaaatctctcactattccccaatctacattcatt

SEQ ID NO: 739200 - DNA, 642 bp, Homo sapiens
acattttgagattgaaaagcaatattattaataattttgccaggatcacatgcataaaccaggattgagccaggcaaaccgagacttacttgtccccctctgtaggaggccgctagaggctcattatgtcttagagacctgaactggakggatgaagtaatttgtttaaaaaaaaagaatgtagtggagaaaagataagaactctttccagttaactgtgttcactccccagccaatccatgtgatcactggctctatgtctcctcctcatcagctggagtctcaatcacaataggacacaggtgagcctgagatgacgctaatatcattctcctggaatatggcttcccaacacaagcaccatcaccttcatcatcatcatcatcatcatcatcatcatcatcatcacagcgatgacttgcccaagatcacacagttgttaagctgctgagcagggatttgaatctgactcgaacctaactactcacctgtggttatatactcgtaattatatatacattaaagtctcattgtgaattctaagctgtgtctaacataacaccaattgtacaataggtgctcaataatgtggctgccctttcccactttagggaaactcaatatgtaaaactctaaagtggg

SEQ ID NO: 739201 - DNA, 527 bp, Homo sapiens
taaagaaaagaggtttatttagctcacggttccatatgctgtacaggcatggcaccagcatctgcttggcttctggcgagacctaaggaagattttactcagggtggaaggtgaaggaggagcaggtgagtcacacggaaatagagggagcaagagagaatacaggaggtgctgggctctttgaagcagccagctcttgtgtgaastaacagagtgagagctcactccttcccttggggtgggcaccaaaccatccatgagggatgtgcttctgtggcccaaacacccactaggcttcacctcgaacactggggagatcacatttcaacatgagacttgaggacaacaaatatccaaaccatatcaatgaccttgatgcattgctttccccaaaagtttaaaagttcacagttctaccaccaatacatgaaagtgccagtttctgcaatgcccttctgtgcactcaatgttattacttaagaacaatttttaaagccaaatgttgagtaaaaatgaataattgctgt

SEQ ID NO: 739202 - DNA, 622 bp, Homo sapiens
catgcgcttccctatgcgtgaggctgctggtatgaagtcagtgagaggtggccatcagcgatggatgacatttcccagcctctccatttccacatggtatccaggtgtgactgtgtgaatagcaaggtcatggtgacatttccatgccaaagcagggaagaaataagtgtgttttctctacggtttctttcaccacccagctggataaagaggaccctgaggccctataggatggtggagcctcaagatgaaagattcgtgcacccaccaggaacatcagacaagaaagaaacctttactgtgataatactgaaactgtggatttgtgtgtgacaacagttaacctcascctaactcacaggcagaaacacagcaagctcactgcatctcagagctgggattcaaacgtaatgctggggggctccaggcctctgttctttgtggtgcatcaggctctggccctaggaagagttctctttagatgtcagcagccccctcccttgtttccaaagccagattgcaagtgggtaagcccagagatagaggagatggccaagctaacatatacaggatagagaaatcttcctgctcaatggccatttccaagtttggggctcaggga

SEQ ID NO: 739203 - DNA, 497 bp, Homo sapiens
tgattgagttgggggtttggagaacatggttcctcctgccttctgagtccacttctgaatgtggacatggtggcaccagcttcattgtcttgacctgactaggctttggattgttttaatttgggttgttcaaggtgcacagttgaatgtagtcaggggccaagttaccagcttactaagaaccaaaagcccaaagcacatggatctgagtaagaggccaggagaactgtggagaaagaagcaaagccatccaactggacaatacaggaatgagtagagccaggggtgtgagctcaagataacttataaggtcrtgtgtatgcctaatcagtgtctattggtctagccagccagccaaccagctaatttttacctcttagaaaagggatttgaaaagtcttgacatctgatcataaaccagtggtttgccaccaatccaattcaattcaaagtgattcaattaataaaccaaaattttattcattacctgttgtaac

SEQ ID NO: 739204 - DNA, 529 bp, Homo sapiens
ctggaaagaggtgttgagcctctggacttgggttcctcatcctgggtggaaaattagagtggggactttggtaaatccctggcaaggctagtgtttcatccacacaagagactaatcctctaactctctacatctgtacccgtcaaggctgtgccagcttatgcagctgaaggtggtcagagcaaagtggagctcaccgttccacacttaggataacatcattcatggkctgtgtgccttggtgtccccaaatgaggcaagatggggttcatgttctttcatctgactacgtttcatcccaaagatgttatgtggctaaaaagagatagcagatggcaagctccttggaaagaagcaagtattatacaaagaaagcaatagttgtagtcaggaatctactttaagatagacttgaaacagcatgacttaagaaaagccacaaactggtttgtgtcttgagggaatctgaacttctaagtctgaattttgctaaacatcagggagagacaggatagcatgcacagagtgt

SEQ ID NO: 739205 - DNA, 602 bp, Homo sapiens
cagtggcagatcttctcattgggttctaatagctgctccacatgccagagccaccaaaagcctctctgccttgtccagttaagacaaagatgaacttctcaaaagttttttatgcccaaagctcttccaaaaccaaggggaagaaactctgtatataatgaaacctcaaataaagtcaatgacactgagaagtttacagagggctcctctcaataaatatccaagagggagagctgacagttgtcttgaccagtagagttcactgggctcagaaacaagggggggcctgtcctcaccccrtctggcttggatcagaggacctgaagtgctctagttgggaatgatggcaaagtttggtgggattgtcagtctttgtaaaaactttctcaccttctctttggatgtgggcctctcagtagacctatctggtcccaaaatgccatcccccaaacttcacacctatccccaatcagttttgcagatgttttagaggaatctccacttgtataggtagaatcatgccccctccccaaagatgtccacatcctaatcctcagaacttgcgaataggttacctaacatggcaaaagggacttggaaga

SEQ ID NO: 739206 - DNA, 578 bp, Homo sapiens
agcattttacacatcaccttatatgtacaactctagagatgggactttatctgaatatgaatgccctctgcagatgccttttgcaaaatactgctgtcactgaattatttccacagaatgtttcctcagccagattgggaagttgtgtgtgtgtctgtggggtgagggcggggtccagttctcatcctttctgaggttaccagggtgtcacccaccaggttcagtgccatcttgaagattccccctgccttcagtgtctcagatgttctttcaccrtgtctgtttcctgtatctctctaacacatgcctcttgactatgaaaattaagttagaaaactctctatttagagtttcatgagaatttactgggtttgtgcctttacatgggggttttacctgcagactcgcagaagagcttgtcctggggcagaccactcttcatcattttctagggatgattctgagcatgatctctcctcaggagccaaaaggtgcttagttactgccttcttagacattgagaggcattggaatttaatcagcaatgaatgattccaaactacttactgcgatgatgt

SEQ ID NO: 739207 - DNA, 578 bp, Homo sapiens
agcattttacacatcaccttatatgtacaactctagagatgggactttatctgaatatgaatgccctctgcagatgccttttgcaaaatactgctgtcactgaattatttccacagaatgtttcctcagccagattgggaagttgtgtgtgtgtctgtggggtgagggcggggtccagttctcatcctttctgaggttaccagggtgtcacccaccaggttcagtgccatcttgaagattccccctgccttcagtgtctcagatgttctttcaccgtgtctgtttcctgtatctctctaacacatgccycttgactatgaaaattaagttagaaaactctctatttagagtttcatgagaatttactgggtttgtgcctttacatgggggttttacctgcagactcgcagaagagcttgtcctggggcagaccactcttcatcattttctagggatgattctgagcatgatctctcctcaggagccaaaaggtgcttagttactgccttcttagacattgagaggcattggaatttaatcagcaatgaatgattccaaactacttactgcgatgatgt

SEQ ID NO: 739208 - DNA, 544 bp, Homo sapiens
tgcattattctgtgtgatttcttatctgtagttccatgttatcgaatgatccattaatttcttttacccaattatcaaatggaatgtgatacatttgtatcaattagttgcatattttagaaagcaagctttttaaagagcatcagatacatcgagcacactgaaatgtatacaaaataatataatatatatcctgaaaacattatatagataaataaatttagcattttttcrtatttatttgtttctgcttttttttaatagagaaggggtcttgctatgttgcccaggctggtcttcaactcttggcctcaagcagtcctcctgcctcagcctcccaaagtgctgggattacaggtgtgagccaccacgtgtgggcttgttttggtttttgataagcagataaggcaggttcagaaatgaaatacatctgatgtaattgaagcccctttggaaccccctcagactcagttcccttccctcattctctaggacatcactccaaatgtcatgtttattatagccactcacatttttatactat

SEQ ID NO: 739209 - DNA, 566 bp, Homo sapiens
taactacttcctctatcctagggcatcatccttccttgaggatttatggttctattttacaaaagcaagcaggcttggaaccatctctggttttctgccctgcagagcctttcctgagataatgagcaggggtgagctatgtttggcctagtaaaaggaaagtaggggacatctggggtgggtgggggtgttatcaaaatatctagccaggcagttttctatgcattaggaaataatttttttctctgtctgccacattaagactataaaatctgtgaaggctggacccacaatgggcagcatgcacagaaactggcaaatggtaagaacttagagagagagagagagagacagagagagagagggggrggggtagagagagaaagagggagagagagaataaattaactgctaaggctgcacagaaaacactgtgaactactcatttgtccaaatctttgacagaatgacacattaaccatctggaatatatgccctcttctctaaatctcatgaattccccatgtccctttgcaggttttccagtggttctcccataactgtca

SEQ ID NO: 739210 - DNA, 578 bp, Homo sapiens
ttaaagatcacctatcaaatctgggttattcttccaacagctgtgatatggtttggctctgtgttcccacccaaatcttatcttgaattataatccccctaatcctccacatgtcaagggagggacctggtgggaggtgattggatcatgtgggcagtttctgccatgctgttctgatggtgagtgaattctcacaagatctgatggttttataagcatttgacaatacctccttcacacactcccactctcttctgccatcttgtgaagaaggtgcctgcttctccttccacmaggattttaagtctcctgaggcctccccagccatgtggaattgtgagtcaattaaacctcctttgtttataaattacccagtctcaggtaatatctttatagcagtgtgaaaacggactaatacaagctgtatgtagtcactccttaattccttcattcatgtattaaatcaaatctagtagttaacggttcaaaagaaaggtcacaagtagtcacaggccagccctgtgatgtcaagtgcttctaaatgctgtttaattttgcaaataaacattctttgaggg

SEQ ID NO: 739211 - DNA, 638 bp, Homo sapiens
gcacatcatactcccacaatggcctgtgccccacacatccccaagcacagtcccctataggtccccacaatgatgcacatgagccccctacagatagcacacacatctcaacagtaggtgcagatcttagcagccaatccaactctgctagattgggataatgtgtgcaatctgaacacatcaggtcactgcactagggaaaataaataggaggccctcattccaggcctggctttgtgggattgaaaaaaggcacacaatcctaagacttctcctgtaagaaggaacaagagcagtagagtatgggyatccattgataaggtctcgagacctccagaatctagagagtctcactaacgaagctctcaccagtgacaagctcactggtgaaggtctttctctcttgaagccagtcagtaaaggctggaagaggtgactacttattcaaatgcaaagaaacaatgcaatgcttctaggaaaacaaagaatcaaaaaaacacaataccaccaaaagaacaaaataaagctccagagactgatcttaaaaaaaatggatacctatgaattgcccaacaaagaattcaaagtaattatctttaataaaactcagtgagccacaagagaagaaaatgatagaa

SEQ ID NO: 739212 - DNA, 638 bp, Homo sapiens
gcacatcatactcccacaatggcctgtgccccacacatccccaagcacagtcccctataggtccccacaatgatgcacatgagccccctacagatagcacacacatctcaacagtaggtgcagatcttagcagccaatccaactctgctagattgggataatgtgtgcaatctgaacacatcaggtcactgcactagggaaaataaataggaggccctcattccaggcctggctttgtgggattgaaaaaaggcacacaatcctaagacttctcctgtaagaaggaacaagagcagtagagtatgggtrtccattgataaggtctcgagacctccagaatctagagagtctcactaacgaagctctcaccagtgacaagctcactggtgaaggtctttctctcttgaagccagtcagtaaaggctggaagaggtgactacttattcaaatgcaaagaaacaatgcaatgcttctaggaaaacaaagaatcaaaaaaacacaataccaccaaaagaacaaaataaagctccagagactgatcttaaaaaaaatggatacctatgaattgcccaacaaagaattcaaagtaattatctttaataaaactcagtgagccacaagagaagaaaatgatagaa

SEQ ID NO: 739213 - DNA, 631 bp, Homo sapiens
tagaacactggttctgttaggaagatgcaaccccaccaagttctgactctttgactcaaaggtattgaatgcaaagaagcaatactggtcggaaatccattcttgcaggagtagggcagtaagtgaagctacatcaaattccagaagaggcaatggtggtgattctgctagcctgtgcaacttccagcatccatggyttgtggggtacaacagctgtgcctgtgcccagtggtggctgcatagggatttgtatagaatcaattatctgacatcattttagagattgtttctgatggtgtggcctctaaacacaagttgtgtaagtattctagaatacagttctttcctgcataaattagcctgggttggttcatgatgcttaaaattaagaactttgactagccatctacctttctaacaaatccaaaactttaatctactgatattcactgaatgcaagaaactatgttatgtgcttgagtgaagggatagcgtcaggggtaaatactgaaatgtaagccacaggcctgctctccaggggcaagcagcataaaacaactgtaaactgagaaggatgattgtagggctacatcaaagcacaagccttgcagtacagaagaagtaacaacca

SEQ ID NO: 739214 - DNA, 627 bp, Homo sapiens
tttgttctgaatgcatagaacaggacttggcccatataatagtaactttgatatttgaaattgggtaagttatttcactcttttaaccatttattcaaatcaggagttcaggcttatcctataacagtacccaaaaaggcaaatttaatctcctttatctttccacatgctattagctttcyaggtctcttctatgttagaaaacattgctgccaaataaaatgtattttgaacatatttaatactcggattgtttccctgcattttagtgaaattcaactgtcaaatggaattaaacaatgatataataggttaattcataacaaattttggatttctgaacatttgtccaagttccagacttagaaacaattttgggtagaagctcaaatatatgtttaattactttattgtatgatctgttatgtttgaaacttgagtttttctagaaagatcctggtagggcttggggattgtatgtttgactctagaatggcacatgtctttttctgtattacaggtatctctaaaaacttatgatcctacatttatttttttaaatagcactagccaataaataatccttacttttatggaatactaatttataaaaactgttgcccaaat

SEQ ID NO: 739215 - DNA, 627 bp, Homo sapiens
tttgttctgaatgcatagaacaggacttggcccatataatagtaactttgatatttgaaattgggtaagttatttcactcttttaaccatttattcaaatcaggagttcaggcttatcctataacagtacccaaaaaggcaaatttaatctcctttatctttccacatgctattagctttctaggtctcttstatgttagaaaacattgctgccaaataaaatgtattttgaacatatttaatactcggattgtttccctgcattttagtgaaattcaactgtcaaatggaattaaacaatgatataataggttaattcataacaaattttggatttctgaacatttgtccaagttccagacttagaaacaattttgggtagaagctcaaatatatgtttaattactttattgtatgatctgttatgtttgaaacttgagtttttctagaaagatcctggtagggcttggggattgtatgtttgactctagaatggcacatgtctttttctgtattacaggtatctctaaaaacttatgatcctacatttatttttttaaatagcactagccaataaataatccttacttttatggaatactaatttataaaaactgttgcccaaat

SEQ ID NO: 739216 - DNA, 617 bp, Homo sapiens
agtttccccttatgtaaaggaaggctgtttcgctaggtgttggatctccaggctttcttgtagctctgtcacttgctgtaaggaagaagctgagtgacctgagagtggcctttgagctctgaagagggacagggtgaactccttcagtggtcctaagccccttcccccataaactctgtatcagtttccattgctgatgaaaattaagggtcagcaaatactttctgtaaaaggctagaaggtaaatattttaggctttgagggccacattyccctgagccccagccagaaagaaattctaaatcctcccacaagccttgccaagcacctggaccttggacctttctaagctccagcaatcaacaagcatttttcagctcagcctctgagaagtggtcacatcccactgggacaggaatgtcctcaatgtattatttaggaaatgggctccggtcacactgcagttcaagaacagtcctgagcagaaactctaggcccttgtgggatggacccccactgacctttttccacctcccagtctctgcatggtgtctcctgctgcctgggacattcttgccccagatcctcccatgactgtctccttgtcattttgcaga

SEQ ID NO: 739217 - DNA, 825 bp, Homo sapiens
agatatgtactgtggtggccctggatggatcctctacactctgttgcattgcatcatagtattccattttgtgggtatagtgtattttatgtatccattcccacaactggacacttgagttgtttttagttgctcatgatcacagacaaagctgcaatgaatagccctgtacatgtstctgagtacacatgtgcaagcatttctcctaagaagtagtgggattactggtcatagggatgcacatattaaattctaccagcgaaattgccctctgagggtcctaccaatgcacagtcccaccagtagtatacaacaatgctcatttccatcatccttgccaccacttgctgtcagactagactttttttctaattgtcttctgtcttagtgtatttgggctgctgtaacaaaataccatgaaccaggtgacttacaaacaacaaaaatctattcttcacagttctggagactgggaagcccaagatcaaggtgctggcaaatttggtgtctgatgagggcctgcttcctggttcatagatggtgcctttttattgtgttctcacatggtggaaggggctagctagctttctgaggcctcttttataaaggcactgatctcattcctgaaggctctgtccttgtgaactaatcacctcccaaatgccccacttcctaataccattaccttggtaattaggtttcaacatataaatattggaaggacacaaacattcagaccacagtatcttcccccttcttaatgtacccctggttgactctattgctctggggttgttcccaacctattgttttattttgttcctg

SEQ ID NO: 739218 - DNA, 638 bp, Homo sapiens
taccctataaaaggtattactagaaaaaaaatggctccaagtgaggcttgtcccagagttcaaaaatgccacaaaagaccaggtggtgctctcctttcactctgccttccatggttttttatttattcttatttatttttagttttagtttttgagatggagtctcactctgccacccaggctggagtgcagtggcgttatctcggttcactgcaacctctgcctcctgggttcaagcaattctcctgcctcagcctcccgagtagctgggactacaggcacgagccaccacgccctgctgatttttgtatttttagtagagatggggtttcgccatgttggccagggaactcctgacctcaggtgatccacccgcctcggcttcctaaaagtkctgggattacaggcgtaagccactgcgcctggcctccatgttgtttttccactcatctttaagctctcatggccgtcctgggtcaatgaggttgtgagcaaaatggctgctgcagaccaggcctcttacctcatcctccaggagaactaagagcaactctgttgcccgcgcctctcacaactcctaagactctctcttattggctcacattgggtcatgtgcccatctctgaaccaatcactgc

SEQ ID NO: 739219 - DNA, 587 bp, Homo sapiens
tgaaacctggaagggtacatatcaactaggcttattttcaggagttagtcttataagtggtttttatttatttaatgctaatgtggatttctgcattttccttattctaagtttgaaaagtaatactcatcaaaaatttcaaagaattcagacctacgtaagttaaaacaaagggttctaccccactgcactctctcaactccctccttggatgcaacacatgtcaatttagtgtatttctttgcagacccttttctatgtttgtaaatacaaactttaaaagtaattttccggctgggygaggtggctcactcttgtaatcccagcactttgggaggccgaggcaggtggatcacctgaggttaggagttcgagaccatcctggccaacatggtgaaacctcgtctctatacaaaaattagccaggcatggtggcaggtgcctgtaatcccagctacttcggaggctgaggcaggagaattgcttgaacctgggaggcggaggttgcagtgagccacgattgtgccactgcactccagcctaggcgacagagggagactccgtctcaaaaaaaaaaaaagtaattt

SEQ ID NO: 739220 - DNA, 640 bp, Homo sapiens
taggaagatactggacctcgtgtgggatatgtggaaggatccagaagggaaggaagaaaacagaaaaaataaggatgtggagagtgaaagacgatgcagaaaatgctggctcagggtgattttccaggctagatggcatacaaaggtcctcctggttggctgtgtgataagcaggcaggyaaatctcaccagtgagtggggaatccagcttgggcatgaagggaggtttaaaggccccagagtgcccaaggtggtagacagttgcacacgaggtccatagatccagcattgaacaacacagaatcacatcatgataaagttatttcttttcaatgctctcactgcttgtaacaaagaagagtcttagtctgacaatgatgtgctttactccctctttctaatctcttcttgcagtaaagaggtgacaggcctcaggctcgaggtctgaagcaggcaacaagtccagacggaatttagtaatcctattttgttttacttgtaagtacttttttttgtgatcaccttctgtttacggcaaattgaacgtctcttggaaacctggaagggctggcaagttcaggctttcttttcctcattgccacaatttactgggatgaagagtggtttctcactttaagtg

SEQ ID NO: 739221 - DNA, 640 bp, Homo sapiens
taggaagatactggacctcgtgtgggatatgtggaaggatccagaagggaaggaagaaaacagaaaaaataaggatgtggagagtgaaagacgatgcagaaaatgctggctcagggtgattttccaggctagatggcatacaaaggtcctcctggttggctgtgtgataagcaggcaggcaaatctcaccagtgagtggggaatccagcttgggcatgaagggaggtttaaaggccccagagtgcccaaggtggtagacagttgcacacgaggtccatagatccagcattgaacaacacagaatcacatcatgataaagttatttcttttcaatgctctcactgcttgtaacaaagaagagtcttagtctgacaatgatgtgctttactccctctttctaatctcttcttgcagtaaagaggtgacaggcctcaggctcgaggtctgaagcaggcaacargtccagacggaatttagtaatcctattttgttttacttgtaagtacttttttttgtgatcaccttctgtttacggcaaattgaacgtctcttggaaacctggaagggctggcaagttcaggctttcttttcctcattgccacaatttactgggatgaagagtggtttctcactttaagtg

SEQ ID NO: 739222 - DNA, 640 bp, Homo sapiens
taggaagatactggacctcgtgtgggatatgtggaaggatccagaagggaaggaagaaaacagaaaaaataaggatgtggagagtgaaagacgatgcagaaaatgctggctcagggtgattttccaggctagatggcatacaaaggtcctcctggttggctgtgtgataagcaggcaggcaaatctcaccagtgagtggggaatccagcttgggcatgaagggaggtttaaaggccccagagtgcccaaggtggtagacagttgcacacgaggtccatagatccagcattgaacaacacagaatcacatcatgataaagttatttcttttcaatgctctcactgcttgtaacaaagaagagtcttagtctgacaatgatgtgctttactccctctttctaatctcttcttgcagtaaagaggtgacaggcctcaggctcgaggtctgaagcaggcaacaaktccagacggaatttagtaatcctattttgttttacttgtaagtacttttttttgtgatcaccttctgtttacggcaaattgaacgtctcttggaaacctggaagggctggcaagttcaggctttcttttcctcattgccacaatttactgggatgaagagtggtttctcactttaagtg

SEQ ID NO: 739223 - DNA, 373 bp, Homo sapiens
accttctgtttacggcaaattgaacgtctcttggaaacctggaagggctggcaagttcaggctttcttttcctcattgccacaatttactgggatgaagagtggtttctcactttaagtggggagttctctagaattacccccgctttctttttgtctctctgaaggaaattagaaaccatcttctgccaccacactcactttatgggtgtgtcacatgcggtatgtcaagkgttacagctcaggtttgttagcgtctcatccactggaggaaggattcttaatcatatatgggcattggcattgccagggcagcttttgctaaatgcttataggaattgtttagaagctctcccagtgcctctgataagcac

SEQ ID NO: 739224 - DNA, 538 bp, Homo sapiens
ctactaacaaagaaaaagaaaggatgttgaaaagacataaacagcagatgccaactatatccggtgagaatcttcccagatacatctaaaactacacaactgtttcctttttggcttgttttaggaatacgggttggagagataatttcgtatctgcagttggcgagcctgagtctttgagatatcaaagtgacacaattagagtttcaggatgaattctcgatcggcattgtaatccagagaacrtaagatttagactcttctctaagactttggaacttattgtctagcaggctgaggtaataggcagcactactccatttggaagatgcatcttattttcttgagactcggggaaatcttgattttgaggcttgaaatgtttcccagaccctgtgtcaaaccagtgacaggattgtgtgtttccgagtgtaaactattagctggtggacccaggtatttcctaatgaggccgatttaaatagaatacttcttgggatgagaaaatggatccgtctcttcaatggtagtttttttc

SEQ ID NO: 739225 - DNA, 633 bp, Homo sapiens
catcaatctcaatatagttacatcacaacttttggttaatcaaatctgtggttatatttctaagactgtgaaaatattgcttattactgaatcaagtagtgtagtataattatgtcctattcttgagaaagtgtttcatttttttcctttgctaagttttcaatgtttccaaggcgttttctccgtccccaacccatgcgcagtacttctatatatctgtccattttaaattaatatttctctcaactatatcaaataattgatcagctccctgcrcagagaccttcatattgatgttggcctcttcctgtcctcctcttctctggtttctttctaggactggtactgacattttctatcactggctcctctgtttctaagttgatgtttttattttgctaaaacatatccaccagtagcttcctaaaaaaggatgcataaggggtaaattttttgagtcattgtatgtgaactctctttagtctgtcctcatactcaattgagagtttgtctagatttagaatgtcagtttgaaattaattttgcctcagaattgagatatagctccattgctttctagcattcataattgctattgagatgtctgatgtaattctttgcatctttgtattc

SEQ ID NO: 739226 - DNA, 519 bp, Homo sapiens
ccggcctccttctagctctgtcagacacttggccccttctgggtactctggcagagtttggtaccattctctcacactgaagagagaccctcataggtagaggcattgcaagctgcaggctgtggctcacattgcaatgtagctgtatcagccatgatttttagttacaggcatcagccaactctggctgactgaagccgaagagagtttgatgcaaagaacactgggtggctggagaatcagtaggaatgctgacagtaaggctggagaataagcagcctggagcagcaccgagaatcacayggtggaaggagtctggagaaacttctactgcttcagccattgaatgttgggcactatcattggcatcacagtcacctctgtgcacaaacttgaacctgcagtagggagacagagaactccacccttcctgtgtctagctccagagtcaaaacccagggtggcacatggtggatggatcctgtgtacagcctgtgcctggctgcaaaggctgctggg

SEQ ID NO: 739227 - DNA, 616 bp, Homo sapiens
gaaattaataaccagtttacaaattaaaagaagtactatatacaagcacatttcatgctatgtgcctgcctcatgaatcatcaataaaggtaagtttctataccgtcattcccctgtacaggagaaaaatatctaactttgaaaatggggtatgaataaaattaaagatttcttgtagctccaagttcattactatgtgacatattatttcacattayataataacaattattacttccagcgataaagtttttagtaagtgttttttagtggctacagagtagttttcttgttaaaaatataatagccttaattatattccaacgtttaggttagagaaggtcttctccaatgctgcgtctacaatcatcatcattttgtatgacttgaggccattcaacatcaaatcaatctacctggaaactcaagtctgtggagaaggtcagagtatgcccaattatcaaacagatccatctgctttttccctatccaagaatatgacaaggaaaagtctagggattcaacttttgctttatatctgctcttgacaaaggactgaacacataggagtgttgaacattctttggggaatagaggcacacaggagggacactgt

SEQ ID NO: 739228 - DNA, 540 bp, Homo sapiens
cttcagaaatatcttgtctctgagaatctatcctaagcaaatacagaaaaatctatatgcgtaaagtgtgcttttacataaagaatgcatatatgcataaagaatggtacttttacaaacaagcattgattagaaagcagcttaactatgtaagtataagtactcgaactgcwctaaaagaaaaaaaaaacagaattatatgagaaaatgcatgtagaaactattacatacctatctaatcttcatggccagatctttttggtacttttcttcctgagttcctgagttcaccttctatcctgctgttgttcaacctacatttccttgccataccttctcctgctgtaaacctctaggtatcagggtgcttcaggtttctgtccttgctatatttattccctaggggatttcatccagtcacaagactctatatctctacattgaaggctctccaaattttcctccaatgctgatctgacctcccagttccagacttctatactgagctgcctgcatggcatctatgctgcgtccagtaag

SEQ ID NO: 739229 - DNA, 625 bp, Homo sapiens
ttagcacatattgtgttacataactggtttaatagctacattgcagtccattaaatggatataacttaattttttttttcttttctttttgagacagagtctcactctgtcccccaggctggagtgcagtggtgcaatcttggctcactgcaacctccgcgtcctgggttcaagcgattcttctgcctcagcctcccaagtagctgggactacaggcatgtgccaccacgcccggctaattttttgtatttttagtagtgatggggtttcactctgttagccaggatggtctcgatctccygacctcatgatccgcccgactccacctcccaatgtgctaagattacaggtatgagccaccgcgcctggccataactttatttatttaaccaatctgtggccaatcatcatttaggctttttctagtttttcactgtaacaaacaatgctgtaataaatatccttgtgcatatgtcattttacctgtatatgagttcttcacaattaattcctaaaagtataattgctcagagattatacacattttaagtttggatatacctgggtcaaaccagttttctgtttctgtttttttttttttttttttttttttttttttgagacg

SEQ ID NO: 739230 - DNA, 590 bp, Homo sapiens
atctctgtatggcctggtttttcctaggttataattgtagagcaaggattattataatattggaataaagagtaatgctacaagctgatgattaatattcatgtatcatcatatctataatctatttctagtataactattctgattttttatgttttctttattacactggaacaacttgtgccctcagtctcttgtcttggcacccgggtggcttgccgcccacatctcccccctttttattaactaggatcaccatcaccatcattgcttgtcattgacttcggacttttcctcagactctttggaggcatctgcaggcyaaaagtagacaacacaagcatgccaatattaataatgccagggacaacaatgatcctccaaggggtttgatccatttaaagggattaagatcagataatcctttagttattgtttcaaaaatgtctgagccaggaacagtggttaaatgagcctgtgaggcctcaaaaatttgttcctaagttttgaaatatctaaggttaagttatcatcccaggcttttaaatgtcttgagaccttttcccagctatgttgatctttattataag

SEQ ID NO: 739231 - DNA, 590 bp, Homo sapiens
atctctgtatggcctggtttttcctaggttataattgtagagcaaggattattataatattggaataaagagtaatgctacaagctgatgattaatattcatgtatcatcatatctataatctatttctagtataactattctgattttttatgttttctttattacactggaacaacttgtgccctcagtctcttgtcttggcacccgggtggcttgccgcccacatctcccccctttttattaactaggatcaccatcaccatcattgcttgtcattgacttcggacttttcctcagactctttggaggcatctgcaggccaaaagtagacaacacaagcatgccaatattaataatgccagggacaacaatgatcctccaaggggtttgatccatttaaagggattaagatcagataatcctttarttattgtttcaaaaatgtctgagccaggaacagtggttaaatgagcctgtgaggcctcaaaaatttgttcctaagttttgaaatatctaaggttaagttatcatcccaggcttttaaatgtcttgagaccttttcccagctatgttgatctttattataag

SEQ ID NO: 739232 - DNA, 600 bp, Homo sapiens
gcaaagcttgcctttcaatttctgacgtttcttcgccttttgtttctgagagctttttatctttgaagttatagtgcaatttcagttgccgggagggaacccacacgggttgttgtccttcttttgggcaaacacagcaaaacccctaccccatgttaccacagtgcctgattcctgtttstcagttttgcatctttccaccatacccgcttttcctttttgtggatcaaatttatttccagtgaaatgttctgctgctgtaaaaggttgatttcttactaaatttaagaaatttagtgtaaaaaagcagcactagtgtagccggggccgtcattagtttttagtttctcgggacagcccataactgagaaagatgaaagtatgtgtcgtttaacatgaaccatatactttcccttgtttgacaagtgacccagataaaatgagaaaaggtgtcaatagttaatgtataaaagagagtttgccgaaagtaggataatgagtcacatccatttgccagagagcattttgtgaaagtcctctaggattaactcctgaagaaagtggctgtaacattaacacttgacaagtaggacagtgatg

SEQ ID NO: 739233 - DNA, 563 bp, Homo sapiens
ttttctccattagcactttggtgccatttatttagaacctatgggagcccttaatattttaaagatgtacacccatttggggagcatttttactgcaaatgcaaagcattttccaggctttgttctagactaatgctcattcactttcttttagaagctgctactcctttgaaactcatgttacttgccttctcctactcctaatgttgtctgtctgtcttccagattccgtcacaaataaatgtaggcaaaatataaattattacagtacagctattatggaaaacagtatagaggtttctgaaaattttaaaatagagctaccatatgatccaataatctcaccactgrgtgtatattcaaaggatagaaaactgatatttcaaaaatatatcggtatgcccgtgtttattgcagcattattcatagtagccaagatatcaaatcaacataggtgaccatcagcatatgaaaggatagtgaaaatgtgggatatgtacataatggaatactatttggccttataaaggaaggaaatcctgtcattggcaacaacttggatg

SEQ ID NO: 739234 - DNA, 550 bp, Homo sapiens
cccaaacagcatggtactggcataaaaacagacacatagaccagtagaataaagaacccagaaacaaatctgtacatccacagtgagcacattttcaacaaagctaccaagaacatacagtgaggaaaggacagtctcttcaataaatgctgctgggaaaactggatatccacatgcagaagaatgaaactacactcctatgtctcaccgtatacagaaatcaaatcaaaatggattaaagacttaaatctaaggcctcaaactatgaaactattayaagaaaacattgggaaaactctctaggacattggactgggcaaagatttctttcaaatatcccacaagcacaggcagccaaagcaaacttggacaaatgggatcacatcatgttgaaaaggtgctgcacagcaaaagaaacaatccacaaagtgaagagacagcccacagaattggagtaaatatttgtaaactatccatctgacaagggatgaataaccagaatatataaggagctcaaacaactctataggaaaaaaaataataatctgac

SEQ ID NO: 739235 - DNA, 577 bp, Homo sapiens
caactggaactttcatacactgccagtggaaatataaaacactacacctactttggaaaacaatttggcagtgtgttaaaatgctacacacacaactaatatatatgatccagccaccccattcccaggtatccaatcaagaaaaatgaaagcatattttcataaaacacatataccaatgctcagagcagctttaatttattttatttatttgtttgttttattattttttcgagacagagtttcgctcttgttgcccaggctggcgtgcagtggcaagatcttggctcaccgcaacctctgcctcctgaattcaagcgattctcctgtctcagcctcccgagtagctgggattacaggcatgcaccaccatgcccagctasttttgtatttttagtagagacagggtttctccatgttggtcaggctggtcttgaactcctggcctcaggtgatccacccacctcggcctcccaaagtgctgggattacaggtgtgagccacggcacctggcctaagagcagctttatttgtaacagtcaaagtggaaataacccaaatgtctatcaaacacatg

SEQ ID NO: 739236 - DNA, 535 bp, Homo sapiens
aaaaggataaagaaatacgtgaggttaagaaagataacacagaaaccaaaggagaaaaaagaaaaaaaaaatatgaagaatagttatgacccaccaataattatctggcaattctggagcagaggttcctatctagctgtttcattaaagtaggatgaaaagctgaagtatagctctccaattatcaggctttagaacgtttttttaaaataaagctcratttcatctctaactagtttttgtgccttttacgagatggaggtctcagtgttacctaggctggatttgaaatcctggcctcaagtgatcctcctgcctcactctcccaagtagctggccctacaaatgcatgcctctgtgcccagctactctagtttttaaaacatatttcactgtaatgagaaaagcttatttcctatctacttctacaacagtaagaatggaaaagctttcttcactctgtctgaaagagccaggaggtcaaaaacaaagtaccgtgatacccatgattcttgctaccttcccccacccccac

SEQ ID NO: 739237 - DNA, 616 bp, Homo sapiens
gggccttaaaattggatcttccatctttagctaaacaataccatatgagctcattaaaaggatccagtgagcttgtccaaagacattatggttttgattattctccttctcattatagaggagagcaggtggtgctttccagataaatcgaatgaggcagacttccatgaaacccttgaaggacttagtctgtgctccttcagttggaaaaaaatgaggaagagtccctgacttacacctagaaactgaggctggagctgcctatgatgacagagtgatgagacagatttggagraaaagaaacactcttggtcattctctcagtgtggtgcagtggttccaagtgtagtttctgtgtctctactggttaagtccatatttcacatccaccacttattaactaagtgttcatggttgcgtaactaatttttctgtggctttgtagaaataattcaaatgagggttgtgagaatgaaatgagttgaagtatggtgagtgcttgacactgggtttggcacatagtgagtgctagctttgattgttatttcttcctgacaagttaaagtagacatttgcatggctcccagaaggtagctggatttgagttatctggaag

SEQ ID NO: 739238 - DNA, 616 bp, Homo sapiens
gggccttaaaattggatcttccatctttagctaaacaataccatatgagctcattaaaaggatccagtgagcttgtccaaagacattatggttttgattattctccttctcattatagaggagagcaggtggtgctttccagataaatcgaatgaggcagacttccatgaaacccttgaaggacttagtctgtgctccttcagttggaaaaaaatgaggaagagtccctgacttacacctagaaactgaggctggagctgcctatgatgacagagtgatgagacagatttggagaaaaagaaacactcttggtcattctctcagtgtggtgcagtggttcmaagtgtagtttctgtgtctctactggttaagtccatatttcacatccaccacttattaactaagtgttcatggttgcgtaactaatttttctgtggctttgtagaaataattcaaatgagggttgtgagaatgaaatgagttgaagtatggtgagtgcttgacactgggtttggcacatagtgagtgctagctttgattgttatttcttcctgacaagttaaagtagacatttgcatggctcccagaaggtagctggatttgagttatctggaag

SEQ ID NO: 739239 - DNA, 622 bp, Homo sapiens
agagaactactgcctcttcactaatacaaccagctagcctcagttctatctgccagtcctgtttttgccttcttctcctggttggcagtctccctgctttcaggcccactttaagccctttgactctggctaaaaaacagttgcctcatcctacagtatttagcaattcaaaacatccttaggccactgagctaaattttccctttggtagtttctaagtttaatgtctttcctaatctcactgcccccatttcttccttaattgtgatcctatagagtttgagttcttacattataagtagtaaataacagaagttgcaacatacttcaggcactttgaaagtagctcatgtgaaaatcaccttgagataatgctgagaatgctgagaatactagtctgaagagccctaataataaragccccagtaatagagatgcccagtggggtagtctttggggagaggagagcagtgatacaattgttaatcagccccagtgttgagagttcagttccagttacccagaagccattgccctaaactttcagcagtttggtcttttcgcctttcctctgtccctcagtgtctccctccccacttttcatccttcatactgattttcc

SEQ ID NO: 739240 - DNA, 596 bp, Homo sapiens
ttgagactgtacctaaggaaatgagtcaaaaggaacaagttgatataaactagacatagtaagtacatcaaacactagcaaagactatgaaacaggtacaccggaggactgaacagctgccattgaattcagcagaaaggtaaatggatctaaatggctataggaaaaaaggagatgcgcgcttaaaagaactaaacttcctagcckcaatgttaggagaatcactggaatgaattatagtgaaagttgtgtaccttctttctctgaacctttctgaaaagtgaaaagacaggagaaggacaaggacaagttagctgtcctcatttgcagtgttcactccatatgtctcctcctgacagatgctttgaaaagctttatcttgactggtttgtcagtgtaagcaccttctcatctcaaggttttttgcacaaagactttaattggttaagccaatttgtagttgtaactacaaatacccactttgcagcaagagctgaatcacaaatcacttttaaacattattttctaatcatagaaaatggattggggagacagagagggaaaaaacagatacgtaatctgtttgaagtgactta

SEQ ID NO: 739241 - DNA, 592 bp, Homo sapiens
gggaagcttgactaaatggtggatgacctttggcacaagacagtcatttgctaggaatgaacacagactacctttatgggaaagagaatagagtatgacaaatttcagccaagttcaatgtcagagatgagagaacaaagatggatctagcattaagtggttaggacagcaggagaattaaactagagggccagaaacaggtgtttagcaaatacaaggctggaattgtggctgaaattccagaccaaaggcaatatagcctatcttcctccttcctgcccttctttctctcccttcttttctttattttttctgaagacaggcacaaacaagacctttctgaagtcttataactgatggtagctgaaaacaaccaagggtatcagaagtacagtgttcattttaccagccaaacttcttcctktcagttatctcaaaatccagcttaccgcttgtattagtccacattcacactgctataaaaaactacttgagactggataatttataaagaaaaaaagtttaactggttcacagtttcacatgtctctggaggcctcaagaaacttacaatcatatcagaaggcaaagg

SEQ ID NO: 739242 - DNA, 542 bp, Homo sapiens
agatttctatccttacgaagacttccgtgcaaagttggcccttggttgacgtctgggaacatgactagtaaacagttccctacactgatataaaacctttcctaaacaataagtgaggctcactgtgcctaaatttattgtataaataatgtggtttatggctgggtgcagtggcttatgcctgtaatcccagcactttgggargccaaagcaggcagatcactttaggtcaggagttcaagaccagcctggccaaaatggtgaaaccccgtctctactaaaaaaaaaaaaatacaaaaattagcccggcatggtggcgtattcctgtagccctagctattcgggaggctgaggcaggagagtcacttgaacccgggaggtggtggttgcagtgacccaagacaatgccactacactccaggctgggcaacagcgtgagactccatctcagaacaaacaaacaaacaaacaaacaatgtggtttatgctgaacgcctgctttccttctgggagtctggatttttggaatgtgctaggcagag

SEQ ID NO: 739243 - DNA, 627 bp, Homo sapiens
ccaagaagttcatccagcagcactcagactgatatgtcaaaattaatcataactggcggaaacccggaggtactaacaacagggttcatagaaggttcaagggccagaccttgatgcccaacactggttatgagagcagcaaaaaaacaaagcacatgctgcccagtggcttctggaagttcctgatctacaacgtcagggagctggaagtgctgctgatgtgcaacaaatcttactgtgctgctatcactcacaatgtttcctccaagaaccgcaaagccatcctggaaagaggagcccagcgggccatcagtcaccaatcccaatgcgaggctgtacaacgcagaaagtgaatagacagcttatgtgcacgttttgtgtttaaataaaaccataaaaactgtaaaaaaaaamaacaacaaaaaacaaacaaaaaaaccccctaaaaacaggattaccatgtggtccagccattccactactgggtatataccaaaatgaaagtaaatcaatatatcaaagagatatctgcactctcatgtatatttcagcattattcacaatagccaaaatatgaaattaacctaagtgcccatcaacagatgaatggataaagaaaatgtgatg

SEQ ID NO: 739244 - DNA, 628 bp, Homo sapiens
tgtctatacatttttctttgtatcacaaattctaggaacatgaagataatggcttaggtagctagtcaggcataaaatgccttttaaataattgccccaggctgggcatggtggctcacacctgtaatcccagcacttttggaggctgaggccggmggatcatctgagatcaggagttcgataccagcctggccaacatggtgaaactccatctctactaaaaatacaaaatttatctgggcatggtggtgtgggcctgtaatccaagctactcaggaggcggaggcacaacaattgcttgaacccaggaggtgaaggttgcagtgagcagaggttgcacaactgcactccagcctgggtgacagagtgagactctaactcaaaaaaaaaaaaaaaaaagtaaaagacttaatttttttttctgtggaaataagggaaggcacagctctgacctctcctttttctttcagaatttaatcctctgtccttttcaaatgtatgttacatctttataatggctaaataaacctcttctcagtctcacaatttaggacctgggagtcatgtttcaaaatgcgtattcaagggagacagctctcatagttcttctgggagggtaagaactgaa

SEQ ID NO: 739245 - DNA, 650 bp, Homo sapiens
aatacgtttaataataatactacaggctgggcacagtgactcatgcctataatcccagcactttcagaggctgaggtgggtggatcacctgaggtcaggagtttgagaccagcctggccaatatggtgaaaccccatctatactaaaaatacaaaaattagctgggtgtggtggtgggtgcctgtaatctcagctactcgagaggctaaggcaggagaattgcttgaacccagcaggcagaggttgtggagaatgaagatcgcaccactgcactccagtctgggtgacagagcgaaactctgtctcaaatamtaataataataataataataataataatagtaataataatacaaaagtgaggaaaagggaatagagctgtaagaaaaataacctttctatagataaaaaattaagcaagtataaatctgacactgattttgatcagaaggttgcatgttcatgttatgttggggttaaaaaaaatttatggtagaccctagcgcaatcacacaaaaaaaatactcaaaaaagaagtcaaaaatgattaaatttaagtgctacattagaaaatatccactcaagaaaaagcagtaacagagaaacaaaaaaagacatgagacatacagataacaaaaaataaaatagac

SEQ ID NO: 739246 - DNA, 643 bp, Homo sapiens
acatgacagtttcttctgaagatgaacatacatgtactacattgagagtagattagaaaaaaaaagcattgttaagaaaaggaagcattttattttgcaaaatactgtgttactaaggtaaccttttacctcatgatgggggtaaagagttcattcattccttcattcaagaaatggttactgcgtccctcttatrtgtctggcactgtattaagttttgactgagagtttaacagcactattcttgtggaacttacattctcaagttgttgctgtgttaaaaatgtcttagtagttagaggaggtctgatcgctcagctttatctgtattttctattgcccaggaacaataacaaaaaactgatagtcatactgtagaatatttagacaatatatgtgaaatgtacaaaaggagtttgtttgagagtgtttggctgtctaaataaaccttttaaatcactttaatgtgaaatattttatatatgttattcctaaaaataacaatatgtttcctttttacagttatcagtagctaataatcggctggttcggatgatgggtgtggccaagctgacgttgcttcgtgtattaaatttgcctcataatagcattggctgtgtggaagggctaaaggaactagtac

SEQ ID NO: 739247 - DNA, 567 bp, Homo sapiens
agcacaccaagaccactggccgccgtggccgcaccgtgggtgtgtccaagaagaaataagtctgtaggccttgtctgttaataaatagtttatatacctatgaaaaaaataaaaaataaaaaaaataaaaaataaaaatacaaaaattagctgggcgtggtggcccgcgcctgtagtcccagctacttgggaggctgaggcaggaaaatcacttgaatcggggagacggagtttgcagtgcgcccaggtcacgccactgcattccagcctggcgacagagctccatctcaaaaaaaaaaaaaaggaaacyattcataaaaaaaaaaaacttatacttccaacttagtagactgctcgacaggaattaaaattcagaatattctctagttaagcccctaagacaaacttgacagtgttttcaaaaaagtgactatctgccacaaaattaccaattttgcaatatccatggtatgacatattttaactatgattcctatgcacaatttcattaaaaatatctgacattcaaaaatggcttaaacttaacagcactactttcttgtaacg

SEQ ID NO: 739248 - DNA, 567 bp, Homo sapiens
agcacaccaagaccactggccgccgtggccgcaccgtgggtgtgtccaagaagaaataagtctgtaggccttgtctgttaataaatagtttatatacctatgaaaaaaataaaaaataaaaaaaataaaaaataaaaatacaaaaattagctgggcgtggtggcccgcgcctgtagtcccagctacttgggaggctgaggcaggaaaatcacttgaatcggggagacggagtttgcagtgcgcccaggtcacgccactgcattccagcctggcgacagagctccatctcaaaaaaaaaaaaaaggaaaccattcataaaaaaaaaamacttatacttccaacttagtagactgctcgacaggaattaaaattcagaatattctctagttaagcccctaagacaaacttgacagtgttttcaaaaaagtgactatctgccacaaaattaccaattttgcaatatccatggtatgacatattttaactatgattcctatgcacaatttcattaaaaatatctgacattcaaaaatggcttaaacttaacagcactactttcttgtaacg

SEQ ID NO: 739249 - DNA, 578 bp, Homo sapiens
gcaggggctgcctcaggcagggccaacgtatccatgaggcacgggagacccagggctgtgatatttgcagggtcccatgaaaatgttctaatgttaactgcttgtaaaagcaaagaaaaaaattaaaaagtaattaatgggccatgcacggtggctcaagcctgtggtcccagcactttgggaggccgaggcaggcagatcacgaggtcaggagctcgagaccagcctgaccaatatggtgaaatgccgtccctaccaaaaatacaaaaattagccaggcgtggtggctcacgcctgtaatcccagccactcaggaagctgaggcagaagagtcacttgaacccgggagacggaggttgcagtgagccaagatcatgccactacrctccagcctgggcgacagagcaagactctgtctcaaaaaaaagtaataatgaacatataataatgagtccaacccaggatatattcatctttagaccaaggcaatggtaaaattgaattaagaatttttttttccacggaggaaggaacgcacaaaagccacagtgtggcccttgctccagggattccgtctg

SEQ ID NO: 739250 - DNA, 519 bp, Homo sapiens
ctgggtagctgggactacaggcacatgccaccatgcctggctaaattttgtattattagtagaaacggggtttcaccacattggccaggctggtatcaaactcctgacctcaggtgatccacctgcctaggcctcccaaagtgttgggattacaggtgtgagccatcatgtctggcctaaaatatttttcttatattgggtcatagaaaaaaaaaagcctcttttttaaccactttgtctaaaactgaagttgccaaagtgatcttatcattgcccaaatgccaggcatatctcagttctcatcttctttgatcctttggtggaatttgatactttcctctactttcatcatcaaaaaaygcttgccttccctggcctctgagctctccctttctcctggtagttccatctctccaacaatcctcattctagcacctaaacattgatattccctagagttctccaggacccacttttcttcttgctctatcctcttggcataaaaaaacagcttcaacc

SEQ ID NO: 739251 - DNA, 558 bp, Homo sapiens
tttatctacctttggtctttgatgatggtgacatacagatggggtttttggtgtggatgtcctttctgtttgttagttttccttctaacagtcaggaccctcagctgcaggtctgttggagtttgctggaggttcactccagaccctgtttgcctgggtatcagcagcggaggctgcagaacagtgratattggtgaacaggaaatgttgctgcctgatcgttcctctggaagttttgcctcagaggggtacccggccgtgtgaggtgtcagtctgtccctactggggggttgcctgcaagttaggctacttgggggtcagggacgcacttgaagaggcagtctgtcagttctcagatctcaagctgcgtgctgggagaaccactactctcttcaaagctgtcagacagggtcatttaagtctgcagagatttctgctgccttttgtttggttatgccctgcccctagaggtggagtctacaaggcaggcaggcctccttgagctgtggtgggctccacccagtttgagcttcccagctgctttgtttacctactcaa

SEQ ID NO: 739252 - DNA, 586 bp, Homo sapiens
agtggtgggcagggccaatataatcccaagattatatgccttttgtcttctgctaccagagaggatagggaaggaccatcaggtgggggtggggctaggtgtgtgtgagctcagactctccttgggcaggtcttgctgcagctgctgtggggaatgggagtgagatcctcaggtcattggagttgtgtacctagcaggataatggctgcctttgctgagtcatacaggtcatcaggaaagtgggggaaagctggcagtcacaggccttacccagctcccatgtaaactgaagggccggtctcattcccaccatgtccttcaccccaacagcsccgagtctatttccaggcagagggcatgatgggcttgaaaacttgccctgggctaccagccttctagctgtgaaagaaaagggattggttcctcccctgcctatggagtctgcacactggattcgcaccctcccccaagttctggccagaaggctcctcacccctttcaaattgttgcaaagttcagctagagatgtcctttttcctgtggagtttcaccccctactcctctggtcaccctcccgatggatccc

SEQ ID NO: 739253 - DNA, 647 bp, Homo sapiens
catatatttatctagatcctgccttgttctaaaaagatttgaagtgcctcgtgtgttcaacaaacgtgtacaatgaattaatcaattaatgggctaatggatgtgagagtgctttgaaaagtataagatgaaacagatatatttctttatgagaatagtgaccmaggaaggctgagtggtcctttcaaagagcagagaccctcctaggaactctgtcccggggaggggcgattttatcttaagaccagctgatgggccaattgatctgtgaaggtgacactattcagcatgactttttaaaagggattccaatttccagagtttttaaatgccaccctgaagttcctagcaaaaagtcatcggtttctgtaggacagtcagcctccagactcaagctatgagaaggggcttctctaagtaccttctcccatccaccccagattgtcccaccacccgctgcctggccctcttagtaacttgtgcagggtgagcccaccctggtcttcctatgaaattctcaagtcacaactaaaggttctgagggacttgagtctgggccccagtgacatgggattggggactggggggacttgggggactggggggatggctatatgcaaggcccacagtgagcggcagctctgcag

SEQ ID NO: 739254 - DNA, 659 bp, Homo sapiens
ttgttctaaaaagatttgaagtgcctcgtgtgttcaacaaacgtgtacaatgaattaatcaattaatgggctaatggatgtgagagtgctttgaaaagtataagatgaaacagatatatttctttatgagaatagtgaccaaggaaggctgagtggtcctttcaaagagcagagaccctcctaggaactctgtcccggggaggggcgattttatcttaagaccagctgatgggccaattgatctgtgaaggtgacactattcagcatgactttttaaaagggattccaatttccagagtttttaaatgccaccctgaagttcctagcaaaaagtcatcggtttctgtaggacagtcagcctccagactcaagctatgagaaggggcttctctaagtaccttctcccatccaccccagaytgtcccaccacccgctgcctggccctcttagtaacttgtgcagggtgagcccaccctggtcttcctatgaaattctcaagtcacaactaaaggttctgagggacttgagtctgggccccagtgacatgggattggggactggggggacttgggggactggggggatggctatatgcaaggcccacagtgagcggcagctctgcagagctagcgtagtgtttagccaggtcagtcagacac

SEQ ID NO: 739255 - DNA, 503 bp, Homo sapiens
tgtttagccaggtcagtcagacactgtgccacagcagggcactgaaaatgactccatagttattgttcctcaaattggacaccccctcagagctcacacaatatgagatgaaacagcctgcgggaggttgcaaggaaatggaacactggcagaggggggttttatttcccccgactaagggaaatgctgcagacacyatgccttcctgctcctccctcactccactgccatcagctactcttcagacatttttatctggatgggttcactgtgtctccaggattgaaatggactatatccccagacacctgcccacataactggtggggtaaatccagcactttgggaaggaaggaggggttaattaaggggaaaggaagggtcgttgctgcatgaagttatgtctgcgtctgtatatattaacacatgggtatatgtctttgtacacacaaaccagcatcaatgtctgtttgtgaatttgtacgtgtgcatgcgtatgtgca

SEQ ID NO: 739256 - DNA, 598 bp, Homo sapiens
tccaactggacatttgacacttcacaagatatgttcccatattttgagtggggtttcttcaaaatgccatttccatttgtccctcaaaactttcacataaacttttttttttttttttttttgagaccgagtctcactctgtcgccaggctagagtgccatggcgcaatcttggttcactgcaacctccacctgcygggttcaagcgattctcctgcctcagcctcctgagtagctgggattacaggccctcaccaccacgcccagctaatttttgtatttagtaaagatggggtttcactgtgttggccaggctggtctcgatcttttgaccttgaaactttcacataaactttcacatttccatgacaaagttttagcagtaacttccaaattggtcttattcaactccaacattaaactttgtatgtaccacagccacatgatcatcttacctcacctcctctaaggaggaagtcctctgactcaaggctcagctccctaaaggaaaattctcaaatttttagtgggttatcctctatagtcaggcattatatagcactgcttcggtactgaaagcatccaacatgccaggctct

SEQ ID NO: 739257 - DNA, 608 bp, Homo sapiens
gatgttttaaaatagggctgtctttgtaatcaatatttatatactttcctcttgtatctaaagaggagtgttgttgtcatcagatgtagaatgaagatttaaattagttgccttacacttgtttccgcaatgaaacattttattttaatgcatctttttagatatttgttggaactgacttttaagttacaaagtctataacttattgagatttatatttggcatgaagaacctgactataaatggtccagacaggcaagacgatgtaatttgagaaaaaacttagaaatgttaagaaacaacccagttgttggccttgtgaccatagatgattgagtttttgaagttagttggcctatcatctagtttccaggcagcatgattaytgaaagattataagcaggcaatcattcgttgttttaaagccctccttaggtcagtgagatcttgtggaggagactcataccttactttggcaagtgatacggtggaagtatggtgctagttacatttatcagtggcttgttttcaagctctgggatgaatgtgaagtatgtaaacaaggcttagccatataatatttgttctactacatttactattcaaaa

SEQ ID NO: 739258 - DNA, 506 bp, Homo sapiens
atatgctgtttcagtaaacttggaatggggcccaatattctgattttaaacaactaattctattacctttggattcaagttttgtacattgcattaattagttcacaataaaatcacttctaataatttatctcattattgcctaatctagtcaaaattttgtgattcagaatccagttcacaatttcagtccatcagagtcatcataaaagcaagttttaaaaagcacattgatggtcagctaattttcaactgaccacgaagattatttagaggwatccaattacccaagtcttaattattaaaagtttgctgagatgggtcattatgatatgtacataattttatatttgactctttgcttttgattgtcctcaggtgtaaattttaactttttagactgcaaaataaaatttgagatataaatttagggtctgttcatatactacaacatacacattttttattatgaagtgatataaatgatataaaagaaacctgaaagt

SEQ ID NO: 739259 - DNA, 626 bp, Homo sapiens
ccagattgcctttcaagtttagttggagatacagagcactgtagccttcagtggtgaggtttatgggagctcaagttcaaaccactgggaggcacaattcccatttggccagggctggtttaaatgccccttcagtgggcaggcatcaactgaatttggtccaggtttcctttctgccctgacaggacagcactgagttcaatgcytcacaattgctcttttctccctccctcagtacccagagatgctctgcacaccaggcagctgcttccagtgtggggggaggagtggtgtcagcgattcaggactatttttttaatctcttcagtgcttctttcagccatatgaagttaaaaccaggtactgtaagtgctcattttatctttcgttcttatggaggtgtttttctctgtgaaggtagttgttaacttggtatccttgcagggggaagggcaatcggtggagctctctattctaccatcttgctctgtctctcagtattactttgtgtgttttgcgatttgtataaacactgtcatactttgtcatctgaaacacgttttttttttcccttccaatattacatatccaataaatatccatgttgttacatatccatctaggcc

SEQ ID NO: 739260 - DNA, 635 bp, Homo sapiens
atgcataagggggactacaggagtcttcatttctgtaattgctcatgaggctgtagttaatatctttggcttctttcttctactacccactacctatttcccttcctcttagccagaacttcatctggccagggttcttggtctgtagtagagtgacccaaatcttcatttttgaagggtctgaatgatcagttgtccgcccttttttattttattttattttttttagcttactgtagttttccattaacttttactactggatgtakaactactaaaaggtgtcctagcaatgcctgggttctaggtgtagtccacatttttttttgttgtgtagaaacaacaacctgatttctgcttggaaattagaatcaatcactctaggagtagagttaactttcctgcctattttgtcagtagcatacagagtcccaacggccaggtagtggtctcatctaattcattctgtaactccctcggtggtagttctggtagaagccttactgtcaggaaaggcaaatctattgccagaatgtgtgtctatttcagtgagaatgaatctgtgccccctccatgatggaagcagtccaatgtaatcaatctgctactaggttgccggctagtcctccccatcc

SEQ ID NO: 739261 - DNA, 634 bp, Homo sapiens
aaagcaatagcaactattcccaaggaagcccaaaagttgacttactagataaatatttttctaccagctatatgaaatatgttcaaagacctcaaggacatgatagctaaagaactaaaaaaaggtatgaaaacaatgacttaacaaatatggaatatcaatagagataatcttcgacaaacttgacaaaaacaagcaatgaggaaaggattccctatttaataaatggtgctgggaaaactggctagccatatgcagaaaactgaaactggaccacttccttacaccttatacaaaaattaattcaagatggattaaagacttaaatgtataccctaaaatctaaaaaccctagaagaaaaaatctaggggataccattcagaacataggcatgggcaaagacttcatgactaaaacaccaaaagcaaytgcaacaaaagccaaaattgagaaatgggatctaattaaactaaagagcttctggacagcaaaagaaactatcatcagagtcaacaggcaacctacagaatgggagaaaatttttgcaatctattcatctgaaaaaggtctgatatccagaatctacaaggaacttaaacaaatttacaaggaaaaaagaaacaaccccattaa

SEQ ID NO: 739262 - DNA, 543 bp, Homo sapiens
taatttgtaatctttctattgtttgatgtaggcctttcattgctccctcttagcactgcttttgctatatgttgcctctattttcattcaattcaaaaaaagtgttgactttcactttcatctaattattgaccaaatataagtcaaaacacatggtttgatttccacatatttgcatagttttgatttctagttttcttccactatgatctgagaataatatacttgatataattttgatttttttaagtttatcaagacttaytttgtggcataacatatggcctatttttaaaaaagatgcatgcactaataagaatgtatattctgcagttgttgggtagaatgtctgttaggttcatttggtctagagttcaatttaagtctagtgttgctttgttgatcttctgccttgatgatctatctagtgctttcagtggggtgttgaaatcttcaactattattatgttgctgtttatctctttccttaggtctcttagtatttattttataaatctggatactctgatgttgggtgcatat

SEQ ID NO: 739263 - DNA, 638 bp, Homo sapiens
aaattaacagtagtcactagtactaacaccatttttgctcttataaagcttacatttttagaacaactatttttttgggaaagactagaaaaaaaatacccaacacattaacattccttatctctgggtggtgggttcatgcaccaaagtttgtataaattatatattattgttcatatattagatattatattacgttaattatatcatgttaaatttattgcatttatattatatcgtatataaccatatatgtatatatgttgtgactgtgatctctggcttttatatacatatatatgtatgttgcttctctactatttcttgttttttcaatgaacaaatattactgatgcaaatggagtgaattaaaagtgaaaagataatggcctccaaatgtctgttggtgacaacagacacataaatacaatacagacatatacacatggagatcaacagattcacamtcatttctgtgaaaacacagacatggcccattacatgcaagcacacccatggggacacacagccatgcaccgttacaaatacagacctgcagatattcacataaacacacagacacacaagcctgcatgcttgattataaacctgcctacctacgtgtggacacgaacagg

SEQ ID NO: 739264 - DNA, 429 bp, Homo sapiens
gtcacaagtaggaggaggaaactccacactgagtctaatggagagagtaatccccgggcctcagagcagcaagggtgcccaggcctggtgaggcaagactaaagcaggagggagtcacgcctgtaatcccagcagtttgggaggcagaggtgggtgaatcattcgaggtcaggagttcaagaccagacttgccaacatggtgaagccctgcctctactaaaaatacgaaaattagcctgccttggtggcagatgcctgtagtcccmgctactggggagactgaggcaggagaatcacttgaacccaggaggcaaaagttgcagtgagccgaggtcatgccactatactccagcctggggaacagagcaagactccttcagaaagaaagaaagaaagaaagagggagggagagagagagacagagaggga

SEQ ID NO: 739265 - DNA, 477 bp, Homo sapiens
atttcagggggcaatatttggccagagctgaattgcagctgctcccatgaatgccacagtccccaccactccctatcacatctcaggcactgaagaggagcattagctccatttaccattgcacttacactactgttctggtaaagatgaaagtgacatatttttaatattcrtgtctctaacaaaactgagaaacttttttttttttttgcatatagcccttgtaggttatcttcttcgccttactacccttggaggtacctgaaattgagagccctggcctatgtgatttataaagtcccactcaggttggagagtctgaatggggtgatggatttatgtacaggatacactcaagataatttaatttttttttttttttagaaacaaggtctcactctatcacccacctggagtatagtagcacgatcatggctcactacagcctcaaactcctggactcaagcagtcttccca

SEQ ID NO: 739266 - DNA, 586 bp, Homo sapiens
caggctgtgctctaggtgccctctgagcactaaaccatccaatccctccgtgaccttgtgaagtggagacttattcccattatacagagaaggaaaccgaggcccagggtggctagtattatcattaggagctaagggatattataaggaatgaagtgtgacgattctgtcccccagacacccacttgcaccaactcacatgcaaaagctgtgccccaagatggggtcwcatgagtcacatgtggactatgtctgctctggtgtcctgggcacctctgtctcatgacatagccaagcgccacagtacccaacaaagggctcagtgtaaagaatttgagctattgcctgcctgatgcttccacagagggacctgggtagttgcaacttgcgggggtgggggggcagatccagggcacctcccaacatctgagccccaaactcctgttttcctggaataagtggttggtggccgctccttgtatgtccaacaagaaaataagcctgcacaagacatctgcatatagataaggcctgctccgaaatctcagaaagcaattatggcatgggattaaaagagaattttttc

SEQ ID NO: 739267 - DNA, 584 bp, Homo sapiens
gctgtgctctaggtgccctctgagcactaaaccatccaatccctccgtgaccttgtgaagtggagacttattcccattatacagagaaggaaaccgaggcccagggtggctagtattatcattaggagctaagggatattataaggaatgaagtgtgacgattctgtcccccagacacccacttgcaccaactcacatgcaaaagctgtgccccaagatggggtcacatgagtcacatgtggactatgtctgctctggtgwcctgggcacctctgtctcatgacatagccaagcgccacagtacccaacaaagggctcagtgtaaagaatttgagctattgcctgcctgatgcttccacagagggacctgggtagttgcaacttgcgggggtgggggggcagatccagggcacctcccaacatctgagccccaaactcctgttttcctggaataagtggttggtggccgctccttgtatgtccaacaagaaaataagcctgcacaagacatctgcatatagataaggcctgctccgaaatctcagaaagcaattatggcatgggattaaaagagaattttttct

SEQ ID NO: 739268 - DNA, 492 bp, Homo sapiens
tcccagggcaggagacaaatgatgaacaaagataataataagtcaatatctccaggtccactggttaaagtgctacaaaaaataaagtaagaaaaggaggaaagagaatgatggggtcatcagggacatacgggacatttgaraaaagcccggagggaagcaagggggtgaagcagtggctgccaggtgtgatagaggctctggggtgggtgtatcttcaggtgtggcaggaagtccacgcagctgagctcagtgagcacagaggcgaatggttgtagaggaggtcaggggtttattatgctgatttagtcatgtggacaccttatggccccccttggtaatacacttcttgaggacgcaggctctatccaacctctcagtgccacacacttgctggaaccaagctgagaaagacgccaagttgaattgaattttggctcaggggaggtggtttcctgtattatgaaatttacatgagatgaactatccctg

SEQ ID NO: 739269 - DNA, 573 bp, Homo sapiens
gtatagtatgtcctgaataaatatttgcagcctgtgaaaatgaactgtgaattaatggagcttcactaacaggcaaatccagagcttgttgctaaccattggttaactggctgggagtcttcctgcatatttctgaattctcagccctgaacaacgctccttttcaaagcttgcttctctttgaaraacagaaaggaaatgattgcccattatccctttgtacccagtttcagcccatgagatggcacctcgttctaatccaaagttgaaagctgtgtctgcatagacttttggatcttagagctgagagaagcttcacaattctccgggcgcagccccgctgtcttcagtctgggtatcagatggattttgcaagctagacacctgagaaccagggggattaatagacttgtatggggttgcacagctgctggcaggcaagtgagtctagtgggcgatagaagtcctgttttaaaggtggaaagtccttccttctcagctggatcgggatctcagccctctgaattcccagttggtgcctctacgatgccatgctgccccagggaaaaggaa

SEQ ID NO: 739270 - DNA, 635 bp, Homo sapiens
ccgggggccaggctagccagccctacactgccctccttcaaacctctccccagcctaccaaaggaagtggtggtttcaagctgcaaaataagcaaatcagggccccggcttctgggggacggatgtttgcatcttgctgcattctatggaagtgtgatccacggctttaatcctagtcaccaacaaccaatatctcagatgcaacacatgggctccagaagcctcaggagatgtgaaaatgttctctggccaggccaggagggtcccatcctgaagcrctgttcaaccttcagctgtcgggacatcctctgttgtcaaaaattcatccacagtggccaggggcacacaggagaggaccaaagaacagataagggctttcatgtcagccttgggcaaaaggtccagctttattcttgacctcttagtgcctcagtttcctcattaaaaaaaaaagaaaataacaataccatctgcataggtttgttgtaaccaggaaacaaaataacccatgtaaagtcctgacctttcagctgagcccagagaagctgtggattcacagctagttcctgtgctcctggggtttgcagtgcacaaaggatctgggtcagatcagagttctacaaggactcctctgt

SEQ ID NO: 739271 - DNA, 646 bp, Homo sapiens
attgttcactttatttctattattgttacattgttatacataatgaaataattacgtaactcaccataacgtagaatcagtgggagccctgagcatctctttttttttgagacggaatcttgctcttgtcgccaggctggagtgcagtggcgcaatctcggctcactgcaacctccacctgccggtttcaagcrattctcctgcctcagcctcctaagtagctgggactacaggtgtgcaccaccacacacagctaatttttgtatttttagcagagacagggtttcaccatgttagccagaatggtctcgatctcttgaccttgtgatctgcccgccttggcctcccacagtggtgggattacaggcatgagccactgtgcccggccaccttgaggtgcttttcctgcaactagatggtcccatctgggggtgatgggagacagtgacagatcatcaggcattagattctcataaagagcagcaaattagatcccttgcatgggcagttcaccacagggttcaagtgctcctataagaatctaatgccactgctgatcagacaagaggcagtgctcaggtggcaatatgtatggtggggagaggctataaatacagatgaagcttcactcactcgtacctgctgc

SEQ ID NO: 739272 - DNA, 607 bp, Homo sapiens
aacattttggctgaccatctgggtggcagaccatgatgagtgtctgagtgactgatagaagtattatgagacctggtcatggtgcaagttgtctctcagccactgtaagctcataagccacttaagtttctaaaaaaaaaaaaagtctgagaaaaatagatggtttctaaagttcattccagattagatttttttttttttttttttttgagacagagtcttactyttttgcccaggctggagtgcagtggcacgatctcgactcactgaagcctccacctcctaggttgaagctattctcgtgcctcagtccagcttagatttttttaaatttaatttttaatttaatttttttctagggatggggtctcattatattgcccaggctagtttcaaactcttggccttaagtgatcatccctccttagcctcccaaagtactgggattacaggtgagtcaatatacctactaccagcttagaaattaaaaagatggggaaacagtcttcctgtggtgtttctggtactaaatagaagccccttctcccattctgtgtcaatccaagtagaaatgacacatgaatgtattggtttcacagaagccagg

SEQ ID NO: 739273 - DNA, 541 bp, Homo sapiens
gcaataaacattttggctgaccatctgggtggcagaccatgatgagtgtctgagtgactgatagaagtattatgagacctggtcatggtgcaagttgtctctcagccactgtaagctcataagccacttaagtttctaaaaaaaaaaaaagtctgagaaaaatagatggtttctaaagttcattccagattagatttttttttttttttttttttgagacagagtcttactcttttgcccaggctggagtgcagtggcacgatctcgactcactgaagcctccacctcctaggttgaagctattctcgtgcctcagtccagcttaratttttttaaatttaatttttaatttaatttttttctagggatggggtctcattatattgcccaggctagtttcaaactcttggccttaagtgatcatccctccttagcctcccaaagtactgggattacaggtgagtcaatatacctactaccagcttagaaattaaaaagatggggaaacagtcttcctgtggtgtttctggtactaaataga

SEQ ID NO: 739274 - DNA, 631 bp, Homo sapiens
acttctcccttgtatcattctcatttcagtgggttgcatcatcaagagggccctagggtggccaataatttcattttttcaagtctactattatgttttaaagtatctttgaaaaaaaatttttttacggtattttcaaattacatactattcctattgagcatgtatggcagcttaactacccgaatacaaagtttaagaagccaaaactaatctagctttgttttaaaaaattgtgctattgttgtaatggttaacaaagcgargagaagcaccactcaaatcataatgttacaatctctttgttcagttggattatgggttggtcaaacattagacttcacacaggcatggctatgatgcagtgattcctcagaagaagacgaaattctcaaatcacctcagatgtaatattaggagcagaatttaacattttcaacataatacaccataaaagtcaggactagttcttatctgatccccaccttgtaacttcagtaaccaaagacatactggtctataatgaattatttctaattaactaaccagcctttctcacaaagaggagattctttttgatggggagaaatgcaaatttaagtctgaactgagaaatcaacttaacagttag

SEQ ID NO: 739275 - DNA, 575 bp, Homo sapiens
caccaccacacatatgcacccacaccagttagaaacaaacttgtcaaaccatagatgggccacacactcaaataccacaagaaggcatcccactgaccttatgaaatgcctagtgggaagaaaggttgcttaatggctctggtgctgccatttcatttctgggcaactgtttctgctggggtcagttttctcctctctgcctttttaatatttttcactccgagacagggtctcactctgtctgtcacccaggctggagtgcagtggcacaatcatggctcactgcagccttgacttcccaggctcaagagatcctcctgcctcagcctctggagtagctgggactataggcacacaccatcattatgctcagccaatttttaacttttgttttttgtaaagacrgggtctctctatgttgccaggactggtcttgaactcctggcctcaagtgatcctcccacattggttttccaaagcgttggtattacaggcatgagccactgcacccaattttgccactcaactggcaacagcacaggtggcaaagttgccgggatccttaggattggact

SEQ ID NO: 739276 - DNA, 481 bp, Homo sapiens
acgagtcacttccaagggtggagaaggctttgaagtcggtagtgacgccgtggagggtgaaggcttcggagaactgaagaggtgaacacagggccagcagataagcaacctaaacaaccaagagtgcactcccaggcacagaatgaagaatttctgacaatgagtttttgcctggcttttgcttagtctagtttttagagctatgaaggatgatgttcctgaacttggctaagccagaaatggaagaggctattagcttagcagtagtctatgaactttcccccrgagctggagctctggatctcttgcctcagttagggcttccctgtagctttctctctgtctttctgtattgaataaatcaatctagggcctacaagagtcctgggagatgcattttatgcgaatgtccatttttcttctgagagtattcaaagccttcactggagcctgtgggatccctccttgaaaagttaaacct

SEQ ID NO: 739277 - DNA, 578 bp, Homo sapiens
cccctgccccagccggtggcatcctgtccgttctgaacgggatccaaagtgagtttggaacccagcagctgggggcctcatcagtggttggcagttgtgttctttagttttaattttgtttccaatttgagaaaaggataggttcctggatagtattttaaagaggttcctctcaatctttccattcccagtgacaatgatgatcactcattccacaggcatttatcaagtgctatgttgcagacactgagctagaactggggaaatcagaagtaatatacagcatagatatgactcacactttgtcctaagtggaattcctaagtagaatctgcagtctattaggggagacagactataaaccataatgacacgtagagtaatttaattgcaaatatgatttttcaacaactcaactaatgtttaytgagcatctattacaggctagacaacattctagggacaagggatacagctgtgaaccaaacagacatcaccaaaatggggatactaatagtactgaagttgaaatgagacaatgagaataaagccctgagttcagggactattaggagttt

SEQ ID NO: 739278 - DNA, 654 bp, Homo sapiens
aatgagacaatgagaataaagccctgagttcagggactattaggagttttcttactctgctgttaaagcttcaatggctccccagtgctctgagggtaataatgtttcatctctttgggttacaaacagctgggcttttcttctttgctgaatcartctactcctgattttaccgcttaccagctgtgcaaccatgggtaagttatatgtgcttctctgagcctcagtttccttttctatagaatggggataatgacgtcaatcacatagcactgttgtggattaaaagaactgtgtctggcacaagagtaagcgctccacaaattttaactattattattattattgttttaaaaattattgctatttgtagcagagtcttgattatttggttcctccaaataatccatagtaatggaatctttagcttatgcatagctacccagcataaaaaaatacatttctcagactcccttgcagctaaatgtggccatgggactaaatcctagctaatggagtaagagcagaagtgatttgtataatttttgatttgctcccttaaaggggagggatgtgccctacccttctccttttcttccctccctcatgctggaactcagacataatggcaggatcccgagcagctgtcttgga

SEQ ID NO: 739279 - DNA, 654 bp, Homo sapiens
aatgagacaatgagaataaagccctgagttcagggactattaggagttttcttactctgctgttaaagcttcaatggctccccagtgctctgagggtaataatgtttcatctctttgggttacaaacagctgggcttttcttctttgctgaatcaatctactcctgattttaccrcttaccagctgtgcaaccatgggtaagttatatgtgcttctctgagcctcagtttccttttctatagaatggggataatgacgtcaatcacatagcactgttgtggattaaaagaactgtgtctggcacaagagtaagcgctccacaaattttaactattattattattattgttttaaaaattattgctatttgtagcagagtcttgattatttggttcctccaaataatccatagtaatggaatctttagcttatgcatagctacccagcataaaaaaatacatttctcagactcccttgcagctaaatgtggccatgggactaaatcctagctaatggagtaagagcagaagtgatttgtataatttttgatttgctcccttaaaggggagggatgtgccctacccttctccttttcttccctccctcatgctggaactcagacataatggcaggatcccgagcagctgtcttgga

SEQ ID NO: 739280 - DNA, 580 bp, Homo sapiens
aaaatacatttctcagactcccttgcagctaaatgtggccatgggactaaatcctagctaatggagtaagagcagaagtgatttgtataatttttgatttgctcccttaaaggggagggatgtgccctacccttctccttttcttccctccctcatgctggaactcagacataatggcaggatcccgagcagctgtcttggatcatgaggtggtagctgtgtggtggagatggaagagcaaaaactggagaaaccttttggtgattgtagagtcactatattgaccctgggctacttaatkggatttatatgtgtgggagaaatgaacttctgttttgtctgaaccactgtcagtttcactgtctgtaagagtagtcaaactttattctaaccaatatattgttacctcctgtatacacctccagggcagccttggatgatctattagccttgatgatctattaactgtgcctggatgatactttgcattttgctgactcagcctcagtatttactgtcatcctcacctggatcacttgctctcttttctctcctagctcccctatctccccctaaccat

SEQ ID NO: 739281 - DNA, 569 bp, Homo sapiens
taggcgtgcacaactgcacctggttagttgctatttattgagtgtttctgggctctggactaagtgcttcatgtattttcccatttaattctcaacactgccctttgtaggaagtgctatttcctaccctttccatcttacagatgaagaagctgaacccagaaaggtcaaactgtttgcatagaactccatagcccaaggtcttaaccattacaatccamccccctttttttgtattcagaatggcggttagggctaacagtctctcaggacttattcttcagtactttggccaaataactgtctccacttttagctgcctggtgcctgctcctggcctcactgctgtctctcctgtcttcacagaggaagaatgttccaccacagaccatccctataagaagccctacatggagacatcacccagtgaagaagattccttctaccgctctagctatccacagcagcagggcctgggtgcctcctacaggacagagtcggcacagcggcaagcttgcatgtatgccagctctgcgccccccagcgagcctgtgcccagcctagaggac

SEQ ID NO: 739282 - DNA, 593 bp, Homo sapiens
  misc_feature 28: n = A,T,C or G
aggaagaggaggaggaggaggacttccnaggctgcacgttcttgctggagacagggctagtcacagatgagcatcctcaccaataaaactgggtttgttgttctgatgacgctagtatttaccagaacgctctgacacatccccaccgaacgtgcgaatcgccgcgtttaacagcctgaaaatctggcctgctttttcccgggaactgcggagkttgtctctgtgactttgattatttgcattgatgaccctggggcaagattcttggaccaaccctggagtccggccccgatcgagtggaggtagttgggggaggcgagccgcggccgggggcgggggagggacgaggaactcgcgggccccgcggctgcccgaccccgggccgcgcgtctctaatctccggccgccgtggcccggccgcctccccggccgatagcgacgccgaccggggcggcgtggcgacagagagacgcagcggggccccgctggccgccacagtccccggccggcggggccatcggcccggcttagccaaattgctttgacggctggggacagtgtggagacatcagcgcgagggcgatctaatggct

SEQ ID NO: 739283 - DNA, 593 bp, Homo sapiens
  misc_feature 28: n = A,T,C or G
aggaagaggaggaggaggaggacttccnaggctgcacgttcttgctggagacagggctagtcacagatgagcatcctcaccaataaaactgggtttgttgttctgatgacgctagtatttaccagaacgctctgacacatccccaccgaacgtgcgaatcgccgcgtttaacagcctgaaaatctggcctgctttttcccgggaactgcggaggttgtctctgtgactttgattatttgcattgatgaccctggggcaagattcttggaccaaccctggagtccggccccgatcgagtggaggtagttgggggaggcgagccgcggccgggggcgggggagggacgaggaactygcgggccccgcggctgcccgaccccgggccgcgcgtctctaatctccggccgccgtggcccggccgcctccccggccgatagcgacgccgaccggggcggcgtggcgacagagagacgcagcggggccccgctggccgccacagtccccggccggcggggccatcggcccggcttagccaaattgctttgacggctggggacagtgtggagacatcagcgcgagggcgatctaatggct

SEQ ID NO: 739284 - DNA, 616 bp, Homo sapiens
tcagtttcagtctttacaactccagagaagtaaaataaatgaagctataaacaggtaacatacttcctgacttgactatccaaatgactattgtgagattttaatcctaaatattcttggtggcaaattaaaattagaaggcaatataattacaaaatagtataagaattattgcattttttgttttaccttttctgccaccaagttctatactacatttcatagaaatacacaaatttccaaacttttcctggtaakaagtagtccgctgcttctgtttcttatcatttcagtggggatttgctgatctgttattcaactaattaaacaggagctgaatcagagtttttggacatcctctttttaaagcatagccaataactaggacactaaaacaaggactttgagaagcagagtagtcttgaatttttctgttgtaggagaaataaactgatgatctcagaaggcataatatgaactccctgtcctaccccagattaaactttacccagagtgacacaggttatacctgctctattgagagaatgcactggggatcagtcgagtgaagaaacacaagttgcctgggggatcctcatctggaacaggctaatga

SEQ ID NO: 739285 - DNA, 616 bp, Homo sapiens
tcagtttcagtctttacaactccagagaagtaaaataaatgaagctataaacaggtaacatacttcctgacttgactatccaaatgactattgtgagattttaatcctaaatattcttggtggcaaattaaaattagaaggcaatataattacaaaatagtataagaattattgcattttttgttttaccttttctgccaccaagttctatactacatttcatagaaatacacaaatttccaaacttttcctggtaagaagtagtccgctgctkctgtttcttatcatttcagtggggatttgctgatctgttattcaactaattaaacaggagctgaatcagagtttttggacatcctctttttaaagcatagccaataactaggacactaaaacaaggactttgagaagcagagtagtcttgaatttttctgttgtaggagaaataaactgatgatctcagaaggcataatatgaactccctgtcctaccccagattaaactttacccagagtgacacaggttatacctgctctattgagagaatgcactggggatcagtcgagtgaagaaacacaagttgcctgggggatcctcatctggaacaggctaatga

SEQ ID NO: 739286 - DNA, 616 bp, Homo sapiens
tcagtttcagtctttacaactccagagaagtaaaataaatgaagctataaacaggtaacatacttcctgacttgactatccaaatgactattgtgagattttaatcctaaatattcttggtggcaaattaaaattagaaggcaatataattacaaaatagtataagaattattgcattttttgttttaccttttctgccaccaagttctatactacatttcatagaaatacacaaatttccaaacttttcctggtaagaagtagtccgctgcttctgtttcktatcatttcagtggggatttgctgatctgttattcaactaattaaacaggagctgaatcagagtttttggacatcctctttttaaagcatagccaataactaggacactaaaacaaggactttgagaagcagagtagtcttgaatttttctgttgtaggagaaataaactgatgatctcagaaggcataatatgaactccctgtcctaccccagattaaactttacccagagtgacacaggttatacctgctctattgagagaatgcactggggatcagtcgagtgaagaaacacaagttgcctgggggatcctcatctggaacaggctaatga

SEQ ID NO: 739287 - DNA, 645 bp, Homo sapiens
ggatatgcctgacatttctgaaggcaagtccccttctttccacaatagagcaataccatctaagggaagttacttaccgcctgacacagcccactcactactcgcacattctctccacttgctccagctactgaggaaattagagcaaatcctatttttagacactgtggttcaaatgacagtgatgtatggggtagtgactcgttttatgaacatagttcggaggtgtcggcggatcttamtgctcggaaactctcttacatcaccctgttttgctctttataatttatttcaaagatcgctttgtttcttctccctcctccgtgagtcctgcaacagacttcagccagaaacaataaaattctgagctgaaataaaaggcaatgagagaggatgaggcttctctcagaaacccgaaacacaaatcatgtcagggatacataggggtggagcacaagcccttagcaaaaattagagtgtgctcaatggttaggactagaaaaaacagacttcatcccttcttagcaaaattgattgtgtgtgtgttttagatgaaaatcctaactttactgcttatttttttatggctaattataatctgctagttttgaaggccagcaagagggctaaacaatgcttgtgcag

SEQ ID NO: 739288 - DNA, 645 bp, Homo sapiens
ggatatgcctgacatttctgaaggcaagtccccttctttccacaatagagcaataccatctaagggaagttacttaccgcctgacacagcccactcactactcgcacattctctccacttgctccagctactgaggaaattagagcaaatcctatttttagacactgtggttcaaatgacagtgatgtatggggtagtgactcgttttatgaacatagttcggaggtgtcggcggatcttaatgctcggaaactctcttacatcaccctgttttgctctttataatttatttcaaagatcgctttgtttcttctccctcctccgtgagtcctgcaacagacttcagccagaaacaataaaattctgagctgaaataaaaggcaatgagagaggatgaggcttctctcagaaaccygaaacacaaatcatgtcagggatacataggggtggagcacaagcccttagcaaaaattagagtgtgctcaatggttaggactagaaaaaacagacttcatcccttcttagcaaaattgattgtgtgtgtgttttagatgaaaatcctaactttactgcttatttttttatggctaattataatctgctagttttgaaggccagcaagagggctaaacaatgcttgtgcag

SEQ ID NO: 739289 - DNA, 610 bp, Homo sapiens
tatgagtacaatcacggcagcaaactatgctttaaagtttaagcaatttggcgggggaggggtggttgttgactttgtctcagttgattctcacaagaagatagagcgcatgtttaaaattatttttatttcttagtatgtgtgttagtccattctcacactgctatgaagaagtacccaaaactgggtaatttaaaaaggaaaaaggtttaattggctcacagttatgcattgctggggaggtctcaggaaacttacaatcatgatggaaggcgaaggagaagcaggtaccttcttcacaaggtggcaggatggagtgagtgcaagcaagggaaatgccagatgcttataaaaccattagatctcatgagactcactcatcatsagaacagtatgggggaaaccgcccccgtgatccagttacctccacctggtcttgcccttgacatgtgaggattacagggattatggggattacaattcgagatgggattttgggtggagacacagccaaaccatatcattatggttcaatcaaaaataatattttagaacatttagaaaatgaatcaagatggaggacttatcacaaaaacttcctttcctcctg

SEQ ID NO: 739290 - DNA, 627 bp, Homo sapiens
cactcagacttcagttaggatcatggttttgccatgccatctgatagagcgttctgtgcagatggaaatgtagtatacctgtgctgtacaataaggtagccagtagccacatgtggctgttgaacacttgacgtgtggttagtgtgattgaagtactggattttaatttaatttwattttaattaatttaagtagctacatgtgggtaaagtggctactctgctgaaaagtgcagcttagagaccagtcatgtcacatctctgagcctcttctttctcccctgtaaaatggagattaaaatctctattgcattaggataatactagttgctattacaaacaggctatgtggcattagaggctccaacaagtcggaagtttgtttctcgcccatgtaacagtctagggcatgcccctccaaagaatattcagggattcaggctgatggggtttgctatctccaacacacagacattttagttattcccatctagtcaccaggaaagggaaaatagcagaattccaaagctaggggttttctcttaagcaattgaggtagaatttgtaatgtcatttccgctctgccaattcttggcaagaaaacactcacattaccacacgtaacagc

SEQ ID NO: 739291 - DNA, 627 bp, Homo sapiens
cactcagacttcagttaggatcatggttttgccatgccatctgatagagcgttctgtgcagatggaaatgtagtatacctgtgctgtacaataaggtagccagtagccacatgtggctgttgaacacttgacgtgtggttagtgtgattgaagtactggattttaatttaatttawttttaattaatttaagtagctacatgtgggtaaagtggctactctgctgaaaagtgcagcttagagaccagtcatgtcacatctctgagcctcttctttctcccctgtaaaatggagattaaaatctctattgcattaggataatactagttgctattacaaacaggctatgtggcattagaggctccaacaagtcggaagtttgtttctcgcccatgtaacagtctagggcatgcccctccaaagaatattcagggattcaggctgatggggtttgctatctccaacacacagacattttagttattcccatctagtcaccaggaaagggaaaatagcagaattccaaagctaggggttttctcttaagcaattgaggtagaatttgtaatgtcatttccgctctgccaattcttggcaagaaaacactcacattaccacacgtaacagc

SEQ ID NO: 739292 - DNA, 627 bp, Homo sapiens
cactcagacttcagttaggatcatggttttgccatgccatctgatagagcgttctgtgcagatggaaatgtagtatacctgtgctgtacaataaggtagccagtagccacatgtggctgttgaacacttgacgtgtggttagtgtgattgaagtactggattttaatttaatttaattttaattaatttaagtagctacatgtgggtaaagtggctactctgctgaaaagtgcagcttagagaccagtcatgtcacatctctgagcctcttctttctcccctgtaaaatggagattaaaatctctattgcattaggataatactagttgctattacaaacaggctatgtggcattagaggctccaacaagtcrgaagtttgtttctcgcccatgtaacagtctagggcatgcccctccaaagaatattcagggattcaggctgatggggtttgctatctccaacacacagacattttagttattcccatctagtcaccaggaaagggaaaatagcagaattccaaagctaggggttttctcttaagcaattgaggtagaatttgtaatgtcatttccgctctgccaattcttggcaagaaaacactcacattaccacacgtaacagc

SEQ ID NO: 739293 - DNA, 657 bp, Homo sapiens
ttaggtttccagcttttagtggtaactggtattttttctgctacccttacccttgatgagagggtgggaagaataggtagacaaaccctctccttctgcctggatggcatttcctatgatgcttagagaaaacccagtgagtcatgtcctaccacacatatattgatgggaaaatgctgccaagaccaagccttgggtctacagaycttgctccaactcatcaaagcaattttacatgttacgttatttgattctcacgaagacctgtgaagtaggaattatcagccccatttgacagataaaatggaggctcagggaacttaaatagatttcataaagttaaattcttagaaaatactgggactgagacctttgggccttggcttttatatgggttacatatgtaaactgtggacccagtgattaatcctaaggaaatcatcttgaatgtgtacagagatttagttacaaagatgttcaccacagtgttgtttctaagaccaataagtgggggaaaaaaaccctaaatatttgatctaatggtcaaataaatagagacaaggggaatgaaggcatgatactgttatctatctgtctatctatccacccatttatcttgaaagcaatacagatctttactaaagcctctcaagggac

SEQ ID NO: 739294 - DNA, 583 bp, Homo sapiens
taatatgggaactctgttctatatgctcagtttttctgcaaatctaaaactattctaaaatatcaagtctactacttaaagaaaaattaaggtacatataatgttatacatttttttgtgacttttgtcttgttgataaaacaacttcttataaatctgtgactgtatccactttctacctttatttccaaaactaatacaaatatcattggatgaatagatgatatcaggatatacagacaaaatttcgtgttttatgaattcagagtttttcaatccaaagaggaattttctttcgtgagtttttcatcataaaagatagaacycaattttaagtagacccccttcaaaaagtttctgaaggcaaacttcagagtacattatatttgtattcaatcatagcaaccagcagtgaaaacatcgacataaccacaggcatgtggtgtataaaagtttttgagtctttgaagaataatgtgtaattttctattctagcgaaaactaaaatgatgtaatgttaacatatactacttcattccagagtaaagcaggagcccatgactgcactgcttgctatttcatg

SEQ ID NO: 739295 - DNA, 513 bp, Homo sapiens
acaattgctttatgtttttacaatttaagtctctgatcaggacgcatcttacaatcaatgactcattctaatttaattgacaaaatcattttctttcttaattttacacaaaataatggtctgtcttaaaaatggatgacagataaaataaaatatgatgtacacagacatattatatatactttctttyttttttttttttttttttttgagatggagtctcgctctgtcacccaggctagagtgcagtggtgcaatctcggctcattgcaacctccgacttccggattcacgccattctcctgtctcagcctcccgagtagctgggactacaggtgcccaccaccatgcccagctaattttttatatttttagtagagacggggttttaccatgttagccaggatggtctcaatctcctgacctcgcgatccaccgcctcagcctcccaaagtgctgggattacaggcgtgagccaccgtgcctggccaacatattatatatacttaaaag

SEQ ID NO: 739296 - DNA, 616 bp, Homo sapiens
agaggatggaggcaataagtgaataaatgaatggatcccatcaggtgctgataaaggatgaatgctgtgaaaaaaatatataagacagtttaggggagagggaatgctcagatgaggatggcatgtggctgttttatgcaggtagatgcggtaatcctctctgttagggtgagatttgagcaggggttgaaggacattgggttgtgaggcatgaggactttgtggtggatggagtatgtcccatgggaagaagagcaagtgcaaaggcccaatgcaggagtgtgcttggtttatgcaaggactggcatggaggcctagcagctggtgcaggtggggctggttatagtgacgggaagtgaggttggagagagckggggcaggctaagaccatggagggcttttcaagtcatggaagatcttgactttcctctgaaatgggaggctttggagaagtttgagcaaaacagtgatgtaacctgagttatgtcttaacaggaatactttgcagtatgaagaatagaccatggcaggaggcaaggttggaagcagggagaccaggagtctattgcaatggtccaaaatggtagatgtggagatgatggaaggtagtctggct

SEQ ID NO: 739297 - DNA, 470 bp, Homo sapiens
tcaggggtctcacagtcttcagagctgacagccctgaacagagatttacccacatatttattaacagcaaaccagtcactggcattgtttctatagatattaaattaactaaaagtatcccttatgggaagtgaagggatgggccgaattaaaggaataggttrggctagttaactgcagcaggaacacgcccttaagacacagatgctcatgctattgtctgtggcttaagaatgcctttaagcagttttccgccctgggcgggccaggtgttccttgccttcattcccctaaacccacaaccatccagcttgcccattagagccattatgaacatgttatggtgctgcagagattttgtttatggcaagtcttggggccagtttatggccaggttttggggggctggctcccaacatttttgtactagtgaagacctttggttctgggaggggcatcaactcattctt

SEQ ID NO: 739298 - DNA, 623 bp, Homo sapiens
ttacatttataatgacattaaattaaccaaatgcatttttataataataatgcattctgaagggtggaaattggattatgttaattagagtgctctatttttatttagtaaaagaaagttatgcatcttctgctcatttcataactctggatgagcctcattataaaataaaatagtctattaattaaaatgtactctatgaaaactgtagaattctggacggaaagcaacaggatggaggtaagtggtgaaaatttccagaatccacagggaggtgacggagaaggtgtcactaagtggttttgkcagtgaaaaaagaaaagaagctgatatgttggggaggaattggtcagtctaaccagaaaacaaaagccactttaagtgtcttaacagagggaatttaatccagggaaaatagacataatggaaaagctacacatccaaagggatagtgaggcaaacctgaaattacagcggaaggaaccactgctggcttcaggctagagcactttctcaacctgggcactcttgacatttctgctgggataactgtttgttgtgggcagttgtcctgtgtttcatcacatgtttagccttcatctctgaccattatccactaaatg

SEQ ID NO: 739299 - DNA, 603 bp, Homo sapiens
tgaatgacaaaagcataataccctatcaaagatgcctaagattttttaagtgtgttcttatctataaatagatgaaaaatggaacttgaaagtatttgggaaaaaatggacacatgttaatattagactgtaggtataggatattttcatataggtgtgcccttttaggatcttcctgagaaggaagataccaagctgaaagtccctatcatttaattaattaagtgatgctacaatgcttgcgagttcacaggaactgggctgtggatgcctcttgtctaattcaaagtggtaaagcttatatatattagaaataatcttctactgcagccatttcatcattccctcccactttcattctyttattactgatacggtttggctgtgtccccacccacatctcatcttgaattatagttcccataatactcacgtgtagtgggagggaccccgtgggaggtaattgaatcataggagcggttacctccatgctgctgttctcattatagtgagttaccgcgagatctgttggctttataaggggcttttccctgtttgctcagcagttctccttcctgccatcctgtgaagaaggatgtgttt

SEQ ID NO: 739300 - DNA, 550 bp, Homo sapiens
acctgcaattttactgaatttgtttatcagttctaagagttttttggtggaatcttttggcttttctaaatataagattttatcatttgcataggacaatttgacttcctctttcccagtctggatgtgttttatttccttctcttgmctcatttctctggctttgacttctagtacgattgaataggagtggtaaaagtgggcatcctagttgtatatagttcttagaggaaatgcttttagcttttccttgtcagtatgacattaggtgtggatttgtcatatatgattttattaggttgaggtatgttccttcgattcctagtatgttgagaatttttctttttctttttcttttccttttttttttttttttttttttgagacggagtctcgctctgttgcccaggctggagtgcagtggcacaatctcggctcactgcaagctctgcctcctaggttcactccattctcctgcctcagcctcccaagtagctgagactacatcttgaaaagacactgaattttattaaatgccttttctgtgtct

SEQ ID NO: 739301 - DNA, 550 bp, Homo sapiens
acctgcaattttactgaatttgtttatcagttctaagagttttttggtggaatcttttggcttttctaaatataagattttatcatttgcataggacaatttgacttcctctttcccagtctggatgtgttttatttccttctcttgactcatttctctggctttgacttctagyacgattgaataggagtggtaaaagtgggcatcctagttgtatatagttcttagaggaaatgcttttagcttttccttgtcagtatgacattaggtgtggatttgtcatatatgattttattaggttgaggtatgttccttcgattcctagtatgttgagaatttttctttttctttttcttttccttttttttttttttttttttttgagacggagtctcgctctgttgcccaggctggagtgcagtggcacaatctcggctcactgcaagctctgcctcctaggttcactccattctcctgcctcagcctcccaagtagctgagactacatcttgaaaagacactgaattttattaaatgccttttctgtgtct

SEQ ID NO: 739302 - DNA, 535 bp, Homo sapiens
aatgcttccagcttttgcttattcagtgtgatattggctattgatttgtcattatagctcttattattttgagatatgttccatcagcatgtagtttattgagattttttagcatgagttttttgtctttttaaaaaacaaacttttkgttttgttgattgtttttattgcttttttaagtctttgtttcatttagttctgctctgatttttatttgttttctactaattttaagtttggtttgttcttgctattcaagttccttgaggtacaatctttagatctttagattgtttatgtgaaatctattcactcttgatgtagccatatattgctttaaacagctctcttagcactgcttttgctatatccaataggttttggcatgttgtgtttcagtttcatttttttcaagaaacaaaacaaatttttgatttctgtcttaattttttttttgacccaatggtcattcaggagcatgttgtttaatttccctgtatttgtacaatttccaaatttcctgttggcacttatt

SEQ ID NO: 739303 - DNA, 535 bp, Homo sapiens
aatgcttccagcttttgcttattcagtgtgatattggctattgatttgtcattatagctcttattattttgagatatgttccatcagcatgtagtttattgagattttttagcatgagttttttgtctttttaaaaaacaaactttttgttttgttgattgtttttattgcttttttaagtctttgtttcatttagttctgctctgatttttatttgttttctactaattttaagtttggtttgttcytgctattcaagttccttgaggtacaatctttagatctttagattgtttatgtgaaatctattcactcttgatgtagccatatattgctttaaacagctctcttagcactgcttttgctatatccaataggttttggcatgttgtgtttcagtttcatttttttcaagaaacaaaacaaatttttgatttctgtcttaattttttttttgacccaatggtcattcaggagcatgttgtttaatttccctgtatttgtacaatttccaaatttcctgttggcacttatt

SEQ ID NO: 739304 - DNA, 574 bp, Homo sapiens
attgtatgccaatgtaataaagtgctaggttaacagacaaaattactggatatggaaacacactttgttctttatttaaatgtgaggtacacctgtcaattgtgtatagaaaaacatgatctagctagatttagtgttaatggaaagcatttaaaatttaatttgctgaaaatgttttaggaaaaaccctggaagaatgatgaaataagggataaagcatattctcagtaggcatcagaccatctkagatttctcataacagttggggctttgcaactacctcattaaatcacctggagtaacttacttgcattttgtcatagttttcaaatctttgcaatgtaattgtaagttagatcatgtttatgaagatgctaggttaaaatctaagaaactaatttttaaatttgtagagaaacagtataatatgtagtacaaatacagtgctgtagtgagaaatacattctcatatacttttcattaactgtaccttttttgttgcattataacccagtcaaaaaatgattatattcaaaaaaatcatcatctatagtcactggatttttttctagaa

SEQ ID NO: 739305 - DNA, 643 bp, Homo sapiens
tcagagctgactgcaatttttttttcttaatgtcataacaattttttatttaaaaagaatatcaagccagtcacagtggctcagactgtaatcccagcattttaagaggccaaagcaggtggatctcttgagcccaagaggtcaagaccagcctgggtaacatggcaaaaccccatctctactaaaaataaagaaaaattagctgtgcatggtggtgcacacctatagccccagctattcgggaggctgaggtgaaaggatgacttgtgcccaggaggcagagattgtgagctgagatcatgccactaaactccagcctggatgtcagattgagaccttgtctcaaaaaaaaaaaaaatctgaaattattaccacaacataatggcagaattaaaatcctattgtagctctgattacttaatttttaaaatgtattattcatataattttaattgacaaatctataattatatatatttgggggtamaatatgatgttttgatatatatatataatgtggaattattaaatcaagctagttaacatgtctatcccctcacttacctatcattttttatggtgagatgtttcaaaatactcttagttattttgaaatatacattactgttgactatagccaccc

SEQ ID NO: 739306 - DNA, 367 bp, Homo sapiens
actagaattctatctcaaaccaaatacatttttagtaaaaaaaaaaattcagacagaatatgctatgagacgaagctcttagatataatttggcataagtgttactcatagttgggatgacaaatgcttttcttgtattggtaatcattcatttactcattaactattaagtacgtttaatgcaaytagcctaaggctcagtcaacgaagacagatatatgaataagatatgttcacttcctctccaataacacacagtctcataatggatatgacatgttaaaagtaattatacttctgagaagtaagtgccaatagaggatatggataggatcagacttggaggatggtagcttctgccagaggc

SEQ ID NO: 739307 - DNA, 634 bp, Homo sapiens
tcaagcattagatgattcttaaaaggagcacgcaacctagatcccccgcgtgtgcagttcacagtagggctccgctgccatgagaatggaatgcctctgctgttctgacaggaggcggagctgggcggtaatgctggctaggctgggctgctcacctcctgctgtgcggcccggttcctaacaggccacagacaggcccggggtgggggagggggatccctgctttagttgaaaggaggtgagtccttatataaatagaaactaacaagaggaatcttcagaaagtgggaaagccagtgaagctcgacaaatgacctcggggaaaacgtcagcattcctcaaarcccctcccagcacagtagtgcactcccagctccctgagggcctggctctaagtctgaggaaacacactctctctcgaacttgaacttgccagagagaactcaggcactgactgtgacgacgcgggtggggagagactgtgcacctacacgtgtcacttcacaaaggcctccaggtaacaagcacaaacctgagtcccaggaggaagaagaacggcccctgggttttttcgtttgtatatttgttgttgttgtttgctaaagagcatatgatttgtgaattggcagtaaga

SEQ ID NO: 739308 - DNA, 634 bp, Homo sapiens
tcaagcattagatgattcttaaaaggagcacgcaacctagatcccccgcgtgtgcagttcacagtagggctccgctgccatgagaatggaatgcctctgctgttctgacaggaggcggagctgggcggtaatgctggctaggctgggctgctcacctcctgctgtgcggcccggttcctaacaggccacagacaggcccggggtgggggagggggatccctgctttagttgaaaggaggtgagtccttatataaatagaaactaacaagaggaatcttcagaaagtgggaaagccagtgaagctcgacaaatgacctcggggaaaacgtcagcattcctcaaaacccctcccagcacagtagtgcactcccagctccctgagggcctggctctaagtctgaggaaacacactctctctcgaacttgaacttgccagasagaactcaggcactgactgtgacgacgcgggtggggagagactgtgcacctacacgtgtcacttcacaaaggcctccaggtaacaagcacaaacctgagtcccaggaggaagaagaacggcccctgggttttttcgtttgtatatttgttgttgttgtttgctaaagagcatatgatttgtgaattggcagtaaga

SEQ ID NO: 739309 - DNA, 536 bp, Homo sapiens
ttttataaacaacaacaccagccactcaacagcatacattcctcatgttcaacaacgaatcaaatattagaaagacaggactcatacatttgagaaaatcaatcagcagaaacagatctcaaagtgattcaaagaatacacttagcatgtcaggacattaaaacagatataaatgtgttccatatgatcaaaaaggttggaaaataygagcaccatgagggaaggaatggtacatgtaaaataagccccaaacaaacttatagagatgaaatacaatatccaaaatgaaaagtatacttgatggaataaacagcatgagacattatagacaaaaagatgggtgaacctagagacataggaataaaaactacccaaaatgacacacagagatcaataaaagatcagaaagcatatcagtgagcagtgggacagcacaagtgacaaagcatgtgagtaactagagtctggacaaggttgggggcaggatatttaaagaaataatggccaattatttttataaatatgatgaaaactgt

SEQ ID NO: 739310 - DNA, 570 bp, Homo sapiens
gattgaaaggcaggaaaaagagaggtcattataataaaacaggccaagggtaaaaatcgaatataatttttctacacctgtgaaaacaaagtattgcagaattctattttctaatagtcttagttctcttctgagaagaatccaggaacccaggctggttttcccatgtgaagagctcacctttggcttcgggctggtgtcccgctctcagattcagaacttggcttggaccaggatgakgagaacagcggcattttgcagagaatgctttgtcataattaaacaaaagagaccaagatatgatgtcagaatagcaagcgacatcttaggagatgcagaatcttctcagcaggctggctggtatagctgcagggtgaccccagtcctccatctgcacagatgtcgggggctgcccgcggaacatgggctcagagtgggagtagttagttgcacaggcccagtgtccaagggcctcaggccgaggggacagctgcagccactgcattccaggctggctttccttgccactgctgctcggggagtggggtctaaccaagtgatggagctgtt

SEQ ID NO: 739311 - DNA, 548 bp, Homo sapiens
cgtttttcttttagtgctttcactatgtcatctactgctttttggactccataattttgaatgcataatcagctgttaatctcattaaggagcctcatagtgctattttgttctcctcagtttacctgttgccacaggggctccctctagttaccactggtcgtgcctaaggggccatatggggtttcccctggctaggccaccagtgtctttctgtgagggatgggaatcttaggcctatggagataaggagacatccctaatttggggcttgctgtggtaggatcctctttgtctttgggcatggagaatgcatctgtgctcttgtgcttgttctgkcagaatactccctggaggtgcccattggctactctgatgtctctaggtggtggagtggcatctcaggcctgtgaatacaaagcagcttcctgggctaggcacttgttgtagtgtggtttctctttctagtgccatctgggcaccctgtatctcttagtggtagaggggaatcccaggttcaatggtaaaaaacactaccccctggctgc

SEQ ID NO: 739312 - DNA, 588 bp, Homo sapiens
aattgcctaaaccctacctcccgctgcctccaccatcttgaaacaaaccgcacattcatttttgtccacaagtatatcccgtattaatagaatcaaaggctgagagctttagcattatttacacataagagatatgcttagaacagtactcaaaaaaatgtcatttgagggaattcagggctactatttaccatttgtataaaattttaaatcaaccaccaaagggtaaagcaattacatgaattgaagtccaactcagttgygaccctatgcttcagaactcccctgggtctcccaggccgttcttaatgaggcaaagggacgtggtgagcagcagaaatgtcggtcagcggcagcttctcaattccggtggtatctcgggaaacgctgagttagctgaacattaacatgtacatcaagtctgggaggttcaaaatcagtttgctctgcaattcaattttatagaatcattaatggtgaagggcaaaaaaacccttcatcttacattttaaaaaatttatcaagatttggggatattttaataatagctcaatattacagggaaaggactaaagaaatgtaacagtg

SEQ ID NO: 739313 - DNA, 514 bp, Homo sapiens
attgaaaggccatatatatttagcatgtatacatgcacacatatacatacactcacattactttacttttttttctgtaccattcaaaagtaggtttcataaatcatgaccctttacctcttagtacttcaatatattccctaagaataagagtattatcttacataaccacaatactgttataaagtacaggaaacttaacattgatacctgtagtccagttccaatgttgacggttctccacgtytttcctacgatatcagatgcagtctagggtcgtgtatttcatttgtcatgctcttttacagaatgctctttgttttgattttatacgatattttttcttataattaggttcatatgtgttcttggccaggatgctacagaaatgatgatgtatcgttttctgggtatcacatccagaggcacataatctgtctatctatttctctctctctctcttactgatgatgttaattttgatcacccagtaaaggtgttaattggtttttcc

SEQ ID NO: 739314 - DNA, 646 bp, Homo sapiens
caccatgacgctgtgaaatgagttgggtgcagggtgaaatgagaatcgatcttggatagaccactttattctggaggaggtagggagatcaaataagttttagaaccagttgtgaaatctgctgttctacccacttcagttggagcgagtgaagacagtacgaagggagtggtctcattctagctttccccacagcaaccaagctactaccaagcaccttcaaagatcctcaccacttgcctagtttcaaattcagtgccatttaaaattaataaaaacaatctttccrgtctagcagactggctctaaatggaaactcaccacaatttccaaagtgtaatttgttattgacatcctagtttcataacaaagagtaataggttggtggttcaatatttaccaggaagagaagtactagaataatcccctacccaaaatcaaaatgccattgacccgatttatagtgcaaatggtgtattagacagaaataaaaagagacttcatttgattttaaagtctgagtaatcagtaagtacccttcagggtctgtgacatttccaatggagatagaaatagggatagagagaccagagatagatacttaaacttacttataggtacagagatggaaatagagaaacagata

SEQ ID NO: 739315 - DNA, 619 bp, Homo sapiens
tctaagtcctttgcaaatattaagtcatttaatttaatcctagagcagttctgcgaggtggtgggaagacctagagaggttagggtccaccttagcactagctctctgagctataaggcctcagggtctgtggcattccctactcactgaaaagaagggaatttaaaacatgagttccaccacccagaaatgaaacagtgttcatttccagaatccaggcatatggttgattttaccaatttcctrtcacttgaatcacagttttttttgtttgtttgtttttgtttgagatggagtctcactctattgcccaggttggagtacaatggtatgaacttggctcactacaaccccgacctcctgggttcaagcaattttcgtgcctcggcttccagagtagctggggttacgggtgcatgccaccacacccagctaatttttttgtatttttagtagagatgggttttcgccatgttggccaggctggtctccaactcctgacctcaggttatccaccctcagattatccaccctcctacacctcccacagtgctgggattacaggtgtgagtcactgcacctggcccacaggttttttttaatagtcctgtgtgtataa

SEQ ID NO: 739316 - DNA, 619 bp, Homo sapiens
tctaagtcctttgcaaatattaagtcatttaatttaatcctagagcagttctgcgaggtggtgggaagacctagagaggttagggtccaccttagcactagctctctgagctataaggcctcagggtctgtggcattccctactcactgaaaagaagggaatttaaaacatgagttccaccacccagaaatgaaacagtgttcatttccagaatccaggcatatggttgattttaccaatttcctgtcacttgaatcacagttttttttgtttgtttgtttttgtttgagatggagtctcactctattgcccaggttggagtacaatggtatgawcttggctcactacaaccccgacctcctgggttcaagcaattttcgtgcctcggcttccagagtagctggggttacgggtgcatgccaccacacccagctaatttttttgtatttttagtagagatgggttttcgccatgttggccaggctggtctccaactcctgacctcaggttatccaccctcagattatccaccctcctacacctcccacagtgctgggattacaggtgtgagtcactgcacctggcccacaggttttttttaatagtcctgtgtgtataa

SEQ ID NO: 739317 - DNA, 619 bp, Homo sapiens
tctaagtcctttgcaaatattaagtcatttaatttaatcctagagcagttctgcgaggtggtgggaagacctagagaggttagggtccaccttagcactagctctctgagctataaggcctcagggtctgtggcattccctactcactgaaaagaagggaatttaaaacatgagttccaccacccagaaatgaaacagtgttcatttccagaatccaggcatatggttgattttaccaatttcctgtcacttgaatcacagttttttttgtttgtttgtttttgtttgagatggagtctcactctattgcccaggttggagtacaatggtatgaacttggctcactacaaccccgacctcctgggttcaagcaattttcgtgcctcrgcttccagagtagctggggttacgggtgcatgccaccacacccagctaatttttttgtatttttagtagagatgggttttcgccatgttggccaggctggtctccaactcctgacctcaggttatccaccctcagattatccaccctcctacacctcccacagtgctgggattacaggtgtgagtcactgcacctggcccacaggttttttttaatagtcctgtgtgtataa

SEQ ID NO: 739318 - DNA, 595 bp, Homo sapiens
ttcaacagtggaaatggaaacagtatttcaaagctcagcttgcagccggatacagtggctcatgcctataattccagcactttgggaggccaaggcaggcagatcacctgaggtcaggagtttgagatcagcctagccaacatggtgaaactctgtctctactaaaaataacaaaaattagccaggtgtggtggtgcactcctgtaatcccagatacatgggaggctgaggcaagagaattgcttgaacccaggaggtggagtttgcagtgagccaagatcaggccactgcactccagcctgggccacagagcgggactctgtcttaaaaaaaaaaaaaaaaaaaaaatctcagcttgygtcatgtttactaacagcttatgagacacagtcagtccagaatgagatacagggaatgagtgaagaattagggccattcctgtaatcagttcaccacatcattttatagatgaagaagggaggatccatataattatgctacttacgtaaagttactgagcttagtatctgagtcaggatttgaacttgggctatttcaactgtaccaagttccatgctgctgccatcagatatca

SEQ ID NO: 739319 - DNA, 626 bp, Homo sapiens
caatgcttatgtggcaagcactgtgttaggcattttatacacattaaactgtttaatcctatgagataggctttgatatcccccatttctgaagtcacacaggcagtcagggcagaagtgatggttgggtctttctgactcataagcccccacccattaatcatgtttccctcccctactagagcattttcattcaccttcttccaagaatactaggtagagaggaataagaaacacacccaataaccccattctgagaatagcctgtccctgggtgcccagcccatttcatacatggtggggatcatgtgagccatggaggctgcatcagattaattttgttgtaagttttatctgagcccaacactgtcatctrgtaacatgtgttcagtggacatcatgcattattcaggaaacaaaaaaatgtagcctcactagagattcttatcttaactgatcatcaagatggctagatgaggtggtcaaaaggggtgggacagtgtggagaatgaggcccaggggccacccttctaggctatcctaaagcagcgcctggtacttagcctggggatccaggcactgaccttctctcctgtccttcaaagaactgtgatgctccggtgtgg

SEQ ID NO: 739320 - DNA, 586 bp, Homo sapiens
tctgcttttaatctatgaaaattaatatttggatacttcataattatcttgattatgtcacttgataaaacagtgataggtattaatgttagttcagccatatatttatactgcctgggaataggtggctgcaattgtgtggcgagcataatttggcagcgttcactagcttgcaaaaayctactgcaagagcttaaacatctacatgaacactgatatgaaaaaagcatgtaagcctgaccatagcttctagttcctagatggacctggctgtgtttttcaggccccaacctgcagggagccccttcaatctcatcagctgagtgggcagaataaagacatcatgcctgcacatgcttagcattgtgcccagcatggtcagggattgataaaaacacttgtgtattctctttttattatcatcaccaccattataatcattactgagagatgcatccgtagagacatcatgtcagagagaagcagaggaacccagaaggcagcaatgaaactaacatttagaagcaacacaggtgatggggcagcccagaaagctgaagacagaaaccatttcggagaattagct

SEQ ID NO: 739321 - DNA, 604 bp, Homo sapiens
ccaaaatggctatactattttatattcccaccagcattgtatgagggttccagttgctctacttccttgccagtcagtacttgatatttaggtctctttaattttagccattcaagtgggtatatacagaggcatctcactacagttttaacttgagtttttctcatgtctaatgatgttgagcaacttttcatgtatcatttttggtcattcttttatcttctttcataaaatagcctttcaaataatttgcctatttttattgggttgtcttcttatatatatccttcaaaaatgaaatatttacatattcctcacttgttttatgtgatttcctgtgtgtttgatgaccatccactctgtctctatctgacatattttttaaagtccggctcataggtctccttctcactggaggcttttccctacctccccagtgactactttctctgggccctcacaacgtctggtgtccacattcctctgtagtggtccttaccagattgcaycataattcagggttacatcctgaaccctgatagaatagagcctctatccttccctagattgtgagctccttgacagcacaagaggattaattttc

SEQ ID NO: 739322 - DNA, 633 bp, Homo sapiens
gatttcctgtgtgtttgatgaccatccactctgtctctatctgacatattttttaaagtccggctcataggtctccttctcactggaggcttttccctacctccccagtgactactttctctgggccctcacaacgtctggtgtccacattcctctgtagtggtccttaccagattgcatcataattcagggttacatcctgaaccctgatagaatagagcctctatccttccctagattgtgagctccttgacagcacaagaggattaattttctcctttgaatcttcccagggcttactamaatatccagcatatttaagtactcaggcttacctgagtacttggatgatttagattcagaagctaagagaaggaatagtgaattattgagattaaagccatggaggggtgagtatgacttcagagtattgtgggaaaatatacaggaattaattcattcattcacttatttaacaaatattcatttggctctcactgtgtaccagacaccttagatgctaggatgcagagatatatgagctagaccaaatctctgctatggaataacttagcctatagcaagaaagacagatccattactcaaaagttaaagtacagtgtgacaagtatg

SEQ ID NO: 739323 - DNA, 533 bp, Homo sapiens
gtttattgagagtttttaacatgaagggatgttgaattttatgtaaggctttttctgcatctattgagataatcatgtggtttttgttgttagttctgtttatgtgatgaatcacttttattgatttgtgtatgttaaaccaatcttgcatcctgrtgatgaagccaacttgattgtggtggataagcttcttgatgtgcttctgaatttggtttgccagtattttattgaggatttttgcattgacgttcatcaaggatattggcctgaagttttcttttttgttgttgtgtctctgccaggtcttggtatcaggatgatgctggcctcatagaaatagttagggaggagtccctccttttcaatgttttgaaatcatttcaccagaaatggtaccagctcttctttgtgcctgtgatggaaattctgctgtgaatctgtctggtcctagggcttttttttatttttttggttggtaggctatttattactgcctcaatttcagaacttgttattggtctattcagggattc

SEQ ID NO: 739324 - DNA, 533 bp, Homo sapiens
gtttattgagagtttttaacatgaagggatgttgaattttatgtaaggctttttctgcatctattgagataatcatgtggtttttgttgttagttctgtttatgtgatgaatcacttttattgatttgtgtatgttaaaccaatcttgcatcctggtgatgaagccaacttgattgtggtggataagcttcttgatgtgcttctgaatttggtttgccagtattttattgaggatttttgcattgacgttcatcaaggatattggcytgaagttttcttttttgttgttgtgtctctgccaggtcttggtatcaggatgatgctggcctcatagaaatagttagggaggagtccctccttttcaatgttttgaaatcatttcaccagaaatggtaccagctcttctttgtgcctgtgatggaaattctgctgtgaatctgtctggtcctagggcttttttttatttttttggttggtaggctatttattactgcctcaatttcagaacttgttattggtctattcagggattc

SEQ ID NO: 739325 - DNA, 679 bp, Homo sapiens
agggagtttccccagcatcagtcggtgctgtcttacttttgagcagcctactttgatcagctgtcagagtgcacttttactttccaataaactcctttatttttttttattttttacttttttgagacagagttctactctttttgcccaggctggagtgcaatggygcgatctctgcttaacacaacctctgcctcctgggttcaagtgattctcctgcctcagcctcctgagtagctgagattacaggcatgcaaaccacgcccagctaattttcatatttttagtagagatgggttatctccatgttggtcaggctggtctcgaactcctggcctcaggtgatccacccgcctcggcctcccaaagtgctgggattacaggtgtgagtcactgcacctgacttcctttgtctacttttatttggactcactgtcaaattcctttgtgtgatgaaatcaggaacctgaactggcccaccgacaacatgtctgtgctgtgcagtatggtagccactagccacatgcaactattgagaatttgaaatgtgtcttgtgccacagagtaacccaattttttaaaaattttatttaaattgttttaaatttaaatgtagacagccaacatgactcatgactactgtatttgacagtgtagatttagaaagggttttttatct

SEQ ID NO: 739326 - DNA, 420 bp, Homo sapiens
aaaagtagattagaaagaattgaataaagaatgtggtaactgaaacactggggaaatttccaaaagatagcagagagaggcaaggagatagcaaatacaaaataagttgtattttaaaaatgtatgtgtaaaatatataaaagtacttaaaagtattaaaaagtacttaaaaagatatgtgtaaagtatataaaagtacttaaaaaccattaaaatgtayctgcatatatccaataccaggttaacaatagaacaatatttttacttggaatctctttttctttgctaaaacaattatctttattctaactttgttttgttttgtttttttgagaaagcatcttgccctgtcacccagactggggtgctgtggcatgatcatagctcactgcagctttgaactcctgggctcaggcagtc

SEQ ID NO: 739327 - DNA, 635 bp, Homo sapiens
aattcgttttgctttgtctttgttgcaatgggttaatttgaaaaccttgtctttgagttctgaagttttgtttgattctattgctgagactttccagtgtattttgcatttccgtgtgtccttcatttccagaagttgtgattgtcttttatttatgctatctatttcactaaagattttccccttcatatcttgtatcttttttttttcatttcattaagttggacttcacctttccttggtgcctccttgataagcttaataatcagccttctcaattattcttctggcaattcagggatttcttcttggtttggatctgttgctggtgagctagtgtgatctttggggggtgttaawgtaccttgtttttttcatattaccagaattgtttttctggtttcttctcaggcagactgtgtcagaggaatgatctgtgactcaagggcttctgttcagattcttttgtcccacatggtgcttccttaatgtagtgctctcccctttccccttgggaagtggcttcctgagagccaaactgcagtgatcattatttttcttctggatctagccacaccacagagctaccaggcactgggtggtactggggagtgtctgcatagagtcctgtgatg

SEQ ID NO: 739328 - DNA, 426 bp, Homo sapiens
gcatacattaaaccaaccctgcatcccaaggataaatcccatttgttcatgatatataatctttttgctgtgttgttcattttggtttgctagcattttattgaggatttttgcatcagtgtccatccaaggtactggcctgcagttttcttttcttgtgatgtcttcctctggctctgggatcaggatgattctgrcctcataaaatataaatgatttgtagaattcagttctgacatcatattttcctgggcatttctgttttgagaagtttttgattactaattctgtctcttgttattggtgggttcaggctatttctttttgattcagtcttggtagtttgtacgtttctaggaatttgtccatttactctgggttaatcagttttttgttatatgattctccataatagataatagtccc

SEQ ID NO: 739329 - DNA, 673 bp, Homo sapiens
tatttaattaataataatatatgattaaatgtgtgtgaagacagagtggttcctataaatacaaagctgcagctaggcatggtggctcacgcctgtaatctcagtactttgagccactgaggtgggtggattacttgaggtcaggagttcaagaccagcctggccaacatcatgaaactccatctctactagaaatacaaaaattggccaggcgcggtggctcacgcctgtaatcccagcactttgggaggctgaggaaggaggatcacaaagtcaggagattgagactatcctggctaacacggtgaaatcccatctctactaaaaatacaaaaaaattagccgggtgtggtggcgggcacttgtagtcccaactacttgggaggctgaggcaggagaatggtgtgaacccgggaggcggagcttgcactgagccaagatcctgctactacactccagcctgggygacagagcaagactccatttcaaaaaaaaaaaaaaaattaggtggccatggtggcgcatacctgtaatcctagctactcgggaggcggaggcaggagaatcacttgaaactgagaggcagaggttgcagtgagctgagatcacgccactgcattccagtctgtgtgacgcagcaagactccatctcaaaaaaaaaaaaaaaaagttg

SEQ ID NO: 739330 - DNA, 613 bp, Homo sapiens
gtattccatggtacatatatcatgattttcttaatccaattgttgattgatgggcatttgaggtggttccatatttttgcaactgtgaattgtgctgctgtaaacatgcatgttcaagtatctttctcatgtaatgacttcttttcctctgggtagatacctagtagtgggattgctggatcaaatggtagttctattttacttctttaaggaatctcaacactgttttcygtagtggttttactagttaacattcccaccagcaatgtagaagtgttcccttttcaccacatccacaccaacatctattttatcgttttttgattttttgatcatggccattcttatagaactaaggtggtattgcattgtgagtttgttttgtatttccctgatcgctaatgatgttgagcattttttcatatgtgtgttggccatttgtatatatttttctgataattgtctatgcatgttcttagcctactttttaatggaattatttggtttttttttcttgctgatatggactaatatccataatctaattttgttggattatagattgtgaatttttctcctactctatggttgtttagtgattatttattttgct

SEQ ID NO: 739331 - DNA, 594 bp, Homo sapiens
tggttatatttatttctattattatttttttttttgctattgtgaatgagattgctttcctgatttctttttcagctagtttgttattggtgtatagaaatgctactgatttttttgtacattgatttttctatcctgtaactttactgaatttatcagttctaaaagatttttggtaacgtttttaagttgttcgatatacaagatcacgtcatctgaaaagagggacaattggccttcttcctttccattttggatgtcttttatttctttctcttggctaattgctctggtcagggctaccagtactgtgttgaataaaagtggtgaaagtgagcatttttgtcttgttccagttatttgagaaaagttttcaatttttccctattcagtatgatgttggctgtgggtttgytatatatggtctttattgtgtctagatatgtttcttctaaatctaattctttgagagcttttatcatgcaggaatgttgaattttatcaaatgtttctttctgcatttattaagatactcacatggttttttcctttattctgttgatgtgctgtattacatttcttcaattgtgtatg

SEQ ID NO: 739332 - DNA, 703 bp, Homo sapiens
ccaatgtccagtatttttcttaaatatcgtccaagacacccattccataacacattataaattaatattaaagacaatgttacaattggtgtatatatatatatatatgattatatatatatgattcaagtggtgtatcattgacaactggtaattcattggaaaaaatcaataatatccccatgtcacatttcactgcaaaatcatattgtttagagaatgaattcataaaatttaaaggagaataaratatttaaatatatctttaatataattgtaagaaattataggtagtgatacaatatttaagcttgaaaatataaaaacaaacacagaagaaaatataaatggattctattactgaaaatgtgagtattccacatcacatatcatacagaaaatataatatcaaagaactaactaaaaatattatatgacctaatgttatatgagctaatacactgtcatatataaaggatttatacaaattgataaggaaaacacatataaaatttgaaataaaatttaaaaaataaattaacagttcactaaaacacagcaaataaagtggttagaatgtcaaataatgtcgataacaaaagacatgtcaatgaaactgactatttttacctattatatcagtaatgatttttttaaaaaaaaattcctctacctaccagtcattatcttgaatttcttctat

SEQ ID NO: 739333 - DNA, 703 bp, Homo sapiens
ccaatgtccagtatttttcttaaatatcgtccaagacacccattccataacacattataaattaatattaaagacaatgttacaattggtgtatatatatatatatatgattatatatatatgattcaagtggtgtatcattgacaactggtaattcattggaaaaaatcaataatatccccatgtcacatttcactgcaaaatcatattgtttagagaatgaattcataaaatttaaaggagaataagatatttaaatatatctttaatataattgtaagaaattataggtagtgatacaatatttaagcttgaaaatataaaaacaaacacagaagaaaatataaatggattctattactgaaaatgtgagtattccacatcacatatcatacagaaaatataatatcaaagaactaactaaaaatattatatgacctaatgttatatgagctaatacactgtcatatataaaggatttatacaaattgataaggaraacacatataaaatttgaaataaaatttaaaaaataaattaacagttcactaaaacacagcaaataaagtggttagaatgtcaaataatgtcgataacaaaagacatgtcaatgaaactgactatttttacctattatatcagtaatgatttttttaaaaaaaaattcctctacctaccagtcattatcttgaatttcttctat

SEQ ID NO: 739334 - DNA, 703 bp, Homo sapiens
ccaatgtccagtatttttcttaaatatcgtccaagacacccattccataacacattataaattaatattaaagacaatgttacaattggtgtatatatatatatatatgattatatatatatgattcaagtggtgtatcattgacaactggtaattcattggaaaaaatcaataatatccccatgtcacatttcactgcaaaatcatattgtttagagaatgaattcataaaatttaaaggagaataagatatttaaatatatctttaatataattgtaagaaattataggtagtgatacaatatttaagcttgaaaatataaaaacaaacacagaagaaaatataaatggattctattactgaaaatgtgagtattccacatcacatatcatacagaaaatataatatcaaagaactaactaaaaatattatatgacctaatgttatatgagctaatacactgtcatatataaaggatttatacaaattgataaggaaaacacatataaaatttgaaataaaatttaaaaaataaattaacagttcacyaaaacacagcaaataaagtggttagaatgtcaaataatgtcgataacaaaagacatgtcaatgaaactgactatttttacctattatatcagtaatgatttttttaaaaaaaaattcctctacctaccagtcattatcttgaatttcttctat

SEQ ID NO: 739335 - DNA, 601 bp, Homo sapiens
aataaatatctattgattaaagtacatatattttacatttgtatcgattatccttaaggaagaggtggaagaaggtggggtgtacagatgtaagactgaaattggaagatgcgacattggaattttctcttatcagtctttccacatttgtaaatattgatccataattttaaaaataagtataattttttaaaaaatttaaaatgcaaaggggaaattgtgagtctttttgacttcctatagttaatatcaaacaccccaacatattaattttttttcaaatttttyactccctattagtgacatatcaacagtaaatcatgttcgcaccatgaaagatgatttctctaggtttcagaagactcagaaagtgtgccagttgtgtttgttgataatcagtatcttgcctactcttctagacctgttgtttgattgtggtagtataaagccttaaaatattatttaccatataccctttctaatagctttctattttaattcttcagtggaaggcactcaggtaaaattggatagactggggagaaggagaagccatttaaaggaaacctatttttacccacagaacatttctgacaccaaa

SEQ ID NO: 739336 - DNA, 629 bp, Homo sapiens
tttattatcatgttagcgtcatttttggaaggagttgtggtacggtggaaaaccatgaacccctctaatttttgttgtacaagtacaagtggtgaaaatacaatgcttgtagtcttttcctgcttggaaagaagtgttgtcctcatctcatagaccatcctttcttagttaggaaaggtgagataagaatggctgttacagaaaataagaccattttggcttatgtaacctgagcaagaggtgctcttcctggtacacacttacttagttcagcaggctaccacacgaaagttcgaggtcaaaattccagctagtaatcagaatttctttgtctcttattgtcctctgggaatataatttccttggcatattgcagaactggtaaattagtaagtaaaacatcatttgtgcattcctgagttttctgtatatatatatayacacacacacacacacacacacacacacacacatatgtgtatatatatatacatatatataaaacatatatatgtccttcaacatatgtaactatgaataactatgctgtatacatacagtttccaatttgcagtttcaatatagtatacagtattcaatgaattatgttagatattcatattttatta

SEQ ID NO: 739337 - DNA, 442 bp, Homo sapiens
tgccctatgtgggaattaaaagttgatctcatagagggagagaggagaatgacagaggttgggaagagtgtttatgtggggtgggagatgaagagagcttggtgcatgggtacaaacatacagttaaattgaagaaataagtaccaatgtttgatagcagagtagggtgactatagttaataataacgtattgtacatttcaaaatagttagaagagaggatttgaaatgtcactaccacatagaaatgataaatacttragaggatggataccctatatagcttgactttgatcactacacattctatacatgtaacaaaatatgacatgtacctcataaaaatgtgtaaatattatatcaagaatatcttgactggctgaaaatattgacaaatgacattactaacaaatgattggtacttttcagtgttccacttttat

SEQ ID NO: 739338 - DNA, 594 bp, Homo sapiens
atttctgcagctttcttgaatttctccccagaaaatgggtttttctttttcttttctaccgcatggtcaggctgcaaattttccaaacttttacactcagcttcccttttaaatataaggtttttttgtttatgcaaatgagcatcagtttttaaaagcagtcaggccacatcttgaatgctttgctgcttagaagtttcttctaccagataccctaaaccatctctctcaagttcaaagttcygtagatccttagagcaggggcgcaatgtcagtagactctttgctaaagtagagcaagagtgacctttgcttcagttttcattaagttcctcatctccatctgagatcacctcagcctggacttcattgtccatattactatgagcattttggtcaaagccattcaacaagtctctcagaagttccaaacttttcctcatcttcctgtcctctgagccctccaaaatattccaacctctgcctgttacccagttccaaagttgcttccacattttcaggtatctttatagcaataacccacttctggtaccaattttctgtatttgtctgttttcacactgttataaataa

SEQ ID NO: 739339 - DNA, 591 bp, Homo sapiens
aaaataaagggatgggctctggctagttatctgcagtatgaacatgtccttaaagcacagatcactcatgctattgtttgtggtttaagaatgccttaagcggttttctgccctgggtaggccaggtgttccttgccctcattccagtaaaccgacaaccttccagcatgggtgtcaaggccatcacaaacatgtcacactgctgcagagattttgtttatggccagttttgggaccagtttgtggccagattttggagcctgttcccaacatgttccccttctttgttttgcaaagcgataagagcaaaggcagctttgtcactatgagctacttcttgcaggagtcaggatctgcatctgcagaggcaatggtgatcgctgctatcatagctaccattaaattactcattgtgactggttgtcctgctttcctmaggttttcttctgccatctgtgacagcttcttgatctgtccccaggtggatggctgtgttcaacgggtgttgcttgtgacagttggggtcctcctcagagtcattctccacatggctgcaactggggggagctcgggatcctcctggaatctctt

SEQ ID NO: 739340 - DNA, 672 bp, Homo sapiens
gccgggtacggtggctcacgcctgtaatcccaacactttgggacgctgaggtgggcagatcatgaggtcaggaggtcgagaccagcctgaccaacatggtgaaaccccatctctactaaaaattcaaaaattagcctggcgtggtggcgcatgcctgtaatcccagstactcaggaggcagaggcaggagaattgcttgaatctgggaggtggaggttgcagtgagccgagatcacccaatgcacaccagcctaggtgacagagagagactccgtctcaaacaaacaaacaagcaaacaaactcatatgtaaatgtaaggatctagaataactgtccaacttaaaaaaagaaaaacaggtttggaaaactagcattacctgatttcaagacttattataaagttatagtaatcaagacagtgtggtttctggtgtaaagatagactattttagttaataaaacagaatgaagacttcagaaaaagacccacatatccatggacaactgattttcaacacattcaaagacaatttagtggagaaagaatagtcttttcaacaaatggcactggaacagacagatatccgctaaataagaaaacgagctttaagctatactgcactatatataaaaattaactcaaaggacaatatgtctaatgtaaaatctaa

SEQ ID NO: 739341 - DNA, 544 bp, Homo sapiens
aaaacagctccgtcacttcccaaattctatcctgctgcctgtttatggccatcccctttctccacacttaacccctggcaaccaggggcttaagtgctttattcctatagcctttttccaggatgtcatttaaatgcagtcactcacacactattcattttttgacagtatcttcaaaattttcaaagagaactatatgcctttttaaaaagaaaagtataaatcaaggatgtgatacctgcaagtatagtagacttgttatattgacatttatttcattaaaatacacaacatgagtattagttatggttctgaaaccatacatttcttcttggactctgaaaggccaggcaagcccatgtacatcaaataaaaataaaggaattcttgactgtaaagragtattgagctgaggctacctccaaaataaggagggacagttattctgggaagggcaagatccattttctcattggcttccggttaagctagtcatagagagaagacctgatgaatgaatggcctttgaaactctcaaatttgc

SEQ ID NO: 739342 - DNA, 575 bp, Homo sapiens
aaaatctttttatcctcacctcaatgatttttaatccctatttttataaatgaggaaactgagacatagggaaattaggtaaattgcctgcgaatttttgttgggacaagctaggattaaaatctaggccttctgatgacacatttaatatttttccttacataatgctgcctatatataatacgagactgcttcagttaaaaaaaaatcaagtrtacaaaaaataacacttttctcattttgtattacaattttatcttttacgaccagttgttttggctggaggaaagcagagtaacacatcaaggattggggaaggagcagccacttgatccttggtcaccgatcaacagaggctgctctagaggcatccattgtccttgtgtgcatggcctccacgccaggagctctctgcagctcctgtagcattctcattttgctaccttcttgccccagtgtggtggtttcatcacaacgctgcctgagattccacctgcccagtacccaacagagccacttcttctctgtggtctttctacctccctggaggcacaagagggtcccaggagagggtc

SEQ ID NO: 739343 - DNA, 559 bp, Homo sapiens
ataatcctttgggtatatacccagtaatgggattgctggatcatatggtatttctggttccagatccttgagaaattaccacaccgtcttccacaatggttgaactaatttacactcccaccaacagtgtaaaagtattcctatttctccacatcctctctagcacctgttgtttcctgactttttaatgatcgtcattccaactggygtgagatggtatctcattgtggttttgatttgcatttctctaatgaccagcgatgatgagcttttttcatatgtttgtcggccgcataaatgtcttcttttaagaagtgtctgttcatatccttcgcccactttttttatggtgttgtttgtttttttcttgtaaatttgtttaagttcttcttacagtctggatattagccctttgtcagatggatagattgccaaaatttttctcccattctgtaggttgcctgttcattctgatgatagtttcttttgctgtgctgaagctggatcccatttgtcaattttggcttttgttgccattgcttttggtgttttattcatg

SEQ ID NO: 739344 - DNA, 576 bp, Homo sapiens
tctacctcaaaaaaaaaaaaaaaaaagaaaagaaaaagaaaaatgtcctatattgttacctatgtggttaccttccagtgtcttcatgtaagtccagattccatttagtattgctttcctcctgcttggaggccttcctttcacatttcttgtactgtaggtcagctggtgataaatattttcaatttttgtatgtctgaaaaacttyaaacagaatatggaaatgacagaccaccaacactgagcagaaaatattagaatttaatgtaggcaaatttaatctgcaacgctttccaagaccaaagcctttcatttagaaccttcatattaaaggaaagccattttgggagaaagtaaatggcatgacctttgtgacaattttcataaaaatcaatttttaaggtctccattgagctaacataaaacaaatctgcttttgacccatatactgcattaataacatccaaaaaaggctctatatctgaagtagttttctggggtaaaagaatgtataaacaaaaagagacaacctttcaaagaagaactctagatatgaaacaggaaaaaactgatgtg
